United States Patent Application Publication US 2006/0134663 A1 - sequence listing, part 107

SEQ ID NO: 328435 - DNA, 706 bp, Homo Sapiens
  misc_feature (30)..(30): n is a, c, g, or t
ttttgggctcagaggttttcctttattcantttatcattgatacagctttggccaacatacacacaggagagaaattgttgacatgtggaacccaagtacagaaaatctttcattttcctccctgtctgttcaccaaataagtttttgtttatttaaagactacagaggatttggctgttaagaaccaaatgcctttggagtggaattacaacataatttatcatttcctctgtttattaaaaaatccctgcatctttgaggaggcacatttgcaggtgagtgggggatttcggccactcatgaaagactgttgcaaagcccctgtccatgtggcttaacccctaaaagaggctcccttaattgctctatctatccctgctcttccccccagctgacttctgatcatgtgatgacccacttagggctggtggatggggttagaggacaggtaagtggggcaggagactgtgttagtttaaatttgacccaattttgaccttgaatcctcgctgcatgtttcaccagtgtaagtaaagagggaagtgcaacccttattacctccagcacaggagagaatctggaggaagtcaaagagcaaagagaagttggatgttgctttgaaagaactcagccaggccttgccaccaccaaagtgggctccattctgaaagcagacaccttgcagaactggaatgaacttcctac

SEQ ID NO: 328436 - DNA, 713 bp, Homo Sapiens
  misc_feature (226)..(408): n is a, c, g, or t
aatgcaggggacagatgagttaaaaagtttattttcactgcactatggagagtagattgaagttgagcaagcatggatgtagggaagttgtactgtagtatttcaagtgagaggcaatggtacttgaattaggaaatgctagtagttaagatgaagagaaattgatggatttaagctgtattttagaggtggaatccataacatttgatgatatattagattacannnnnnnnnnnnnnnnnnnnnnnnnnnnnnnnnnnnnnnnnnnnnnnnnnnnnnnnnnnnnnnnnnnnnnnnnnnnnnnnnnnnnnnnnnnnnnnnnnnnnnnnnnnnnnnnnnnnnnnnnnnnnnnnnnnnnnnnnnnnnnnnnnnnnnnnnnnnnnnnnnnnnnnnnnnnnnnnnnnnnnngggttcgattgagaagaaggttttgaggattacactcaagtttctggcttctacagctggtggcctcatttgcctgagacagaatagaatggaagaggaggaagatttatatgtgtgccttaatagggattgactcatgagtctgtggacatgtgcctttaagaagcttttgaagcatcagagtggatatttagcattgatagttgaatatactgtgtatagatctggaattcagaggttattcattggctagaaatgtgtatttggccatcatcagcatacagatggtaattgaagccccagtt

SEQ ID NO: 328437 - DNA, 572 bp, Homo Sapiens
  misc_feature (436)..(436): n is a, c, g, or t
ggaagtccaaggtttgtgaggtttcaggacaagatgatacagcctagtttgagtcccatctgagacacggtagtggaattcaccatgggcttcagaagtccactaatgggaagacctgctgagggcactagtacagcaacgaaatttcctggagattctgggtttagtggctcggggcagaggcaggagagggtgttctgtctcctcctcactcaggggctcttcgaggtcagcactcagactggaggccagggccccttgctcaaatattgaaatgagacctttacgtgttttaatccgttccgctgagggagtagctgggagagggagaaaagacttgggctgcgaaatcctcgaatgtcattacttcgcggtggttctgaaattattgcttcgagatacagagctcgctcttcatagaagctctggtagagtngggatgaggcacttcacagcccttctggcctttgatgcacgtggcacatacaaggcttggcagcagcttcccactcactatggctccatcaaacagaggcccaaaaaatggaacctcaggtttcttcgttatcgcg

SEQ ID NO: 328438 - DNA, 351 bp, Homo Sapiens
  misc_feature (271)..(271): n is a, c, g, or t
aatcacatgttcttcatcgcgataacgaagaaacctgaggttccattttttgggcctctgtttgatggagccatagtgagtgggaagctgctgccaagccttgtatgtgccacgtgcatcaacgccagcagggctgtgaagtgcctcatcccactctaccagagcttctatgaagagcgagctctgtatctcgaagcaattaatttcaggaaccaccgcgaagtaatggacattcgagggttttcggcaggcccaagtcttttcttccctnttcccaggttacttccctcaggcgggaacgggtttaaaacacgttaagggtcttcattttcaatattttgaggcaggggg

SEQ ID NO: 328439 - DNA, 558 bp, Homo Sapiens
  misc_feature (37)..(37): n is a, c, g, or t
  misc_feature (43)..(43): n is a, c, g, or t
caataagcttgcggccgcttaattaaagatctttttntttttnctctttgtgatttaaaagctaaaaccaaaatgcttcataggaataaggtatgtaaccttagccctcctttctcacagaaaaaagcatttattcaaagtacttcacatggtaggacgaaagtagtatttaatgatgacacccaattaaatggcttctggccttccaaagccacatgactatcctcgagttccctgagggtgaggcccctcagaagccctgtctgcctcagtgaccactgcacataaggtcatgcagaagcctctggtgccagcaccacctgcaggcctctggacacctttgctcggcctgggacagtcacatggccatgcagttctgtccatccactccaagacacggagttaggggcaggggagaacagatttgagagaccatcatccagcattccttctcccaggctggggcccaggtacacaggtgaggaccccaagacacaggctcatgggagtcagcggctgctcctgggattccaagttctcctatcagcccctctcctt

SEQ ID NO: 328440 - DNA, 847 bp, Homo Sapiens
  misc_feature (407)..(407): n is a, c, g, or t
ttttagaagtgagtgatgcaataaactgtgtgatcctttttacaaagtcaataggttttattgaaaatactggtttctgtcagtatgtttgcttgttattacactgtgttgtaccagtcttaataattaatttgtttgtgtttttactatttaccaacaggctaatgtatttatactacatattttcttccatagaactccactttgacaattgaagaatttcattccaaactgcaagaagctactaacttcccactgagaccttttgtcatcccatttttgaaggtattgcacagttcactggtctgtaaagtattttaaaccatattgttgctaggtcataactgtgtgcttttttagtacatttaggggctctttggatttaatttaatgggatgaaaactatnctgaatcgattgtatttatgaccatttcctaaggtaggtctgaaaattacaaggggtgttttaaataattacctgaaaagaagtaaagtttgcagaagagtttagaagtctctttgaataaaggttttgttcatttttttggtcatatgagatatgttattttacattttgcttgtctttagagtgaacagaagattggttgagctttgtagttgttcaggatttttttatcctcctaattttatctttgtaacaacttaacgggaagatcagaccgtcatccttttgtgccagtgaagaagttgggagtaagtgacatgtccaaggtgtgcctggctgaggactgattgaggtgtgggattcgaaatggtttttaagtctctgctgtgagctttctgtctcctccaactgctgccacttcagtaaagcaactgaaaaac

SEQ ID NO: 328441 - DNA, 779 bp, Homo Sapiens
atagtctcagatattcaacttgtttgtcttagatttgcttaaaccccaaacaatctgtgtttaatgtttttggtgtcccactgctttgcaagcagacataccacttgcaaatgtgccagccctttgtgcaaacacccaaaaggctacatcagatccaaaagctctggctcacaagggggccagcaggtggagagcagaagaatcagccatgagtgtgtgcctttcggcctgctaagaaggaagacagtggcataaagagagtattatggttccaggcacaacttcagtctgtccaagaggctctatcgttaacggagaatacagagattacattcagttacccgaattctacaagctttctgtaatgctcaaaaggtttaagtgcacttatctgtcatcccttcactttcctttttgaaataaatcccctttgtaataacaaatccagactattccttcttctctttatgcaggtgagcaatgcatgggtgcttttatatttagctggtagggaagaatgacaacaggtagcagaagcagactgtagattattatttgcaattaacaataggagatatagctcccttcttaccttccaattcatttctctatgctaatagaaaataattaaactgcacagcaatttaaagtatcaggttgggttctgaatgaatatctttaaggttcatgatagcaattaatagattcctttttaatgccagttgtttagatcttgataatcaacctgttgggttcttctgttttgtaattcatgtagt

SEQ ID NO: 328442 - DNA, 263 bp, Homo Sapiens
tttaaaatgagtcagattctctgattactcttacgttcattatgtaaactccagttttgaatatttcatccatttaatctgcattttctagtatattggtataggtttgcagcctgttctggggttagtttgtgaaaatgtgtgtaggatctgctgggctgtctgctggctcactcccatatggaaatgcgtgcctgctctttctttctcttgctcaatgtagttaggatttatgactgtaattaatatttttcaagaatgga

SEQ ID NO: 328443 - DNA, 680 bp, Homo Sapiens
  misc_feature (296)..(296): n is a, c, g, or t
  misc_feature (455)..(511): n is a, c, g, or t
gaatgtctcaagacacccctgttttaaagatggatactggtagtgaaaagagagacggaatgagttttgtgtattctgagtgatgaattttctgctaactggtttaaagttttagttccatttgagtcataggaaaagttcaaaaggaatttttgatatacccctgaagggtgcaggaaatctaaactccaggccctgtcactaatgaattttctgtgaccttgaccagggtcatgtctctttttctggggctctgttttctctaaacacgatccagtctaggtttgtttttaagnagtaatttcctctttctctcccaaactatatatataaataagaaaaaagcaaatgtttctaatgttcattttccttttttggtgcttatgaagttctcaaacaattttgttttctggataatataagaaaaatgtccagagaaaacagagacactgggnnnnnnnnnnnnnnnnnnnnnnnnnnnnnnnnnnnnnnnnnnnnnnnnnnnnnnnnnccaatcgtgcagaaaatccaggtgacaataaatgagactgttggtataataatatttattttttagcaaacgtgtctgcatgttccaatgagagtaggaattttgtataagtaaaaagcatctgggatgtgggacccactgccctattttcttgggaatcaaaacatca

SEQ ID NO: 328444 - DNA, 805 bp, Homo Sapiens
aatactagggtgagcaaaatgttaaatcaggttctcttgatcattatgtatgtattaaacccttggaaacacacagggaaagctaagactcctatcagtttcagtgttcaatacatgaagcatgaaaggcagaatggttcttcaagatgagatgtttaaatggcaacttctttgtcactggatcagaccacacatgtggaacacaagggctgtgtccaagcaggacaactcaatcgcaggctcaggaattagatattgagaaaaagtactaggcgagatcaagagtcaaacagcctgggtagggaagggcaggagtcatccgaacggggtcctcatcccctccagatgtcaaagctccaggggccactgcccagccagagctgctgcctctgctctcagctaatagtggctaagaaggaaggcctaggcagctgagtcccaggggagagcacacttggaggggcattaccccaaggaaaaggtggaaaggattataggaaaaaacaaaggttgtctatgtgccacaaggaggggcttcaggttcccgtctctaacataacatttctacagcactaatagcatatcatgtacctgctataccaatagtatagtattaaatacttccatgatagttatgtcttgcaaacagcacccaggtggtcttgactaccaatggactctaaatagagaaacttaacaacctattacatgtgtcagagaacattcactgttgccaagtagtgtttctataggtacgaatgaaggacactcctcttaggcaaaacaggtaaggctttgaggagct

SEQ ID NO: 328445 - DNA, 495 bp, Homo Sapiens
aggaaaataacccttcttgcttcagcacttctccctggtccttgctgaaagacagagataaaaatccattctctgagccttgcttggttgtcagaggccatgagaggtgccagttataggtggatgtgccaagatgctggtgaacttggtcttcagctatacccagggctcagaaagggcaagagccatgctgcagcgtaggtgactttggaggtgcacttgggggcccagggctttgagtgttgcgggtgtgcctgtccctccagatagtgctctgtttctctctgttgtccccctgcctggtcctctggggccactgtgctttctgctgtgtgcatttataaatgatgtgtattttatatagacctgcttgcattggctgatgctcctctaattccctgagtttgattcaaccacccttgggttgttttgctatggccttagcctttgaaaatattttaaaataaaaaacttgatttttctagtgtaaaaaaa

SEQ ID NO: 328446 - DNA, 357 bp, Homo Sapiens
ctattatttaattttaattttgtgtttcttcatacacctgaatttaagtgtcagaatactgttccatgccaaaagttttatgctgcaagttagggttaaagctaaaacctgttagaattgagaatgatggcagtagcagcagcagggatcattaagtggcatttcggcagaagcctgggattttaatgtattgagtggggcctatcactagataagagccatcagcaaagtgagtacccagatctaaagaatttctccgtaaattgttagtgttccttcccattcatttcttccagggttaagcgttttatgaagttcattgtgccttgatgttctttcatttctttagttactacc

SEQ ID NO: 328447 - DNA, 661 bp, Homo Sapiens
  misc_feature (221)..(234): n is a, c, g, or t
  misc_feature (469)..(503): n is a, c, g, or t
  misc_feature (505)..(505): n is a, c, g, or t
  misc_feature (583)..(583): n is a, c, g, or t
  misc_feature (590)..(590): n is a, c, g, or t
  misc_feature (614)..(614): n is a, c, g, or t
  misc_feature (643)..(643): n is a, c, g, or t
agtaatttcaccatgaatataatactcctcttatcattttgtattcccttccaactaatttttctcttaaaagtggcactatgtttttgaaaaagctgactactttaagaaaatttctctcagtttactttcttaatcgtgtgcttttctgaagagttggctctgacgttgactactatagtaaatccaattttgatgagtttttcttttttagtgggccnnnnnnnnnnnnnnggaaagaaaattctcctttgtagaaaaaggagggaggatggaatgtatattgtagtacacctgaaaatccataccttttcttagccatatacacaattagtttactctttctcaagataatatttttatagtaaattaggattctttgttacaagtgatgggaaaccaaactagtgctatgctaggttaaaaaaaggaatttagggactcaagtcactaaactactcacgcgcgnnnnnnnnnnnnnnnnnnnnnnnnnnnnnnnnnnntnacataggggttcaattgggccttaggaatggctaaatctaaggtctcaaaagctgtcagtttttttccttcggttcgntctttgnctctgagagttagcttcactttgncagcctgcttctttatacctcttcctggntttcactctgacttactg

SEQ ID NO: 328448 - DNA, 746 bp, Homo Sapiens
  misc_feature (103)..(144): n is a, c, g, or t
  misc_feature (211)..(211): n is a, c, g, or t
  misc_feature (213)..(213): n is a, c, g, or t
  misc_feature (659)..(674): n is a, c, g, or t
  misc_feature (727)..(727): n is a, c, g, or t
gcctggcccgaacttacattttttaaatttgatttttcagtttatgaatcactttctctgagcaggcagaatctaagtcttatttaatcagtgatacatcaannnnnnnnnnnnnnnnnnnnnnnnnnnnnnnnnnnnnnnnnnaatatattggtatgttgaaacatgtttacaaaatgttcaatttttgtgttttttatatatatatagntntttaaaatatttactaagaagtaacattttgttgggttttccaccagtttgagggtttgtccattcttatacactcctccccccatttgtaataggataatctttaaattacaaaagcggtgtatgttcacgcttttaaaaagatccccactgttacagaagtacataaagaatgaaagtagaatcatgctatatgctagtggtattttccttttagagaagcttcaacatgtctatattagtacatttaaagctatctttttatttatttgaaatggctacattgttttctattatgtgaataataggtttttatttgcctgtcctgattgatggtaggcatttatttttttggctgttaacaagcagtgcttgtagtgagcatccttccacgtatcttttgttgatgaatgtcatgttttgaatatacgtatagattgttgccnnnnnnnnnnnnnnnnctggagacagagtttcgctcttgctgctcaggctggagtgcaatggaacgatnctcggctcaccacgccgag

SEQ ID NO: 328449 - DNA, 561 bp, Homo Sapiens
ttaaattttattactatgatactttaagttttagggtacatgtgcacaacatgcaggcttgttacatttgtatacatggggcactgagtagttctatatgatgagtgagagttggtgggaagaatctcgctttttgtattttggcaagaatttgctaatttgaatacatttttccctgacctcaaccatcctgcagaaccatattattcccctgcatagacgaggaggctggctcagatggtttttggtaacttgcccagtcatcagctagggtgcggcatggccaatgacccctgtgtcaaatctcatgaggaaaatatctccatgggtcatatggcatgctgagtccagttcagaaatgaacccttattattcctgggtggaatttgtgaagaatttcagtctgagatagtggtttagagcaaaaccagtcaggtagaaggcttcttggaaaactggagagcaaatggagctgtgtggcagcaaggcatgagacaagggtgtttcctagattagatggttccagaggccctgaatgagaaataccacatcctgccagca

SEQ ID NO: 328450 - DNA, 483 bp, Homo Sapiens
  misc_feature (294)..(294): n is a, c, g, or t
caaagcattcttgttcccattccaaagacgagcaatatgaggctcagaaagattaacatgcccaaggtcacacaggtaaatgatggggtcagaatctgaactctaggtctgtcttgggagggcggggaaaaaatcagaacaaataaggaggacacagggagaatagactcaggaatatgaaatacaacacacaccaccgaaggacagttcacatgtctttacacagggggtataaaatatgtatgcaaagctgaattctgagtcagaatgacccaactcgtgcttgaaagcaangtgcctcttgatttgcccctcatggcagcctgtgagacagtggtgtcctaactcctggcctttgaggaagtcaaattcaccaagtttccatgagccctccacaaccacacccttctcaaatcaggcaagctcatttctcttgaccctcccctggtgtcactgaggggacaggtggcccactgtagaaat

SEQ ID NO: 328451 - DNA, 586 bp, Homo Sapiens
  misc_feature (440)..(440): n is a, c, g, or t
  misc_feature (563)..(563): n is a, c, g, or t
taccaaagcttcattctccttctaatttctccctttacaacctgtgtttctgagcccttcctcgtgcaagcatggaactcgtctgtgagccgtttggctccttgcctttctgagtatcaaccagtgttcctggtatatagagagtggagagtgccacaggctctggggaaacggggccagctctactcggaggcccacctagctgggtcccctcacctccacctagaagacagagggggagactctttcctctaatgcttgttcttaatctttctccatatttctctccacatcccctgccaagcccccttcaatactgctgtcttctcatcagatcaagcccagcgccaatctttgcaatggatttttaaggcacagattctgaataatttgtaagggacataatctctagcttggcctaagacaccttgttctccctnttccttccagccagcagcaccttcctgtctgacccttggggtttttgtgttccttttagtttaacccattttggccacagttcctagggcaaagccgcgtttttgggtaaagcctgtggggtncttgtttttgttgtgtaattttt

SEQ ID NO: 328452 - DNA, 427 bp, Homo Sapiens
  misc_feature (165)..(255): n is a, c, g, or t
aactggaagtatacttatgatatatctacaagttgctacttcaaaagcaaccttcctacttttccaaataatttataggagtgtgataagctggaaaatggtccaccaaaagatatctacatcttacactgtgaaacctataaatgttttatgatttgggggaannnnnnnnnnnnnnnnnnnnnnnnnnnnnnnnnnnnnnnnnnnnnnnnnnnnnnnnnnnnnnnnnnnnnnnnnnnnnnnnnnnnnnnnnnnatgttgagagagggagggggcaatctgacacaaaaagaagacaacacaaccatcgcaggagagattgaggtaatgtggccacaagtcaagtaatgctggcatccacaagtcaagaagtactggcagccactagcaagtggctctctcctacagcctcctaaagcacagccct

SEQ ID NO: 328453 - DNA, 548 bp, Homo Sapiens
  misc_feature (19)..(19): n is a, c, g, or t
aactggattggaagcaatnttccattataaatttcctttctacatagcaatcccactgagatgatacctttgtaaaatcaggcaaaaatcaattgttaatattctagagatggacaaaccacagattaagtaccctaaataatccatgtttcccaatcacccaattaacctaagtagaattctcttaattgtatctattaaggcctactaattgacagaaaaagggcagagttgaggacttggagaaagaagacagaagcattcctctgcctgattcataaaggtcagaatcccctggccgttgttgtaggaacccagccatcaccagtcacaaagaaaaaggcagcagcacactttgagtatccaaagggcctctttactgaggctgcatggctgttgtgggcttagtccaacatgatgatgtaggacaagaacctaccagttcaatcaacatgcaattaaaactcctgatgaaggacggcccagggcagtccattggtttggggcaggggacgcagagaagcaaagcctgttttaattaagcggcc

SEQ ID NO: 328454 - DNA, 526 bp, Homo Sapiens
  misc_feature (12)..(12): n is a, c, g, or t
  misc_feature (76)..(76): n is a, c, g, or t
  misc_feature (124)..(124): n is a, c, g, or t
cctgccccaaanccaaaggaacgccccgggccgtccctccatcaggaatttttaaaatgccatgttgaattgaacnggtaggttccttgtccctaacatccatcatgttggactaaaccccacnaacagccatgccagccctcagttaaagaggccctttggatactccaaagtgtgctgcctgcctttttctttgtgactggtgaatggctgggttcctacaacaacggcccaggggattctgacctttatgaatcaggcagaggaatgcttctgtcttctttctccaagtcctcaactctgccctttttctgtcaattagtaggccttaatagatacaattaagagaattctacttagttaattggtgattggaaacatgattatttaggtacttaatctgtggtttgtccatctctagaatattaacaattgatttttgcctgattttacaaaggtatcatctcagtgggattgctatgtatgaaaggaaatttataatggaatgattgcttccaatccagtt

SEQ ID NO: 328455 - DNA, 684 bp, Homo Sapiens
agtaggaccctgtctcaaaaaaatatatgaaatacaaatagccaaaatgtcagtaattaatgaatctggggaatgggtacatggaggttcattaaagaatctggagaggaggtatatggaacttcattagacaattctctacgattctgtgtatgtatgcaactttcataataaaaagtctaaaaaggtctacttacaggtatactttttaaatcctatcttcagttaaggctgaccattctaaacaaaattctggcagatactttttcaaagaatgttttccttcattctcgactgatcaattaaacaccatagtgaaatggaccataaaaggggaaaaggcctattctgtcatttcagagaaatatgaacatgtttattacatggaagaagttagtccttttatccatgttgattgatatcagacatctgtcattcttcaaagaattatgtttttgttgaaaaatatataagttaaatgagtaaagaaaacatggcatacacacacaacggaatactactcagccataaaaaaggaatgaaataatgtcttttacaacaactttgataaagctggatacattattctaagtgaactaactcaggaatggaaaaccaaatactgcatgttctcacctataagtgggagataaactatgagtacacaaaggcatacagagtgat

SEQ ID NO: 328456 - DNA, 553 bp, Homo Sapiens
  misc_feature (16)..(16): n is a, c, g, or t
aaagtcagcttttgancaaacaaaagcaatagttgatttcttccctcttgtttcaaacattactcaaaggccgctggcttcctggtattcttaataaaactccaaatctctcagccaagaactttcaaagaccacaatttgtgcttatgcagtcaaacagccaccacagtcttgatcagtgttctttttttgtctcatggatggttaggaaagtgaactaaagaaaatctgtccaaagcttcatttttaaagaacagagagatgaaaaagaaattggtttgaaactgtggtagtagaattgtgagagaaatctttccttgtcttttgcctcttgttagcattataggacctgtgcatctattcagtataaatattttaaaagtttaaataccttatgggaaccttgcatgggtcctggattttttaaagccatctataaaagacatttctgggccgggcgcggtgctttgagcaggtttacaagaaaagctaaagcctttctatgaaagcgttaacatttcagataagctgactttgccaagtccaatggaat

SEQ ID NO: 328457 - DNA, 515 bp, Homo Sapiens
cggcacagaattattatggttacaggatgcagacatcagaacgtgaggggagtgggccggagctgagccccagcgtgatgcccgaggctcccctggagtctccaccttttcctaccaagtccccagcgtttgaccttttcaacttggttctctcctacaagaggctggagatctacctggaacccttgaaggatgcaggtgatggtgttcgatacttgctcaggtacagactttgtggagttgctctggtctgctctgccttctgccgtcctgctctgtagtaactaacactgaccatttaggcagtggctgggctgtcctttctgccctagtgaggagcagttctgggaggtctgtttcggcctctgggtttatctagggcctaaccctgtgtctcaaggcccagtccagggagaggcagatactgggaatgatcctgcctttcagcaaggttcttctttgtgactgaataagctccttcctctggactgctggacaaccttgaacatcacgcc

SEQ ID NO: 328458 - DNA, 728 bp, Homo Sapiens
acaagactgaattttcaggaacaattcatgatataaattcatctttaatactcgaagcacccaagggatttagagatgaaccatattttaaagaagaacttgtggatgaaccatttctagatctgggaaagtctttccattcccaacaaaaagagatagagcaaagcaaggaggcctgggagatgcatgaatttctgactcctagattgcaggaaatggatgaagaaagagaaatgcttgttgatgaagaatatgagttatatcaagatccctcaccatccatggagttgtatcccttgtcgcacattcaagaggccactcctgtgccctctgtgaatgaacttcacttttggtacacagtggttgcatgataatgaaccattccgagttcttcaagaggcaagaaccgggaggactgtctattcccaggaggcacagccgtatggctattgccctgaaaatgtgatgaaagaaaattttgtcatggagtccctaccatctgtaccatcaactgaaggaaacagtcaacaaggcagatttgacgacctggaaaatcttaattcattagcaaaaactagtctggatttaggcatgatcccgaatgatgtccaaggtcctagcttgctcattgaccttcctgttgtggctcaaaggagggagcaagaagatttgcctttatatcaacaccaagcgacacgagttatttccaaggcctcagcatacacagg

SEQ ID NO: 328459 - DNA, 711 bp, Homo Sapiens
ttttattatgtaactagagtcttcttatagagtagtggtgcccaactagcatgcctccaagtagtaatgcataacataatttatttttttccttttagaattccagatctgaacactctctcagatggaatgttgagttctgaaggttatgctaaagggatagagaagaagggctgcagcaagtgtgagcagcaagagagggccggagaaagtctgggatttattggaacatgtatgggaatttggctgtgggcatgagggtcacggtgggctgaaaaataaaaatttggctgtccttgttttgcggagccataacttacctagggctagcacaataggaatgacaacttaagctgcctagaggggcggggcagtgaacagaattaagtgaagatggttgtaagaatttggaaatgccctgattaagactgctctactcatagctccagctggccatgatcacacagaaacacaagcctggcatgctgaaacgccctgatttttcaaaagaagccagaaataggaattgttaggtgaaaaaatggaaatgtagaaactaattttttataaagtattgtgaagctccaacagaacatttctgtggaccaggccttcttgaaggttgctattttgagatctctgagtgtaaagaggagatgagctgagctgagctgagctgagaacccaggacagagtcctagggagccatga

SEQ ID NO: 328460 - DNA, 468 bp, Homo Sapiens
gcatgagccacttgtgcctggacagatttgtgactgttaactaccccattcctctgcccacacccagtgggaacacctgcacccactaatcaggtgcatcccagagtgtgccctggtgttggccatcaacctgccctacagccctggtggggggcagtgtcctcatcctggagctggccccattctagctggccttgacctgtgatgtgaaccaatcccttccctctctctgctccagccagtctgaactggtttccctcccttgccagctggaagagacctcacagactcaggccaacaagccggaaaaccagccaaccagatgacgctgaagctgtgacattctggggcttctctcgagttctaaaaatggatcattcaaaaaatcaattcaggttcccaaggcttgtaggcggagaacagggccaactgctttcctggtgcttaagactaattaattaagcggcc

SEQ ID NO: 328461 - DNA, 827 bp, Homo Sapiens
caggaatccctttttggctgtgcttgtaattaagtggactggccttccctctgaaaaagaatataggtctggctttgaaatgctcacactgaaaggtaaactctgcctcccttcctggtagtatccaaggcttacagatccaatgacagccaccaatagagatgaggaaacccgagtactgctgcacttgttccacacccagctcttagatggcacaacacccaggcacccatctgaaagccatttcataaccagggtatttgagacagagtttgacaggacatgtaaactgcctactcgtcttgattctccaaatattacctttggcactgggcaactcatcaggaaaaacaaagtaggccacattatatagttcttcacagaagcacttttaccaactaaaagttaacactgtatgctccatctttatagagaatcaacaaaagggcccatcaaattgaaaaggattcaagaatctttgggtaatacactgcctgaagaattgaatcactgtgtcactatcttttagagaaaagccaaacaacaaatttgtccttgaatttaacccaggaagaatgtgctgtttctgacttgtcttcagaaaatgaaaactctatatccaacatgtttctcaccctgccagcagtcctgaacctagagccaaattatactgaccaagggttaggatctgctccactggaagccttaaaagcccccattcctttagcttcctccacatttcctatattccattctattttaaaaagggatgtgtgaaatgaccacgagtgagaaataccaacttttggatggtgattacctctgct

SEQ ID NO: 328462 - DNA, 429 bp, Homo Sapiens
  misc_feature (416)..(416): n is a, c, g, or t
atcaattgtttatactgccttttacctctgatgaaccaaattaaaaggacatattgtagaaaggctgacatcagccaactcaggaaactaatagggttatacagtgggataaggaagtcaagatgtagtccaaggaatggggctattcggtttacagatttgaagttagcctattccacatatcggagaaaggtataggataccaaaaagtctcaatgaggccacacagccaaaaaactcttcaaggatatagcatgagattgcagaggaaatgttggaaaagacaaaatgggaggttgagttccacagagagcagcaaaaagaaaattttctgaaaactatttgacacattcttagacaaattctaagggagaacttttgggccttttaggttattttgcctttggatagttccngggtaatctttcc

SEQ ID NO: 328463 - DNA, 606 bp, Homo Sapiens
taaaaagggagacaaagtttattgctgtattggaaggaatacaaagtcaagaaccaaacccttttccaaccttggtggccccagttcctctgagttcccccacattcatcaaatccataaggtaccccaagtctccctaagacagtcatggggtaggaggatatcctgtacccagcccatggggatagggattgaagagtcaccctggtcacccccatgctgaggtctgtgatcagttacccacaagtctgcagatctcagtccttgcacattccttggtggggtcttgtgtgcaggttgcctcgactcagagccaaatttgggaatgcagacagggagtcctggttcccaggttttgcaggcagagaacttggtggtgtctgggcaggtagcgtcgtctgtcccgacctctaggtatggcaggaccaagatcgaggtgtcaccagcccccagaaagttgcctggggtaaggggcagtgccgccgtgcgtaccactcctggcagtacaggctgacctggattccctggcctagaaacagcatggtccacatcagcacgttccatgccgggccggtgcgctggtcatgcatcatgaagttcaacatt

SEQ ID NO: 328464 - DNA, 409 bp, Homo Sapiens
  misc_feature (108)..(210): n is a, c, g, or t
tgggcagattgcctgagctcaggagttcaagaccagactgagccaacaaggtgaaacaccatctctactaaaacacaaaagaaatttagccgtgtgtcagcagtgtgnnnnnnnnnnnnnnnnnnnnnnnnnnnnnnnnnnnnnnnnnnnnnnnnnnnnnnnnnnnnnnnnnnnnnnnnnnnnnnnnnnnnnnnnnnnnnnnnnnnnnnntgacaaagacaagctccgtctcttttgtctctgagagatgttgagggcaccaaagtcattaaacaaggatgaagcaggtgatgttagaggatcatgggctgaatatggcttggcactgtcatttagaaggcttggggagctgctactattagtcattctctgcatcaggggatattttgtttctacagggcttccaaat

SEQ ID NO: 328465 - DNA, 481 bp, Homo Sapiens
  misc_feature (354)..(354): n is a, c, g, or t
gaatttttagtttcaggagtcagtgaccttcaaggatgtgtccatagatttctcttgggaagagtggattcaagcagattctgctcagaggatgaccgtgtatggggaggtgatgctggagaactacaggaacccggtctcactgggtaaggacttcttgtaactcaaaacccacctcttgacaatcataaggcctgatcataaggcattgttttagggtgtttgcttggtgtcctctctttcaaggcagaagattgaaattttctgtagagaatggaaaatgggggaacttcataagccacaccttccttgtttcagaagccctgaaggagaaatgatccagaactctgctanggtttggtttttaggctcagttcagaacccaaatttaatgtctctcctcttaagcaggaaatcacctttccaaacccaatgggacttcccagctggaacgagaactgagtctgatgcaaaaagaacc

SEQ ID NO: 328466 - DNA, 412 bp, Homo Sapiens
gaatttttagtttcaggagtcagtgaccttcaaggatgtgtccatagatttctcttgggaagagtggattcaagcagattctgctcagaggatgaccgtgtatggggaggtgatgctggagaactacaggaacccggtctcactgggtaaggacttcttgtaactcaaaacccacctcttgacaatcataaggcctgatcataaggcattgttttagggtgtttgcttgggtgtcctctttttcaagggcagaagattgaaattttctgtaggagaatgggaaaatgggggaacttcataaggccacaccttcccttgttttcaggaaggccctggaagggagaaatgatccagaactcttgctagggattgggttttttagggtccagtttcaggacccccatttaaaggt

SEQ ID NO: 328467 - DNA, 515 bp, Homo Sapiens
  misc_feature (492)..(492): n is a, c, g, or t
  misc_feature (500)..(500): n is a, c, g, or t
tagatctagaaatacaccattgttttgttagagtgtattcttagggtgtgtatgtggggaggcagattgtaagcaaccgattcaaaatttacctggaacttcatagaataatgtcaatgctttttaggtagaaaaatcattacctacaaataggggatacattatgaacgtatttcaactaagcaaaagcatagtcaagtgccttcataatgctaaattttagatgttgcactgatgagatattttccctacaaataaaagaccaaagtgtacaaaacctcaggacatgtggctgagttagatttacaatgcagctgtcatttttgcatttcctgggctttcatgaatcattactagtgatcctctgtgcatttaaattcagttgagaacatgggtttatcttaattttcaccctttgtttcccttttttcgtgattaccgtttggaggtatggtgatgtaaagtgtttctacttataatgggtttccgccntgtccctnggcagcctaaatctt

SEQ ID NO: 328468 - DNA, 555 bp, Homo Sapiens
ttgtgctttgacttgctttattgagcctgtgcaggaacagggagtgagcttcggccagagccaacagtgtggaggggagagctgggctggcactgcccgtggagtggtagggggcgggaggtagtgttacaagtccagcgggctgagctctctgggggcagcagcatgggaagaccccactctgagaaggccagcgtgtcctctttgtctctttctccatacctggaagcactgtgcccagggtgccagcccaccggtttcatatccgcctgtaggcaccctcttgcccagggcacatgggcccaggcctggtcagcacagatgctctgtttccccaagagtggcctggaaggggctgggactggggctggagatggggcttgggctggggatagggtgtggccaggaatgtggagtgggcccagggtcccaggggctgggatctctctccttgtccatggcacatgcctaggcttggtcagcatgttgatgtatctacggagctcagctgtgtactgggccatctgctccggtgtggtattgtcccctgggtac

SEQ ID NO: 328469 - DNA, 165 bp, Homo Sapiens
tccaggtttgttctgttagtcaggaaaccaagatttttgtgagttgcccattatccaagtggggagggcatgagcaaatcacttgttgtagtagatggcaaaaatggcctcaatagggtacagctcctcgcattaagacatgagtctattaccccactccttgaa

SEQ ID NO: 328470 - DNA, 640 bp, Homo Sapiens
  misc_feature (84)..(92): n is a, c, g, or t
  misc_feature (159)..(205): n is a, c, g, or t
  misc_feature (228)..(340): n is a, c, g, or t
tactctctatctgacagctgctagtttttccctcatgatctttctattaaaatagctctgtacttactatgttgagcccttccnnnnnnnnngacagggtctcagactggagtacagtggtgtgatcatggctcactgccacctctgcttcctgggttnnnnnnnnnnnnnnnnnnnnnnnnnnnnnnnnnnnnnnnnnnnnnnnacatgccaccatgcctggctaannnnnnnnnnnnnnnnnnnnnnnnnnnnnnnnnnnnnnnnnnnnnnnnnnnnnnnnnnnnnnnnnnnnnnnnnnnnnnnnnnnnnnnnnnnnnnnnnnnnnnnnnnnnnnnnngtgtgaaccaccgcgcccggccccttctttttttaaatttctgtatttaaagagtacattggggattggaaatagtttagatcagcagggattagccattccctaaatgtaaacttcagtggtgctatacttagagtgcctaaggtcatttccaaatccatgaatctggacgttgaagttatatttgtattcccaccacacaaaatttatgtctgtgccctgtcttcttgggtctattttttaaccagaaattaataagacattgatttgcctttgttagagtgatttcagtgtttcgag

SEQ ID NO: 328471 - DNA, 240 bp, Homo Sapiens
ttcctgccttcttatattaataagaaaaataaaacaaaatagtgttgaagtgttggggtggtgaaaatttttggggggtggtatggagagagaatggatgatgtttctcagggctgcttcgagtgggattaggggcggcgtgggaacctagagtgggagagattaagctgaagggaggtctcgtggtaaggggtgatattgtggggatgttagaagaaacatttgttgtgtagaatgatt

SEQ ID NO: 328472 - DNA, 495 bp, Homo Sapiens
gtcattgtagctcaggtccagcttttgcagtttggccagatgacccgtctgtatgaccgatgccaggagagccacatcctctgtcacccgggaaacagctgctcagcctcagcaacttgaagagaacatggaaagctttaagtgtttcccagaagcagcttcaagttgccaccaacacacttgttccaagaaaggttgaatacttccagagcagagaggtgaacagaggcttcagcaagagctgtaaaagtctcactctccaaagcacagttgttgataactaatgacttcaatgctggtaaaaatcggagcctgctgagtaagttttcagaagaactgcccatctttttgttggctgataaatccaattcttgaagatttgaaagtaaaggaatgacctgggctgttaaaaatatcaacagtgacatgttttaggcaccatctcacagggagtcttctgggtgtttggttcccacaatctgtttaatctgtcag

SEQ ID NO: 328473 - DNA, 482 bp, Homo Sapiens
ggccggactggcgtactcttaggtgtgctcttagcaacatcagcatctggaggaatggcataaagctcttccacactgcaagctttagggccagattgaggtgtttctggaggagactgtgggggttggattgaagccacaatctgagaaagcactgtgcttgctttctctctggtgctgctgctgcccaccatctgagactcctgagtgccttctattttggccacaggctcttgagtggctctctggatctttgctggggagctgtggctgtttgaaaaccctttagtttgaagacagtcagtggttttgctagtggtgttatcaggcactttgctttctgtttctatttcttcataagtatggcttattacacttgtggttttttccttcactgagagttctccacttgttcccagaaaacttttgtagatagctagattgtcatatgcatttggattgataacaatgggaactttgat

SEQ ID NO: 328474 - DNA, 504 bp, Homo Sapiens
  misc_feature (80)..(80): n is a, c, g, or t
  misc_feature (111)..(111): n is a, c, g, or t
  misc_feature (173)..(173): n is a, c, g, or t
aagctctgcacaggaaggcatcgtcggcaagctctcttctccgacactccaccggaaggatcacagagctgtggtcttgngcctggatgggatcgcagctctctccaaccntgagggcccccaagctggcagggaccggaagaaacactggcgtctggcagccaccgtttccnactccctaccaagaaggctcaaagacgacggtcagctcaggcttttcttcttgaagtgtttctaacgcactttttgtctcataattgaaatacatttcagacaaccccaggttctgcaggaggcagctctgctgtttcagcacttcacagaacatcatgacccccaggtcgcccaggtcattgttgcccaggcttcagttttcgcaggctctggctggaggtcagaagtgtggaaagatcccagcagcagtgtgacgtgaggttgcagttgtctaattccaacacctgaagcttgcagtcggggtgcaagagtccctcacagagtagtttg

SEQ ID NO: 328475 - DNA, 484 bp, Homo Sapiens
  misc_feature (90)..(90): n is a, c, g, or t
atcaggacagcgaagctggacaggtgactgcaattacacatggtgtgactcttgttcacgtgtatcaggaagcagccatcccctggaccnactggctgcccctgcccctgtgctcttccagtagacacagaagacctttttggtactgggggtcatcttcacgtgctggaaagtcagcgtcacagacttggagagagacacgttccttttgggtccaatagcagcactcacaacctgagagttcagatacacttgatctttcttatccatctcttcaaaaaaagttgcatttatgatgtttccaagagaagaatatgagataaaggcaatgacactgggaccttgtgtgtctccctggatgatgtcactgcaacggatgtccattgagttcatttggacgttcaagttgaatgtctttctttcttcagagcaattgtctgtaatcgcttgagtttcaatagctcacactatcgttttggatttt

SEQ ID NO: 328476 - DNA, 503 bp, Homo Sapiens
  misc_feature (359)..(359): n is a, c, g, or t
  misc_feature (393)..(393): n is a, c, g, or t
cggcacaggagcattgtgaccagccttcaacgtgggggacgggaattccaaggatgatctcattatactgcatttcactgatttcaaactggtcacacatgtgcaggtagctgagccaatttacatttaaaagattttcactacagctcttcggtactagctagtgcatgagcacaatcgtgtaaacacaatttatgttttcctaatcttttccagaattattattcaaatgctgactaacctattgttattaaggcttcagccaactatgaagagttagttgataataatctaatatataaatctttctccatttttccatagactctttgagtcaaaggattttagactctaaaggntttaaactgctaatgatataatgaaacatagatnaaactatatacaaatgtcccaaataaaagtaaatggcaatttgtaggcaggagcacagggggtgaggtcaatccattctttggagttgtatagataatacaacagttgaa

SEQ ID NO: 328477 - DNA, 502 bp, Homo Sapiens
cactgatagtttcctgccattttgtgtcatcagtggtacttgggtcccagaaatggactggttcttactaagcagtgggaatgcagcaatgagcagtgagtatcactaaagagcggacccttacaccaattcctctcattgttgatttcaacaggttgttgcaactgaagaagatctcgtcccacccagtctgcgggagccatcccccagagcagacgggctagaccacagaatcgcagctcacattgtgtcccttctgccctcactctgtctttcagagagggagaaaaagaatcttgcatgacatatttttatctgaagaagaaaatgaaagcaaagcagtgcccaaaggccccctcctactgaactatcatgatgcacacgcccacaagaagtacgcactacaggaccaaaagaattttgatccagttcaaattgagcaggagatgcagtccaagttgccactgtgggaatttcttcaattccctctacccccaccatg

SEQ ID NO: 328478 - DNA, 696 bp, Homo Sapiens
  misc_feature (240)..(240): n is a, c, g, or t
aacgacaggagaatgtatctgttgatctgccaccaggcgtctatgcggtgcctcctggcctatttcctgataaaaagttcaggtactaccctcatctctgctttgggaatgtttgatggtattgagacactgacaccaccaattagatatctatatcttagtagttaagagaagagtatctagaacaaggatgcctaggttcagattctttctctttcacatactagctgtactgccttncacaaatttctttaacttctctggcctcagtgtcctcatctgtaaaatggggagaataatgatgaattttaaataaacataagtaaaaagtttagaacagttcatgacacattgtgtgggctatatattaactgctattattagtatagtattattcttagctaacattttcaaagccaacgttaacagtctgcctcaatctggaaaagatgagctagtatttctgtgaagcatgctaccatcaggtgatagtagggcctttcatagcttcatgatcctgattacaagtttctgtccttgctataggggtaatttccccaagatagtgatgttttcattttaaattgtttttcaaatgataatttatttttaaaaaaatatgtaggcattgcatttacagagtatttacacactgactgcataggctgaactgcaaactggggcagctggcctggc

SEQ ID NO: 328479 - DNA, 721 bp, Homo Sapiens
  misc_feature (51)..(51): n is a, c, g, or t
ttaagaaagaaagtttcctccagagctagatagctccttggttgcggccanaagcgaggcttgtttgggagttgcggaggacttcttcactggaagtggggtgcctcagtgaggccgaggcagagtaggagaagagcaaagatagcatttcctaaaggtggaaggcgatgaggacacaggcagtttgacttcttggaaagggctcagtagtgggctgggacagtatccagggcttcctcaggttcccgggtgatgtccacattctcaggcttctcccggtgtgtgttcacggcctccacattcaggtagatggattccactttgcagccataagccacaggagtgagtttgagcactgtgtgcagagggcacttgagatatggaagctcatctgaacttttatccaggaaataggccaggaggcaccgccatgaacagcctggtggcagatcaccagtacattctcctgtcgttctagctccattatcactggctccagacgctgaaccagatcctcataggactctcccttgggatagcggtagcgatatttatcttggtctcgcagtgcaaattcttcagggtaatgttcctggatttcttcataggtcatctcctcacagacacccgcatcaatctcattcagggccttccactgctcataggggacacccaggcctcagctgtctggatggtcctcttcatgtgactggtccacacc

SEQ ID NO: 328480 - DNA, 424 bp, Homo Sapiens
cagccagagggtggctaaatttaatgtttacttgcttataaaatgttacatataaggttaacatcaaatacttaagaaatacaattaggataaagaaaggacttaggaagacatttaacataccacacagatgagggttctatacttctcaagtcaattaattacaagtatgtaatttattgaagtactttttaaaaatctataatacgagcttttttcaagtgttggtatttatatttttcttaatgtctgccttattacacctatgtttcattaaagattagtatttatagcacctccccaacaaggatgggctcataacaactgaaatatacaaaacaaatatataaaataaataacaacatcatgttaaagtgttttcaaaagcatcctctcatttcatcctcgactccacagtagtgaa

SEQ ID NO: 328481 - DNA, 395 bp, Homo Sapiens
  misc_feature (162)..(208): n is a, c, g, or t
  misc_feature (210)..(321): n is a, c, g, or t
  misc_feature (330)..(330): n is a, c, g, or t
  misc_feature (351)..(351): n is a, c, g, or t
  misc_feature (365)..(365): n is a, c, g, or t
tttgtgaccagccagccacttaatcaggtggaaatggccttagtgccacatcaatatttgctaccgtggaggctagttttcccacttagggcatgagaagaattggtgtagtcagtatagagttgccaaacctgttttccaaaaataatggtaaatctatannnnnnnnnnnnnnnnnnnnnnnnnnnnnnnnnnnnnnnnnnnnnnngnnnnnnnnnnnnnnnnnnnnnnnnnnnnnnnnnnnnnnnnnnnnnnnnnnnnnnnnnnnnnnnnnnnnnnnnnnnnnnnnnnnnnnnnnnnnnnnnnnnnnnnnnnnnnnnngcatctggngactacaggtgcccgccaccntacccagctaattntttgtatctttactagagatggggtttcac

SEQ ID NO: 328482 - DNA, 466 bp, Homo Sapiens
  misc_feature (73)..(73): n is a, c, g, or t
  misc_feature (78)..(78): n is a, c, g, or t
tggtgttttttggtagggattatggtcacatagtcacacggtcccttctcctcctgggcaggtccttttcccnttctngtccccagccttgctgccaacacaagatcatatagcctctgtgtccacccagccagttaattgttcatggaccaaacttagtgatctggcctcaatctctccactgccagctctagatgctattgatttttactgataatataagtagtaatatactggagaaaattttttaaagcataaaaccaggaaaacccataatccaactacccagagtttgcatatcctttccatctttttaaaagtcattttttggatttatacatacaattttgtatatcactcttttcacttaacactataagcactttgccatgctgtcaaatattcttcagaaacataaattataatgatggcacaacagtctactggatagtcatactgtaattta

SEQ ID NO: 328483 - DNA, 389 bp, Homo Sapiens
  misc_feature (13)..(13): n is a, c, g, or t
  misc_feature (52)..(52): n is a, c, g, or t
ctgtccccttacnttgggtaacgaacatgaaagcaattacgtgttaggtccntcttgaaacactccgtcactaacagggaatgccgttggacttccatttcattgcagcaacaccactacagaacttttgcaatagaaaccaggaaatataccttccacatgggctttgaggctgactgtaacattctgggaaaccccagaaacatgggccacttcttcaccagccagggagaaggtaactatggaagccagagaagtacttcacggctgggacaatagagaggatttgcaatacaagctcactaggagttcagttactaaatggatccgaccctaagtagtccctaagagggctactgacatgagagaattcttctcctagctccttc

SEQ ID NO: 328484 - DNA, 923 bp, Homo Sapiens
  misc_feature (347)..(490): n is a, c, g, or t
  misc_feature (502)..(584): n is a, c, g, or t
acttttaatcagctcctttatagtatgttgaaaatcactgcgtgtaatgagaggtattgagagtttcttgcacacatgagtgtaaaaggttgagaactagattatacaaagtagtaagtcacagtgcatggcaactttctacaggttggattataagacttatgtggaataggagaattatattgggaaaaaattattttctctaacttgaagactccagagacacttttcttagtcatgaccagtaatatttttcatatattttggaagaaataagctcctcactataccaccagttagtgatttatttatttatgtattttagagacagggcctccttctgtcannnnnnnnnnnnnnnnnnnnnnnnnnnnnnnnnnnnnnnnnnnnnnnnnnnnnnnnnnnnnnnnnnnnnnnnnnnnnnnnnnnnnnnnnnnnnnnnnnnnnnnnnnnnnnnnnnnnnnnnnnnnnnnnnnnnnnnnnnnnnnnnttcatttaattnnnnnnnnnnnnnnnnnnnnnnnnnnnnnnnnnnnnnnnnnnnnnnnnnnnnnnnnnnnnnnnnnnnnnnnnnnnnnnnnnnnagtaaattatatagaagagcacttctgtataatttactcagtttcttcatcacatatttccaactgttgccctaaataggtttaaaaatgtgatcatgttattagaaaatcctttccattgaatttcagggatgctgaatttcagggagctaaattgttgacccttgcctgtagttgttattggttcgagaagtaaattttattgatgctacaagtaaaaaattagaactgacttagtaaactcaaaagttttacaaaactgtattttactatgtagatgtatttctttaaaataggtatggatggatatttttatgaataaataatattgcattataa

SEQ ID NO: 328485 - DNA, 943 bp, Homo Sapiens
  misc_feature (176)..(176): n is a, c, g, or t
  misc_feature (331)..(331): n is a, c, g, or t
aagctcataagtctttttacttgatttaagaaacatggcaactataatactaagaaagaactacagctttgtacagaaacatagagccttgtcttgactataaggtttagttggtgttttaataacaacaaaaaagcacaaaagacacaaacactcttcaacaggtttactcaaancagcttcgctcaagaagaaaaaggcacagatttaaagggatagacaataatcattaagaatgaagtaaatggagactcagtcaaaaaatgatacttcatgaattaagtcaagaaaaacaaaagtctttcaaattatctgtcttccttaaaatgantttttaaattaaattgtataaacatatgatataaagttggtactttagggagcgtctttgtatattttttatggtaccaaatctttgtatacaatttcgatgttccttatatattccctatatagcaaaccgagccaggacctcccaactgcatgcctcaagtccctgtggagcactctggcagctggatggccctacttgctttctgacaaaatagctggaaaggaggagggaccaattaaatgtagtcatcttcaactggctctccattgactcacaatagtggataaaaattgccactactcgctgaaatacacccttcttcatctgacgcatctctgaaatttcctctcctattgtttccatacagatgtctgcagacagctgtcctttccttctaggagcatagatagtgctttcttcatcgtcttcaaagtcgtatcgagcgaagctgttgggctctgcagctcgtaatgacctcagccaagggaagtcagaaatcatggaatatggagctccatccacaacaccttctaaagtatagatttctctcccccaggggtacttggggtatttctttaagtcttcttcacttcgagtggcttcagggaa

SEQ ID NO: 328486 - DNA, 672 bp, Homo Sapiens
caaggtgaactcattgggtggttacaaatctggggggcttgtccaggattgcccatgtggctacctgcccatggtttggtagtccccctctggtgatggattcagatgccagctcaagcagctgcctagttattttggactgggggctgactctggtattgtctctgctgaaggggcactggtgacccagtgtgcatggatttaattgcaatagagaaatagtcttgaggagatgtcctataactgtagccctatcacaaggtgtctgtctgtagcccagtcatggagtgtctgtagctgtagcctcattacagtgtgtctggattggtgaatatcctaggcacggccaacgcctccttccttttcccgattggtttgattcctttggggagggggtcttggtttttctgttgccccatggtggggtgtcggtctgtaggcccactgaggggcatctttctcagtttggttcatttgagattctcggttggctctctctaattagtaggaagagtcttggtttgggagacttctcaatcaggaagattttggggagatttctcagacagagaacaggaggatagtttggaagggatactcttggagttcttggttagggatctgatttggaagcccttctgtctgtcttgtctttgtatgtgttctcgtgcc

SEQ ID NO: 328487 - DNA, 522 bp, Homo Sapiens
  misc_feature (23)..(23): n is a, c, g, or t
tacggagagaacatagacctttncaaaggcaaaggcaaaaaaacaccttaaaggaacacagttccactgttaaacaatgccttaatttttaaagggcatccccggaagcttctgaatccttgggtccttgaaacatccatgatcaaagctgtttgggccatgaattttgcctcgccccatcttcaacctacttggccccataataatgtaatttagacctcttctgaggagagggcactgcttgcagacgacagtcagcctggcactcatgttcttgcccgcctgctgaatcgccaaatttccctctttgtagatgttgatgatcgagactgtggcgtgcaaactcccatcgcgagtgatggttgtgataacagtgccggctaatacaaagtcacttgaacaataattgccctccagagtccccgtccgtctacacttttgttgacacaaggccacggtgggttttaaacccgtggttacagggaatgtggtggtgacaggctgttctgtagttgtaggcag

SEQ ID NO: 328488 - DNA, 964 bp, Homo Sapiens
  misc_feature (452)..(461): n is a, c, g, or t
  misc_feature (486)..(546): n is a, c, g, or t
ttcagaaaagtcatatcctgaaatgtatttttaaatgtaaatgatattctacttagaaacatgtttgagtatttttaacatataaaacatagaatattcaaaaacatattaggtacattaacattacaatatccaattttttagttttaagttagggtaaaatttttctatcacaagccataaaggttgaaaaaaattcagtcacctaaataaaaacgtatatccaagggatgacagtgagggttggatgtttcattgaaatttaaaataaacaaaattatttaagatgctcaaaaaagaagctaagaagttgttgttttcgtcacatgtggccagttaagttagctgagaacaggacaagaagggagacagtaagagagaggaaagagtgggaaagagaaacagagactaagatttattcaagaataaaaggaaacagagaaggtcaagcnnnnnnnnnntgggggcacggggagttgatacatnnnnnnnnnnnnnnnnnnnnnnnnnnnnnnnnnnnnnnnnnnnnnnnnnnnnnnnnnnnnngatgaaccaactcccacaaagactgaattagaaaaagacttcacaaagaaacagcaactcggagagataggaagagaaacataaagagaggaagcaatggagaaggggaccaaaggccagacgtgctatctcacgaggctgatcctgtcccacgttctgctttgggcaaaggaacccaatccacctgccctcgcatggaaattaccaagtctctaaatgtccccaatctttccatgctgaaagactgagaagttactttaatttttaaaatttatttttcaaaaaaagagaagtaattttaaaatgacattccgaatgtttcaaatgtgaatgaagggcatgcattttttaaatttagagatgtcagtaaatttagtagttacaccaaaagatactctaaaacttctacactagacgg

SEQ ID NO: 328489 - DNA, 564 bp, Homo Sapiens
aactggaaggaaaggagaagaatgtgcagatgatccaagggggatgactaagtcttcaaattcctctggttggctcagaccctgttttggtcaatccttgtgaatcagggcgggtctgacattctgggaatgcaaggagacttcaaatcatcttcatgaaaacaagttgtaaaaatactgaccgccactccaagtggccagctgataggcttggctccatggagcagggttgaacaagttcaccagaagggaacacacagcgggaaagactttaggcttagaccccaaaggaagaacttccctgtaattgagagctgggccccagagatggggttgggtgtggcctctttggaagcaggccatccacgtcctgaccttcctaggcctttcttgtttgcagtgtctacgaaacagctttggtgagcactgaagatgcaaaaaccaccagaggccaaccccgcccagccctgagcttcaactcctgacctgaacctggtttacgaggatgctctgagctagtggagcttctgcctcctggatcctcccccacacccccagggtggc

SEQ ID NO: 328490 - DNA, 447 bp, Homo Sapiens
  misc_feature (274)..(274): n is a, c, g, or t
  misc_feature (399)..(399): n is a, c, g, or t
cattttgcatccttatatggatagtaaataaacatctttatgatgagtgtttttggtgaacagactttgaatgtttggctttttggttgaatttaatactttagagtgaaaaaaggctgactagaatgaaaaaaggctgatgttcaaatacataattttagtgaagtagtttctaccagctctcttaactacaatgttgtatcagctgtgggaggagttgagaaagacaggaatacacaaaccagcaacaacagtgagcttatcttgattttcnttcccattgtcttacatttgttcctctgataagtttatgggaaattatgtaaattctaggtctcttttgatggagcatcctatttagtattacattagtgatgcagtagagaatttgattttggnttgcccatgtggttcattcctttagtcatgactagagaatgaggattt

SEQ ID NO: 328491 - DNA, 612 bp, Homo Sapiens
  misc_feature (271)..(271): n is a, c, g, or t
gcgaggtgggaggggttcagaagcaggagcgttttttctctgctcttcccagatctgtgtcttgctctgcaccctcagctttgcgggtcactctttcaaaacccagcactctatccccacctgcgcccacacccggcgctgcggcaatccgcaaagcaaaggctcttgaactctagcgcgttgaccttgcctgacagccccgtgtagggatgtgctgccgctctgtggtccgcaaacaggtgggctcgagtgggcggatggacgcggctgngagattggatagctcctattgcactgaaaaggtgcattgcagtttgaggccccaggagtcagaagcttttctaggctgggacgtgggagggactgtgcagataattcaagaatgaggagagtctgacctggatatctgggagctctccctcctggcagcggaggcggggtattccggggtagaataccggtagagttcttagcttttctatctggattttatgtcagcgacacagcccgatggacagggcaaccccaaccaatccctgcaccctcccttccctccaccctcctgagaattacccacagaaccagggagacagacttgaaacccacgccgag

SEQ ID NO: 328492 - DNA, 675 bp, Homo Sapiens
  misc_feature (376)..(376): n is a, c, g, or t
  misc_feature (464)..(464): n is a, c, g, or t
  misc_feature (593)..(593): n is a, c, g, or t
gtattcagatcacagcaaactcaagatggggaaaaatagatctgaaaagacttcctcttggagagtcacaatatataagatatactgaaactctgaaaagtcttacaataaagctgtttgattttgtttaatctagtctttctcaaaacttatttaactacagaattcttttttggtaacatccgttaacattttaggaagttctgttgatcaaactttgtgaaaagtgctctaatatttttatttttgtattaattgatacatattatgcataaaaataattcatttgattttaaaaggttataggttcataaaattttgcttcagtctaaaaaggcacaaagcctcctaagggtgatttttactattatattcntagttctattagcctgattgtaggaattttaagatttgctgtacctctggaagctcatgtgaagagcactgattaagtatctgctgcncttgcaaagcactaattaaagacttgctgttctgcatacatagagatgtggaacagtaatagaaaatatgactttctccttaaacttgtctttttattatggacttctaacacttcaaatatcatttgntattgccctctctcactattcttgctattcttagggcatgtcttggggttttccttctagattttccggatatatgttatat

SEQ ID NO: 328493 - DNA, 688 bp, Homo Sapiens
  misc_feature (591)..(631): n is a, c, g, or t
caagatattctgtctttgccttctgtcagtttgattacagtatgtttagatgtggatccctcagtttttcctacttgtagttccttgagcttcttgaatatgcagattgtttttcatcatgtttgggaagtttggggccatcatttcttcaaatattctttctccttttttctgtttttcttctcctgggatgctcattatgtgtacattagtaagcttgatgatgtgttccacaaacaggtctctgagattccattcactttcattcatttttatttctgttcctcagagtcaacaatctcaattaaccttcaagttccccattctgtcttcagcctgctgtaatgtgccattgagaacctctaataatttttccatttcagttaccatacttttcaactctagaatttcctatttgactcctttttatggtttctatctctttattgatattctctatttgatgagacattgctttcatactttcctttagttctctagtctacagaactgaatcgtttctcttatctctttgaacatattttaaatagctgaattaaatccttctctaggccaggcatggtgcttgtnnnnnnnnnnnnnnnnnnnnnnnnnnnnnnnnnnnnnnnnnagctgaggccaggagttcaagaccaccctgggtaacttcgcaagaccccacctataa

SEQ ID NO: 328494 - DNA, 412 bp, Homo Sapiens
acccaagaaagtttactatgtgtaatgcaaggcacttatgtctctgcttaaagctacaagggaaaaaaatgacaagcccagtttttttcaagggaaatattttttctctgtgaaaggtcagtagtaaaagagctagtttaaagtcatggagtttttgccaaaaaccatgtctcgaggttttatgcatttctaatggctttgcccataggagagatacccagagtgggcaaacagaggctaaggaaaaaaatgctgttcatttagatcagaataacctcgctccaatctgggaaaccactcaaatgacacatacaagtctgtatggaaaaggcaaaacaaactcatggggtgatatggcggttatttccctttcaacatgtttaaaatggagggcagagtttttttaaatggc

SEQ ID NO: 328495 - DNA, 445 bp, Homo Sapiens
  misc_feature (74)..(104): n is a, c, g, or t
aattctttttttagaggaggggtcttgctttgttacccaggttggtctcaaactcccggcctcaagtttgcttnnnnnnnnnnnnnnnnnnnnnnnnnnnnnnntgacaccacactcggccagaaaaatgcctcttttgcaattagaattctagggaataccaccactatcttcctctctgttgaaaatgggtagtcgagttatcttgtaatagggattttgtctgtgatgggtccttagctctctcagcaaaagtagcaggaactcagagtaaacagtcgggggacatagtatacttcatgtatactcttccgaaattattcctctgctagggggagttgaggagtcaagctctcctgtaataggtatcttgtctgtgagggctccttagctctcagcaaatgtaatgggaacactgagtgttgggggacaagagtctactctc

SEQ ID NO: 328496 - DNA, 767 bp, Homo Sapiens
gcgggggcggggggggaagaaagtgggtttaaattttcacggtttaaggcacagaaccaatgtctgctgttctttgaataatgatagtgccaagtctacacaaatgaaggttagctgcttcatcatctgtctgagtagatgacaagcacctaggatttaaatatcagtatttctttccagatattagtttagcattttcaaaaactaggctccataaaatactgatgttctgaaatgagagttatgtaaagaattctgtataaaactggtaagttagggaaatactgcttattaaatcttcctctttaagataggtagaggctcaccatgtataggctcagggaagtcctgcagaaaagaaacccatttactgatgcttagcacagtattttccaaagttctctgaccatagaacccctttctgtacactgttaattattacctttagctctataagcgcacactttaggaaatttcattctaggcaattcaaggaaatagaagtttttccaatcaagttatccatctaattactcaagtctgccaaataaactttgaaaaggcataaagatcttataaatttaaaatattatccttatcactgtcttaaaatgtttcatcctgctaaaaattgtgtaatataagacatttaaatataaaattggatgaaattctggcaggtactagaattgagcagattgctacactttgatagtatatatggtttaataacaaattaacgagaaatgtttagctacatttctttc

SEQ ID NO: 328497 - DNA, 743 bp, Homo Sapiens
  misc_feature (177)..(201): n is a, c, g, or t
  misc_feature (222)..(494): n is a, c, g, or t
  misc_feature (701)..(701): n is a, c, g, or t
ggtaattttaaatggaaagttattgggggaaaagccatctttaacttgctcaggacagcatttaactatgccagtagaactcaaaccttgaacaccccatcagaaaaagttctggacacgcacctccaataattttgttttttgagacagcctgggacaagagcagaactccatctnnnnnnnnnnnnnnnnnnnnnnnnncaccaccaccaccaccatcannnnnnnnnnnnnnnnnnnnnnnnnnnnnnnnnnnnnnnnnnnnnnnnnnnnnnnnnnnnnnnnnnnnnnnnnnnnnnnnnnnnnnnnnnnnnnnnnnnnnnnnnnnnnnnnnnnnnnnnnnnnnnnnnnnnnnnnnnnnnnnnnnnnnnnnnnnnnnnnnnnnnnnnnnnnnnnnnnnnnnnnnnnnnnnnnnnnnnnnnnnnnnnnnnnnnnnnnnnnnnnnnnnnnnnnnnnnnnnnnnnnnnnnnnnnnnnnnnnnnnnnnnnnnnnnncaaaaccaaaaccatttgacttattccctattcaaacgaaaccaggtggcaagacccacagatatttctaaaacgtgtacaataataatgctccaaaaagtccctcggtgtctcccattgctggcagaacaaagatcaaactttacacacttcaaggttttctaccaactgcctgtgcctctccccctagtcttctcccttactggntatgtcctggaggtagactaaaccccagacaagccaagtaac

SEQ ID NO: 328498 - DNA, 764 bp, Homo Sapiens
taagtcataaaatattttcataggttttagagttgcagttgttttagttttaagaatttttgtgtgtctttcttttggtcatagaacaatatttgctgatattaattatttctgcctgagagccttgaggtgctagtactaaaaaatgtatagcgaaaacccacctggacctacagctaaaaggcaggcaggataaagatgttactcccaattcctctttccccccatagtattctgggtagtaagaggtatcccaccaaagtctagagctcaaagcctgtcctgtgaatgagtatagagaaactcatcagggctggggccaagctttatgagaatacagcagagctttctatgcttttctgtggaacaaagggggacagcacctagaaaataaaacagaaagaggagcaggacacctgtagtcctgtcagttgattggacagagaacatcagcgaacgaactgcaatatgatcaggcatatcctttgtggctactgctaaagattcgctcattttcagacggcattctaaggaaattgtggagaaggttgctgttgtaatcactctactttccagaattacctgtccttatggatttccagaagatcagaaagggttagcccaccctaaatcctatttaccttattaatttccctatgggaacagtgcctacaaagttggcactttttttcctcattcacatcagtagggaatcttcaactttcacaatttaactaatctttttctttaacaccctttcttag

SEQ ID NO: 328499 - DNA, 768 bp, Homo Sapiens
  misc_feature (40)..(40): n is a, c, g, or t
  misc_feature (116)..(116): n is a, c, g, or t
  misc_feature (458)..(458): n is a, c, g, or t
gtgtgatttgtctttgcaaatctaagaggaaaagcccaanctcccaagaaaccatttggtttagtgcggaaataagtcataggttaatttctcctttcagtgaaatactattcaanctgagtatttatattcttcccttcaccaaaatgcaattgaaaatgaacgtgaatcttgtgggaatttaagcattgcatattgtctagttgacagagtcatttataaaagttgggatattttataccccatcagggcttaattagggtttataaagatcactggcagttgaaacagaaatattgtattcttcctttccccaatgactttcccttgttcttttatgagggcctttaaaaactcatttaagtcttgcaagaagttaatcagaaagatagatactagctattctcccggggaatctactcctctgagttctccccctttcccccaaatgccttggngctgccataggcagagttagctccaaattctgtcccttctcctaatagagttttgaaaggaaattttcttaaacaagaaggtgatagtaaagacacacaaagctcaagacatgtgcgctcagagaattttagctgacttaggccaaaggattaaaaagtgaactgtttggtaactccacacagcggaaaatgctgacaaatggtatctctgcacgggagatattaacactctgactgcgagggtgcaaagttgaacagatggcacttctaaatgcaagactcatataatctatttccactagtgtttttt

SEQ ID NO: 328500 - DNA, 732 bp, Homo Sapiens
  misc_feature (253)..(268): n is a, c, g, or t
caagtgtgataacttattccaggaacctaagaaaaacaggcttagggactaagtgacttgtgtaaggtcaggatgttaactgtgactatcttttctgacattaatttaaaatccatgactatgaaatctcttcttctttgcccttattctaattatcttatgtgatctatattgcatctcacttataattttcttatgttataattttaactgaaacttgaaaagaaaagaacttcagagttttgtttatttnnnnnnnnnnnnnnnncctcttttggccttggtggtgaaactgtccctctagagaaattgtgcttgttgctccaggggttccagcaacctgagaccaaatctttatgtttttttcaagcttaggatttcctgcatcaacactgatagggtaaattcagatccctttataaggggaaagcctggaattctaatctctcatgggagtcccacatggagaccagcttccttttttcctgttctggtggatgcaattgtttgagtcccagtttcactgaaattgcagttctgcaaaggcttgatccccacctcacatctacccaagtctcatatccagtctctgtattaatactcaagcacccaaccattattttagggtccagtaacatctccagagttcctgggatataagctcacacacttgctgctctggcttttagttccctttttgttcgtggcattgggggtggggggaaggtccct

SEQ ID NO: 328501 - DNA, 744 bp, Homo Sapiens
aaactaccctattgcttgcaacacctctgggatggaagcacagcatttagcagcctccctggcctcttgctgctgtgtgactgtggctaagcacattctcctgcagtggctgggtgtcatcacaggtgagtctgaggtgggccttaccctgttaatttgttgaggatccagggagaccttgctctgtgaagcaccaatgcagggcctggcatgtagtaggtgccaatgatgctatagtaactggcaatcaggaagtagaagaaccggggtgggagaggaagggaccagctggtagaaccgtgaggtgatggttcctaaacagatttcacatcctgaagtcagaggtgactcaagagtgagagggaaggaaatagaaacaaaaacaggaggaagcacagatcacttcatgaaactgcataacggccagctctgcacaagtctctgctccctgcagatgggacacggaatttagcaggacacagttgtgatcctgaagaatgaaaagaaactgcttacgctgggcctgatgaggagaggctcagaacctagccctgttgggtcttaagagaaaaggaagcatttaatcacttgctgagaaaatgaaccatagatgctcaggctaaacctggatgcagaattaagtatctgaccagcacagtctggagctgctttctaagtcagatgagcaaaaccaccattaaaaagcagccctgttccaaccacagagaaagcacgcatggcatt

SEQ ID NO: 328502 - DNA, 776 bp, Homo Sapiens
  misc_feature (14)..(14): n is a, c, g, or t
  misc_feature (633)..(633): n is a, c, g, or t
  misc_feature (717)..(717): n is a, c, g, or t
atgcagtgtgccgnggtgcatttttttaaattaatgtctttgctgtttaaatttattcaattttattgtgttttttaaaaagcagcttatgccacaagcacaaatgagctttctcagttttcaactcaaaatattatatgaaaagatggatatgtgtgtctgtgtgggaggggtgtgaattggatgacggttcttagggtattacagaattcagccagtggtggaagtctaaggttcttattgaatggttcaacttctttatcaaagaagttccatgaagatctttgataacctgtttaaatgtacagaatttttcaaaagccactgtgaaaagcagtaccataaagttattttttaactaaaatctgtaggaaagtgtttccaaaagagttccttttttcttcttcgaagtaatttctaaaagttgaaaacataggcttataaatctgaataaattagtgaattcatacattttagagactatcaaatatatccattattaacattcaataataatctctaaaggggaatgtccttaaaaagattgatagaaagattaatttaaaaactgaaaaggaaaacaagacaccaccagttagccagctggagaacttggacttttgcattagtagngatatctgctccaaaaagaatgcagttcgaggaaatgttgcatgtggcttcaaaatagcagtgctttctgctttgctctcttgnattcattttcagcaaacatgtattaagcaattattatatgtaactcatgtggtgattcc

SEQ ID NO: 328503 - DNA, 261 bp, Homo Sapiens
  misc_feature (96)..(96): n is a, c, g, or t
  misc_feature (196)..(196): n is a, c, g, or t
accaaatgctgttttaaaaaatgtataaatcttaatcccacttccccttccagtattgccatttgtttcctgtagagcaaacctccttggaagagntgtatatactcagcctccaattcttctttacttgaacctactccaccaagactattcttgtcaagacagccagtgacaccagcattgccaaatccagtangctatttttcagtcctcatcttgcttgacctatcagcaggttcttgttacaactgacactcctgt

SEQ ID NO: 328504 - DNA, 679 bp, Homo Sapiens
gatcaacactggcagcccgcgtgcgcaggggagtgctcagtaactgcacactggtggaactgtccctgcctcaagctctgggaggggcggggggacagcccagcaggccagcttcttacccatattgtccactcctcgcgggatgatcacatcggcatacttctttgtctgtaaggcacaaggggggttgttcctgtgaggacttttcccttcaaagttgattttaagatgctcagaaacagatgcaaacagcaggaggggcggccctggggtgcctcagaggtgctggtgtccatcggcaaaatgggggaacacagactcagtccatcagccgaggtgtgagaggccatgatccaagaagtgaggcaagaaagtgcagctgaggcagccaaaagaaagtgcctcttccagtgtccccattccatcacagaagacagcccccttccagtgttcccactccattacaggagacagcctggctacgctaacgactcaattcactgggccaagctaagtgtggcacttctacaaagtgtgacattgttcctctggaatcatgaagcttctgcaaataccctggcacagcaacaggacagccgccgccgtgcataattactgcaggcagagacgctgatggtaacttactccctcatccaaccactattggctcaatgctgac

SEQ ID NO: 328505 - DNA, 369 bp, Homo Sapiens
  misc_feature (295)..(295): n is a, c, g, or t
  misc_feature (320)..(320): n is a, c, g, or t
  misc_feature (328)..(328): n is a, c, g, or t
  misc_feature (338)..(338): n is a, c, g, or t
  misc_feature (344)..(344): n is a, c, g, or t
  misc_feature (359)..(359): n is a, c, g, or t
cagctacatacatttttaagcatattttaaccctgtgccgcagatcaacactgggcaggccgcgtgcgcaggggagtgctcagtaactgcacactggtgggaactgtccctgcctcaagctctgggaggggcggggggacagcccaggcaggccaggcttcttacccatattgtccactcctcgcgggatgatcacatcgggcatacttctttgtctgtaagggcacaagggggggtgttcctgtgagggacttttccttcaaaggtgattttaaggatgctcaggaaacaggtngcaacagcagggaggggggcggccncgggggtnttcagaggtnttggtnttcattcggcaaatngggggacaca

SEQ ID NO: 328506 - DNA, 1039 bp, Homo Sapiens
gcagcaggaagtggttttattgctgtgaacacagggcaataaagcttggcaaaagttgcagggttagaaatctgaatctttctttgctgtcttccctattcccttctctcgaaaagtacagaactacaaagcagaaaataatcttatttctttttgtctcaactctggtctggcatcctaggcactcgaattctccaaacacctttcttctttcttctacgggaacaagaaaatcaacaaaagaaaagaaaacgtggatgcaattgtaacagaagctatgtcaaatgaaaggaaatgcagtggatgccttagagaagactatctaagtgtacaggaaccaacttgtaggggggatcgctcttctgaggggggtcacaggcaacaatgaagaatttgtactgggcagcagcactatagcggcactggggatactttcctgaagtgagtctgcagtcagtcatgttgacaggctttgagctctggtggcagttgtgctgacgatttttgcagacaatgctgagcaaatcacagacagcagccacattctggaaagagtcatgcagaaaggtattttgatgcttacagtgctgggtataattgttgatgccactcattgccctgttgcattggagaggacttggctgtatatgctgaatttcaaaccagtgagccttggtgagacgcttaggccaagcatgaagtggacacactggtccccatagaaccagcagcagtaaaagaagaggaaagcatagcaccatcttttctggtctcagtgttggggctccttgctgagaaccagaggctgtgattagtccaaagctcagaagctgttgtctgcctttcttctctaacccttcgagccctgtgtgtatagggaaggggaagaaatattctgagctttcagaaggagaatcctagggtttggcagattaacttcttgtgcagagtctggattaaactcttagactttcacacctgttctttaaaacagtatcattatcacatgtatacaaggctaaaccaacttaaagaaaca

SEQ ID NO: 328507 - DNA, 725 bp, Homo Sapiens
  misc_feature (68)..(68): n is a, c, g, or t
ttccttaagtatgataaatctaaagctcttgataactctgtaagtaagagcggtaactattatatttncaagccgtgggaaattacagagtccccagagaaatccagcaagttggtacataccaaggaacgaaagcaggactcctagttgcagtgtctcatttcgctgctgtgtgaggaactgtctataggcttctatcttttttctttgccactgagtcagttttacttaaactgttgtgtgtgtgtcatttttattacatttgccatgcttaaatgatctctataccatcatttacttagtaacgtatttttttaaacctttcaacttgtcctaattattagtatctataacacctttgttgtctttcttatattttttctaattcacattaaaacaagtgtataactattaaaatacaaaatgtttgcacaccacctaacactttgtgtagcactggtggcacacaccccacactgggggaagttgtggactacgtgagcttcagttctttcgccacagtgttgaattcatgcttgtgaacacctacagagctgggaactgaggatgcggcagaaaataagcagaagtctctaggctggtgtgggagagtacacagatcatggcagtacaaatgactgcgatttatgatgggtgccacaaaggaaaagtataagagttgcgaacctatggatataaaaaacatgaaacaggcccagtagctc

SEQ ID NO: 328508 - DNA, 608 bp, Homo Sapiens
  misc_feature (351)..(369): n is a, c, g, or t
ggtggttgcctgtttcggccatgtatccactgcgaagtgttcatttagggtcacatgtataagtagcagtctatgtgattgttagtaacccctgaagctgtgcagtgcctgaagttaaattccattactcctaatgcaggattctggaagcctgagagcagggaggaaagaaagctgaaaacttgctttctcagagcctcctccccctatcattgtgagagtgtgatgtaatgcttctcggtctggtgggctgaaaggattgtagtttgtgatgtggcgggtaaattgcccccacccctgggtaaattactccacccccctgagcacatccctggctctgagaggccttgnnnnnnnnnnnnnnnnnnncctcatttgtatcctcctgatttatgctgtggcatattggcatgagaaagagactgttcttctaaatctgttacaaagtatagtttagaaaaggcatttaaaatatgcaaatgggttgaattgtcatatccccatcattaaatatgtagacgtggattaaagctaattaagcataaatggaataattttgatcagaagggagcagtgttttttgttgtttcctttttaattaagcggcc

SEQ ID NO: 328509 - DNA, 434 bp, Homo Sapiens
ctccatgtatgtatattttctcaaggcatctgtcctgcactagactttggcttgtctttccaggccagcttccagaggatgctttggcagttttccctctgggtaaccaagcaggctgcagccagcagatggcactgcagcagaaaggggcagagtccctttaggcccttgacaagcacggcggattagtaaccgtataatttaaccctccagttagccttggaggactcggtgtcgcacttccgcccgaactctaataaagcgggccgagttgtgtgcaattaaggatttcagtatgcaaatctgaatctgtacttttgtctcctccaccccacccccatcattagactggcaatgtcttttgtcacgttgtcaaagtgtcctcagagaagcggtgtctagatatcgccgatttctggttaaagtggctgaag

SEQ ID NO: 328510 - DNA, 773 bp, Homo Sapiens
  misc_feature (718)..(718): n is a, c, g, or t
atggtcacatgacacgttttctgagggggggtggaatttacctttaaaaagcagtgacccactacacatgctagaacaaagtgtccaccatagggcattaccgtgatgatgcagttccgtggttttaggacagtgtcctgcttaacagggctctccccttctcaggggcttgttggcttgcctctgatttgatagcagaactggaattgagaatctttaccccttaaaccattaaccgtaacatcaatttttgttttgccttggttttgttttaaaataaatttatcctgcaaaggaaaaaaatttcattcagtggggattatgaaacaaaactgtgatctcttaaaaagcagaataatttgcatcaagggaagacacttagctatagaataacaaataattggagagacccaaatacagctgcatatgtattctgattctttatagacaggactaagacccacacaggattgaaagtcatgtaaactttacactgtgctctattgtaaaatattaccttctgcatgtattacatcctaaaaattaatagagaaattaaagaaagcaatagaaaaaatgtttagagagcaagggtttttgtaatctgaagggaggatgagaaaaaacacttatcccattcatggatgatgatgagggggaattatgttttaccacagctttatcttgagaaatgatgataagcataggttggaattgnagacaatttagatggctaaatggtagacgatttactatcttattgagcaaatatt

SEQ ID NO: 328511 - DNA, 661 bp, Homo Sapiens
catacacatacatacacatacaaacatagtgcaaaaagatgtttcagggaaaacatcagtttacaacataatgtctttcatgactcaagtaaaagctcacaagtaatttcttctgaaacccagatcactgaattacaggtttgcctatagatgtaccaggtcaaaggctgtgccagagagaatgaaatactaattattttcaggctgataggttcagttcctgcaaagcctgtaggtcttgctctaccctttgactgccttaatcagctgccgagcttcatgccattgtttacaaggggaattgggtgaataaatgtagacagattacagtaaatccacgttgcctgcaaaagtgactaaggtgtatcctttactgataaagtaaggatgaaatgtggaaacatataattaaattataaattaccaggcttttgtgataattcatatgcttttaaatattttgaacctaagtgttaccctcaaaatgttttaaaatataaaaatcaagaaatagagcaagcaggaaatgggattttaaacattttgatttcaagaaatagaactatcttaaatatgatgctgaaacaatctgagaggcaggagataggactcaggcaacagagatccgaggaaatatatatgggcattttgtggttcattt

SEQ ID NO: 328512 - DNA, 499 bp, Homo Sapiens
  misc_feature (332)..(442): n is a, c, g, or t
cactttaaaatatgctatttactttttttacagttataaaaataatacattatcaaaatagacaacttacaaaacacaaaaatccaccaagggaaacacagcaaaggcccctgatcccaccatctagaaagaacgagagtctttctggcccgaaggcaccagctctgatgaaggcacaatgaggagatgccagcacagacttccccagacctgaggtgacgctacaaacgagcggtgcacagccacacacgcaggtttagagttcgggaggaggagaccctaagtcctgtcttcaaaaacaaaaagcaggccgggagtggtggctcatgccnnnnnnnnnnnnnnnnnnnnnnnnnnnnnnnnnnnnnnnnnnnnnnnnnnnnnnnnnnnnnnnnnnnnnnnnnnnnnnnnnnnnnnnnnnnnnnnnnnnnnnnnnnnnnnngttacttgggcgtggtggggggcgcctataatcccagctactagggaggctgagaca

SEQ ID NO: 328513 - DNA, 628 bp, Homo Sapiens
gttttctcttggtggggttgatttctgagttggttccatcatgggttggttatctttatcttccactctagactgtcttccttcctgtccactcatctgataatctacatgccccattcatcactaggggaacccgtcacagggaagggagtgggtgaactagcataagtggaatagctaaattgagaagactccaaaacttatgccttgctgcatacaaattgttagcaatatccttttgcttattaggatattctgaattaatatatagatgttctaacacaaattcatctctttagcgctttgctatctctaaaatagagagggaagaagcattgttctatttctcactgaaaaaagagtattacagaaatgattttagaagttttaaaagtgctattgaaatgctattttaaatacagaaatgctattttaaacatggagaattaaagtccagagccatatcatctagcaatctaacaaaaggaaacgtaactttgggctttgaaaccagactatgaacagaggctagttctctattttaagcagtgtcttccatgagtgggtatttttatattgctatctcccccagtttcaatagcttattagtaatctaatattttttttc

SEQ ID NO: 328514 - DNA, 420 bp, Homo Sapiens
  misc_feature (16)..(16): n is a, c, g, or t
  misc_feature (22)..(22): n is a, c, g, or t
  misc_feature (39)..(39): n is a, c, g, or t
  misc_feature (54)..(54): n is a, c, g, or t
  misc_feature (93)..(93): n is a, c, g, or t
cttgggttaactctgnaagggnccaaggaacaggggtcnagtcaactgaaagcnacaggccaggaacaccgcagttccgaagccggcaagccnactacacgaaaggccctccctggttggacgaagccgttgattttgaggaagagtttgtcatcctcctgcctctgctgcagctgccgctccaactggcgccggtagcagatcaggtagagcgggaggcagaagcccagcaggctgagaaggagcagccccacgttcacccacagagggtctccctggagaggacccatcatggccagaaacagcggctgctgcagaagggcgaagagcgcgctgatcagagactgcagtcccgtgaggctgccgaactgggtggaggggtacacggcagcgtacaggcccccgacagcggagtggatg

SEQ ID NO: 328515 - DNA, 761 bp, Homo Sapiens
  misc_feature (748)..(748): n is a, c, g, or t
gggtgagcaggggctgaggcttgcagggtttgacctttccccagggccctcatcacctcactgggatgtgggcgggaggggagtgggtcgtctcaaacacctccagcagtcgaacatcaaaaagggggtccaactcttggttgcgatttctttggctgaagcctggactcctagccccacgggctgagggaaggttacagctggtggttggatagacgccagtgcttgccccagagctgcaggggaagaaggtggcctgaacctcagggcctctgtgtccagttcaggggccagtacagcagcatcggtctgcgaggggtatgtgttctagaggagtgaggggacagacaggggagccccagaggcatccagtggctcgaatggtgggaagggccctaagaggggaggctgggaggggacaatcccaggtggcaggggatggccgcgatgaggccctggggtggagcccaggcagggagcatccaggggaagccattgtgggtggggactgggaggagagagggaaggctgggcctgccctggcgaggggtggtcagaacatcgctcggtgccagacaggcaggacgcagcgggctggcctgcggggctcaactgactgccccccggggccgagcacgaaagggagagttggagggcgcttcctcaccgggtgttgcggtgtgagcggggactggtgagtgtgtgctgtcttcagagagagaagagcagttttcagggtgagtagccnttaattcttccag

SEQ ID NO: 328516 - DNA, 763 bp, Homo Sapiens
  misc_feature (59)..(59): n is a, c, g, or t
  misc_feature (186)..(233): n is a, c, g, or t
  misc_feature (494)..(494): n is a, c, g, or t
gaaactgagacttcagagaagtagattgatttgctaatgtcataaaattggttaataanctccccaagtcttctgaatcctactccaacaatatgatcatattgaaatatttcccaaaatgataagtttcgcagcccccatgtgtttaattgaagaatcattcacatcagcacacagcattggaannnnnnnnnnnnnnnnnnnnnnnnnnnnnnnnnnnnnnnnnnnnnnnnttcctgggagaataaagcacatctagaacaacttaaggaatacagattctgagtcataagaaatctgggagaattgaaaagtgtcatttctgaacaagaggtgctcaattaagaaaaaatccaaagacatatctaaatcatttaaaattatatagaaatccccacttcaccagccattagaatggctattcctttttaaaatttaacgggaaaataacaagtgttagcaaagatgtggagaaactggaacacttgtacacntgctggggggaataaaagtaaacatagaattaccatatgatccagcaatttcatttctgggtatacccagaagatcagaaagcaaggactcaaacagatacttgtacacccatgtttacagcagcattattcacaacagccgaaaaagtgggagcaactcaagtgtccatcaaccaattaatggacaaagaaaatgtggtatatacatacaacggaatattactcaaccttaaaaaggaaagaaactcttatacatgctgcaacatgga

SEQ ID NO: 328517 - DNA, 311 bp, Homo Sapiens
agagcggaaaactctgtctcaatcaatcaatcaggcagtaggtgtttatctggggtaggcaacctgtagttaaggcattttcttgtaagatccttttcttgattggaaggatgtcagagatatggattagactttgttgggaaaaaaggttttgaatgtatgtttgatattaaaacattatgaataaaatgacatatcacagatctgcatcataataattcagtgcctgatgggagctgagaaggtatacagggtttagatgacacaaggttgacacgagttgaaaattgttggccgggcatggtggctca

SEQ ID NO: 328518 - DNA, 709 bp, Homo Sapiens
  misc_feature (46)..(185): n is a, c, g, or t
  misc_feature (208)..(217): n is a, c, g, or t
  misc_feature (679)..(679): n is a, c, g, or t
gaacggagatgtgcttaggttaccttgagtaattagagtatatttnnnnnnnnnnnnnnnnnnnnnnnnnnnnnnnnnnnnnnnnnnnnnnnnnnnnnnnnnnnnnnnnnnnnnnnnnnnnnnnnnnnnnnnnnnnnnnnnnnnnnnnnnnnnnnnnnnnnnnnnnnnnnnnnnnnnnnnnnnnntggcagagcgagactccatctcnnnnnnnnnntaaagtatatacctactttgcggaaaacagaaactttgtggttgctgaatactgagacattactctcttttctggtgactcattctggtaattcagtttatctcttctgataattctaatgcctatcttttcccactgttaataaagctatggcttaattggtggcctctgtcttgtcatttctgaagcagtagttaagtgcatggacataagagtcacttagcctgtgtttgtattgcagctttgctatttttagctagctgtctccacttcaaagtagaaataatacttttccagatttttaaaattatttgtgggataacatctagtacctggcacatcatacttgtaacaataaatagatgaaaatacggtgtatgttttcttgttcctatccctgtttctaaacataaggaagaaatggattgaatgggtaacttaccaggtaatataaggtgcctnctttggggtagaattcttatagtaggccgg

SEQ ID NO: 328519 - DNA, 327 bp, Homo Sapiens
  misc_feature (290)..(290): n is a, c, g, or t
tgtccggccttggctgaaggtttgactgtttgcacccacagtcccatgatgtgtgtacttgtatgtatatatattcacatctgaggactgacatcatttcgcagaccgggaaactaagtgtgaggagtacattttaaaataatttttacattatatattggcagatcatccatgtgcttgtagaaggtattatattggaagctgcaggtagacaggaagactgaaagagaaggtagaacctgcttggatcccagtctgtgcatacctaaggagttgagttggcaattccntgaaccaaaggttctggtgttcagaaatatctccagt

SEQ ID NO: 328520 - DNA, 776 bp, Homo Sapiens
  misc_feature (54)..(54): n is a, c, g, or t
  misc_feature (142)..(142): n is a, c, g, or t
  misc_feature (227)..(252): n is a, c, g, or t
  misc_feature (380)..(380): n is a, c, g, or t
  misc_feature (540)..(540): n is a, c, g, or t
cctggagtttggtggccaagtcctagttaagaataaaatgtagagtccttttgntgtccgtttgtcagtgcaaatatttaatataaatatttctcccagggaccctatagacttgaaaatagtggctatagattgcagacanttttgatatgccagggatccctgaccaggaataataagaaattaccataatttctcaatttctagcaccacacaaattgcatctnnnnnnnnnnnnnnnnnnnnnnnnnnggggcgggtttacctacttctcagaaaattgcacagattcaacaagaaagaataaatagtaattaatgtgttccttaatggctggtgaataataataaaatgttaactaaaacaaaaacaacttttanttttaaacccactatcacccctcaccaaatatttaagtgataaagtctaaactgacagagcagcaaattagtacagtcctttgggagggaaatatggtgatacatagtaggaagctatcctgttatttgttgcttttatttttaaatgacagaaaagtanacaaaatttaaaaaggctatgtttcataaatcacaatacattcttacaatatatactatgtaaacactttaaaaatgagatgcttgtgtgagaactaactttgaaggaggcgcaaggtatttacaaattattctattgaatgatagcatttgtgcaacacctatgtactagggctgtgctgactgcttgtacacttgctgtttaattttacaatagccttacaaggcaagtggcat

SEQ ID NO: 328521 - DNA, 814 bp, Homo Sapiens
  misc_feature (62)..(108): n is a, c, g, or t
  misc_feature (781)..(781): n is a, c, g, or t
  misc_feature (786)..(786): n is a, c, g, or t
tcctgtttcacttggttcagtaccacatgggtgaacactcaatggttaactaattcttgggnnnnnnnnnnnnnnnnnnnnnnnnnnnnnnnnnnnnnnnnnnnnnnnagcacagtatatttccctgtttcttccacagtgcctaataatactgtggaactaggttttaataattttttaattgatgttgttatgggcaggatggcaaccagaccattgtctcagagcaggtgctggctctttcctggctactccatgttggctagcctctggtaacctcttacttattatcttcaggacactcactacagggacccagggatgatgcaacatccttgtctttttatgacaggatgtttgctcagcttctccaacaataagaagcacgtggtaaaacacttgcggatattctggactgtttttaaaaaatatacagtttaccgaaaatcatataatcttacaatgaaaaggactttatagatcagccagtgaccaaccttttcccaaccatacaaaaattccttttcccgaaggaaaagggctttctcaataagcctcagctttctaagatctaacaagatagccaccgagatccttatcgaaactcattttagggcaaatatgagttttattgtccgtttacttgtttcagagtttgtattgtggattatccaattaccacaccatctcccatggaggaaagggggacgggtgaggtacttagggcgctaggagggaggcaggcccaggtcgggttagttggggaggcttgattggggtnccccngtttaggcctcttgcaggggtgttgggg

SEQ ID NO: 328522 - DNA, 776 bp, Homo Sapiens
  misc_feature (128)..(128): n is a, c, g, or t
  misc_feature (162)..(393): n is a, c, g, or t
  misc_feature (468)..(520): n is a, c, g, or t
  misc_feature (530)..(592): n is a, c, g, or t
  misc_feature (623)..(651): n is a, c, g, or t
aagaaattgagaagctaattctagaatttatttggaaatgcaaagaacctagattacctaaaacaactttgaaaacgaatatagctagaggactaaaactgcctcacttcaagttatagtaaaacagngtggtacaggcataaagataaggtaaacatatcnnnnnnnnnnnnnnnnnnnnnnnnnnnnnnnnnnnnnnnnnnnnnnnnnnnnnnnnnnnnnnnnnnnnnnnnnnnnnnnnnnnnnnnnnnnnnnnnnnnnnnnnnnnnnnnnnnnnnnnnnnnnnnnnnnnnnnnnnnnnnnnnnnnnnnnnnnnnnnnnnnnnnnnnnnnnnnnnnnnnnnnnnnnnnnnnnnnnnnnnnnnnnnnnnnnnnnnnnnnnnnnnnnnnnnnncaagaaaatctttgtgaactcgggttaggcaaagattccttagacacaacaaaagctataaaagctaaaaagagnnnnnnnnnnnnnnnnnnnnnnnnnnnnnnnnnnnnnnnnnnnnnnnnnnnnngtttccacgnnnnnnnnnnnnnnnnnnnnnnnnnnnnnnnnnnnnnnnnnnnnnnnnnnnnnnnnnnnnnnnagtctgggtgagaaagcaggactccatctcnnnnnnnnnnnnnnnnnnnnnnnnnnnnntccaatggaatctcccctaaaagctattaaaataagtgaatttagccaagttgcaggatacaagatcaatacacaaaaatcaacttcatgtctatagagtagcaatgaccaaatactgaaattct

SEQ ID NO: 328523 - DNA, 742 bp, Homo Sapiens
  misc_feature (265)..(613): n is a, c, g, or t
gttctgcctcagtgttgggaaggccacaaggagagggtctctatgcaatccctgctactttcccctattcccagttggtaacagtgtcatattgtttttttaagaatagtaagaaatttgaatttttagatataatcactgatttttaaaaggtcacatttttattaaaagttttggttaaataccatgagtctgttgatgaagagttaaattctataaaatatttcaagagatttattctgagccaaatatgagtgaccatggnnnnnnnnnnnnnnnnnnnnnnnnnnnnnnnnnnnnnnnnnnnnnnnnnnnnnnnnnnnnnnnnnnnnnnnnnnnnnnnnnnnnnnnnnnnnnnnnnnnnnnnnnnnnnnnnnnnnnnnnnnnnnnnnnnnnnnnnnnnnnnnnnnnnnnnnnnnnnnnnnnnnnnnnnnnnnnnnnnnnnnnnnnnnnnnnnnnnnnnnnnnnnnnnnnnnnnnnnnnnnnnnnnnnnnnnnnnnnnnnnnnnnnnnnnnnnnnnnnnnnnnnnnnnnnnnnnnnnnnnnnnnnnnnnnnnnnnnnnnnnnnnnnnnnnnnnnnnnnnnnnnnnnnnnnnnnnnnnnnnnnnnnnnnnagagtgcctggctcttaattgattatctcctggatctggaaaggaaggaaggaaaacaaaggggaaagggaattctctatagaatgtgggtttttcccacaagagactttgcaggacagttcctaggat

SEQ ID NO: 328524 - DNA, 367 bp, Homo Sapiens
  misc_feature (140)..(201): n is a, c, g, or t
ccctgggcaatgtggcaaaatctggtctctactaaaaatacaaaaaattagtcgggtgtaatggtgcacacctgtagtccgagctactgtagtggtggtgggggaagagggggttgaagcaggaggatcacctgagccannnnnnnnnnnnnnnnnnnnnnnnnnnnnnnnnnnnnnnnnnnnnnnnnnnnnnnnnnnnnngagaccctgtctcacctgtctcaaaacaaaaacaaaacccaggtacttaaagatacgcttatatgattgggaaaggtcttcaaggtcgtctagtttaaaccgacctcttccgaagctgtaaacttaatgacttaatccctttaactttgttaaatttcctcgtgcc

SEQ ID NO: 328525 - DNA, 746 bp, Homo Sapiens
  misc_feature (30)..(30): n is a, c, g, or t
  misc_feature (634)..(674): n is a, c, g, or t
ggcacgagggctaacactgtaaacctcagnatagatatgtcactgcagactggcatatggaatataaatgagatataaaagctgttttttccaacgtaacaccaggtgagctccttagaattaaagaaaccaaaaccatgctgtgaaaaaaaactttagatcctattgctttctcctaattacaacaagagtaacatgcaaaggatattatataagagggatttttaaaagacacttttagccttaaataaagcttcactgaggtttcattgccacaaggattgaactcaaggtaaaaatagggaatttgagcctttgagcctctgtccacaatgttagacattcaaggtcctctccctctgtgaccaacttgcctggctccatcttcaacaccaccagtactttcaggcatggccctcattttcctgcatactcacgcctctcaggctgttcctttggtctgtaacaaccttctcattctgcaagttctgtgttcctgaatcacaactatccttcaaggccaatctcagataataccttctttggggatattcgttaatctcaaactgacctgtcttccctctgtctcaatttttcttatccctcttataccttttattctttaatgtaaacnnnnnnnnnnnnnnnnnnnnnnnnnnnnnnnnnnnnnnnnngcaaatatatagtctcttttattaaatggcaaaccctttatgcatagagatggcaatttatcttttcatagt

SEQ ID NO: 328526 - DNA, 496 bp, Homo Sapiens
gattcctcttaattctagcaagcctcgtatgttcgcatcattcaatgctttccgaatccaatacccagagccccacagaccagctacgtatgctgtttaaaccctagaactgtcttgttcccgcaattcaatcaaccctcactgaacacctttaagaggtggaaacttaagggaaagaaaactgtagccaacacacgctgtggttctaagtattagaacgcctcaaaacaaaggaaataacggcgccgtaaatggttgcccgccaatttctccttcacaatcccgtggaaatgcgatgtccacaaaatcatcttaacgactttgtggtctgtcctaatagaatactgatacagatttttgcctgggaagccctttcggcatcagagaaaagcgcttcatttaggccaaacacaaagccctcacgcaatcccctccacctaacgggcccagaacttagtcggccttggattagtttccatcttaagaggccccaaag

SEQ ID NO: 328527 - DNA, 699 bp, Homo Sapiens
gctatttaagtgatggacagcaggtgaccttgctttgtcagctggacctgaggtgctggtggaactctcagaaagggccggaggcccgcccgacttgttttcaaatccaggggaggggccagtgggggaggagtaaccacttctgagcacctactatgggcgcagcacgttgtgggattgcttgcattcagcctcactggacccttgcgtccacccaggaggtggcaatgttacccccagtgttgagacccaaagggggacgtgacttgtccacagtcacagaaagtggggagctgggatttgaacccacctctacctggtctcagtccagggatcttcttagcccaccttcccaggctgtcttggagctccacctctaatccaaagggatgcagatgtttatttgacaaatatcagtgagcctccactatatgctgggcagtgggtagtgaccggggagtacttcgttttccttttcagtaaaaggcctaataatggcacctgcgtgatggaagtattgagcagaggagtgtggttcctcctggcctcacgggcactaaagaggaaggcaaaatctatctcaccatcactaatgctatggtgcatttctttccagcctttccccataggtttttcttctgtggttaagatcatgcagctgttttaatctaaccttctatttggtttaatattgtaaca

SEQ ID NO: 328528 - DNA, 678 bp, Homo Sapiens
gaacatatttataataactagtgttaaagtcattttctagtaagtccaagatattaacttcctcaaggacagcttctattggttgcttgtttttccctgggtatgggccatactttctagttttgctctgtgtcttataattgtttttgaaaactagacatttaaataatataccaactctggaactcatctcctctcccttagtcccaggtgcattgttgttgctgtttgtgtagtgattttctaggactaagtctgtaaagtctgtattctttgttgtgtgtgatcactgaaggatctgctcagttagtttagtggctggctaatgactgaacaaagatttccttaaattccttgcaagtttcccaacctttgccagaggggctgtgtgagtttgggggcatgtatttgaatgcttcaacaggcaatttatgactttgccttagctttcacactctgcttacacagagcctcaagatcagccagaggtgagagattaggaccttctcaggtctttcctgggcatgtgcacagctcttctcatgcatgtgactctctaggaatattttagagcttttctataccccctatgggattttgcttttaagttttttgggcagccccttgtaagcttcaattaatattgctatttccagcaactatgatgttactcgtgcc

SEQ ID NO: 328529 - DNA, 695 bp, Homo Sapiens
  misc_feature (623)..(623): n is a, c, g, or t
  misc_feature (665)..(665): n is a, c, g, or t
tatcttgtaggagggagggggaaagaatcaactcggagagcaagttttaaatggcgatttccagggcaccatcccaagagcttctacttcaagtggtctggagtgagagcctagaatctgcatttttaataagcatcttcaaccctgggtgattctgatgaactggggcatatactgcacttgaagaaattttacagttaaaatatactctgaaaattatgtactcttttatcagatgtgtatatctagttgtaaagaaggttctgaaacaaggcacgaaaatctacttgtttaggaggattgagcacactgacattgtatataacactttgtaggctcttgatcttgtcacttacagacttcagagtgatgtttaaaaagattaatattatactaaacctaacttgactgtagctgttatacttcctctgttaagtgtatgaagcattcaatattaaattgacagttctggtagtctagctacgtttcagactttcaggaagtcacatccgtgtataattttggccaagacacccctccctaattctggtagctcaatatatatatatactcttcttgcttagtttggtttagtctttgtattgaaatgatattcataaagntagctagccctctgggtaaaatcaatacttatcccaaaaggnttcggggttttttttccctaaggttggttt

SEQ ID NO: 328530 - DNA, 398 bp, Homo Sapiens
  misc_feature (371)..(371): n is a, c, g, or t
gagccaccgtgcccccgcccatggatctgcttttaatgcctggttttaggagcctcttagctagattgttggccacagttattttcactgaggttacatctgttgagtgtctcacttggcagagattctgaacatcagtttgtgagtgctcaagcatgcttgtctttctacaagtggccccttcactttactgtagagaactagaaatgagagaaatgggatgtgtcatcactgtatttgagagttcattggtgaatgagatatctagccatttttctagaactatggctaagttgaatttaatatttaagatgaggaaaaacgaagactggttaaaccattaagtatttcactgtttgctgtttgtttgntttgttttttaaggcagttctccagtt

SEQ ID NO: 328531 - DNA, 763 bp, Homo Sapiens
  misc_feature (423)..(443): n is a, c, g, or t
  misc_feature (681)..(681): n is a, c, g, or t
  misc_feature (728)..(728): n is a, c, g, or t
cccacatctgttctattcttcatgcttcattctgtctgtagtaattgtctttttctgtttcatctttgtactgctttatcacatagttgtggatagacagttcgcctctttggtagaacatctgaagcctttactatgggaactgctcagtttgggaatggcctttgtgatgtagcttccaggtaatttccggagtagggggctgctgggcaggatcccttctgcctggatatcatgtatatttgtgtttcttaccttatggagtgggggttggggaagagtggctgggaaacagtgcataaccctggctccaggaggctggctagggtttgttttccttcttcattcctgccagccctgttagctaggggctgggttgtctgtccacccttactggttccagtcaccttgcacagcttcttnnnnnnnnnnnnnnnnnnnnngccctatacttctgtttgccttgtctgctcctctgatcagaccatccctttccaccttgagccaacctgaattcctcctccagctggtctgtgtgctcttatattgtatcctgctggataccagccttatcagactctgatgaggatgttaacatgcttctgtgagcttaagccaaaaaggagagtacaaatcagaccagaaaaagagaggtgattgactacaatagaagagaaaggnttcaacagtggatggattctgacagctaaaattccatcttttgaagngctggaatttccatcttaacaacttatttcttggg

SEQ ID NO: 328532 - DNA, 690 bp, Homo Sapiens
agtaaatgtaggcatgaaacatttttacaaaaattaattattaggtcataaagatgtcacaataaatacaaaaggattgcagttatatacatgttctctgaccctcaatacacctatacagaaatcaataattaataacaaaaagaaaactagaaaacttccatatttgggaatatttttgcccttttctcacatcattcctcctggcattttgtactaagagaatttgatttggtgttagagaattcaggctctatgaggggcatactttttggcccaatataactagtgggggtcacaagttaaaggagagtcatcaaatctactgtaaatatgggataattgatatttggagtggtcaaaaaatgtttccaagatcaaagagctgatagtaagttccagtagtaactggaactcatgaccccaatagtccatgatctttaagatactctgctaggctgcatctctcatatcctgtgagttgtatgtgtggtgatgggcaggagtcagctactttgtgctccattttgaagataaaaagacagctggtcctggaccctaagtctgtggactctattctcagtaaactcaatgactggcctgtgtaatttaagaaggccctgctctctacatctcagagctttttttcataacaaatgtctactctctagggggaaagattttaccaga

SEQ ID NO: 328533 - DNA, 481 bp, Homo Sapiens
aacagacgtttgttatgtaaacaaatgctatcaaccatttgttcacctagcaaacttttgttaagacctgcaaaggaacaagcaccataaaagcaccagggttaagatacttgcacatattatttcaatatactcttcatcattttagtacatttgtataacatactgcaattgctaacgcatatgcacatgctttacttctaaatcacattttagataatttctttctgtgcaagttcttgtagacctaatccaaagtatacttactcactctttgggcttcaaataatataacttgtctgctttttaaccatttttctttccgaatatcccactggaaagctggatctaacattggggcctatggaccttggccctgcctgaattctctttgagggccaagggccctccagcatcacagactgtctgagacaaaataattcatttgtgctagcccagggggaaatatgaatcacttggg

SEQ ID NO: 328534 - DNA, 826 bp, Homo Sapiens
tgcctgtttcaggtcgtctcggggaatacaattctccttctcttcagctttgcagcctgtgtcttttgtaagttaatggtatttgattgtggtcagagtgtgaggaaactgccctgcttcacaaggaaggtttttctgtacacccactagcctcttccaccgcgtttcaaattctggaactgacagctagaagcagtggtaggaggttgaaggattcaatggcaaaaccttaatcaaggaccaagtaccatcctctttgctttcttctctgggagttttaatgagcttgatggtttgtcataaacattggcccaagtgtggggacagattcccccactgttaaaattgttcttctagagaaagttagcttcctttaggacgcaatgctattttttttcagactacagagagtacttaaccattcttaaacttcataacttataagtggaaacctgttactctgaatatttttaaagcatgtagagatatttgcagggaagaatttatgtcttagggagagtctagataattaaatgttttgataagaacgtgttcccctttgcctcgtttgtcgtccaaatcagcaaagagccaaatatcaagccctcctctgctgttgcccctaacaagtctcttactaagtctgaccaggaaaatcgacccaatgtcattcagtgtagacttcaggggcagaaggaaagaggccgatgcagtcagtgcactggcccttctgcctccaggttcctgctatgttctggaggaagtatgctatagtacaatcctgaatttcatgcattaattcacccacgccgagccctatgcagtc

SEQ ID NO: 328535 - DNA, 429 bp, Homo Sapiens
  misc_feature (20)..(20): n is a, c, g, or t
  misc_feature (33)..(33): n is a, c, g, or t
  misc_feature (40)..(40): n is a, c, g, or t
  misc_feature (66)..(66): n is a, c, g, or t
  misc_feature (385)..(385): n is a, c, g, or t
acagagggtacttaacccancctaaaactccanaactaanaaggggaaaccggttaacccggaaanttttaaaagccatgtaagagaatatttgccaggaagaatttatgtccttaggagaagtcctagataattaaatgttttgaataagaactgttcccctttgcctctttgtctccaaatcagcaaagagccaaatatcaagccctcctctgctgttgcccctaacaagtctcttactaagtctgaccaggaaaatcgacccaatgtcattcagtgtagacttcaggggcagaaggaaagaggccgatgcagtcagtgcactggcccttctgcctccaggttcctgctatgttctggaggaagtatgctatagtacaatccntgaatttcatgcattaattcacccacgccgagccctatgcagtc

SEQ ID NO: 328536 - DNA, 453 bp, Homo Sapiens
ttataatttcattatacagtgtttaattttagggtttggcactttcacgtataacttttatacaattatcatcatatacaacttacgattattttaaatgactagagtttagtttttgatctgggttagcgttcatagtgcaaagttctctcgttccactcagttaaccccattttttggagggctctatgtcattttattttacttacgaatctttaattttaacctttattatagattaaagggtacacatacaggtttgttacatggggtagattttggaaggctgaggcttgctgtcccaatgacctcatcactcaaacagtaagcatggtacccaacaggtggtttttcagcccaggtgcccctcctgtctcacctgtctagtgatctccagtgcctctggttcatgtgaattcaatgtgtagctgccactttccaatgggaacatgc

SEQ ID NO: 328537 - DNA, 567 bp, Homo Sapiens
cgtagtagaaaaagaatttaatagacacgaggccggccacgccacatgggcgattgaagttcgtactcatcttattcaaagctcataggttagggatttttcaaaggcagtttgggggaaggggtgggggtggacaggtaacaggtgcttgctgctgagtggttggggcagagatgaaatcgtaatgggttgaagctgtcctcctgttgggctgaattgcttctgggtggagccataaggtccaggtggagtcatgggtgtcagacatgcaaaaaacctttgacagccccaagctgggtcttcatcctgagtctcaagatgcagtagcctcagtgaactcctcagcctccaagcattcctggggtgatcctcttggtggggcttgtgaatctgggagcccgttattctgtccttccatgtcgattagctgcaacaggagaagcaaacagggcaggatctatggcatgggcagggtagatgcagctcctcagatgaaccaggtgaacacagagcaccaagactggctccattagataagatgttgtggggtacaagccagaagacata

SEQ ID NO: 328538 - DNA, 445 bp, Homo Sapiens
  misc_feature (55)..(55): n is a, c, g, or t
ccctaaaggggttgaaactgtcctccctgttggggcttgaaattgccttctgggntggaagccattaaggtctccaggtggaagtccatgggtgtcaagacatgcaaaaaaaccttttgacagccccaagctgggtcttcatcctgagtctcaagaatgcagtagcctcagtgaactcctcagcctccaagcattcctggggtgatcctcttggtggggcttgtgaatctgggagcccgttattctgtccttctcatgtccactagcagcaacaggagaagcaaacagggcaggatctatggcatgggcagggtagatgcagctcctcagatgaaccaggtgaacacagagcaccaagactggctccattagataagatgttgtggggtacaagccagaagacataggtcagctgtggcaaagcatttttatttaacctcgtgcc

SEQ ID NO: 328539 - DNA, 531 bp, Homo Sapiens
  misc_feature (448)..(448): n is a, c, g, or t
  misc_feature (480)..(480): n is a, c, g, or t
  misc_feature (488)..(488): n is a, c, g, or t
  misc_feature (504)..(504): n is a, c, g, or t
acttggtcgttttaattatcttaaaggagaagaatacagtttctctaaactcaagcacttttgtggactaatccttgcaattattctttcttctttcccatacttgacatttaaagtgatatctcccaggctcctacactgttagtcacagaggtaccattcgaccccttgtgcctcttaccatatgtgaatgcttgtcagttgagagtaaactttcttcataaatttcacagttgtgggattgataaaaacagagaactctggttcctcattccttcctgctttctttcttggaaatgccattcatgatgggtcccttatatcactataggggctggctatcatccttcatccttatggccacttgcaaataggcaaccaacagtgtccttaggtgccagcacttccgggggatggccccttttccaggcggcaggggtcaggccgntccctttccggagctgtgggcatctggtctcntaaattcnggtttcctccttggcnggctggcagggcccttggttttggccc

SEQ ID NO: 328540 - DNA, 724 bp, Homo Sapiens
  misc_feature (405)..(405): n is a, c, g, or t
cgtcaggaggaagagaacacatgatttcagtctacagataaggaaactgagacctaatggctcaaagttaaaactaagtttcttagtgctgcatgggacatactagatcagaagcttctctagatacaaccttgaagaaaataaaattataaagtatgcttcagggaaaaacacctggccaaataatttagattgaaagaatacgtttttgggaagagcaagtacttttgaatgagagagagaacttgaattccctttggctactcatcagctgggtgactgacctacggcaaactccaaagcttcagttccctcatcaataaaatgaggcttcatatccacctctcactgttttgggtccgggagacaaaaaaagaatgtagcctaataaaatttactccatcngggatctcaaccttacaacagagcatgccatgcaaaataggaaaattcccaggagatttttaggaagcctatatacaaaagaacagaggcagagaaaacaaaaggaataaaacatgtgaggggagagttgctataacccaacaggagacaaaaagtcagacacagttattcgcctttaaaagaacagtgactttttgctgaaggagccaaggaaataaatactccagcctcactctcttttctccctctggtctccaaccaagcctcaagccagaggacatcagagcccacttgatttagctcttatagatcaacctca

SEQ ID NO: 328541 - DNA, 694 bp, Homo Sapiens
  misc_feature (334)..(343): n is a, c, g, or t
tgagggcagccctcaagtggggcctggcaagcttgtcatttgcaaataaatcaaaagaccatcattgcaggaaggagaaccaatgaatagagcttgctttgtcattctttgatgggccccacactcaagcccgctattaaaaatgaatgcattcaagagcctctgcattaagaacataaacaattaagggcacttgagttgctctgctgagagctgctgcgaagataggagagctttctccggagatgcaggcccctgcaatctgcctcacgaggagctagagaatgggagcaattagtgttgctatctgtgcccaagcagccttcagcacggnnnnnnnnnnccttcctttcttttaacccctccttgttttcagagaactgcgagtgtgaaagatgaggagtgaaaggatagtatctgggcccagttggagagagctcagatttagaatgctgcaggagctgccaagtgaggagatggaacataaaagttattatctgccagtaattggtgacttgtgttctgattagttgagccactaaagggtttctgtcatctggtactctttgttttgttttaatcacaggcttgaagaaggggcgagattacattgccatgggtggaataacttaaatgaatattgtgcgaggttttccacagaaggcaaatgtgttcctacacccccggtttgtgt

SEQ ID NO: 328542 - DNA, 527 bp, Homo Sapiens
  misc_feature (423)..(423): n is a, c, g, or t
aagctcatcaactatggttagtgttagtgtgttttacatgtggcccaagaaaattcttccaatgcggtccagggaagctaaaatattggacacccctgcctaggggaacttgtttcgtctacttggttagttgtcctaattgcattttacctgcagtccaaaggttattttagatgatagaactgcaagaaccccaaacccaaagaaagaatcgttgaagtggttgggagaggaggtcatttctgagatacatttccaggagaaatacaagtttgagagaaggagctggtagttactgtgtgcaagtgtttttctttgatggggaaggagtagttggcaaagggacaggaatctgtgtgtacatttcctgctcctgtttccttaaccaccatcctcagggcattctctgggcaccttggggtncgggtaagtgctctctactgccctcgttttagctgcctttatctcgtctatatggcactttctgcgtgaaaagacatttgctttacagggatgaaacggacttg

SEQ ID NO: 328543 - DNA, 1003 bp, Homo Sapiens
tgcccaaattgtaattttattaaatgagtggaaagaaaattacttcttaataatactgatatatgaggatttcccatattcttgacctgctgttaggcttttaataggcatctcatttaatcgcactacatcgagggtctgggcccagcacctcctatctccaagtctgacatcccttcttggacactactgttcctgtatatcttttgttatgtgcattcattaccttttgtaacatatgtgcactttgcttgctccgaagtctatggtatgcacatgtacctcacctacttcccttcactgtgatggctgatgatttttcccccagctttcgtgggctatgtcacatgtccaagttcattcctcgtaggtgctggaggtagtgatcaaaaggcacaaaactagagtccctgtgattgactgtgacccagcagaaagagtgcccatcacccaacctgtatttgcctgcaggtgcattcccatgtgtgtacatcaaatatcctggtcaggaaacctgtggatcattcttccatgaaataaatttgttctgttatggatagaagtgaaatagagcccctagtgtcatgaagaagaccacattagcacatcatgccactcttactattttagggactccacccagtgaaagtcagtgatgtgctgttcttgcttccctagcttgaagaagagtatcaagacttaatattacattcatacagtggctctatgatttgggtgataaataattgaatctgctttgctaatgtgagaaatagattattcagggtcactcaagccagggttccacttttcaaagttctaggtggtaagctagatcattaggaacccacttatttgtttacaaaatggaaattttcagtctttgtgagaatttgtcagcataacaatttgccaacagagactgttgattcagaggtgtctgtggcatgatagaattcacagcagcacagttttaaataaagttacacctttcagaaagcgc

SEQ ID NO: 328544 - DNA, 568 bp, Homo Sapiens
caaagataaataactcaatacgtattaaaattgctgacatgagcttttctttccccctttcttgtgtaaagtctattagaatttgctagtaaaatttaaaaaggtatgtgacatttcttaagataattgagaaagataaacttctttttcaggagggtccatcttcctgccatttcttgtgactggctataaattccatgcagtgctggaatgtgcttctcacagttagagtgctgagcacctgttttatttcacactcccttgattcctggggtaaatcccatctccgcagcatgggctccagttaaattcattagtggtccagatgtgtgtcccctgtcagctggccaagtaaccccactgtttatcgacaggttctcaggaatcagatagctcgcagtcggccaagaaggacatgctggctgccttgaagtccaggcaggaagctctggaggaaaccctgcgtcagaggctggaggaactgaagaagctgtgtctccgagaagctgtaagcctttcctagctcatcccgttgaaattggtgttgtctgtgatgtcactgatcttt

SEQ ID NO: 328545 - DNA, 787 bp, Homo Sapiens
  misc_feature (22)..(22): n is a, c, g, or t
agacccacggcccaagccctancctcaccggctgctctgacctctcctgctgtagcatgtaatgccaggctctcatatcctaagaactttatggctagcataggcataaactgattctcatggtatctaaagagagcgtagaaaaattcatttcactactgccttaaactgtattttacctttcatttaaattttctcactttcctaggtacggtattaggcttggaaaacattagtgatatctgaggtgtttgcctcccctgttggcaggtgatccagggagtcatgcagagggaggagaaataggggcagacaatctacatgctgggatgacaacctctggcacatttagagtcaatgtctagcaagttggctctccccctacttgtttccatacaggagtgtggaagaacgtaggaaaaagcggcttatttccttacccaaaaacaaattatccaggaaagaaatatgcattagcccatcaaaaatatgccaaattagaactacaatgaaatactgcttcacatcccactagggtagctataattatagagacatgataacaagtgcccagggaggatgtggagaaactggaaccctcatacatgccggtaggaatgcaaaatggtgcagctgctgtgggaaacagtttggcagttcctcataaagttaaatatagcaataccgtatgacctagcaatttcactcctaggtatatgtccaaggaattgaaagcaggaactcagatatacccatgttcacagcagcattattcacaagagctaaa

SEQ ID NO: 328546 - DNA, 465 bp, Homo Sapiens
  misc_feature (419)..(419): n is a, c, g, or t
  misc_feature (454)..(454): n is a, c, g, or t
ttggttaatcctccgtgaaccatgcactagatgaatgttttttttcattctgctctaatcatgaagttaactatggtatgttttataaaaaggagacctcaataagctgtgggagaagatggagacccacgcccaagccctaacctcaccggctgctctgacctctcctgctgtagcatgtaatccaggctctcatatcctaagaactttatggctagcataggcataaactgattctcatgggtatctaaagagagcgtaggaaaaattcatttcactactgccttaaactgtattttacctttcatttaaattttctcactttcctagggtacgggtattagggcttggggaaaacattaggtggatatctgaggggtgttttgccctcccctgtttgggcagggtgatcccggggngtccatggcagaggggagggaggaaatagggggcnggccaatctac

SEQ ID NO: 328547 - DNA, 554 bp, Homo Sapiens
  misc_feature (299)..(337): n is a, c, g, or t
gataggcatgagccaccatgcccagcctgaagctttgggttcttgagaggatgatgtaaaatattatgatataggcaaagggacacatctgtaagctgacagtgctatgtcagagaaggatcaaagagccagcagtctcagaagagtcctgcttctgtctaatctggggagaagactgttcagtccaatgctacctgaagggccccgggcagttagaccctgggtgttagaaggagaaaaagtagctccagggagaagccatttaattccactgatagcaggagtcagctattctggannnnnnnnnnnnnnnnnnnnnnnnnnnnnnnnnnnnnnngtcttggtttactttcttcaagctattgaatgcccctatatatgactatgatttttctaatgtctgcacacatcagtgtgtgtatctaaactgtataactcataaatattcagtgactcaccttgtaaaaggatttcagtctcttgctctagtgaagcaagatcatgtgaacactaatcttgaccagcgaaatgtaaatgaaactaatgtgtattag

SEQ ID NO: 328548 - DNA, 562 bp, Homo Sapiens
  misc_feature (64)..(64): n is a, c, g, or t
  misc_feature (73)..(174): n is a, c, g, or t
tcacaggtgatcctccctcttcagcctcccaagtagctgggaccatacgtgtgcatcaccacantcagctaannnnnnnnnnnnnnnnnnnnnnnnnnnnnnnnnnnnnnnnnnnnnnnnnnnnnnnnnnnnnnnnnnnnnnnnnnnnnnnnnnnnnnnnnnnnnnnnnnnnnngtgtcagccaccgcataggctttacttctaacttcttcttggctgtagtccaggagtcttgtttcctgagtcctcatgatccccatcacatgcttccaggttgattcactctttgtacaaccctctgacccagcgctctccacagctctgccctcaactcaccacatatggtgcttgaagagccacttcctttcctatacaggccaccaatgtctttttgtggcacatgaaacccacttcagagaaatgtgggactttggaatccacgaaaggcataattcacttcactgtcaagggatatagctcattggtcagaaactgtatctgttctctgaaggaccattgcattcggtccctcctggctggtttctggtaccttctagtctgt

SEQ ID NO: 328549 - DNA, 412 bp, Homo Sapiens
gtggccacgaagacccactgcatgctaattagaagttatctgtgtgttcctcctttcatttttagcacaaacatgttctcccatggttcctctggacattttccatgttaacacctagattttggatattgctaaagcagaatcatatagttgttacagatttttggcagttactatgataatgaagatttttctggaatttcatgcacagggcttctgcctaacagtagctgtgtgcatacatgagctcatactacacagtctttggctccatcaagtgaaaatgtggacaagctgtattacttctgggcctcaaaatctagcttaatcatcttaaaaatggaatcagcaaagttgtcagtactaataatcactggaactgatgcctaagaagatgactcagttcaactta

SEQ ID NO: 328550 - DNA, 1023 bp, Homo Sapiens
ccttaagagataattatctaaaacaaatataccaatatatacaagaatttataatgtatgtagcagtaaaatgtataacaacaatagcaaaaatggggagtatacaaaataaatgcatactcttttaaggttctgacaccacaggaaaatattatcaattgaaaaccggccaggtgcggtggctcggccaataaaaaattattaatccaaaagaaagcaggaagaagaaaaaaggagcaaagaactgacaggtcaccctgggaagggttaggaggacgcacccttcaccaccactgtgaggaaatcaatttgtgaggtgaggcccagcatctttgctctgtggttgcttctctttgtaggtcagaaattacagtgggaactgctaccatcaactgggatccctaaatgcaatggggataaaggaatcccggggtggcagggcccaagtagcagcaccatgccaaatccaaggtgggcatagttaccataataaatagtggagccaaagcagtaatcagaatagtctgacttgctgagacctatagcattgggtggttgatcatggtgtccctaaaaaagaaatagatgggcagtctactaactcttacttgatctgtataagcagaagaattctaggtctggtaaacagaagtataatttgaatcacctgaagagagtcatggccccttaagcaattcccagaaatgagctagtttacagacccagaatctccttaatgaaagggaagctgtgtcctcttgaggagactttcctgtttatctttctcctacccttccccaaagggacctatggctatttgccttgcagaaggggaaacaatgattttttggggattactagacactggcttctgaactaacactaattctaggggacccaaacttcgctgtggtccagcagtcagagtaggggcttatgaagtcaagtgatcaatggagttttagctcaggtctgtctcagtgggcctagcaggtccctgagcccaatctgcggttattttct

SEQ ID NO: 328551 - DNA, 832 bp, Homo Sapiens
  misc_feature (22)..(22): n is a, c, g, or t
  misc_feature (27)..(27): n is a, c, g, or t
  misc_feature (60)..(60): n is a, c, g, or t
  misc_feature (66)..(66): n is a, c, g, or t
  misc_feature (88)..(89): n is a, c, g, or t
  misc_feature (119)..(119): n is a, c, g, or t
  misc_feature (150)..(150): n is a, c, g, or t
  misc_feature (168)..(508): n is a, c, g, or t
taaaattgctttagtattaatnccatnccagcaaaggtaaagttggttttcttttttganccaggntcttgtttaatattaagagagnntaaaagatttttgtttgccttttgggccanctgcaaaaaaagaggaggggagtaaggttcncttggtttcatactatannnnnnnnnnnnnnnnnnnnnnnnnnnnnnnnnnnnnnnnnnnnnnnnnnnnnnnnnnnnnnnnnnnnnnnnnnnnnnnnnnnnnnnnnnnnnnnnnnnnnnnnnnnnnnnnnnnnnnnnnnnnnnnnnnnnnnnnnnnnnnnnnnnnnnnnnnnnnnnnnnnnnnnnnnnnnnnnnnnnnnnnnnnnnnnnnnnnnnnnnnnnnnnnnnnnnnnnnnnnnnnnnnnnnnnnnnnnnnnnnnnnnnnnnnnnnnnnnnnnnnnnnnnnnnnnnnnnnnnnnnnnnnnnnnnnnnnnnnnnnnnnnnnnnnnnnnnnnnnnnnnnnnnnnnnnnnnnnnnnntgatattagaccttattgtttaagaaactgtatctcctttctctatatcaaagaataaagatttttgctttttagaaatatttaaaatatcatttttgacttaatgagtaattcatttaatcgtgattggtgattctattttgtaacactgtttcaatcctttgatatttgacaaactttccaaatcaaattctaatttacccttagtgacctaattaactttttgaatattaggtcacctgaagtccaacagtgacaaattagccacatttaacatgttaaaatcatacagaagcatggtgaaatatttaacttttgagttct

SEQ ID NO: 328552 - DNA, 721 bp, Homo Sapiens
  misc_feature (438)..(438): n is a, c, g, or t
atttcggcacaggaccattatcccttttatacctaagaagggcatgctaataattaccactgtcaaagaggcaaaggtgttgatttttgtatatgaagttaagcctcagtggagtctcatttgttagtttttagtggtaactaagggtaaactcagggttccctgagctatatgcacactcagacctctttgctttaccagtggtgtttgtgagttgctcagtagtaaaaactggcccttacctgacagagccctggttttgacctgctcagccctgtgtgttaatcctctagtagccaattaactactcttggggttggcaggtttccagagaatgcagtcagacctttttgccactcatctgtgttttactttagacatgtaaatatgatagggaaggaactggatttctccattcatatttataaccattctagntttatcttccttggctttaagagtgtgccatggaaagtgataagaaatgaacttctaggctaagcaaaaagatgctggagatatttgatactctcatttaaactggtgctttatgtacatgagatgtactaaaataagtaatatagaatttttcttgctaggtaaatccagtaagccaataattttaaagattctttatctgcatcattgctgtttgatactataaattaaatgaacctcatggaaaggttgaggtgtatacctttgtgattttctaatgagt

SEQ ID NO: 328553 - DNA, 766 bp, Homo Sapiens
  misc_feature (231)..(246): n is a, c, g, or t
  misc_feature (312)..(325): n is a, c, g, or t
ggaccgttcacatacaaagaaaagtagtggtattttggtatgtgcaaatatttccatatgttagccatttcctgtctggtttctccttatctgttaatcccagacaatagcaattaaaagactagtaggatcctttcctgacataagaaatgttttaatgccttttgatgaagcagcagattttggaacaatcttttaactcaatttgtatttagaaattctcaaagggcnnnnnnnnnnnnnnnnggttttataatgtcagagactagtattaaagaaaactgaaagaacctgagagaatagtatgtgtgnnnnnnnnnnnnnnaaaaagtccttggaattatagatactaattaccagggtaataatattagcactttcctaagcacttatcaaatgtgtaacgttaagcaacatccttgcctgtgggcagggcaaatggaaaactgtgtatgtcttttgccgaaatgctaatgatttctgtgaaaactcactagggtacaggagacaatcatttatgtttaagaaaagaaggcatcattcctaattgtgtgcacatgttgtggagttgagctgaattctgtgaatggaaacgtggctcatttgcatcatgcagtaagtaggagtgtggtagcacagtcggtggtgacccagttcagaagcttctagccatagagcagacacttgtcaggttccctgactacttggtcctggtctctgatgggcatctgcagactcctctagaacctggggttctcctttgatg

SEQ ID NO: 328554 - DNA, 286 bp, Homo Sapiens
acatggtctttgtttgcaatacaattggtcctttatacattttggggaggggggcaggaggtgtaaggtgaggggagggagagcatgcaggcaggtatacaaaccctgattcggttctctcctgaggtcagggtcctgtgctctgggactcttcactagaactttatagatgtttccaacagtaccaaagccctcacgtgtggccgcccattctcgcaccttggttcactcattctggcccagaataagcacctgcctgtcttcccttttatactaataatcttat

SEQ ID NO: 328555 - DNA, 617 bp, Homo Sapiens
  misc_feature (95)..(95): n is a, c, g, or t
  misc_feature (117)..(117): n is a, c, g, or t
  misc_feature (128)..(128): n is a, c, g, or t
  misc_feature (137)..(137): n is a, c, g, or t
cacacctggagtgactgtgtgtcatggttaataagagtgtgggcttagtcacgaatacctgcgtttaaatctctgctccttcacttccaggctgngtgaccctgggagatgtgcttncttctctgagncctcgtttnctgaaaaagtctatgaaatgcagatgatgataggaattctcataggttatttctttcattcaacaaatagttacagagccgttactcctccgggcgtttgagaacagagcacaagcttgacaaggtccctgcctccgtggagtgtgcaccacaaggtggagagccgagaataagcgagtaaacagctgtgtaaatacaaatagccctgatgtgggcggaaggaggacataacgttatccggaatggagattttcacggagcagggagcagttagggaaatgaagactgggaaggactgggttggtggcgtgtgaaagggcagtttttacgctctccaagggctgatgagcacacggggctgggggtaagagaggctctagcaatggcccccgcttcccaaccacagaacattggttttggaaaaccacctgcattaatgttggctttttcctatctggactttgcctattgtctgagttt

SEQ ID NO: 328556 - DNA, 793 bp, Homo Sapiens
ttggagaatcttaagcttatcccattatatgtctcattaagcttatcccattctccccttctatgttttaataagtcattataacatcccttttccctcacatgagtttgtaatcaattgaaaagtaaatatagagaaatccagtaaatgcagagcaaaatatcaattttcagaaaatcagtgaagactataatggaagatgtggcttatgcacatgacaatacgcatcctaatactgaaccttgttatgactcttagccatttaatcataggaagctctgaccatcactctcctctcccgactgaagcaggccttcagagtagcacgtgccacatagctggcagccaaacccgacagcatgaactctctattagaacagggcagacacatacacactcggttcactcacctccccagccacaccacctccctgcgactaagagttttaaactcttgaactagtggatgtcacaccacatgaaagcatgaaggaggaaaaagaaggttcttactcccaaccatgtgaaatcattttttttactcaggaaggtgggatacaaagtgggttcctcaactaaccgagcaacacaatatgcataaataaaagcaactataaaaaaagataccatgtcatagctattgatggcagctattggtttatattccaatcccatcacataaaaatgtagaataagtaataggaaaatattcacaggagaagagtgtagaatttcaatcttaatgagataatgagaaaatctaaactttcctgagttctgtactaccctccag

SEQ ID NO: 328557 - DNA, 185 bp, Homo Sapiens
gtttactccttgacttgcatttcccccaaatagtacaactttgtaattaatttctctcccaggacaccaaaacctagcagtagaaatgtgtgtgttctcttggctgttagatctcgggcaagtggcagtggatctctctgtcttcagccttttctaacttggcttaactggtcccccccttcccc

SEQ ID NO: 328558 - DNA, 791 bp, Homo Sapiens
  misc_feature (640)..(640): n is a, c, g, or t
  misc_feature (726)..(726): n is a, c, g, or t
  misc_feature (750)..(750): n is a, c, g, or t
attcggcacagcatattttagctactttacatactcgggtataatgaactttattcatagcttctgaagcagttggcacatttgagatattttttacttggctaattgttatgctaaatcttttgatttctaaagatacatgcctttgctaagctttcttcaaatgttattatttttatttagattggatcattgctattccatggatgactcagaggatacatcctgggactttggtccacaagcatttaagcttttgtctgctgtggacatcttaggcgaaaaatttggaattgggcttccaattttatttctccgaggatctgtaagtatatatctgtgaattcccttcatagatcttcttttacttctattacacttttcttcagaggtttgcagtattatgattgtagctttgacttcagatgggtgactaggaactcatagagtcttactaagttccagttaaacactacattcattactttggataaaacccgtgtgtatggcatcttctgctgttttcatgttcaagccgatgttcagctctgcagctcagtctggaagcattgtgttaatttatcacattgcatttgggtgaatccctagactagtcttgcttaggataattaggaaaagntaactttcattgtatcaagggacaggtagaacaaaattgtccttttgtccaggaaaccattaaattcttcaagggaaaactttagntatagggattatttttttaaatgnctaatttcagtaacaatatttgggacataatttaatttttc

SEQ ID NO: 328559 - DNA, 534 bp, Homo Sapiens
  misc_feature (498)..(498): n is a, c, g, or t
cataaagaaactcctgtttgtttgcaaatatgatataagccaaagctcatgctatttagagaagttatttgatctttacataaagaaaacgttctttaaatgggataaattaattttatgtcctttcacacattttaacaatgataaccttcttataaataaaagatttgagaattataatacatctaaatttgttttcattttagcagtctccatggaaggttttcagctggggtaactacatcaatagcaatagctttatagcagctccggttacctgttttaaacatgtaagtacagaatttctcaccttattttgaagtacttagtcattgtttaaatctgaaggtacaataacacctaagcatcttatccttagaaggtgtttgtttttatgtcttgtaactgaaatgcttcttttattattatacttaataatagctaacaagaacttctgtaagttttgtaagtacaagtttcctatagagaaattgcagnttgaagctattttaaacagggagaagtactagtctt

SEQ ID NO: 328560 - DNA, 701 bp, Homo Sapiens
  misc_feature (678)..(678): n is a, c, g, or t
accaaatctaacgatatataaaaatgagtacatcatgaccaagttgggtttattctcagaaataaaaatattggttaacgttaaaagttcaataaattgagtattcatattgctagatatgaggaaagtcatataatcaattgattcagggaaaaatatttgataaaatccaacatctgttcataattagggaaaaacactgttgaaaactgaggaatagaaaagaacctttttaggataaaggatatctaaaacaaaataaacaaaaaacctgaatgggatgttggaagctttctcttttggatcagtgtttattatgttttcattttcagtatcttatgatgtcttgacttcttaaaaatcttgctggccaaggagagactgccctcccagggctagctaatttctcaaaatagtaaacaacttgggagcaggcctctaaaatgcaaaccacccactcccctttatcaaactctcacataccacgccaacatttcccctgctttaaatcatcgcagggccaggtacgagccaactagagagctccccataccccaaagcctgctgatttttactcagatttgccattcctaaactgctgactctgccctgccttgcctctcccaaggaagcctaatacaggctctggcctgggctttcccctgcttctgctgctgnctcctgaccacacctggtgctcc

SEQ ID NO: 328561 - DNA, 388 bp, Homo Sapiens
  misc_feature (147)..(253): n is a, c, g, or t
  misc_feature (267)..(338): n is a, c, g, or t
ggccgcttaattaagtaaataaaaatttatacttctttttgttggttcttctgtcttcggtgaagttagggctgctcacacacagtagcaatgatacttttcaaaataaaccaggcctaagaggcatggtggctcatgcctgtaatnnnnnnnnnnnnnnnnnnnnnnnnnnnnnnnnnnnnnnnnnnnnnnnnnnnnnnnnnnnnnnnnnnnnnnnnnnnnnnnnnnnnnnnnnnnnnnnnnnnnnnnnnnnagactctgtctatnnnnnnnnnnnnnnnnnnnnnnnnnnnnnnnnnnnnnnnnnnnnnnnnnnnnnnnnnnnnnnnnnnnnnnnnctgttggactcaaaagttaacatctgcttactgtcaaaattttctttagg

SEQ ID NO: 328562 - DNA, 329 bp, Homo Sapiens
  misc_feature (31)..(31): n is a, c, g, or t
  misc_feature (41)..(41): n is a, c, g, or t
aatttttggcttgactagaactggataattntgtgtataanaatactttcaattaataatagtttttaaagcttattgatcttttatatcttcatgagcaccctgtggtctttgtgtctgtgacccaggcccaccctccctacctgagtgacttattcttacctggaacccaagcttctgaccacagaattagcgctctcttccactgtatcagttttctcactcattgtctcttatgtttcgaaagagttgcctcagttgaggaatagccctgaagcctgtcctttcttcctcgtttttcactgctgctgccttgctggaatactcct

SEQ ID NO: 328563 - DNA, 577 bp, Homo Sapiens
ctattaaatttttatatagctgagatatcattatacatttatataacctgtttcctcctacattttatcataagcatttttctttatcattaaattctccgttaaaatcatttttaattatgcaagagttttccataaaaagaactgccatattttccaaatgtttaaggctgatctattttatgatgaaaaagagtttaaaaagcattatttcaaaccacacatgtcagaataatagaccgaggtaggggactgcaattagtaaggaatacccatatccttgacttgagtggcggtgctatgaatgccatatgtttatatgcaatccttcatctagatttgtgcataaatctatgcttaaaaagactagaggactataaatcaagatggtaatagtgtttatctttggaaaggaaaatcatgagtaattttagtggaataaaattttttacaagaattatctttacagtttgttgaactataaatttatgcacttttccttattttatagcttcaataaagaattctgctgttttgtaaaagacacctgctcaaatatctttatacaactcaagat

SEQ ID NO: 328564 - DNA, 143 bp, Homo Sapiens
aagtgaaattaattttgtagaatctagtcatggttgggctctgagaaaatgttgtaaagctgtaatttatcttgtgggaaaaagtgaaaaggaacttaaatttatggtgttatcaagaattggccaggcgcggtggctcacac

SEQ ID NO: 328565 - DNA, 606 bp, Homo Sapiens
  misc_feature (194)..(250): n is a, c, g, or t
  misc_feature (463)..(464): n is a, c, g, or t
  misc_feature (482)..(482): n is a, c, g, or t
gaattacagctttttataagggtgaaaaaaatggaaatgtccatcaacaaggaattatctagataaactggtacaaccacaaaatgaaatcatagccactaaaactaatgctatgaaagaataataccataaaaatgttcttaatatgttaagtgaaaaaaattaaaaaccacatgtacaaaatgatttttatnnnnnnnnnnnnnnnnnnnnnnnnnnnnnnnnnnnnnnnnnnnnnnnnnnnnnnnnncagcgaagaaaggaatacaccagaaagttaagcatgcttatttctgagtggtgaaatgatagaaaatgtgtaatcagattttttaaaatgcctaaagacaaaagttcccaaggagtacctaagatcaagcaagtcttcttgctggggcctcattatcttactatcttccctgattgggtatgagtatcaccctgttctgcagggttaccaggnncgagcctgtgttcaaggnggtctgaaatgttacacaaacccacagcccttctccccttttccagccacctaatgatccccatgggtatccagagagaaggcctcatcctgaggtcttcgcgctgtgctgggcttctacacca

SEQ ID NO: 328566 - DNA, 715 bp, Homo Sapiens
gtggagcccaaccagctaatcgcagcatatgtaatagacactcacgttaggactccagggcctgcatacagcggtcgagagacaatatcacccagtggagatctgcatttccagaacgtcaccctagaggacacgggatactacaacctacaagtcacatacagaaattctcagattgaacaggcatctcaccatctccgtgtatacggggaatgttctaaatttgactctgagatctctgaggatgcagcatggccccaagacactttctgttggtcactctatccacagagtcagtggctcagccctccatccaagccagcagcaccacagtcacagagaagggctccgtggtcctgacctgccacacaaataacactggaacctctttccagtggattttcaacaaccagcgtctgcaggtcacgaagaggatgaagctgtcctggtttaaccatgtgctcaccatagaccccatcaggcaggaggacgctggggagtatcagtgtgaggtctccaacccagtcagctccaacaggagcgaccccctcaagctgactgtaaaatatgacaacactctaggcatcctgatcggggtcctggttgggagtcttctggtggctgcacttgtgtgtttcctgctcctccgaaaaactggcagggccagcgatcagagtgacttcagggagcagcagcccccagccttcacccccgg

SEQ ID NO: 328567 - DNA, 599 bp, Homo Sapiens
attcatttttaaactataaagagacagtacagcaattcatacaagcttttagaagaagaaccacaccctgggaagcttatgaagcaaaggcaggctaattacaagctggggcagcccaggtgctggccaggcagaagcaagcccactggaaagcattttagcaatgggcccagctggtaggaatgagaaagcctcaggtcttgggaagagccctctttcccttagaacacaaaccatttattacctttttaaactcaggcaagtgatgaaagataaccagaagaggcagtagttttatatgccaaatcaggatctctcttttggatgggcaaacgctttgttagaaatgcagtgtcttttgcaagcctcaacaagaagtattaaatgacctactggtgccttctcttgggattcagagttcaaatttcaactgaaagagtagcaaatttctctctcacacaggattctatcctgggttcgattagactttctccacctcctattcttccctgggcctatggcaaacaaacaacccagttgtttagcgttaggcagcctcttcctgaatgcagaccctcaggagaacaagacagtctgta

SEQ ID NO: 328568 - DNA, 706 bp, Homo Sapiens
  misc_feature (675)..(675): n is a, c, g, or t
ttttcttaaaaacttggggaccagaatttcaatcgtatgtttccattgttgaagataacattttcttcaaagagccttaaccttttgtactggaaggaaatattttctggacttaagtagttgcctaaatttaagattcctacactttatttctgccattgatgcttttcctaaacccttatactatctttttattatctgagccttttcctaatgcagctcataggtgctagctagagctgctgctcagtattgaagactttacaaggagattagaaatctttggaaaacatatgtgatgaaattgagctatatgatttatcacgagatctgattccaaagagcacagaatactgttctcagaccatggaaaccagaccaacacatgtattggtttaaactcgataatgacaggaaaattccaaactagagcagtaaattcaaatggtaagatgaatcctagaaggcctctgattgcagcatgttgacaccaacctcacgttacgaacaattcacagagaatttgcctttgtggcaactgaagatggaagtctggggggcacagacaaccttatcaaacaatataaaagccaatataaattctcataagcactatagaatttgcaaattcagaacattttatacctaaaagtaattctgtctttcctaaagtgnttttaacatgaaaattagtaggaagatgtgg

SEQ ID NO: 328569 - DNA, 847 bp, Homo Sapiens
  misc_feature (11)..(11): n is a, c, g, or t
  misc_feature (98)..(98): n is a, c, g, or t
  misc_feature (638)..(638): n is a, c, g, or t
cttttaaagancaaattagaaatcctttaaataaaagtatttttaaaattgttaatgtgaaaattaaaaatttgacatgggaataaaatgtgcttatncaataataataattatgaaattagccaaggatcccagctttttctgcagaggaaacatttattttcaatttcctcaaagtctcatgaagcacaagagaatcccagaaatagactaagagttgtgacagaaaaaagaaattttaagatagaaactctagagacaatctgaaggaatattactacatatgttcaagagtcataagctgaagggactggttattttaattgtatttcaaaatgtatctctttcctttttcttgtaaatcacagaatcatctagttggtacaagaatgacattaaaatgaacatatttccatctggatattttaacaggcacctcaagtttaaagcatatgaaactgaacttgattctttctctacaaacctacagctatcagttttcctcattttcctgttctccaggccaaaaaccatgaaaccacccttgactcctttctctcttacatcctatagcacacaggtaaaagcaactcctgaggtcttttcctccacaatgtacacaatatagccagagtccnagccacttcctcatcacttccactgcttgcaccctagacacccaagctgtcacccatcttcccttgcctgattaccgctatctcctaaattgtgtcctgttttgtctcgccttcttttggcctattaccattaggagagccagactgatccagttaaaaagcaggctcaaatcatgtcactcctccattcaaaccttcgattggctttt

SEQ ID NO: 328570 - DNA, 469 bp, Homo Sapiens
  misc_feature (377)..(377): n is a, c, g, or t
  misc_feature (392)..(392): n is a, c, g, or t
  misc_feature (408)..(408): n is a, c, g, or t
  misc_feature (414)..(414): n is a, c, g, or t
  misc_feature (433)..(433): n is a, c, g, or t
  misc_feature (453)..(453): n is a, c, g, or t
taaaaattatttcaaaatattctcaccaaggaatgagtaagctgaagtatttatctaccgaatctcatatgccattgattgagagttgctcctgttggtgttaaaccttgtgtatgggctgagtgaactcctgagtaccagtgaaaattacaggtagaaaagctaagacatgcgggcacttgaggggacataggacctgtccatcacaggtgtagaagacagtgaagtagaagtaagcatgagactgatatctttaaaaccaaatgaagaaagtgtttcaagaaggaggtatgtattgactgtgttgatggaccaagtaagatgaattgactactgggtttgacaccatggcttctacatttttctagatgcacccnagaggttttcccttnctgaggtcccactgtncctccnaggggcattgcaagggatnatgagactcaagtttgtttncttccacataggagcc

SEQ ID NO: 328571 - DNA, 748 bp, Homo Sapiens
gcagaaaagaaatctatttttaatggctttggctttatagcacgaagcaggcaccctctcgttaaaggcacacagtcctctcttctgccccacctcctgggtccttaaaatcgagtcctgagttccagaggggtcactgcaaggcagcagggaagggagagggtcacagtttcactctgtgagtatcagacacccagggccaaggcccagactggcctctgaagctacaggttagagtctgggtacaggaggcagccgagatggtccctgagaacagacagtcccggtcccccggagcaagctccatcctctgcagagctgtgaggtcagtgccccacatcctgggggcaacgtgaaagtccctgaagctgtagaaggagatgtcaccatgatccaccaggggcaaagttcagagggacatccccactctgggtaaggacaaccgcttgaggcttgcagaggtctgggacaggctcatcaaatccactaatgcacatccgggcatagggtttgccagggttattctttcggaatgtggccacagcgtcggcctggtaaacatcaaagatgatttccaagcccccagacttctccaacagccggacacctccatcaggaaggtgtgttgtctgcagcacagagatatgctgaaggaccacggctacaaggacacagaaaacaaggtactggggaggggagtcacatttctcagtctgccatctagtttaggacggccagatttagcaac

SEQ ID NO: 328572 - DNA, 741 bp, Homo Sapiens
atcttcttcttgtagtgtttcttttatctctaagaaatatttcctcttagtttcttttcaccttgacttcaactttgatattaatattcctacacccactttgtgctagtgttttccagatatggtaagttgatcaaaaaaatgacacaataactccttcccttcctgaatccatatgccttgtgactttgcctctgttctaataagaggtgaagtccatttccttattcgttgaatcatgtttgggcattgtgacttgtgaatacagaaggcagcagaactaatgctatgggacatctgagtctagtcctcaccaggtctcccagctgctgatctcatcacctggaacgctgctcccaccatgtgtagaagcctgggttagtgtcctggaggatgagagacaatgtggagggtgaggctggccaacagcctgcaccagctgtgtaagaccatctgagatgactgtagctgcatgagtgaacccaggggagacatgcagagacttgcccagctgtcttacttgttactttaagccattcagttttttctaagataaaaaaggttagtttatctaggcagaaatagtatgtaaataattatacaagtagtacatggatatgacgaaaaccttgaagctgatgtgcaaagagctgaaatttggaaaatacttaatgagagaatggcctaaagagctattcggtactctgaattccccaaaggcaaggaccaatatttatccac

SEQ ID NO: 328573 - DNA, 766 bp, Homo Sapiens
  misc_feature (51)..(51): n is a, c, g, or t
  misc_feature (713)..(713): n is a, c, g, or t
  misc_feature (743)..(743): n is a, c, g, or t
ccagacttccctgggcagtactaccttctccgcatgccatccaagggcaancaaaaaaccccaaaaccagaagcactccaggaagtggtcaccctgctttgctgtcttaccagattactggatctttttcaaactaaagagaaaaccacaacaaagtcaagttccatgtgcggcgactccaatgccaacctcttagaatattttctcaattttgaggattacatggctcggagaagcccgtgtagtgcaaaatgtcctcttctgaatcgtagttgcaaatggcttcctttgagggggaaagggcagagatacgaagaatcatttagtggttcaggggtgtggggtagggggagactgaagccggcgtaagatcttagcatccccctttttgtcctccagtcttggttacttacacgggctggtcagtacgctgctgggtcccagggtggtgggcacatctctggagatctttctttctgcaattctctcctctgggtcggctatctaagccaccctccctggcaccacagccctggaaactctcaagacagtaagctggggcaatgacagggcttgcctccttcatttctcatagctcaggatcactgtcctttgttgcctgatgctcatggtcttgcaaatcattacttcttatatttgactggggtttttgccctaggtgtgcaaatgaatatggttcctgtgacactgtncttggcgggaaggggtaatgaggctacagngcatgttttgcttttgctttgtg

SEQ ID NO: 328574 - DNA, 462 bp, Homo Sapiens
  misc_feature (78)..(78): n is a, c, g, or t
  misc_feature (168)..(285): n is a, c, g, or t
atgagcccccgcgcccggccaagtttagaagatagtttggcagtgtccaccaaagctgagcaccagccatctgccctnagctgtgtgcacaggagaagtgggggacacacactcaccttagaaagtgttcccctcactcagcagcaggacttactctagccccaactnnnnnnnnnnnnnnnnnnnnnnnnnnnnnnnnnnnnnnnnnnnnnnnnnnnnnnnnnnnnnnnnnnnnnnnnnnnnnnnnnnnnnnnnnnnnnnnnnnnnnnnnnnnnnnnnnnnnnncgtctcataggctaatgtcgagggaaagccgcacagaggaggtgagtccacagttcacaggtgtgtctgtgtgcagtggtacagatgggaagtagaggttaattcttgtgggggatggtcagtaaccgggaggggcacacagggccttccagggggagatgccacctcagcctcgca

SEQ ID NO: 328575 - DNA, 575 bp, Homo Sapiens
  misc_feature (64)..(94): n is a, c, g, or t
  misc_feature (147)..(165): n is a, c, g, or t
tatttaaatctaccatcacttcgtagttaccacatcatgaaaaagaaactaaaactttgttctnnnnnnnnnnnnnnnnnnnnnnnnnnnnnnntgagggtatgtttaatgtacaacttctatatacatcacagcccataggcagtnnnnnnnnnnnnnnnnnnntgatgaaaggaattgtgaagaactgtccacgtggaaggtcaaaacgcccgacagcaggcatgaacgggagtggtgaggagcagtttcccggatcgttgtcaggtatgtattctcaatccttaaaaaacattgtttttgctccccagcctaatggaaccatattcctgtggagaaaccagtatcatttcatagttttgactactgaccgacatacctccttgagcccctatacctgtatctgtagaaatttctattgcacagaactttgggtgatgggatgcagtttttttcattctctgaggagtaaaacgcataggaaatggataatttttcacctttttgactcagtgtggtgaaattttcgcatcttagcatcttttgccacaacttttttctttaaagtcaatttg

SEQ ID NO: 328576 - DNA, 748 bp, Homo Sapiens
  misc_feature (710)..(710): n is a, c, g, or t
ctccttgatcaatcaaagggcatgaattttaatatttaaaaaatgtctttgtgaattaagcttaaaaaatcctacccaaacaatagcactctccaaaagtgaatgattttgccaccatcaaatgatcttcaggattctcccctgtcttgtggtgaggtttagtttcctaagaccaaaatgagattaagccttgctgaactttatctgagttttaataatcataggaattattacaaactctggaaagagtttgagattataagagtatgctgttttcgcaacataaaagccaggtggatggacgcagggtgtatccaaggctgcacagtttgggaagttcccccagatctcttcactgcctgccagagtgttctgtccgacagaaaggcacaggcactttactctgctaaatcctatagttccaactgctacagctccctagctttttgaaaaacccaactgaaaagtagtttaaactgggagagctatgtgttagcagtaaaatctgcctaataactcactgggatctgagttggaaaaaaattatctggcagtgtcatgaagtttttaaaatttgggggatcagagagagggaggaactaggaaggcacattcatttataaagaagctaatgaaacatggactacgaactagaaattccaagttggccagagatagggaatctacagtagctagacatttatggatgntcgttctgggtctgctcaacccaaaactacatactggt

SEQ ID NO: 328577 - DNA, 783 bp, Homo Sapiens
  misc_feature (763)..(763): n is a, c, g, or t
  misc_feature (772)..(772): n is a, c, g, or t
ccatatttgattaattattttatctattttaatggaaataaatgggctgtggataatgtaaagctttggaagctgcacacaaataaatgaaatggggcaatcagtcatagagagtttcatttagttttctctagatgagtgctccaggaggatggctgtctagagcaggggaagggtctggggcaacattcagaaggctggtgaaaatgaaagtcacagtgacacaagaaaacaccatcttgtggtaagtcagttggagcagaagaggtagccatttatcttttagatgaaatctgtggctggagtatcggattccaaactccacagcgttgtccctagccagccaatcttccccaccacatgaaatgtgtggaaatatacgcacagggggccagccagagcagaggaaccctttattaccaggggggctttcacccagaccctaacaaggaacttgagtgagctagactgcccatgtgggtcacagaaattcgattcaggaacattgggctaggctgcagaggaccactgtgcccaaaggcatgccctgctcccgggaggctggttgcaagaaaaggagctctgagctcctgaggcccaccatggaggtccctggagatttaattctattaatagttcctcttaagatactcaccatatcaacttgctgggcctgttttctcatttgtgaacaagtttgaggaatggggagattgaataagacaacctcgaaaccttcctttgagcattagctttccgattncttgggttnctgggcagggt

SEQ ID NO: 328578 - DNA, 387 bp, Homo Sapiens
  misc_feature (16)..(16): n is a, c, g, or t
gcctgaattttagganccagggaaagatctcccaaactgaaagcccaactgcctgttaactggattccaactggccactgcccggttgaagaacccattctgtgaggatgtcaacaaacaaagtgggaaatcttttcacatccttccagccctctagtcttcctccagtgctttctattggtagggtttggggaggtggctagcaaagcggtattggaaaagatagaagagactaaatcttcataaccagcacagggtgacactggatcactactgttgctgatcttgggctgcctcatatcccctgttcttcccattagccctgtcacaactttgtagatatcccttcattatatgcccttcatatattcttttggtttaactttt

SEQ ID NO: 328579 - DNA, 568 bp, Homo Sapiens
attattatttttattattacttatgaaaatctgtttttcagaaacacgttgtcagatatccaaggaatgtatttttaagcatgttcaccacagtaatattgtaataataaaaaatgggagacaacacaaatagaggataaaggattagttaaataaattttagcacatctgtgggaggcaatatagagaaaggatggatgtgggctctggagaagacatggcctgattccaaatcctgcctcagccctatgagctcatgggccttggtctctgtgtcttaggttcttcaactataaaaatcatggtaatcatgcccactttacaagggttattgtgaggaatgagacattacatgtaaattgtttagaagagaaacagggcatagtgagcatcccataaattgtagtattacacagattatgacttaccctttagaagaagaagggcagatctgtaggtactaccatagaagaatacttattagaaaaagactttttgccccttatagatgttgtggggcggggggcggtaaatgatccactcatatattcttagacttgagtgtaca

SEQ ID NO: 328580 - DNA, 461 bp, Homo Sapiens
gataagagaccttttatatgaacaatatgccattgtataaaggacatgatgtcaagaagtatctgcttgacctttctaagaaaaagggcattcttatcttactctgagcttttgatgttttgttttgtaacatacaaaaagaatctgccagaaaaacttacatgtatcagatttttaaaaatataaatagagaacattttgcaaatgctcaaatgagcattctatcttttggctttcagagtgatagagctcctaacaggtgtacaggcccaagagttgaaggtgattggttttctttacagactccttgttctctagaagggctttttacttgaataaaacaatgcaacttagcaaaccaatttatggccttagagaaacatttttgcatgagttcttacaaactgtttgttatattttctggaatgataagtgagaattatttagaaaagacatgctcc

SEQ ID NO: 328581 - DNA, 227 bp, Homo Sapiens
tgaaataattttgccctaatttaccttatttgcaactgtagtatattttcctatgtcagttgttttcttgttgtccagtggctccaatctctgaatgtgctttgactatactacctttattagtacctagtctctgctttctggaataattgttacctgcatctgagatttgcagataagagagaatatttgcagaaatcttacccactctctaaaactctgctcta

SEQ ID NO: 328582 - DNA, 698 bp, Homo Sapiens
  misc_feature (317)..(412): n is a, c, g, or t
atgattgtgtcaaagcctttatttcaggttcatgcctcattacacatcagagaatccatactagacagagatcttacaaaagtcatatgtgtggcaagatctttagtctgaggtcactccttgcaggacatcaggaaattcgtttttgaggtaataatttcaaatgcaatgagtatagcaaaccatcaagcacaattgatgttagattcaaatcagcattgagttcagtttgagttgacttaacattgagttcaagtattagttgagattaaagtgtttatgttaagaggattaggccaggtgcggtggctcacacnnnnnnnnnnnnnnnnnnnnnnnnnnnnnnnnnnnnnnnnnnnnnnnnnnnnnnnnnnnnnnnnnnnnnnnnnnnnnnnnnnnnnnnnnnnnnnnngtctgttttttgtttcttcaacaaaaactgatagagatttttatgggtattgtgttgaatcaaaatcacattgggttatgtaatcatttaacagtattaatttttccaaaacatcaatatgggttatatctttatatatgtttttaatcattttgatcaatgtttgtagatttcaatgtatgaatttctcacttctttccatttattcctatttcttactttaagttctctagcaaatggaagtgtttttaaattttcatttaaaattgtttattgttaatgtatg

SEQ ID NO: 328583 - DNA, 712 bp, Homo Sapiens
aagttttctaatttaccttttgatgtcttctttgacccataggctatttagaagggcattgcttaatttctaaatatttggagatcttctagttatcattctttcattaattcaatcatttgagacatggtttatggcccagaatatggatgattttggtaaaatgttacatatgcacttgaaaagactgtacagttattttgtttcattttctagaaatgtcatttaggaaaatgtggtttagaacagactttttttctccctccacttgttctctcagttatgggaggaagcatgtgtaaaatatctgtattagtttcccggggctgctgtaacaaattaccacaaacttgggtggcttcaaggaggggaaattttactctcttcaacagtttggaggccagaaatccagttaagatgtcaataggattggttccatctgcaagctgttctgtgcctctcttcaggcttccttccagtggctgctggcaatcgttgatgttccttggcttgtagatgcatcatttcgttttccgcctccatcttcaagtcgccttctcctctgtgtgtgtcctttgctcttctggctcctgtaaagacactggacatggatttagaagccaccctggcaatccagaatggtctcaactcaagatcattaatttgattgtatctacaaagactctccaaactgggtcacattcacaggttt

SEQ ID NO: 328584 - DNA, 284 bp, Homo Sapiens
  misc_feature (135)..(148): n is a, c, g, or t
  misc_feature (171)..(222): n is a, c, g, or t
  misc_feature (251)..(251): n is a, c, g, or t
tcatcaaaaggatgtaggccaggtatctgccttctcttagaaaactcatgcagcagtgcttagctggatgacataataaactgcttcatgggatggcagagccctgtgtccacttatgtggaaggatttaagaannnnnnnnnnnnnngagacagggcctcactctgtcannnnnnnnnnnnnnnnnnnnnnnnnnnnnnnnnnnnnnnnnnnnnnnnnnnntgggttcaggtgattcctcccacctcagnctcccaagtagctgggactacaggcacgtacca

SEQ ID NO: 328585 - DNA, 348 bp, Homo Sapiens
  misc_feature (222)..(222): n is a, c, g, or t
  misc_feature (299)..(299): n is a, c, g, or t
ttttcctttatggagcagcaggagccgtggtgggatgatttagaaggtctttcatggaaataccagagagttagcagcgagctatgggaagacatagtcagaggccgtgaaacctggacccggtgtcacactgtagtcattagaagaggagtaaagtggaggacaataatggaacaggcagagctggggcaatttcagtggtgagggtctgtttttgatttnggaagtggagtctcatctgggatccaccactccctttattttgctaagagactttaagaaatttaacagcctctctngagcccttagtttcttcatatctaaattgaaagtaatgatatttcacct

SEQ ID NO: 328586 - DNA, 749 bp, Homo Sapiens
agacactggcttgttgttttgacaatttgatgactagcaaaagccccctccccctgaagggggtggtgggaaagctcactgtgggatgcacacaggtctctgccaagtggtagaggtgtgaagggtgttgcactagctcctcatcctagggatgtaacttacatccctatctactcctgttcaagggctcacaacctgcagttcagatagacaatgtcctttatctccacgctgcaatgcaactaggtttcgtagaaaacattcatcctgtggctacagctgaaagggcctctggaaaaaacctcttcccacagcttgaaatagacagctgtagctggtctatactctgtagctggttcattctatggtgcagaaatgctgctgctttgtatggggaggaagagataagtcccaccctttgagcaagtccaggttggtggggacactttcaactggggtgcagctgccctaagtgtactgaaaagcctgtttccaagtgcatccacacaaacccccagcagaaaacgtcatgattgtgtctgcagcagtgatggagacagcaaaagatgccttttccatttcagttcccagccaatggtaccacctgtcctttgggacaagacaatactcctaattttcaaagatcagcattgcacctgtgtctctgctaggagaaatacagccattttctggttataagtggggaggggggctctcaatcagggaagaatgtgcattccagtttcctt

SEQ ID NO: 328587 - DNA, 711 bp, Homo Sapiens
aagtctatattattttgttatgtagcaacctgaatggacttagacagtagctataatcatcatcatcattgtcaataccaatattacatgaagctcacatggacagaaatttccttataatagtggaaaaaactaaagctctgactctgaagatgtattttctaacccacagatagaatatcctagaacatcttgaagctttatttgttaaagcatgagtagggatggtcagtgctagttcttaccattgctctgattctcctaggtcatctctcagctcagtcacctcatctatgcccttgacacacactcccttaacacgctcataccttcctagctattcaggtttcagttccgccagactctccctcagtcctggtgtcccattccagctggtaccttgtggtctcactttttcttgacttaagaatgcaggtcattttccaaacacaattcttacagcaggaaatgggtaagattaccacatttttttccttcctatcagctgtgaatgcccaccaggtcacaaccaaattggggacagtgactccaaagagctctgcaaataaatgccaaggacagacagtggtggactccaccatatgagagaatgaatgagaattgggaggcaggttgtgcctcctttgatctaaaactctgaatgtaatatttccaggaatccttgggatttcctgggtcttaagcctctaa

SEQ ID NO: 328588 - DNA, 507 bp, Homo Sapiens
  misc_feature (32)..(32): n is a, c, g, or t
  misc_feature (337)..(337): n is a, c, g, or t
  misc_feature (435)..(435): n is a, c, g, or t
  misc_feature (438)..(439): n is a, c, g, or t
  misc_feature (452)..(452): n is a, c, g, or t
  misc_feature (464)..(464): n is a, c, g, or t
atgttaatttgtttctgatcattcctataagnccttaggagtctatgtcagtttagctgtcccttacacatatgttttacagtttttgactctgagcctatattggacaatcttaaaatctgggagtattttaaaaggcttaactaagggtgagtcattacagagaggatccgtatttgttttttccagacagtatggcacattaccaacccgggccaactttatgttaatttcttggcttctggttttttagatcatgtagatatgtaaatttgaaccttgaatgagtgatggcagaccctccagtttcaagttttcaggtggtatctttattccnccacctggagctgtgatgaaaaggaacaaatttctctgtgatctccctttgccaggagggagacatttttctggcccacctatgactgactgtgtagnctnntgtgggtcctggnctgaatgtgggncaaggtgcttctccaataccatgaggttgtacaatttcaagtg

SEQ ID NO: 328589 - DNA, 696 bp, Homo Sapiens
gtgtgtgtgtgtgccaggccttgtactagtcactgtactcgttcatctttattgcagcctgacaaggataagtaatattaaccacagtttagaggtgcagggctggatgctctgggaggcaacccagcgtcacaagggaagggccaagattcaaacctagatctttctgaccctaaaactcgatgttcctttgactatgatgtgctgcctctcacagaattaggcagcacatcccctaagaactgctgagtaggtagcatttcccctaagaactctcagacattcgtttggagtgaggacacccaaccctggtagaaatatagcaagtggctcattacagcatcacaggtaagagggagggagttaggaaggttgagttgaaagcacccctaccagtctgctcctctctgcagagtgcaaacgctccccaccacagccagctctgggtcacttccttgggctctgaggggcagaggctgcctggcaggtgctcttacctctcctgggtccccagaatgaggtgctttcctcagggaaggactattgcagccaggtgagacagatggaaaaggggagcactttagtcccgggtccttgttctaagtcttccctttcctgactggtcactgaaccatccaggcctgaaaactgggttagttttaccatctccttcccagggttttgagggagtaaggt

SEQ ID NO: 328590 - DNA, 481 bp, Homo Sapiens
  misc_feature (12)..(12): n is a, c, g, or t
  misc_feature (28)..(28): n is a, c, g, or t
  misc_feature (35)..(35): n is a, c, g, or t
  misc_feature (50)..(50): n is a, c, g, or t
aattaaggaaancccaaaccctggtaanaaaatantagcaaaatggctcnattaacaaccatcacaggttagaagggagggaagtttagggaaggttgaagttgaaaagcacccctaactagtctgctcctctctgcagaagtgcaaacgctccccaaccacagccagctctgggtcacttccttggctctgaggggcagaggctgcctggcaggtgctcttacctctcctgggtccccagaatgaggtgctttcctcagggaaggactattgcagccaggtgagacagatggaaaaggggagcactttagtcccgggtccttgttctaagtcttccctttcctgactggtcactgaaccatccaggcctgaaaactgggttagttttaccatctccttcccagggttttgagggagtaaggtaaagtcctagagtgagagagctctgtaaagtgctgcatccatgccgggtaacatttga

SEQ ID NO: 328591 - DNA, 1131 bp, Homo Sapiens
acaaaaaaggagctttttgacgtaatcaagcctctatcaatcacttcttgcttcctagtaacttttgtatcttcctttcaggagagcagttgaagtgaattcttctgggaccaaatccagtgtttctgccttgaagaaacataattaactgacattttaaaagccactttatagacctgttctgactctggtctaaggacattacttgatttatagtttatgaaaagtctacttttaggaatttggggtatgttttatgggtaggctcttttagttgattgctttcatttttctttggggaaattatctaggaatagctgtaggtggatgtccatcagaagcttgactttttacctctgtggtacttggaggggctgactgacgcacagggaaatatttcaccatgaatggtgaggataagcttatgtgtgtaaggaagaggtaactgcactgcaagcagcttccccctccctccctctccagggaggggatgatagctattattaattgatttttctcttactatggaaaccaagggtttagatattaatggaaaaaaattactgaaatgtcaaggattttgttttgtggcttgggttccctgaagcctagcttgaagagaccagcagtgaattacagtgtcgcactgtaaagacactgacaagatttttgtcattaaagttaaaaatattgcagcagattgcctgggtaatcagaccttcctttgatgtgtgtggtaagaattcttattcaagggaactgaggtgggatatatattcattattagagactccagcgtggatatgattttaggtttcaatgaaaagctttcttccagaattaccatgcttgaggaaatatgattaagagttgatcacatttgttcaccagccacagacattcttgcctgtttgagagcacgggtacgagtgatctctgtgcttctaggcatatgcacctatcattgttgggtcttccaaggatctaatatgtcaatccagatccatgcatctggtggctttcatccctctgcctggagcacagcctcactttcatgataatggatgcccttccaactttctaataaggaggctttgtgttggtccttgtgtttgttcttgggatataggt

SEQ ID NO: 328592 - DNA, 563 bp, Homo Sapiens
  misc_feature (550)..(550): n is a, c, g, or t
ggttttggcaatgtatctaaacaatctgtacatgactctgagacaaagattttctcctgtttgcttctagaactactagttttatgtctagttctatcatccattttgagttaatttttgcataatctgcaaaatatatatcaaagtccaacgttctgcatagaatacctaaccattcaggacgatttactgaaaacgctgtcctttctccgctgaactgcccccatgcctctgttaaaaaccgcctgatcatgggggatgggtctacttctggactctgctctgtcccagtgatctgtatgtctattctttcaccacactgtcctgattgctgtcgctttgtattaagtctcaaaatcagagtgtgagtccttttctcttgcaaaattgttttggctactgtactttgattcttgtgcaagttttagaattcacttgatttctaaaaaatcctgcttagattttgttcggaattgcattgaatctgcaggtccatttggggagaagtgacatcttaacaatactgagtcttctaatccatgaacagagnatttctctccatt

SEQ ID NO: 328593 - DNA, 1028 bp, Homo Sapiens
  misc_feature (178)..(212): n is a, c, g, or t
  misc_feature (261)..(291): n is a, c, g, or t
  misc_feature (835)..(844): n is a, c, g, or t
tttttttcagatattttcaagccattgttggttgaatccacagatacagaatcctttggctactgttgggtcctaatcacctcaactttagttatagaatgaactgttaatttggggaattatgtatcattccagtctagactgttcaagctcttgctcccccacgggggcctgttcnnnnnnnnnnnnnnnnnnnnnnnnnnnnnnnnnnnagagttgggggtctcaccatgttgcctaggctggtcttgaacttctggnnnnnnnnnnnnnnnnnnnnnnnnnnnnnnngcatgaggcacagtgcccagccctcaggacttctctaataacacatttagtagagagattagttgccatcattatcatgattatcaacaacaaactgtgactaagggccctgaggtatggagtagtatcatgattctttacatcgcaggctatttatgttagaggagcctcaaagataatagggcccaaccccctcgtttaatagatgactcatcaactatgatgataaccagagacgtggcttggtggccctgcaggccacctggacatatgactaccccatacatagcaaattccagcagcattccagttttgaagtatggcaagtttttggccaaatgaaaggtatttaagatacagacagataggtaggtctctagtagtagtcctcttaggagaagaaaacaagactgctggcagtgaggtcttcattcatgtgctagaagaacctgattcatagaaacctgatattgggacagttctataaatatagcctctacatttgaatagagtatgtaaatatccaggaccatgtaagaggacnnnnnnnnnnctactttggaagttgggctctgactctttgatttcactctgtgggttcttgcagagaagcatgtttagtgggctgttcctttgttatactttgttcttatgtccagattatgttatataatttgtttctaatttttagttgtagaagcaatctgtgttcatgaaacagcacaacatacaccacg

SEQ ID NO: 328594 - DNA, 607 bp, Homo Sapiens
  misc_feature (359)..(392): n is a, c, g, or t
  misc_feature (394)..(532): n is a, c, g, or t
aattcagagacctttttttattaaatgtgtaaaaagcagttctcatcttacaagctcaaaatcagacgaatgtatgagggtgtataattgttatatttataaactgtatcacccaaaaactcaatgaggacacaatctatattacattcaacatttgcatatttacatgatacttactgcaaagtaaatacaaaatgaactcccatcattttagttcagaacacaggtgatataatttcaaaacaaaggcaatttttttcaacaaagaacagaagtctcccaagtaccaattcactattttgcagaaaaatacaacactaattataagatttccattccagtttagtcagtaagatacnnnnnnnnnnnnnnnnnnnnnnnnnnnnnnnnnnannnnnnnnnnnnnnnnnnnnnnnnnnnnnnnnnnnnnnnnnnnnnnnnnnnnnnnnnnnnnnnnnnnnnnnnnnnnnnnnnnnnnnnnnnnnnnnnnnnnnnnnnnnnnnnnnnnnnnnnnnnnnnnnnnnnnnnnnnnagtctagtaaggtatgtttttgttactgaaatacagctaaagttttggattttaatcaccaaaataacagtactt

SEQ ID NO: 328595 - DNA, 442 bp, Homo Sapiens
cactgggctattcttttgtaagcaggggaatgagatactggttattaaagattttggtaaagtgtaagttactgtaaggcatgattcaggactgcgtcccacaagtccccggaccaggagccagttcggattgtcttgtgggatgtaccaagtttccctgggtttacagaggctttttgcctctctgaagcctgagctggccagatggagagctctgtggaaaacttccagcagtgtgtgttgggccaagcacttcgaggtgtgaagaaatgtaaaaacttttcaagtgataatatctagcatcgtgtatgcagccttgaaaaatgacccaacctttgtagaaattctctgttatcactaaccctcttccataatgagcggaggatttcccaagaattgggattctgataagagtcctgcaaaagttgaaaagttttcggac

SEQ ID NO: 328596 - DNA, 408 bp, Homo Sapiens
  misc_feature (16)..(16): n is a, c, g, or t
  misc_feature (136)..(136): n is a, c, g, or t
aaaaaatgaaccctgntggggccacggtggccacatgccctgtaaatccccaacactttggggaaggccgaggccaggaggatcacaaggtccaggagttcgagacctagccctggcccaatataatgaaatcccngtctcctactaaaaatacaaaaattagcccggggcatggtggtgcatgcctgtctgtagtcccagctacttgggattatcggcataagccactgcaccaagccccatgttactgtttaacacgttaacctgagaggcacagaatctcataaaatgtttattgatttggtcttggcttattgtgtaaaccatttaatagccaaaagtcagaatttaaacatctaaaatacactgaaaatgtgttcttttccaataacatggatgttcacaaca

SEQ ID NO: 328597 - DNA, 887 bp, Homo Sapiens
taagggcaattggtttctttcctctgcttcttgctatatagacggatggctctacttctaaaaacttggtactcgtggcatccagagaaaagacactgctatgttatataggtccaactgagaaacaaatgcagaacatcagttttaagaagatagaatctcctagggaaaacttacctctccaaatcgttccatgttttgtgtttttgaaagatttccaccaatagacatatcatctaggccagaaagaattttattaatacttccttcactggatggtcgatttttcagtttggatcggaaaatgtctccttggacccacaacgatgcttgtttttcttccaggaagtgctgctgggggtcctataatagagcctggccggcataattcctaaatccaagcaattatttcagcatgtgtaaacctgtagtgtttcattacataacaggctatcaatgtccctgttcttccaagaccagctttgcagtgaacggcgatggccccttcggtgttctcacagatgttcaggaaccttcgcacgatgttgtcactgggtgtgctgccatctatgaagaagaggtcatagtgctcgaagccagcgtctgtgaagcgctttgcctcataaatctttttgtttagcctcacaactgcagtcacattatgctttttgaaataaggaaagtaggcttcaggggcgtgaagaggataaccattctcaattttgcttttaggatgtggtccactaaatgctaaaaattttcctggaacaatacagttgaagtcaccattttcaactcgctcataatgttcatattcatccacatcaattgtctcaaagtcaaaaaatccatgttgtaatccctttctgattccctgcaaacaagtc

SEQ ID NO: 328598 - DNA, 712 bp, Homo Sapiens
  misc_feature (592)..(600): n is a, c, g, or t
acacgatgaaacagcacaattttcaggagtccacaattccagcgaggcgcgtggatgggaaattgtcacgttgtgaattgtgtttgtgctttgctaaatcgccacccggagctgactgtcaaatcctatttgctttgctaaataaggatatctcatcaaattagcctttaatgatacttctacaaatagggtgttttacatgaattaacgaggccggaacactgactgtttctccaagatactgagctataatggaggcgacgaagccgaatgttaaaattactgaattgttaagtgtgcaaaatcagacagaatttagtgctaaatgtgaaacaatttctgcttttaatggtgagcattcgcaacagcacaagcattacttatattcagcccgtctgaaactgtgcatgtaattatgaatacatttaacaaactttaacccccctctgagtctggaaacagtctagtatggtgaagagattataaatcagcattttgcagtgagaagtcatcattaattcagcaaagaatcacagcttcttttcagatccttcccaccaccctcctacacacccccctcaaccaataaggnnnnnnnnnttcagcatggaactgctggatacactgaatatattttggcttttctctttttgcctctgtgtgagaaacttcattaagcagttgctgttctctccccacccccgctaacccc

SEQ ID NO: 328599 - DNA, 903 bp, Homo Sapiens
cggttgtgatagattaaagatgtctgcaaagtctttgctgcatctgccattgagaagtacagtttagttcccctctccctgagtgttggctgagttttgtaagccttgcttgaacaacagaatgcagtacaagtgatattttgagacttctgatattatagatcataggtcaaaaaggacacacggtttctggcctgtctgcttggaacacttgctctagacacctggctgccataggagaggccaacgtgaaaaggaaccaaccgccccagacgatagccccagcagggctcctacccagcagcctgcaccgtggaagtgagccaccttgggaagtgaattctccaggacctgtagagctacaccagctcattccatgagaagcagaaatgagctgcccagctgagtccttcccaaattctggcacacaagattgtaaacaagactattttaaattctcaaattttgaatgcagtttgttatgcagtaatagataatcagagaaggagtagagaatagtatataaagtcaacacagaaccaaaaaagaagatccaaattttaggtgacatgttttgtttcccaattattattattgaaacattaaatccttcctaagtgtaagtgatccagatgaaatgaaagtaattggaaaagtcttgactgtgttatgaggccttagagaaaataaaatccctttaacacatgattcccgaagcacaaaataaaatatattcaaaatgttatggcattgaaatccatgagtgtcctttctttcctttctcactgaaatttattagaagataataatctgtgcattacctattgatggtttttcagagctattttctcctcctttgatatgtagtatgaatttatttatttatttatttttaagatctta

SEQ ID NO: 328600 - DNA, 554 bp, Homo Sapiens
  misc_feature (504)..(504): n is a, c, g, or t
  misc_feature (537)..(537): n is a, c, g, or t
gttttgcggttgtgatagattaaagatgtctgcaaagtctttgctgcatctgccattgagaagtacagtttagttcccctctccctgagtgttggctgagttttgtaagccttgcttgaacaacagaatgcagtacaagtgatattttgagacttctgatattatagatcataggtcaaaaaggacacacggtttctggcctgtctgcttgggaacacttgctctagacacctgggctgccataggagaggccaacgtgaaaaggaaccaacgccccagacgatagccccagcagggcttccttaccccaggcagcctgcaccgtgggaaggtgagcccaccttgggaaggtgaatttctccagacctgtaggagcttacaccagcttcatttccatgaggaaggcaggaaatgagcttgcccagcttgaggtcctttccccaaattcttgggcacacaaggtttgttaaaccaggattattttttaaatttcttcaatttttngattgcagtttttgtttatggcagttattgggntattcggaggagggggt

SEQ ID NO: 328601 - DNA, 479 bp, Homo Sapiens
  misc_feature (122)..(169): n is a, c, g, or t
caaactgcattcaaaatttgagaatttaaaatagtcttgtttacaatcttgtgtgcccagaatttgggaaggactccagctgggcagctcatttctgcttctcatggaatgagctggtgtannnnnnnnnnnnnnnnnnnnnnnnnnnnnnnnnnnnnnnnnnnnnnnntgcaggctgctgggtagggagcctgctggggctatcgtctggggcgttggttccttttcacgttggcctctcctatggcagccaggtgtctagagcaagtgttccaagcagacaggccagaaaccgtgtgtcctttttgacctatgatctataatatcagaagtctcaaaatatcacttgtactgcattctgttgttcaagcaaggcttacaaaactcagccaacactcagggagaggggaactaaactgtacttctcaatggcagatgcagcaaagactttgcagacatctttaatctatcacaaccgc

SEQ ID NO: 328602 - DNA, 785 bp, Homo Sapiens
  misc_feature (747)..(747): n is a, c, g, or t
ttcatggaatgatgtaaattttaggtccagtctgaacaaatattgagtgcctatcatatgcaagactaactccttactaggaatgaaatcacacagtgtcttctgtttgcagtatgtgaactttatgtttgaaaagaaattattatatttaaatttttttgttgtcagagtttatcattgtatactgtaacccagtaaattttgcattcagttttaaaaaatgaagatgtaacttacctgagtctcatttttgaaaatgaaattctgcaaaaattatttaaaaattagttcttggggaaattgattttcaagattcaagtgtataaaaacttatattgaacttttcagcctcgtttttaattagctgatgttaatgataagatacataatacatgtatcttgttgctgaaaatattttttgcatttcaacacattgagttaaaataaagttgttactacttattcaagattaattggcttatcttgtgtttatttgaagaatacatactcttctttttcaggttggtatgatgctttgcaaaagagccatgtatttgatacggtaaatcatgcatagtaattgtcttttctacataggggagctcttgttttttggaaccaattgaagacattcttaactgtaaaatattaatatgcatttattttaatatgtatgaaccatcaatactggatgacttattctaatgctacgtaccattaatgtaacagagatcaccttttccctgncattcctatcctggcttaatttcaggtatcccagacaa

SEQ ID NO: 328603 - DNA, 675 bp, Homo Sapiens
  misc_feature (663)..(663): n is a, c, g, or t
gaccacggcatgctaacaatgtcttagggaagcattcatgcattcagttcttcctgacaatcaacatataatgtaacacattctggtatctagttaccatcttttaagtggcacctagacaatctaactatagagtctactgagttaaaacagagccaataaagtgggaaaatatttcacacagtattcattctatgtttattaaaaaattaacatggggaagcatttaaaaatccatcctatgttggtacttaaaaattaaaatattttatgcataacaaaaagaaatgtataatgggcaaatcaattttactatttacaaaagctagcggttaataattttataataaacttatagtacaaatcctttgcatcaagtcgagtccaatttatttcaaaaatctagaataaaaagcactaaataatatttatgaagctcttcttgtctgccaggcaatttactctgtatttgaaaaagcatatacatacattttttaatcacctcatgcctcacggagattaagtcatctgcttaaacattgtagctgcatttgagtgataaaactcagtatttttaagactaccagtatgactcctcaaaagacaaaacataacaaataagacataaagatgacatattaagtaaagactgactgccttctnctaaagtcagct

SEQ ID NO: 328604 - DNA, 515 bp, Homo Sapiens
  misc_feature (42)..(42): n is a, c, g, or t
  misc_feature (69)..(69): n is a, c, g, or t
  misc_feature (81)..(81): n is a, c, g, or t
  misc_feature (95)..(95): n is a, c, g, or t
  misc_feature (152)..(152): n is a, c, g, or t
aacccaaggaaaggaaacaggaaatttttttaacaacccaanaagggaaccctgaaaccctcaacctanaaattttagttntcctatagcaatcnaataaatataaattagtgtaacctgccttgaaaactgtattaacattggatccttcnaatgcctacttaatttcctgagaaaacctaagtttataagagtacatcagaatctctattatcaaccaaagcaaaacttctaccaacgacagaatggatactttttaaacaaatttacatataccaacaagcaaaaaactagagctttcattcctgcttgacatttttttcgctttgtgtgtctcaaggctctctcaggaatcagtgtccaaaccatgaggtgaatcctgggaggtaagcaagcttgctgtagaagccgctgtacatgccttcaggagacagaaagggtaccagaggctgtgccctcctagtgtggctggttggagtgacaactaggaatgttgtccgtgtttttctgtggaa

SEQ ID NO: 328605 - DNA, 1109 bp, Homo Sapiens
aaagaaaagcaagttgaaaaagaaagaggagacaatttaacgagccctaaaggcaagaagtgtgtcttctcctgcccatttctctctcccacagtacatcctgcattgaaccacgtgttgctggttactaaactttatggtgtcacaaaaagacaaatgattgtaggatccatggaagtgcacttaggcttgctgtggtggaggccatagtggagatgaaggctctgctctgaagctcttaattgtgtattcaccagtgggatggacaccctttcagcctaagcgtacgagtgaaaacaatgatgtcaaaagacaatagcaagtataggctactatttagggcaaaaggaatcttgaaatgaaagaaacagaactaaaaggctaactggagcataatccttacagttttgcactcaggggattaagtttgaaacatagtgtcttttggccaaattgaacctacttgtaatgtggaccaacttactttacacattttcatcagtcccaatgtatggaattagcttagttttctcatgcttgattaaaacaagacgactaaagctaatcattcctcttctagactttgtgtatatgatttaatcttttatttttatttttgtagaatgggggtaaaactacaaatctcctcctcagggtgatatttttaaagattaaggagtatgacatcaattaacagtctttaaagatgttacatacgctcaaagcaatgtgattaagactttttgcctatttcttgtataagttaaggcagccataaatgaaaatacaaaacaaacgtttgcttttgtatttgattcacaagaggattctccctgagtgtcaggggaggctgtgggacttcaccacgtggacaaacgaaagcacaggtcataggtcagagaattttttcttcaaatgtagaaatgtaaattttcagcaagaaaatatctgcatgcctacaaagtgttgtagctgagataccttcctgttttttttcttaaacactcattctatatttcccatatttcctctgataatgaatctcatctttcaataactttgtcttcacttgtcctctcaactgcttttctcttcctcttcttcttctg

SEQ ID NO: 328606 - DNA, 362 bp, Homo Sapiens
  misc_feature (39)..(39): n is a, c, g, or t
caaacagtgccctttttataaagccccatcttatatgtnaacatgcctatcacttcctgcctgtactccttttggtaagtggagacccaatccctactagtgtgggaaggaactacacaaatggaagaatatcaggaggtggagcccttgggtgcccatccctggaggaagactaccacaccatgtctgtctcactttgaaacatataatctgttgaattattcctttagtacatatcaaaggatcagtcatttccagatgctgtcctaggctctgggtattgttggcaaaagaaacaaacataggcctggcacggtggctcatgcctgtaatcccagcaaaacaaaatatactttaaaaat

SEQ ID NO: 328607 - DNA, 783 bp, Homo Sapiens
  misc_feature (348)..(357): n is a, c, g, or t
  misc_feature (385)..(643): n is a, c, g, or t
  misc_feature (739)..(739): n is a, c, g, or t
aaacatacagttacatagagttttgtaatctgttttttaaatctagtaacctatgtgaacagttcccatttcaataatatttatccacagcatcactttcaatggaaaaataatactgcttttgatgcatgcactgtaccacatttgtttatttaaccaattcctattgatggaaattctgatttcctttattctctccctccccctctaaccttccttccttccatcttattacaaataaccctgttattaatatcattatagggtaaggcctttgcacataaagcttaattgtttttgtaggtttacattcgtagaagtgaaattgctatgtccaaaaaatgcacnnnnnnnnnncctttgagatggaatttcactctgtcannnnnnnnnnnnnnnnnnnnnnnnnnnnnnnnnnnnnnnnnnnnnnnnnnnnnnnnnnnnnnnnnnnnnnnnnnnnnnnnnnnnnnnnnnnnnnnnnnnnnnnnnnnnnnnnnnnnnnnnnnnnnnnnnnnnnnnnnnnnnnnnnnnnnnnnnnnnnnnnnnnnnnnnnnnnnnnnnnnnnnnnnnnnnnnnnnnnnnnnnnnnnnnnnnnnnnnnnnnnnnnnnnnnnnnnnnnnnnnnnnnnnnnnnnnnnnnnnnnccaaaaatgcactttttaagggattttgctaaatgacctctagaaagactgccttagtttatttcttaatattatcaaaacaccatataagcttgntttctcacaccatgaccaacattgcgaattggggtgggtggggg

SEQ ID NO: 328608 - DNA, 421 bp, Homo Sapiens
  misc_feature (44)..(44): n is a, c, g, or t
  misc_feature (55)..(55): n is a, c, g, or t
ccccccgccccagtgcccctaaaaggggccaccgtggttaacanaattgccaatnaaaatttaagtggggtccttttccagtaaccccatccaatccatcctaccccaagtatttccttgaaaaactgtaccaaaccttgcgaacaggtgtttatggaggactgaaaagtaaattcattacagattctgcccctctatggagataagtgcctcaaatattcttaagatggggtaaaaagctgtgcacatcatgatcttttcattacacagggcagaaaccagtctgcagtcatctttaggaaggaagagagatattggtcccagacaaatgaaagtccagtgacagagctagctgagacaagccggaggcaggggccagacactgggattgtgactctgtccttgcccatctcttgctctt

SEQ ID NO: 328609 - DNA, 502 bp, Homo Sapiens
  misc_feature (128)..(128): n is a, c, g, or t
tataaccattagtctttgtaatgtacgttaaaatagaactgatataccttgggtcagagaagctaaaataactgctttgatgaaactggaaaggcactgatggtgttcacttgcaccatcaggtctgnatggaggaagtgtaggatgccttccagattgatgttccatcaagtatacgtggaaagtttcagtataaccgttaggacactgtaaatgctgttccctcaggccctactgcctcctgccaagtctcaggtaagacacagctacctccaggaagcatttttctattcaattctccttttattttagaaaattggacatacagaaaagtggaaatactataatgaaccgccacatatcattaatcagtttcaacactatcaagtccagtgtttcctttctctgccacttccacctccattactctgaagtaaattccacacatatcacttcattcataattaagttatgtacccctcgaaggcaaactctttccttt

SEQ ID NO: 328610 - DNA, 740 bp, Homo Sapiens
  misc_feature (703)..(703): n is a, c, g, or t
tcgaaacttggattgctttctttttctaaatgctgattcttttctttgtggtgtttgtgttctgtgccgatgtccctcccccagccctgttattgtgagtggaagaaggggaaagggttcgcccgctactgtgagcccctcctctcacgctgggtgtccttggagaagcctgcacttcttcattgtacgccagggctgggtccctccctggagtggttctgtgctgctgggatggggccaacccctcagatgttttctgagtgtcacacacaggtgtgtgcattcatggcctttgcgtgtcttcctgttgtggaggcaaaaatgtgaagaaccctagatgattttgggaccagggctccatcacctgctgttcattgcacaccggagcatccaggcatgggtggagagctcagacttccaggcacggtcgcaggggctggtctaaccatgttcccgcccgcctgctcgtcagaaccgcctgttgggagctgttatcatgataccatacctgggccctgggctatccgattctgacttaattgctccaggttggggccaggccgttgtttgctgttttgttgtttcttctgtgacgttagccactgggctaatctgagcccctcagttacaggtggagaaactgagacccatgggggtgcaaggacttgccgaggacccagagccccttgggggcagagctgangcggggcctggctttgggtcccagagctttcagtccc

SEQ ID NO: 328611 - DNA, 615 bp, Homo Sapiens
  misc_feature (286)..(301): n is a, c, g, or t
tacagttttaaaaaaaggatcggtttttaatttacaagagttctaaatgtacagaattctcctttaaaaaaatcgttatacacaataaatacagtacaaaaaaatttatcttacagtactagttttgtctccgagatttcaaaatctggcgcgggcggctggaggcaggaagaacagagggaagactagctggggagaggttcgggggagaggaagaccagtttcttgttttgctcagatttcaaagtcgaggggtgggcgttcgaaatctctcactcacttgtgnnnnnnnnnnnnnnnnggtcacggagctggacgtgcggatgtcacacgggtgcctgcgggcacagcacgctgggaggctggctcccccaccccctctccggttttgtttgacagcctgttgggggcggcggggagaggctgagactgtctggacggaccctgccagctcccagcaccctccaccatctgagaagccacacagacaagacaggcacccggagcgttggcatcaacccggtggccccatccctggcaaacacatgcgcgtgtcccccggacagaggggcagagtgtgccaggaaatgggaagaaacaggaactgacacagca

SEQ ID NO: 328612 - DNA, 988 bp, Homo Sapiens
  misc_feature (334)..(491): n is a, c, g, or t
acactacatcgtaatgttcatgtgctttaaacaggtatggtattactctaatatataataatattctgcaactttgtcttccaagatttatacacaataaatgtacatctggctgattcatctatttcactgaaaaatatatcacaatatatttatctatttccctattgatagacactaaggttaactgatttttttctcctgttatcaagaagttgcactgtagacccctgtacatatctccttttatatactatgagaaagtctaagacaagcatttaaaaattgaattccaaggttgtatgatacgcacactttaaactttgatattgtnnnnnnnnnnnnnnnnnnnnnnnnnnnnnnnnnnnnnnnnnnnnnnnnnnnnnnnnnnnnnnnnnnnnnnnnnnnnnnnnnnnnnnnnnnnnnnnnnnnnnnnnnnnnnnnnnnnnnnnnnnnnnnnnnnnnnnnnnnnnnnnnnnnnnnnnnnnnnnctcccccagtctgatgtggatgcatttgactggcaaagcctaaggtcacaggactgcccttgctgaaatgtaaacctggaaagcaagtttctggcttctcctatggggaggtacacatgcacaaaggagggaattctctcacatagataggaagagtgctcaacattactgggtggccagatgaaatgacaatgtaggctgtaacctgaatttcctagatcactgcttctcaagctctaatgcgcatacaaaatcacctggagatctttttaaatgcagattctgattttgtggagcctgagattctgcatttgttttcttttcagagagattcattcaataaacatgtaacaagcccctgtcaatgccagagaattgtatgtgctgcttcagtgacagccatgtccatgtcactgaatccttccctccgcccttcataggaagcatgggaactcattccacagaactagtgggtactgaacagaagctgtcatcgt

SEQ ID NO: 328613 - DNA, 500 bp, Homo Sapiens
aaatacttacagctttattaggagaaggctgtggtcacctcagcagccagctcccttgtatacacagtatacacagcccagccagcacccaggtccttccatccttctgcagtacatggagtgcaaaagaaccaaacacaacggcggggagggagggtctaccaatgagtgtcagtgtctagtgcttccgggagccaactgccaggctagggacactcaagtccctcaaactgtcatcagctcctgccagaccccactccagcatgtcgaggttcatatgagagtgtttggggccagactcctccaatcagtgcacgcgatgggcagaggaggctagggaatcctgagcccaaagctgtattggtccatccccctcaagaagttgttggagctttcagaacgttcctcttcttgtgtagacatgagataccgctgtaactttactccatcaccagaaacctgtgccttgagtctagtctctgctcagccctcgagagcat

SEQ ID NO: 328614 - DNA, 373 bp, Homo Sapiens
  misc_feature (287)..(287): n is a, c, g, or t
  misc_feature (313)..(313): n is a, c, g, or t
atgctctcgagggctgagcagagactagactcaaggcacaggtttctggtgatggagtaaagttacagcggtatctcatgtctacacaagaagaggaacgttctgaaagctccaacaacttcttgagggggatggaccaatacagctttgggctcaggattccctagcctcctctgcccatcgcgtgcactgattggaggagtctggcccaaacactctcatatgaacctcgacatgctgggagtgggggtctgggcagggagcttgatggacagttttgaggggantttgagtgtccctagcctggcagttnggcttcccggaagcactaggacacttgacattcatttgggtaggacccttcccttccccc

SEQ ID NO: 328615 - DNA, 462 bp, Homo Sapiens
  misc_feature (15)..(15): n is a, c, g, or t
  misc_feature (57)..(57): n is a, c, g, or t
  misc_feature (72)..(72): n is a, c, g, or t
  misc_feature (119)..(119): n is a, c, g, or t
  misc_feature (145)..(145): n is a, c, g, or t
  misc_feature (165)..(165): n is a, c, g, or t
tgccccaggctgggncttgaaatcctggagctccaggggaacctcccaaacctcagncttcccaaaagtgcnggggctaacaggtgtgagccaacggtaccccagcctccacttggaanactttctaattgccctgcactggcangttcactagtctttattttnttttacagcatctgatctactattaaactcatctagcaaatttttcatcagatgttgtaattttcatctagaattttcctttagttccatttctctactgacttattttaaatctttaaacatatctaaacagtcaattatcttttaaagaaacgaagaaattttttaaagtcatctctaggtctgtttctattgactgactttcttcataaactgagtaccttttctactgttggctggacactgtcaatatgaagttgttgaccatctgaactttgttttctttctttcaagaat

SEQ ID NO: 328616 - DNA, 694 bp, Homo Sapiens
  misc_feature (314)..(314): n is a, c, g, or t
  misc_feature (317)..(317): n is a, c, g, or t
  misc_feature (550)..(550): n is a, c, g, or t
  misc_feature (553)..(553): n is a, c, g, or t
  misc_feature (628)..(628): n is a, c, g, or t
aagtcctattatcctaaaaagaaatagcagtagtgttttagaccattttatgctgccataacagaataccacagattgggtagtttataattaacagatatttggctcacagttctggaggcagggaagtccaagagcatggtgctggcatctggcaaggacctttgtgctccatcatcccttggtggagggcaagacgggtgagagcaagaagggccaaaccgacttttataacaaacccactcttgtgataaccaaccaactactgagacaaatatgttaatccactcatgagggcagagccctcatgagcnctnaattcacctcttagaggtcccactttttaacatggttgcatttgggattaaattttcaacacatgaagcttgttgggatacatttcaaaccatagcagatggtaactcgaattcacatgaatgaaaaacacctataaaggcaatatataggtaaatataagactacacatatattttttatcttgatttaaaatacaactgcaaggaacagtaactataaaactttactgtgnggntacaatatatacaaatgtaatatatatgacaatagcaaaaggagggaaagaaatggaactatattagagctatgnttttatattttactggaacttactggaatatattttccagaattaatatgaatcagtacattgtga

SEQ ID NO: 328617 - DNA, 350 bp, Homo Sapiens
  misc_feature (299)..(299): n is a, c, g, or t
ccagctacttgggaccacaggcccgagccaccatgactggccaaatctcacaaatatttaaatatactcaataaatttacttctcagtaaaaagacaagctggaattaaccagactgatttttttataggtaaggaaattattctaaggaatggttttatattccgttcactaagaaataagctgcagctcccttgtccattggctttgaccggaaggtaggagaacctttctctctaagactgaatctcccaaatgtttctgctccttctggacaagcccagttcccaccaggtaacntctggtccccagcctccaagaaccatctcctacttgtatccctctcgtgcc

SEQ ID NO: 328618 - DNA, 1011 bp, Homo Sapiens
  misc_feature (46)..(46): n is a, c, g, or t
  misc_feature (83)..(83): n is a, c, g, or t
  misc_feature (93)..(93): n is a, c, g, or t
  misc_feature (121)..(121): n is a, c, g, or t
  misc_feature (683)..(743): n is a, c, g, or t
  misc_feature (786)..(902): n is a, c, g, or t
  misc_feature (915)..(924): n is a, c, g, or t
aatactggctggaaacacagtgaagtctgaactcatgtgtcagcanaggtcaccctaatcacatgagacatctctcaaccccnatcctgctanaccgaagcgctcatgactactttcaacnaacaccgcactatgccccgctgtgaacctcaatttcatattctgatttgcaggctaactgcgttccccgttggggtgggctttccttgtcttttggggttttgtcttccttcacagttgacacaatccagaggacaggaatcatttctccctttccctcaatagcaccatccaactggctgaccagccatgtgtctccaacttacgaaaactgggactgggaaagaaaagctgagcatctcgaggggttggctatctagatgcagagtatactaggagtctccttccatcgtaaggcattcagctgctctcttgggagtccccattctcctacctcagtctgtcccctgggaggagtgactcaggggctgatactcactagaccctccaagagacatggcagctgtgggaatattaggtcaccccattctaccacccaggaccaagaaaacataggagagtgtgctgaagacacaataccatttgaagtttccaaaggggagcctcaaccaaaagacaatctgataagatctctgtttttaggccaggtggggtatctcatnnnnnnnnnnnnnnnnnnnnnnnnnnnnnnnnnnnnnnnnnnnnnnnnnnnnnnnnnnnnnagcatcctggctaacatggtgaaatcctgtctctactaaaagnnnnnnnnnnnnnnnnnnnnnnnnnnnnnnnnnnnnnnnnnnnnnnnnnnnnnnnnnnnnnnnnnnnnnnnnnnnnnnnnnnnnnnnnnnnnnnnnnnnnnnnnnnnnnnnnnnnnnaggctctgtctcnnnnnnnnnngatctctgtttttaggatagatgaaaggaggagatgcatacaaattttcacacgggagtgtctggtggtgattctctgaacatttca

SEQ ID NO: 328619 - DNA, 891 bp, Homo Sapiens
  misc_feature (58)..(126): n is a, c, g, or t
gagacggagttttgctcttgtcacccaggctgggagagcaatggcgccatctcagctnnnnnnnnnnnnnnnnnnnnnnnnnnnnnnnnnnnnnnnnnnnnnnnnnnnnnnnnnnnnnnnnnnnnnaaaatttgggatagggtcttttcaatcattgatgtatttaaattcagccctttaaatctgccttcctgaaaaggctacctccttcccagtttctgcctctgcctggccccctctgcagtgggcggaatgaaaggagaagcacagagaattgctcctactttgcaggatggctcttctctacttctctccaagagtgatgatgttatttatccaaatcagtgctttaaaaaccagcacttatccttttaatcatctagattaaaatcaactatgcacctaaacagagattttagggctgaatggccccaagtagccaataaattcagaaaaacaaatgctttgaggcagtgcaccctcagataagacccaatcaaacgataaaaacctttggttaatgcaaatggacaaaaaaacaaaagccagaatgccaaacacacagtgtgggttatctaggtagaaaacacataccagtttacacgccattcttttcttcgtctttatatcttgtgccaagtatacctttccaaaggcgccccgaggaataaaatcagaaccaatattcctgtaagtcagcttccaggggatcaggagaacatcggaatctatttggtaacgtccattttggggagtgatgacctacaacaaaataaaaatgtgagacggtgagaacttcagtcaagctggctttttctaagacccacctattaggaagctggttattttagcagcattctgatacacagttatgaaattaatgtcactgtg

SEQ ID NO: 328620 - DNA, 713 bp, Homo Sapiens
acactatatcacaaaccccatgacttttgaatctaaaacccagtctttttactatgttatgctgaaatcgagggcaaaatggtctatgcacactgatccccacaggttagaaagcaccaatagtttaggttttgaccagagaaatccaattaaacaaactggctagtctaaacttggagttaaagatttttttctgattacacttagtcaccatcttaaccattggtcactgttgtcctgaaatttgttgacttccctggtgtcaagagttaactttccttatcttctattgataccttccagctggtccatcgtacttctgtacaggctgttttgagtcacacagcttgctctatcaattgaaggtatagcttatgtacaaatgtattttagctttcatttctgattttcagcctggagcagtggcacactaatcctacttctgcgttatcctacaaacttccctgtcaatcattgccaaggctcactgcagggtcagggtctgagatctcactgaagctcttccatcggcaaaccaatacatcgattctttacttgttttccgactcaggtctgctgttagaatgtaatgcagttattctctttaaaatatcatgctaattctcttaagttcctcttacattcagatctttcccaaaagctggagatcacataattcaaacatctgctgagctacattgggttcaggctga

SEQ ID NO: 328621 - DNA, 790 bp, Homo Sapiens
  misc_feature (12)..(12): n is a, c, g, or t
  misc_feature (345)..(345): n is a, c, g, or t
ttcggcacgganactggaaggaaagaaagaaaggtcagctttggcccagatgtggttaccccttggtctcctgtctttatgtctttctcctcttcctattctgtcatctccctcacttaagtctcaggcctgtcagcagctcctgtggacattgccatcccctctggtagccttcagagcaaacaggacaacctatgttatggatgtttccaccaaccagggtagtggcatggagcaccgtaaccatctgtgcttctgtgatctctatgacagagccacttctccacctctgaaatgttccctgctctggaaatctgggcatgagatgggcacaggtgaccacgncagaagccaccagaatcttgcctgccctattcctcctcccaagtctgttctcttattgtcaacctcagcacaacaggctggcgccaatggcattacagagaaagcaatctgtgtggctagtgggcagattaccatgcaagccccaggagaaatggaggagctttgtagccacctccctgtcagccagtattaacatgtccccttccccctgccccgccgtagattcaggacattcgcccctgtgtgccaccaaaccaggactttccccttggcttggcatccctggctctctcctggtacccagcaagacgtctgttccagggcagtgtagcatctttcaagctccgttactatggcgatggccatgatgttacaatcccacttgcctgaataatcaagtgggaaggggaagcagagggaaatggggccatgtgaatgcagctgc

SEQ ID NO: 328622 - DNA, 635 bp, Homo Sapiens
ccacctgcctgccataacgatcatgtcttgcctgaaaggacaatgattaatagcatttccttacatttgtatagttttttttaagtactgtcctctatccatttcaacgatttcctttgtcgtctcacttgatccttcataccagcccccatgaaatgaagcagagcagccatttctaaaattattgaaaaggaggtcacgcaatgagttagtaacaaagccaggacaatgagccatgccactcatttgtttattcattcattcatttattcatattgagttctgcactgtaaaattcattacaggttcttacagggagtcagacttcatgcatgccagagttctgtaccagagggcctcaccagtggcaggtgctcccgcccagcacggagaagtcagtcaggtgggacttttcatgacagttactaagaagtaggaaaggaatgtctggaaaagtgcagacattccatgtttatcctaattccttggtgggaccaaccagaggaaatgctaagtacccttctgtctccagtaaccctcatccagccggagatcctttatttctccccattggctctacatatatctattacaatatgaacaacacttcaatccatttatttacatacttggtt

SEQ ID NO: 328623 - DNA, 527 bp, Homo Sapiens
tgagccaccgcgcccggcctaatgtaactttttaaaaaatgttcagcttgggtaattcagctacttaatacttgattctggctctggaattacatgccagtagatacatgccaagatagaactggtaggtgtattcgaaaattggtacatgcatactgaacaatattttaattcagattttttcatttgcaagcaacagagaccaaattcaaattggcttaattttttaaaagggaatgtactgatttgcataattaaaagcctggggtgggcattttttaggcacagctggatcccggggctcaagtgtaccttccatgtcacttatttaaaagctttagtccttacttaaatggtttaggcttttctgtatactaggtgaatttttctgatattgtaatttattgaatgatactttaagatcaaggttgctggaccaaaaatttgacctcttattgtcattgaaatagagctaggattctactgacatggtattttattatctttttgcatgggttgatgccatg

SEQ ID NO: 328624 - DNA, 691 bp, Homo Sapiens
  misc_feature (36)..(36): n is a, c, g, or t
  misc_feature (343)..(343): n is a, c, g, or t
  misc_feature (671)..(671): n is a, c, g, or t
tttggacaagttgttttaataggaaatagacctgcntgcttcataggtttcctcaaccacctttcctcagctttcttaaaatgggatctacattggctcttcacacccaaatagcagactaatcgtttttctgcttagcaccgtctggttcattgtcttgaactctgccttacagcagcaagaaaattttcctcgacaagaacctcaatctttagttccattgagctccccctctggattttggacttaccagaagtaggaggttctgataccattcaagatggtctttccttcaaagcaggtctgaagaggagactaccaaagcagtgtttacaaacccagnagtccacacaaccatattgcataggaacagcacttgggttttcacaagcctcctacaggacctggtgtaattggagtgaaagggcagagaccctggaagtggaggtggctgtgtgctgcgatgggaagaaggcagaaggcccaggggctttggacatagagcagggtggaagctgcaagtactgggaaggaagagagtttcacagaaacaaagctttgtcacacagaaatgagttctgtctcactggtgacttcatccctcaggctccagctgagcagagattttaatcagcttccttaatgggtattgacactgctcaggaagcagnagaccctgtcagggacagct

SEQ ID NO: 328625 - DNA, 727 bp, Homo Sapiens
gtagacggtgaaaagccagtcctgggccccgcacccctcaccgagctgggcctggtgaggttcccggtccatgctgccttggtctggggtcccgagaagaacaagatctacttcttccgaggcagggactactggcgtttccaccccagcacccggcgtgtagacagtcccgtgccccgcaggcaactgactggagaggggtgccctctgagatcgacgctgccttccaggatgctgatggctatgctacttcctgcgcggccgcctctactggaagtttgaccctgtgaaggtgaaggctctggaaggcttcccccgtctcgtgggtcctgacttctttggctgtgccgagcctgccaacactttcctctgaccatggcttggatgccctcaggggtgctgacccctgccaggccacgaatatcaggctagagacccatggccatctttgtggctgtgggcaccaggcatgggactgagcccatgtctcctcagggggatgggggtgggggtacaaccaccatgacaactgccgggagggccacgcaggtcgtggtcacctgccagcgactgtctcagactgggcagggaggcttttgcatgacttaagaggaagggcagtcttgggcccgctatgcaggtcctggcaaacctggctttccctgtctccatccctgtccctcagggtagcaccatggcaggactgggggaactggagtgtccttgc

SEQ ID NO: 328626 - DNA, 752 bp, Homo Sapiens
  misc_feature (742)..(742): n is a, c, g, or t
accaccgtttgtttaattgctcgctcattgaaggatatctgggatgttttcagattttggctattacaaataaagcagctgtgaacaatcacatacaggttttggtgtaaacatgagttttcgtttccctgggataaatgtgtaatttctgagtgcagtgtaaattccaagagtgaagtttttgggctgttacgataagtgcatatttagttctgtaggaaactgttagactcattttgcaaagtggccataccattttgcattcctgctacgaaatgtatgactgatccagttcctccacactctcgacagcacttggtgttttcatctcttgtgattgttcgagttgtgtagtaacatctcttgtgggttttagtttgcatttctctaatcagacattttttatgtgcttgtttgccatccgtgtatcctcttcagtgaaatatccattcatgtcttttgcccattttctacctagattgtttttcactgttgaattttgagagctttttatgtattccagatacaagtccttcgtcaaatatgtggcttgcagagattatctcccagtctgtattttgttttgttcaacctcttaacaaggtctttgaaaggcaaaaatttctaatttttatggtttattaattttttcttttatgaattgtgcttttggtgtcaagtctaaaaattctttacttatccctagatatcccaaagattttctactatttttcctggaagntttatattat

SEQ ID NO: 328627 - DNA, 736 bp, Homo Sapiens
  misc_feature (18)..(18): n is a, c, g, or t
  misc_feature (34)..(34): n is a, c, g, or t
  misc_feature (41)..(41): n is a, c, g, or t
  misc_feature (63)..(63): n is a, c, g, or t
  misc_feature (103)..(103): n is a, c, g, or t
caagatttgggttactgnaacttgatttcattancatcccncttcaaaatgaaaggcaggtgnaggacagggtaagaaataggagaaagaggccaagagaagncaaagaagaagaggggcacctggtcagaacgttcaagtcttgccttttcttaggggtgtgtattttgtggctgttccttgaaatgcactgactcaaaacattgacagcaagtgtgtgtgtgattatttatatatctataatagaatatgtgggcttcctccgtttgagtctggactgtgtttatttaaacacactacgatcctctttataggtatcaccacagggaatcaggtctcctgggaaccccttttagagacggggcttccgaaagcagggtcttgctgaggtctttgacctcctcagggctgttgaacccgctcatagccccaggacggccatgggctggtagcaaaactcctccacctgtttgatctgctggaaggtgaagggcggtccgccaggcattggcggcctgcgtggcattgcgtgcagataccacgaaaggcttggaggaggagcccgagccactggtcatgttcagggcaaactgctccatttcggggctcaccaacagtcccacaaaatcgtacactctccgtagtgtcttgacggggtctcccaccaggtcctcgtaccgcaccaccaggtagttgccctgcagccagtcagggggctgcagggctgtctgcagcg

SEQ ID NO: 328628 - DNA, 470 bp, Homo Sapiens
attggctttataaacaggactgaagaaaccagaagcaacaaagtgtgtactcattacatttagagagaacactagaaaaataactgattagttaacatccggttactttaggctgcctttttttgtgctaaggattaaagccgagagaacttcatgatcataccagttgacaatttaatcctgcttatttgagaaattgactctctcttgatttctcaggaagtcagatgacaacttagttttgtcgatggctgttgtaaaacctcggttcttgtctccttagtttaaaagaaattaaacaagagacacacagcaaaggagatgcagcatgggagcgatttgttggcaaaagaggcaggatattctgaaagtgacgtgcagaatagacagtacactctgagacaggattcagggcgggctgctcgtgaggatgggacagcattgacttactggggagactcccttgatga

SEQ ID NO: 328629 - DNA, 404 bp, Homo Sapiens
  misc_feature (20)..(20): n is a, c, g, or t
  misc_feature (27)..(27): n is a, c, g, or t
  misc_feature (40)..(40): n is a, c, g, or t
  misc_feature (76)..(76): n is a, c, g, or t
  misc_feature (375)..(375): n is a, c, g, or t
aattccaaaaataaaactgnaaaaatnaaaagaggtgttnatgggagccacagaacatcctgaactaactcccttnagttttgcccagaagagggttcccattttaagcccagtgcctacttgaagtatggtgcccagactgtgaactgcttgttacctattcataacgagataaggagctggcggcaaacataaatcatataataataattgctaggaaaaaagtgtaaactaaacttaagctgggcttaatgccacagttaaggcacactatggtacaaattccttttctgtcatggactgagcagttagtttgtggactggacactttggatagcactgaagttaaactaagtgaagtgaaaaatgtagaanccgtgataggcaagctggagtagaaagat

SEQ ID NO: 328630 - DNA, 555 bp, Homo Sapiens
  misc_feature (161)..(195): n is a, c, g, or t
  misc_feature (197)..(197): n is a, c, g, or t
  misc_feature (269)..(269): n is a, c, g, or t
taagctactgtgcctggcccaaagtcaggattcttaagggaactctccaggacatgcttcgtttctctcagtctgtgtcatttagggtggcagaatggtctcacagggttaacatctctggaagtaaaccatttacccaatatgatgtagtggagttagannnnnnnnnnnnnnnnnnnnnnnnnnnnnnnnnnnanaacccaaaaaaactagcctgcaggcaaaagcaatctgggtcaaagagtttcagcaggccttttactaagagncacactattttgagagtacagctcttgagtgtataaagcttcttgctcctaagccattgctggggcagccaaaaacacaaagccctggttaaggagaggaacatatcctttctttcttgaccactttgtggctattcttccagtagtgaagcctcaagaagtaaacatgaaatctttccttgctctgttctttaagaaaaagcattcattccttgtgttgacctttctaaaaagtttgtttatgcaactgcaaaagagtggaaggcagctcacacgcagacatgca

SEQ ID NO: 328631 - DNA, 803 bp, Homo Sapiens
aaggggggactcggaacaagaccccacaaaacattgcgggaaccgcaccacggtccacggggggtccccataaaggttagggggccccggaaaacccccagggttttccaaaccacccttccaacatctctaaagaaaccccgggacaattgcgggaaggggcccaaaatcgcacttggaaacacctttaagccaacagtcctggcccatcgcttgggaaccggcaaacaccgtaaagtgccttggaccaactttctcaaaaggaactcctcctgggaagacctaacttgaaaagtcccagcccttcccaaaccacagggttgaacaacatgccctccatttcaaaccacgttcacttggtaaaaatcccctacggttcatgggaaaaacacctttccatcaaagctagagggcggattgctattttgcatcttttttgcaatgcacattctccaacagataatccacgtgtgaagtttttttgccctccttccacacaaatctgttattacctttttctttctttttaacttttaattgtattgttttgttttaatgcccagatagcacagcattcctcctttacttgccttttcacaagcccgtaatcaatatctgtaaaagttaaaattagtttccacagaaacattgatttcaaagcaaacactatcttaatgagcctaactctggtaaattaaaaatataaatggcactattaagagaggccaaggaaacaatacgtaatatttagcaggatctctaatattctaatttcagaagtgttaaactgtgtaacagttaca

SEQ ID NO: 328632 - DNA, 943 bp, Homo Sapiens
  misc_feature (752)..(836): n is a, c, g, or t
aggaaggtttttattaagccaaagcagccaactacaatttagaaaaattgaacttaaggataaagtgctttgtgtgatagcatctgagcctactgttttggatagcctattctcaatactttttatttgaactcttcagccaatggctctggagaaaagcgtggcctattaactggtgcagttagtgtgctaggtgccaaatggaatgagccagtttctgctcatcttcagactggcgtgctttggcagtccccatacaactaattgggtaacacttcttcctttcctaacttgggtagagaagggtgctgtatttattctatctcgaagggtgttgtgggcctagggaggactgcagcttcccttcaggaagcctgaactttttatcctgggctctgtactatccagcttctgggtcatccacactgtcccaaaccattgctgaggacagcagaggtgggagaaaaaatttggtcactctgtcattccagccagtgcacattcttcagcctggacagatggaaatcaagatgaatttctgtccactgtcccagtgggaaaggagagcagagttctattcctggctttgcccatcaaatggttgggggatctgtgaaagtctctgaaattatctgagcctcagttttctggcctctaagatgagagtagtggaacagatgtctctctttttaagctttaaaaaaagttttgcttttttcttgagatagggtctcaccatattgcccatactnnnnnnnnnnnnnnnnnnnnnnnnnnnnnnnnnnnnnnnnnnnnnnnnnnnnnnnnnnnnnnnnnnnnnnnnnnnnnnnnnnnnnctggaatggatgtcttctaagatgcttcaccattcatgaatcatggaaatctgtatgtctaagataataatatttgtagttaacacttactgcacacttacttcatt

SEQ ID NO: 328633 - DNA, 487 bp, Homo Sapiens
  misc_feature (98)..(154): n is a, c, g, or t
  misc_feature (378)..(378): n is a, c, g, or t
  misc_feature (474)..(474): n is a, c, g, or t
aatttaatctctcaatgacaacttacttgattccctcattctctttctgctacatagatcacagtagaccttggcagacagttctgtagttacatagnnnnnnnnnnnnnnnnnnnnnnnnnnnnnnnnnnnnnnnnnnnnnnnnnnnnnnnnnggcaatgcttctgatgtttttttcctcctccacaaagaataattaacatataacaatagggtctcagctagttgttttaaaaatggttagagagatgtgtggaatgaagtaagtgtgcagtaagtgttaactacaaatattattatcttagacatacagatttccatgattcatgaatggtgaagcatcttagaagacatccattccagggccagggcatggtnggtgtgcacctatagtccaagttgctcagtaggaatgagggcaggagattgcttgagcctagggatttgaggctagtatggggcatttgggtgaancctatcttcaaga

SEQ ID NO: 328634 - DNA, 937 bp, Homo Sapiens
cgcttatcatctatttttagcgttagtgtattttacatgtggtccaagacaataattcttcttctgatttggcccagggaagccaaaagatgggacaaccctgccctaggccttcacattcactctctactaactcactgactcacccagagcaacgtccagccctgcaaactccattcatggtaagtgttctaaataagtgtaccatttaaaaaaatcttttatatgccatttttactgttctttttctatatttagaaacacaaatacttaacattatattaaaactgcctacactattcagtatgggtaacatgctgtacaggtttgcatgcttccctaataccatccccttccttctcttgctgaagcactgtcagtgacatgttttaaagaagataataaaaacagtagcacagctttacatgtgttgaatggttaggaaatatataaataccataataaccatgaccttttatcttaaaaaggattgtctgcttgtggaagtggaattccagaggagttgccagcttgtggagttattatccaagtggtgccaaggagggttatccaaaatctgcccagaaagttttaaccggccagagtaaacggtcttttgtttaacacagaagttatgtatagatacatccttcacatatatgcacacagaatgaagtacagtcaaatagacctaagaataatattgaggctagcaaaagtgatagtgttcagtgacagtcaacaatggaaattttatgcataaaaataagaaaactaattacaaacacatttaaaaattgggacaaaatatacacagcaaaatgcataaaaggcacagtttttattcattactttttatttctgaaaaaattcataactttatatgatcttttgtatttattttttatagttgtactttttctaaacaggtgaattt

SEQ ID NO: 328635 - DNA, 474 bp, Homo Sapiens
  misc_feature (44)..(44): n is a, c, g, or t
  misc_feature (68)..(68): n is a, c, g, or t
  misc_feature (80)..(80): n is a, c, g, or t
aaacggaaaacctcctaacttcctttaaaggttatatacaaatnaatttaatcccaccaagttttaantttgtgttgttntcctgtacttagcactgatttagtgtaatgtctgaagtgtccgcgccttagatatttctactgtgaattctcagatatttacataaacttaatttcggattaaatttttttcatttttactgcatctgcaaaaacatattttagtatgaaccctgtggtgttttctatgctgtggtttttttaaaaatgtttttccaaactgattacatttgtagggtttttctccaatataaattccctgatgttgaataaactttgtactatcaaccaagcattatagaccctcatgttttataagctgtagtttttcaaaactgtttttacaaatttattacattttccaggggttttttccaatataaattttctgatgttgaacagtatttgagcaact

SEQ ID NO: 328636 - DNA, 695 bp, Homo Sapiens
  misc_feature (246)..(254): n is a, c, g, or t
gagaaaaccatggtgtccagtggatcattcctttaactttaatcttattatagccttatgtttttgatgtatctcttttaaatagcatgtagcttcaccttggttttttaaatcactctggaaatctttgccatttaaatgatacatttaatctacttacatttaacgtaactagttatatatttgggtttaaatccaccatctaactcagtactttttatttgccctgtttgttctatgttctcnnnnnnnnnccttcctttagagtgaccattttttattattctaatttttgccctctccccattagcttgaagttataaactcttaccattttaattgttaccctagattataagttgcagccttcaatattaattggtaccttaccctatttccagtcaatacaaggactttaagaacacactttaacaacatataaacctctcttccaacttataaatcatgcattttagttttctctctattttaattctacaaggtagtattattatagttgtatgcatcttattattgttctatatagacaatattaacttagatttacccatatatttatcattttttggtatctcttctatacctcccaacttccatttggaataatttaccttctgcctgaaaggacttttgtcatttcttttaataaaggtctgctgataagaaattcattc

SEQ ID NO: 328637 - DNA, 529 bp, Homo Sapiens
  misc_feature (264)..(264): n is a, c, g, or t
agtacttaggtcttcggaggaagaatactctgccccttcttttgggtctacgtatcagaacatctctgcccaagtcctgacatcataacctttgccaaccaagcaaggcctcctttcacactgctcatcataagatcataagatgttgaagacattttgtatatggtgagctctttccaaccccagggcctttgcaagcgctctttccctctgcctgcagtactcctcattggtgctttcccagggctggttgttgctcatccnttcaggcttaaggacaaatgttacctccacagagaagcctgctgtcaccaccctatttcagatggcatgcccttattctctatctcaccatcatcttacttctttcatagctatgattataatctggaaaggtcttgtcaatatacctatttgtttatgatctgtctcctgcaccagacaataagcaccatgaaggcaaggaccttgcctcttcactgctgaatttacgacacttccctggtgcctggcatgtaggaggtctcat

SEQ ID NO: 328638 - DNA, 683 bp, Homo Sapiens
  misc_feature (325)..(325): n is a, c, g, or t
ttgataatctttagagacaccaccttttctgtatttattttgcagaggaagagagaaagcatttggttgagtttaatacttagatctttttatcaacatcttgattataacacatgctaataatgtgtagtatccattactagggaccctgtggaactgtgttagagctctagatccattttattctctgtagccactacaaaatttggaaaccggcctatttgagtcttattcataatggtagatctcataaatatctgcctgggttgtatgaggattaagttttttgggcacatctactggataggctgaggagaggaaaatnaatactttactctgtgtctttcggactaagtccatatgtttagtgtgtggaatgttttactttgtattaatagaaggtgtttgtgcagttaattcctgcaaatagaagctgttttgaggattaattgtgaatccagtttattactttcaaggactacttgaaattacagaaaggtaattttgttttgtcactcaaaaactgaagttatcattttttcccactgatttggatcaaaattggtggcttgctttttcttttactagtggtagtcatatttttctttaaagaataaataacaattgatcttttgttgctgagattacatggttagtagcaggtttgcatttgaccttatacc

SEQ ID NO: 328639 - DNA, 523 bp, Homo Sapiens
ttagaaaaaattcagagtagtttactggtatattccatggaggatagcagtccacatgtaacaccagaggattattctgagattattgcagccatccttattggagatccaacagtacgctggggtgacaaatcctataacttgatttccttttctaatggagtatttggctgtaattgtgatcatgctccttttgatgcaatgattatggtgaacatcagttattatgtggatgagaaaatttttcagaatgaaggaagatggaagggttcagagaaggtacgagatataccacttccagaagagctcattttcattgtggatgagaaagttttaaatgacatcaaccaagctaaagcccagtatctcagggaggtatatttttcacttttctcttaaataataatgattttttcttttaacaatcatatgtaaaaatttggctgtcatccaagcatgtctgcacaaaacattttaaaattatgcctttaacacctttaattctttatgtctggtgattact

SEQ ID NO: 328640 - DNA, 448 bp, Homo Sapiens
  misc_feature (11)..(11): n is a, c, g, or t
  misc_feature (58)..(58): n is a, c, g, or t
  misc_feature (85)..(85): n is a, c, g, or t
  misc_feature (342)..(351): n is a, c, g, or t
  misc_feature (427)..(427): n is a, c, g, or t
taactgcaatnccgtacatgtatctgaaaaaggattcataatcagaatgcataatganctcctataaaccagggaaaaggactgnaataggtgctttaaaagaggcaatctaaaaagcccaataaacacacaaaaaggcatttaaactcataaatcatcaagtaaacataaattgaaaccaaaatgagagactactgcagccacactggaatagcccaattttttaaaaactgttatcatgtataggtgaagatgtggagtaactagtattctcacacattgctagtagaaatgtacatgctatatccactttggtagtatctttgaatagggtaattgacnnnnnnnnnngaaatggaagtatctctgatagtatctgataatgctgagatatacatattctatgatctaagcattccattgctgngatataaatcatacagaactg

SEQ ID NO: 328641 - DNA, 784 bp, Homo Sapiens
  misc_feature (683)..(683): n is a, c, g, or t
ttttctgcaatcaatggaaatgttttatatctatactttctaatatggttaccactagcacatggctgctgagtactcaatattgccagcttgactaagaaaataaattttaaattttatttcattttaattattttatctttaaacttaaatagccacatgtgattactgaccgctgtatcacacaatgcaaggaagttctcagaactctcccaaccaggcaggagacaaagaatttgtaaaggaccaagataagtattttaattttaaactatgctgcctacttactctatacatgcctttagcttattcagcaagattgaacattttaaaaaagccttactagaaaatggtttttgacaataaaggtacagatagcattgatttttttaaagtgctttagtgtatttggttttcttttataaacaagattactgaataagaaaattcttaccttggaatattaaagtttctgatgagaatgagttttgggaatagcaagtatctcctaaccttcctctcagatgctccccaagagttatgttgccaggaaagacggaactaccatttcatcctaatgaccacctttcccatggaaactcttccaaaagaaagttagttgtatgccaatatcaactcattctcccagaaacgcagaaagcacctaattttcctaatgtagnatgcctttggccaaggaacgtgactaaattttctggtcacttctttcagctcaagaaacaaatactcttgtgtaggccttgcatttgagacgcgattcttg

SEQ ID NO: 328642 - DNA, 757 bp, Homo Sapiens
atggtcctttaaatcagggtttactgcactgcaatgactatggataaatggaacttctccaggcagcagggtgccaatctgtagtcttatcaatgcataaaactggaagaggggaaaaaggcatacaatggaacataaaggccaaataactgctctcttctgcttagcaatgattttgtagtggattgggaaatataaatattagttgcatgatataaactgtgatacggcctcaaagtttctctccaaaatagatatttaaagagaaataatgctgtgcttgtatatttaatgctacctacctcggtggatgaaaagtcataaatatttagatgtaatgcctctagaaccccaaccatgagtatacatatagatacttcttgaaactctcccttgagacctataaatttgtccaatgaatccccacaaatggctcctaagaatgtttaaacatgggagatagagtagattcccaagaatagaacattaaagttactgtatacctcaaatcataatctctacaaataaaacaaaaatttttattcagttccacaggaaggttattaccaaggcgggtaattacaaactatatacctctagagaaaccatgtctcccaaaaggcacatgatcatgattttcatttgaaataataatttcatgtaaaaataggtgagggaagaaagacacacagacgaatgatagagatctgttaacttctcagctagccatttgtggattctttcaaattagagtttg

SEQ ID NO: 328643 - DNA, 627 bp, Homo Sapiens
  misc_feature (455)..(463): n is a, c, g, or t
aggtttgttatagttgatttcttgaagtgagcaagaaatgctgcaagatcctccctgcggcattccaagtgctgctgtggcagatgaacagcaattgtttaaacaaattacatgcggatctgaaaggcttccccgggtctggaattcagccattgatctgaaagtgcaaaagcaacatgcctccctctaatttcataccttcccagcatcgccctcgaatttcaggatttatttggcagcagatgatgtttatgtctttatatcttttgggaagggaagagggggaggagatggtgttaaaataatgattgcaattgtaatattccctgcatgtactagactctttaaagtcattttggcaattcaatagaatatgtgcaaagtcagaaattatgatgttgggaaaaaataattcctacgtgcaaaggattgttgttttttcaactatcagaccnnnnnnnnnctagtgctttttaactatgggtgccgttataatagattagaaaccagtgaaccaccaaacagcatagaatattgggcatctcccaatacattttaatgttttccattgaattggtctatgaatttcaactttcctgcctagtttcctgcttaaaatccaattat

SEQ ID NO: 328644 - DNA, 900 bp, Homo Sapiens
  misc_feature (292)..(292): n is a, c, g, or t
gagagctagcaccaatccctgcctcccttttcaaccattctcaggcaagcagatttgacttgatcccatcatgtccctgcatacaagccttcagtagaatctaccaatatcagaataaagtccaaaatctttaacctgtggcctcccagggttttgggtatcggcttctccttgcctctcatctccgccatccttttcctgctctatacttcggccaggctgctaccctctcccctccaagcctgtgcacattctgtctgggacccttttcccagcagtgcctcctgaatangatgcgatggggatttgtcacctaaagtttcacgtggggcagttctcctacccagcatacagcatattcttcactgcattttcaatacctgttgcttttctgtatttgtcgtaagatgataaaagctctatgacaggagactgtcttatttctcctattgtttttttccagtaagtaccttgaatggcagattactttaaaaattataaaatggcaaatttgtttttataattagaaacctgctgtttaaaaacaaaaactagccaagcaggcatttgcctataatcccagctactctgggggctgaggcaggaggactgcttgagcccacaagtttgggtcagtttgggcaacatagtgaaacctcctctctaaacaaactaaaaaccaaaaattaaagctacttaaaggaaaccacatgattctgtcagtaacatacactgataaatctaacactaatcaatcttttttagttgataatgggttaataggaaaacttttacttaggaagacctacttcaaaataacctagatgctcgtctataccagcagacccaatcagacatagtagctaaaaaatgccagcacaccctcttaattaagcggcc

SEQ ID NO: 328645 - DNA, 456 bp, Homo Sapiens
  misc_feature (434)..(434): n is a, c, g, or t
tgttttcgaacctaaaaccattttcagccttttagatatgtcatgtgctgctgcttcccgaagtggtcttgctttctgtttcgtaagatgtcttgtttacacactgtatcagggatttggtgatacttgaaaattcctttggagaaaaaaacaaatttaattgccacactgcctgtcccacatgagggctgttaatttggaacccaagtttgaacccaacttgtgatggacccgcagtaaccacagagcttcctttttgaaggcatatggttgggagagaaccattttcccagctctcggttccggaagattccacgtcttggagggctgtgtttcaccactaggaactttaattaactacccaggggaggggaggaagctcgtttgaaaggggaggacaaaggtttttaaacagtttccccaccctttttttnccaccacatactttacaggggg

SEQ ID NO: 328646 - DNA, 432 bp, Homo Sapiens
  misc_feature (31)..(31): n is a, c, g, or t
  misc_feature (76)..(76): n is a, c, g, or t
  misc_feature (125)..(125): n is a, c, g, or t
aataacccctaaaaaatggtaaccttaaaangaaacttggaaaggtaaatcctaaaaagctcctggttggccctanggctggaaaaatgcaagtgggtgaacaatcaacaccctcaacctaacangccttcaccctccccccaggctcaaagcaaatgctccctaccctcaagtctcccttaacagctggggacccacaggcaaatgcccacccaagccccagcctaatttattcctgttttgtagaaatggggtctccctatgttgccccaggctgtaaacctaatgcttaataaacttaaacctaaagtctagctctgtaacagtccttcctttattttctaacaccactaatatctgaatatttatagatatgatgacagaggagtaaaggtctctcagagggcctgatctcaatgttgtaaactcagt

SEQ ID NO: 328647 - DNA, 759 bp, Homo Sapiens
  misc_feature (523)..(523): n is a, c, g, or t
ttacacacatgaacagcatttatttttcatgcactcaacacatgttcaagcctacggactctctgctgggccctgagcggggcctgggaacagaggtgtgagaaacctctaagctggtcgaggccagggccagtatcgtcccccagcacagagcctggtggccgctgtcacctagtgagtgtttgctgaatacacagaaggtcatgtggggtgagcaggttgggcagggcagctggaataaggggtgctgtggctgagaccaagaggggcttgtcccacctgggaagcacctcagtcgccgggttcctgggtcctccttgctgatggctgcagactctggggaacagggaacccccttctgcctcagagaactttcctagggagttggagacggccaccagccccctgaacagtggcctcaactcctccctgtccctgaagcccctgggcttctggcagcttggtgcctgcctgcctgaggttcaggctgaaacggccctgggaccacgtgtctatgtcccanagcgcccagagggcccagccctgccccgtgatcaggttaaggcctggcagggctggggaagggaagggacatgcagcaggaggtcatggggcccaggagtctaggagggactcccagaccagcataactggccccacaggccccgagctgggagccctgaggtcagagccccacagaggagcccgaagcacagtccagctcagcagggccgcttgctgtccagaatggccttccag

SEQ ID NO: 328648 - DNA, 782 bp, Homo Sapiens
  misc_feature (580)..(580): n is a, c, g, or t
  misc_feature (590)..(612): n is a, c, g, or t
  misc_feature (684)..(684): n is a, c, g, or t
  misc_feature (693)..(693): n is a, c, g, or t
  misc_feature (727)..(727): n is a, c, g, or t
atttttttgatgaattaatttttactatgaggattctcacatggtgattttgtaattctatcattcctccttcatttgttactattgtactgtaaggaaaagctttctcatcttcatctgttcattcatgtatttattcagatgagtgttattttattggttttaatctgtcacaaacattgatttgatgctcaaattatatccctcagattggctcttcaggctgacttcagtgtcctttctaaaacctttttatttttaaatgattttaaatttatataaaagctgcaaaagtacacaagtgcttatatacccttgcatacccagattcttagaacttttgagaataagttgtagacatgtgccatattatacttcggttctttagtttgtatttactaaatacaaagatatcctcccacacaaccatagtaaaacatcaaaatcagggtagtttactatgggattaacactgaccccatattaccatctaattcatagactttatttagattttttcagttgttccaataatatgctttgttgcatctaaaccaggatcatgtgtttgttcagttgntttatcttannnnnnnnnnnnnnnnnnnnnnnaaaatagagatggggtcttgctgtgttgccccagggtggtcttgaactgtcggcctcaagcattcctcctgnctcatcctnccaaaatggtgggattacaggcatgaactactgngcctgggcaacaagagcaaaactgtctcaaaaaaagaacaaaagaaattcctgcc

SEQ ID NO: 328649 - DNA, 325 bp, Homo Sapiens
  misc_feature (14)..(14): n is a, c, g, or t
  misc_feature (71)..(71): n is a, c, g, or t
tagagacccccccncatttcttctgcccatgggagaaccacagcaagaagtcccccatcccgtgaacccanaaagtgggttctcacccagatactgaatctggccagtgccttgaaccctagactttcccagccagaactgtgagaaatttctattgtttataagccacccagttgatatttagttacagcagcccaaccaagactgtggttatgaggaaacaaacacattattgtggctagactaatggaactgggtcccttacctccaagtacaccctctgtccttttcggtaaaaatatcttcgccaggcacggtgtctcat

SEQ ID NO: 328650 - DNA, 542 bp, Homo Sapiens
  misc_feature (244)..(298): n is a, c, g, or t
cttagaacttaattttatgtttggattttacatacatagctgagatctgaaagaagaagcccatattttatttaatgttaatttttaaaaattttctctccagctgtattgaggtaccactgacaaataaaaattggtgtgtatttaaggagtacaatttgatgctttgctgtatgtatacattgtgaaacaatcattgtatcaaggtaattaacattttcatcacctcgcataaatgctgttnnnnnnnnnnnnnnnnnnnnnnnnnnnnnnnnnnnnnnnnnnnnnnnnnnnnnnngttcttggtaatgagaacacataagatctactctcatagcaaattttaagtacacaatcctatattgttaactgtggtcaccatgctgtatgttagatccccagaacttatttatcttgtgtaactaaaacttcatattcattccttcaccaacatgtcttcattctaagcaccccgcccccagcccctggcaactactgttccactctattcttctgtgagttatttaaagtgcactttcgga

SEQ ID NO: 328651 - DNA, 394 bp, Homo Sapiens
gcaaatattgttttaacccatctgaggctcaatgtcccttccctagaaataccaactaatggttctgtttccaccatgggatgtttaggttagacagtcagtgcacagggaaaattaacacagcctccacctgatgcagaccatgttaatttctgcccgcaccgctttgtgccgaatgcaccagtgcgccttggcaacagctctgggccccggagaggcaccttttctaaatgtatctggttactcttcatcatcgtggcatcttgggaaaggcagagcatcagtctgcagaataaaaagaagccacttaccagatgcataaaaaagggaatatctttagtattcaggaaaatggcactctgttttataggctgctttaaaaacaaacaaaaac

SEQ ID NO: 328652 - DNA, 355 bp, Homo Sapiens
  misc_feature (27)..(27): n is a, c, g, or t
  misc_feature (36)..(36): n is a, c, g, or t
  misc_feature (46)..(46): n is a, c, g, or t
  misc_feature (63)..(63): n is a, c, g, or t
  misc_feature (68)..(68): n is a, c, g, or t
  misc_feature (75)..(75): n is a, c, g, or t
ggttaagaacagtccagtgcccaaccngggaaaaantaaaacaacngcccctccccacctgangccangaccccngttaaattccctgccccccgcaccgccttgtgccccgaaatgcaccccagtgccgccctgggcaaacagcctcctgggccccccggagaggcacccttttccctaaatgtaatcctggttacctccttcatccatccgtggcatccctggaaaggcagagccatccagtcctgccagaataaaaagaagcccacttacccagatgccataaaaaaggaatatctttagtattcagaaaatgacactctgtttataggctgctttaaaaacaaacaaaaac

SEQ ID NO: 328653 - DNA, 676 bp, Homo Sapiens
tgatttgctgccaggtagcactttcttgtgatatatatgtttgctaagacccaattccattccctgtgtctcctctttcctaatcctaaaatgcagggtgcatttgccaagttacatttggggtcccttcatgttcccaagtcttttgaagcataagactacttttggggtacactgcgtattgttctgggccattgcctccccccgtttttcctgccactgtgtgctgggtgagtacatacactatacaccccataccaacccacacatgtccccctgttaagcttgatttgcgtacttggcaatttaatacttcctgcctttcaacccacagtggaagttgagttcagagaacatcttctatacatcagtaaactatcatcttttaaaagccagtcctttcagaaaggagtccaggcaaataaaagaaaattactgatttaattcttacactcctcacttgcatttaatacctaccagattttttaaaaattgttaatttggattagaaaaggaatctaaaatatggctctgggtatactaacttagaattcctaaaataacatagttactttctcacatataggtaataggcatatgaaaatttcaatttacatttatagatctgatattatactctgtaaatattaaaaaatattccttaatatcagctctg

SEQ ID NO: 328654 - DNA, 631 bp, Homo Sapiens
  misc_feature (290)..(290): n is a, c, g, or t
cttgcccaattggagttctaaaccccttataataagcacatatattagatatagtcatgtgttgattcaataacctgatttcttccctcctttggctttatcacatttgtcatataactgtcaagtctccctgagtatttgcccaacatccattgagcacatggcaaggagaaaatgtggaggattttatggagatggtttgaaaggggattcccatgccttctgtccacgtttctgtgggccaacagtcagtcacatgatcccacttaggatgcaaggggttctatatnaatgtagtccctggctcaggggatgccccagagacagttctatactctaaaagaggagtatgaatccttagtagacagttttccaactgtaccactctgtgtgatcttagaagactttctgagcctgttttcttatattttaaatgaagagaacttaactaccttacagattattattattattatatgggattatatacacaaaaaacatgtgagctgaaaaatgctacacagattcattatttttataaatgatatgagtaaaatttatttatttatcttaccttaacctagagaattagaagagcgctcaggagctaggccgtattatgagtaaattg

SEQ ID NO: 328655 - DNA, 435 bp, Homo Sapiens
ccattaactgtttctctacaaaacttcgggcttctgctcaacttttagctttttctccaactggctgatattctgcttgtctttttgcttcatttgcacagcattatgtaacttgttctgcagcagctcgttctcctgccgaagctggcccatttctgagcggatccctcgctcggtgctcgaaagggagctgatctgactgcggagtctttgttccacttgtctgctggcttgcaggtcagcctttaactttttaatgtcttgttccagcctgaccagtgcgtctggtttgcttagctggttattaggaatacaagttttccattaaggccttgtgtgtacttggggctcttgctaggtgcaatttctgcttcttctcatttttactagatgagggaagggatgctcccatttgtggcgctatgacttcgaggt

SEQ ID NO: 328656 - DNA, 202 bp, Homo Sapiens
caaggcttaacatgtaatttaacaagttgatgctgcattgctgctccatttctcagaaaaacttcaaatttaaagtatcagcaacaaatcaaacatagtacatcaattaaattatgcacagcataactactatctaagataggcaaggctaagagctactctcagaccttcagcatacagcaactctgtttccaagattgta

SEQ ID NO: 328657 - DNA, 450 bp, Homo Sapiens
  misc_feature (181)..(181): n is a, c, g, or t
  misc_feature (390)..(390): n is a, c, g, or t
  misc_feature (408)..(408): n is a, c, g, or t
  misc_feature (416)..(416): n is a, c, g, or t
  misc_feature (436)..(436): n is a, c, g, or t
atagcattatgttttgtaagaacacaaagactcctgtttcttgtctagtctttgactgaacttgacactagttaacagtctggggaccagtgaaaggttaatatgtactgtaaaattcaattctcagatattcattgtcatgcttctaattacacttctttttggccaccaggccaaattncaattgtaacagtacatggaggttcacaatatgtattcacactggagacgtcggcattgtttctattgatgctaatattctaggttgtaatagtgcactacttttgacagctcaatgaactagccaaatatctattttgggcagttgaaggatacaaagcagtatagtcattgatatagttcgggatgtttggcccttgtcccaaatgntcatgttggaaatgtaanccccagtnttgaacgtggggggcccggntaggtgggtgattt

SEQ ID NO: 328658 - DNA, 732 bp, Homo Sapiens
  misc_feature (468)..(468): n is a, c, g, or t
ttaaatgatctattttgtgttttttgctgcagaatcacattcatatggcagtcatatttcaggcacttttaaaacatgttcatctggaataaaaatctgcatgaaccacttctgcataattcaaaatgagtgttgagtgattctagttctcaaatagatagcaaatcaccacctggtgattcgctttcttcatcacaacatgacggtgactgctgagcttgagacatctttgaggtgcctttctggcttcagtaaaaagatgtgagccataaaaatccaaactactcagtttctacttaaaaaaatacaaaatggtgaaatatactaaatgtattatacagatggtttcagctactatcaaaataaataacataatctgactcagaagtctgactgagcttttggacgaaatctgatggaatgtacaaacgtggagactccctcctagggactagctgctggtaggcnaaaagtaactcaacatccttaccatttgctacaacagtattggaagagcagctgctggcaaggtcttctgcagtggtcaaagaggctgcctgggaatgagttttggtcaatggagtggtagcagatggagaaggggtgaggccaggtttcttgggtgggatgggtggagggtttcctctctcagctctggggatggttggggacttgattcctggagacagggggctcaggggactggacactttccctggagtaggtgaatgg

SEQ ID NO: 328659 - DNA, 324 bp, Homo Sapiens
ttggaaccacaattgatctcagaagtgtaaccctgtattactgagaagcttaatcaaggacaaataaatcccctcactccacagatggctgacatgatggtctgtgacctgaaagttgttgaatagttggagtgttctgcattcatgtggaagaggctaaaggatgtttgatgaagcactatgggctgccctggaagaggactgaagaagcagctgcaggaaagaaacgtccactctgctccagtcaaccccactgctggtgtcctctgcactgccttgcactccctgaagagagcctgggcaacagagcgagactccatctca

SEQ ID NO: 328660 - DNA, 769 bp, Homo Sapiens
  misc_feature (39)..(39): n is a, c, g, or t
caagggccctggacatttaggttcaatatgcaccaatancagagtcataggcatttgtcagtttgaaggaaaattacaattctccaatttcccatccattatcatcttctttaactctcaccacaattctgagaggttgcaaatgataccccagacaggttaagtgacttgcctgtttgaatggctagaaagaggtgaagttgggagtacctgttttgattcttggtaaatggtctatcttccaaactccagggaatgaggcttaaaggaaggctctactgtatataaagaatagcaccggaaaaccagcatagtgcaggaaaagagtgaaaaatggaaaaccaaatagtgaattttagactactgtgaaagaggtccttaggaaatcatttgcaatagcaggatgaagaaactatcttgtccctttaagtaaacaagcccataggaaagtaatggggaaaccagttcattgtagttttcagcacatttcttaagtatctattatgtacatgttacacagaagcatagccccggtaagaattttatattacataccccaaagagcatggacttcttataccattgcatgtggtgtgcaaagaacacggtgatctgctactgtagcaacaatgcatactccaaggcatactcttgggctgcctacaaaataggcaataaaggctgtgcgtttaaggtaagcatgcacaccccacccagaagtgcagagctgcaaccataagtagataagcgctctgaggatttatttctg

SEQ ID NO: 328661 - DNA, 682 bp, Homo Sapiens
ttttgctgtagcaggatattttctcgctcgaacttctcatccttcttccatttcgccttctgttttgaccacttctcttccatttcatcataaatactgtcctgatacgtacgaaacatattcttcaaatacttgtattcttttcccatctcctctgttcttgttttcaaagttctgtttcatctcagcacagcggagatccatttcactggagagcaatttctgggcagactggtggtctctgttcatttgttcaattattgctgtcagctctgagatttgctcttctaggtcagaaatgatgttggtcctggaaaatctgcctttgtccgggatctccgattcccaccgctttttcctatcaaacatctcatcccctaaggtgacagaaatctgttcccgattccgaacaagttgatagccaggtgacacgttgatcacttcataaaatgatttattagtctcttcttgccttgctgaatggattttcatttttggggaaacaacaggttttgttggttggaggtaattgtgattttttggagctggtagaagaggagttagcttggaactccctgtggagttcttgcgtggtagttgaggggtcttgattagcttccgtggtcccaagttccaggggtcccagcaggtgcagtagatgagagggttgggctgtgccgaa

SEQ ID NO: 328662 - DNA, 195 bp, Homo Sapiens
attttcaaatcttaatagctgctttgccatgtgtaaaattagttttcagtatgcaagaatatgagagactagaatagtgtattattgtcatatcataagggttttataatttgtcaggttattttatgtatctttttgcttcagtacaatcatatgctagtggcatagaagattatttcccagctagctgcggta

SEQ ID NO: 328663 - DNA, 841 bp, Homo Sapiens
tttttattttgcattctttacttttattatttagagtctgaagatgctcatggtaaatgcagattatagagctaactttttgcacaaaaagcccacaaaacagtctttgagagagcatgtcagtgttacgtttggattttaaaagacagtgaagcttagctgagattctgttttacagattttgcgaataaataaaaagacagattccgtttgctctggactgtgttagctgcagtgcggagggcggaaccggctgaaggaactgctgtgtattttcagcacatctcagtcagcttccgtttcagtcttctgtttccatcacccacacaggcatattcaagagttcctgctacatcgatgtacgctggtttccctttggatgtgcagcactgcaaactgaagtttgggtcctggtcttacggaggctggtccttggatctgcagatgcaggaggcagatatcagtggctatatccccaatggagaatgggacctagtgggtaagccatgagactaaccgcctggaagaaagctttcctattcctgggcaagctttaaaagtttgggattttccactgtcctttccggtgcgagcatttattgaattttgcagtagtctccataatttactgagagctacaggaggagaaacagaaaacagttaggatatgccatgctttccaagaggaactggcaactgcagtgaggatgcatttaaacaaaccagtgtgaggatagatctctctacgttatgcagatccactccatttctaaaagcaagttgaacagcaaatttcagttgatgggaacctatatttgattattttaaaataggaaaacct

SEQ ID NO: 328664 - DNA, 735 bp, Homo Sapiens
agaaagatgccgcccagggtccccaccgccattcaccagctctacctggacagtaacaagattgagaccatccctaacggatacttcaagagctttcccaatcttgccttcattcggcttaactacaacaagctgacagacaggggactccccaagaactcctttaatatctccaacctgcttgtgctccacctgtcccacaacaggatcagcagtgtgcccgccatcaacaacaggctggaacacctgtacctcaacaacaatagcatcgagaaaatcaacggaacccagatttgccccaacgacctagtggcgttcccatgacttctccctgggaccctggagaacgtgccacacctgcgctacctgcggctggatggaaactacttgaagccgcccatcccgctggacctcatgatggtgcttccgcctcctgcagtccgtggtcatctaggccctactccgccaccggatctgctctgaccgcacttgaaggctggggcccaggcacctgtgccggccattcgttttctctctctccctttctttctcccagctttgcctcccttatcccaccctcgaggcagggaaaagccatctattcttctgcagcctcaggagcgagacttcaaggactcagtttggttccacccagttgaaagacacccagtgcacacccaaactcctggccttctgtggtttccctttgctccagaaacacagatgtgtctaaag

SEQ ID NO: 328665 - DNA, 692 bp, Homo Sapiens
  misc_feature (304)..(304): n is a, c, g, or t
gccatagactaatgcattttggtgtaatgatctgagcccttatccagaaggcatctaagactcatgtacaaaaatagatttcagggctaaacattctaaaagacaattgagtgcttcttttttctccggcccctagatgtaaatgaataacctctgttcagtaactcttaatgtaatataagggataaattatgcttgtttatttaattgtgcttaaccagagtactaggttgggagtcaaaccacagatatatttgtgaggatgtggacaaaatgtaggcttttagcccgtaatacccaagtncatctggggaacataactgatgacagtgtcaacacctttcaggaattctggaggtgcctttgagtttagaaattcgtaggttctctagaagcaacagtagcatactaaattaacacataacatttcaagctacatttacataattgcagtggttatgattaatacaaattatattaactgcctgttttactccttatagctgattggctgaatttaccagtgggtttggtatgttcaacaaatgatccaaattaccttttcatttcagttaagaaactaatcaaagcaaatacactttgatttgttgagaggcagagattctccctaagtggcaatgtccttggccttctaagctaaaacctaaatggaactataatatatattttga

SEQ ID NO: 328666 - DNA, 832 bp, Homo Sapiens
  misc_feature (462)..(462): n is a, c, g, or t
atgactttttccattagccaggatcttgggtttatttgcaggactgaagcaaccattatgaaagataagaagaggcaataaagggctgctcttgtgcttgtatttgctcatctctgttagtaagtctagacagccatcaagcctcagaatcatttgttgcccatcttctccagatgatatattcaggagtaacttcaaccaaagaatagtcagattacttagatgtttatttcctccttttggcaatgctagagagaggaagttctgtaagaagttactcttctgaattactcctttacagtcatgcgacaaggccaggtttgaaagaagcataaaaaccatctgctgaaccgtggtgttctccagtggcatctgggaagccaactttaggatacacagcatcagagagttgctcacggctcctctatgtgtagcttgaacagggtgttgtccacaacttgncccaacaaagagaactgcaaaccttcaaaaaataacagcctatcacaatgtccttcctcagtttccctgtttagtttttgaagacacctaaggtggcaaagcatatctgtctaacaaaatgactaggccattaacctgtgaactgcaaattagcaatggaggctaatgttggtgtctacagtcaacctaatagatatactgtcctcactgagggcctaattatctcactaaagcactttaagacaccaggtttatttttaaaaaaagaataaaataaacatactagggtttttaatagttgctaaagaaaacatctaaataaaggcctgtgtaaaggaacagaattttagaaatgggagataacttgtct

SEQ ID NO: 328667 - DNA, 744 bp, Homo Sapiens
  misc_feature (191)..(222): n is a, c, g, or t
tttgtttcctaagatgtgcttgtgaacagttgcctttgagaagttgaaaataaagaagcagatcagtttactcatatgtaattcaaacaaccagcaggggtatttatctggtgagctactttactgaaaagaattgaatgagttcagtttatgatacttaggttctgtttgtactttcactgagtagcagnnnnnnnnnnnnnnnnnnnnnnnnnnnnnnnnaaaaccctcctttttccttcctcctcttcctcctccatcccctgtaatggaataacattcgaatgccgacatcacaaacacagaggacccttcacttcttgggttgccactccctgcctgtcacatgccttctggttttgactgggagtaatcctggtagaatccacgtagctctgaagagtgggtattctgaagagcgcaggttctttgaggggatgatacatgttcagttgctctgttgggagtgggaaccatgaatcacagtggtagtggcaatgttaagtggaaggtccagggaaaaaccaagagttctctgtgctgctcattgaaaatagggaggcttagagatctgggtatcattttggatacttttggtatagtcattttatatacttttggtattgggtatagcaaatcttggctaggtaaagaggggctggattttgggggaacttgaatggcagactcagacatttattctgtgaatagactgggcgcagtggtttgcacctgtaatctcag

SEQ ID NO: 328668 - DNA, 594 bp, Homo Sapiens
  misc_feature (164)..(172): n is a, c, g, or t
  misc_feature (433)..(446): n is a, c, g, or t
tgtcaaatacatatgataatttcctaaagcactttttcaaaacatgtgtatttggggtcccccaataggtcaaatttcattttctgggggtaaggacccaggaagtgcatttcaaaaaagtttttcaggtaatttaataaatcctccctccaccctcagcccannnnnnnnnccttcaggaaactgcttgccaagaagctagccttttccctcccaatgtcatcactcaggaaaatgatagtgaggaaagacatggtttgtccatcagagctgggtcagagcatttatcagaagagaccagatggcctgaggtcttccctcagtgggtggatggccaaagggcaagtagcaatatttttacagcttcattctttgggcatttcccccatgcaaatgcataagaatgagaaataagtcagcacaatgcagggannnnnnnnnnnnnnaatgtcagatcacatcatttgctgctgcacagccaaccattggcttgctttgaggaaggtggctccttggggagaaggggatctgagagaagcacagcaagaccagggcagaagtggggagtgaacccagcacacagagcgcagacca

SEQ ID NO: 328669 - DNA, 722 bp, Homo Sapiens
  misc_feature (393)..(677): n is a, c, g, or t
gtcttttcagtgtttctttcctttcctaatcatctttgtgaatctaacatttatatattgttgaattattttccatggataaaaatccaaatgaggcttttaatttaaatgttatcctattagtattacttggattactaaattaatatttaaacagattaaacaataatagtagtaaagaagtgtctgtcttcagccttgaatacatttcttaattctcagaaataaccatccccattaggttttcttatatcctttcagaagtaggtattctgtggcttttttgtgtgtgtgtatggcatatattttgataaaactatcttcttcattattttccaatgtctgcataggtaaatatggattttttgatattactcttatccagtgggaatnnnnnnnnnnnnnnnnnnnnnnnnnnnnnnnnnnnnnnnnnnnnnnnnnnnnnnnnnnnnnnnnnnnnnnnnnnnnnnnnnnnnnnnnnnnnnnnnnnnnnnnnnnnnnnnnnnnnnnnnnnnnnnnnnnnnnnnnnnnnnnnnnnnnnnnnnnnnnnnnnnnnnnnnnnnnnnnnnnnnnnnnnnnnnnnnnnnnnnnnnnnnnnnnnnnnnnnnnnnnnnnnnnnnnnnnnnnnnnnnnnnnnnnnnnnnnnnnnnnnnnnnnnnnnnnnnnnnnnnnnnnnncaataatgaatattttctaacttaattcatgctgcttttcaactt

SEQ ID NO: 328670 - DNA, 653 bp, Homo Sapiens
  misc_feature (62)..(62): n is a, c, g, or t
  misc_feature (610)..(610): n is a, c, g, or t
  misc_feature (624)..(624): n is a, c, g, or t
  misc_feature (632)..(632): n is a, c, g, or t
gagactgcatagggctcggcgtggcagagggaaggaatgtggcatgtggggagaggagaagnctgtgagcactcatagggagaatcaggcctgtctgggaaaagtgctcacatggggcacaatggggctcataaggattgctgggagaatgctgcaaaggtaagttgtatcaatttcacatacagatgacacagtcttaattcttcattaacaacccccaagactatgacacacaaaaaaattacataatgtctgtaactttcatcttagaatttttaggagctcagttaggatgcaaagctcatcaaagcaccagggaaccttcttaatatcacaatgcttgaataacctaaatgtgccatcatgcacttcagctcatgtacccaggatgctgaaaagtgaacctaaaagacagctcattctgttttttacaagcaaaaggaagcttacagaaactggatgactttttcagtttccaaattactgtgtagtgttgcctctatttgaaaccaggtctttgatcttaaattcactatgcttgtaagtacttaaacatataaagtgtgtgtactacctacataaatgaactatttcccccttttgcaacatnggaaagatcctcgngccgagantctggccgcgcagggccaaat

SEQ ID NO: 328671 - DNA, 694 bp, Homo Sapiens
  misc_feature (334)..(334): n is a, c, g, or t
caaaccttaaaattagaagaaatttcctttattaaatatgaattttgctatattttagcatgtgttgggggttcccaagaccaccctcaggctcagtgattcgctagaagaactcacaggacccagaaaagctgttattcccttggtgttcaaggtttttattgtgggtcagtcacataggcatggagcacccatgtgagtgaccttagctgccgagtctccagccctcctttttcccttcccctccagaggtcaaactaatatggcgtagcccagggccccagacaaagacaggtattcaccgtatatcatattgttagcataaactattctnggcatgcccaaagccccaggtatactaagatactattgtcaggtggatattgcagtggcccagaggttatttcctagaagtcaggggccagtcttgaagactttcggaatgtgcagggtttggacagcccaggtctgctgagttaaccctttactgcacataggccatatgtgaagaaagaatgtttccatgtaagataattggtgaatgtggatatattgaataaatgccaaagatatttaggttctcttcattgaacacttagttaattcattatatccattttctaccttatagttcaggcacatattgtttatatcaggcattaattttggtacttggtttgaaaactgtgtatgt

SEQ ID NO: 328672 - DNA, 1155 bp, Homo Sapiens
  misc_feature (983)..(1022): n is a, c, g, or t
agtccaaattctagaacatggcccacagcatttggtgcctcaccacctcttcagcctctcagttgctgttcacccatttctctattcctctccttctcacaccttgtgctgcagccacatagataacctgcagtttttgtaacgtgcaatgatgtctcaaattccaaggcattgctggtaccacacagcctgcctggtaaaatcctagacttctttcaagataaattcaaagacacctccatgaggtctttctacctctccaagtagagttgaccgctgtctcctttgtgtccccacttccaccaccatcctaaaatacttattatacttagattaataattgtcgctcttactgcactggaattaccctgaaaggaaaggccatgtattatttatcattgtcttcctagtacatagcccacagcctatacctcccaccccaaaaaaaaccttttgtaaataattgaacaaattaagaaacacccaaggcccccagtaaacatcaaggcctaaggaatgcatatctggattctaaataatcataaggttttacaacaccatgttaagcaccagggacttcagagagcttttagtctaaatcttattagagaggccagcgaagacctcccaaaggaagtggcattgaactgagacttgaaaagccagtagttaggcaaagatagggagggaaatatttcagacgaagggaggagatggcacaagatttaggacacggaaaagggtatggtgcagtcatagagaaaacagatgtgcagaatggctggagccccaagagggaagggaagggcgaagcaatgaagatgtgaggcaagcaggactggaccatgcagagtcttgcagatgttcacaaagaaaattgcagcaggtagtccctaacatcgtgctgaacagttaggcaacttggaggaatatgtatatttgtactcatagtcaaaaccactagatggcatttacagactacnnnnnnnnnnnnnnnnnnnnnnnnnnnnnnnnnnnnnnnncttatgttagcaaaagtatgctcgctattgaaatgttgaaaatatttcattggtcttaaaatgatgcttatttttccagatgcttgcattcattctgcatgtgctattttgtcatgtggtttgcttaatttat

SEQ ID NO: 328673 - DNA, 626 bp, Homo Sapiens
  misc_feature (18)..(18): n is a, c, g, or t
actccgcatcctccaatnccccactctctggtaacctctattctactttctgcctctatgaatttgccaattctaggtacctcatataagtggaatacagtatttatccttttgtgtctggcttctttcacttagcataatattttcaaggttcattcatgttttacatgtatcagaatcttgttttttcaggtggagtaatgttctattgtgtgcatatgccacatttggtttatccattcatcagttgatgcacatttcggttgttcccacctttgggctattatgaataatgttgctgtgaacactggtatacaaatatctgagtgggaattgctggatcatatggtaattctgcatttaactttttaaggaactgccaaactgttttccacagaggctgtaacattttacatccaaaccggcaataggacctggataaaaggtggctaaggcacagttaaataaaatactgttagttactgcccatttgcattgggtttctagtggcaaataatctagccgtgtccttgactggatctcccaatgattcttttcagtcatttgaatgagtatggtggtggtgacactggcaggaggctggagggtactttaattaagcggcc

SEQ ID NO: 328674 - DNA, 475 bp, Homo Sapiens
  misc_feature (46)..(107): n is a, c, g, or t
  misc_feature (448)..(448): n is a, c, g, or t
  misc_feature (453)..(453): n is a, c, g, or t
agagtctcgctctgttgccaggctggagtgcaggagcacaatgctnnnnnnnnnnnnnnnnnnnnnnnnnnnnnnnnnnnnnnnnnnnnnnnnnnnnnnnnnnnnnntgagccaccgcgcctggcctaacatcgtattgtcttatgtactcaagtgccagcaaaccattttgctagcaccatagcagtaatgtagtaagagctatatgctgcaatatacttgatcagttctgaacatcttgctttaatactttgtggtattacagttcaaaagcacgttcaaagtttatacttgttctaacagctataatattactaattaggaacaatataaatagaataattacctctttggatgtgcctattaagtcaaatactaattttttagtcccatctcctagctgttcaaagtgttttttctttgatatttatttaattaagcggcgaanttatncctttagtgagggttaatttta

SEQ ID NO: 328675 - DNA, 950 bp, Homo Sapiens
gaggcttcattttgttcaaggtcactaccttgtgatgctttagactagaacagaaaatcaaagcaaaaaatcctgtttttagggcggtcaatagaatgtttaatactatgtatcaacaaaattaagatatcaagtcctataatcacatgacaattttattcagaattaggttcctcatcccctgttttttaaaaagccagcattcactagaatagttctgaaggaaaaaaaagtttgttcaaatagttgtaatgcccaattccttttgaaaactggtggatttggacagaacctagttttcagcttgaggagatcatggtgttcgtgaccttcctgatcccagcctaacctctccatataattccaggcaggccatttccatcagcacgacccagtcgttcctcatctgcacatcacacctgtctgcagagcagaatcacccctggaaccttcagacaaacacctgggaccatcccaggactgctaaatgtgacctcatcattcctacaggcccctaaccccctgggcctctcctcatccaggtcagatgtgctttggccacagggcctttgcactgaagccccttcactagaatttggctaagctggggctgctcctcatctccatctacccgttgctttctacccttggactgcccatggttttctcttcagagcactgatcactctctgacatgtccctacatctgtcctgcgtgttgtcggcctcccctcccatcagaatggggaggctctaaaagggcagggaactttttgttttaggccctgctttatacccagtgcgaatttacacttcagaagtaaaagtctcagcagctattaaaaagaatatgcttatctactgacccacaggagctgtccatgatgtttttctaagtgaaaaagacaggttgaagggtaatgtgtataaaatgatcgcattttaagaaa

SEQ ID NO: 328676 - DNA, 1007 bp, Homo Sapiens
  misc_feature (14)..(14): n is a, c, g, or t
  misc_feature (21)..(21): n is a, c, g, or t
  misc_feature (60)..(60): n is a, c, g, or t
  misc_feature (109)..(109): n is a, c, g, or t
  misc_feature (474)..(474): n is a, c, g, or t
aaaccagttaaaangaaaccnccctcctgtggtaaacctccagaaggaaaaactgtaaanctgcaaaaaaggaacagaagaaaggaaggaataaaagaaccctctctgncaagggaacagtcagttgaacatccaaagatgtgccaaaccatggcaaagttactgtgttccctcgcttttaagttctatttttcaaaaggtcttttgatattggggtgaacttacctgctcactaaccctcagcctgacacccagctatgtgtcgttgtcttgacactgtgtgggaagctttggttgggcaacacattgtcaaagttaaaatccaatgtatctccatccatgaggtcattccgaatgatggattccatgtcacagtctaagcgctcaatgaacatgccatccaagtcacttgggagcttctcctggtggagaaggcccattctgccatagccattgcagctgctcacggaggangtagccccccagggcactcatctgcatggggtggggcagaggcacttgtacaggtgtcttcacttgggtcaggcggttcatacccgaggtgtggggcatggtgcttaccgtgtggggcaggggacgcccgttaactgcagatgtctgctgagcatgtccagggtgggtatgggagctgggattcatcattttgttatgagatgcctggctgccataggttgacatgaccgaattagggcccatcatgacgttctggcccagaacccggctgttgggctgggctaccccaggatcaactggtgtcataatgtcattatggggaggagagtcagaagtcagcaactccttcaagagtccaggcgcacagttatactgactcatacctccataactcgacttattgtcctgaagtgtttgtataggcatctggggcaaagggctcatgctggattggccatatgtatatttttggtagtttgggctgggtgaattcaaactggtgtttggtggcgcaaacgagtagcacggcgtct

SEQ ID NO: 328677 - DNA, 694 bp, Homo Sapiens
caagtcacttttgttttctgccaggacagtgtagcgtccctctttcatggctttctggatgaacttatagtaggggttgaggtagtggtcgaagcgcagaaagtcaaactgggagttccgggcctgcttggctttcagcatgatctcaaactgtgctccctgcctgcacacgaagctggacgtgcgctcgatgatggcgtgcattttagcggttggtggcaactccacgtcagacgggacgctcaatcctaagggggcaacgaagggctcttcattttcctctaaattttcggcctcatttttttctctctgtttggaaggctccctcctcctccgtcggctctgaacgggtcgtaatagtcgctaccgtaagtgaaccccacggcattgtagctcccatcctctgctagtgcttcactcaatcgcttgtattcttcctcttgaataaaaatgagaattttatcaacaaaaatagaaaattactgagaaaaactttatatatttctaaagttgtagctatcagtaaagcatacaacatacttttttcaacctacttttgaggtaaaatagttttaaaaattcacactttatatctatcattatgtacttttgtcagtacatgtttacccacagacagctgaatacacgtcttttgtggaaaatttcttcctgctgagaaaattttgggattaag

SEQ ID NO: 328678 - DNA, 795 bp, Homo Sapiens
tataagagatatattttgaggtaaaattgactggatttatgattgaatggagagagtgggaatagaggtgtcaaaaggaatcagaatctgaaatgtgaatattctaattggtggtatgtgctaagaatacattgatggttcaagtttattttcactgtcttacctcaaagttcaaggaataagttgtggttaatcatacatatgatacatgagcagagcagttgaatgtgaggttgctggcagctcttgaaaaaggcaatcaccctgcctgaccacattctggttcagtgagagtctacactggaacaacaactcatttagaattgcatgagaccagcttcccatagctgaaagaaatatggagaacgttctgaggctgatgggaactatgaaaacagcagtcacatacctttggacaaggccattttataaccaatttacaaggcatcatttctgcttccctgcagtagtcgggccctgggtatcattgggattggcacagtttctttgagtctttccccacctcacaggcagtcaggcttagagagctgtgatggggatgggcagggtcttgggtctgggaagccccagaggaaagactgcgttctttccccaggttgaagctgttaatcatcctgctgaaggctggattcgcagagagagaaaatgtaaaagggctgctttatgatatccatggatgtgccctcatggccgtgaacttcaatagttcttaactttacttgcctaagtaagggaaaacataataaaccagcaggcaatttgaaacattagcag

SEQ ID NO: 328679 - DNA, 736 bp, Homo Sapiens
  misc_feature (357)..(357): n is a, c, g, or t
  misc_feature (648)..(695): n is a, c, g, or t
caaaatatgtgttgaatgattgtttatgttattggtaaagctctggtcaacaggaggttattagtgttaagtttttggagagtcaaaagttgtatgtggattttcaaccacatgggagagtcagcatccctaaactccacattgttcaagggtcaactataaatatgaatagaattctgaagacataacaaaaacctatcttcacttctggtttttatctttcatgaataacagataaaggtgaccaagataatgataaatatcatatgtcatataaggaaaactagaaatagctgccctgtataatgactgaaggtttgtacttgcacatgtaaggaaacacagaatctgttttcnaagtggaaaaaactacaaaaaagtaacatgagaaagccaaaaagatgaggacgcactttatgacaactaaagctgctcagaagaatgaagtaataatacgtagcaaggttcccatcaacagaggctgatgacaacccattaggaatttatagagatggaaattcaggtttctggaagatatttcatctttgttatatgataacattagaatattttctcagtttacataaattcagaaactttttaaaatttctaattactgaaaattaacaaagaaattatagtattagnnnnnnnnnnnnnnnnnnnnnnnnnnnnnnnnnnnnnnnnnnnnnnnnctatgcaaaccaagaattcttccaaatcttgcccagtgact

SEQ ID NO: 328680 - DNA, 687 bp, Homo Sapiens
tagctctttaaactgttggggctcaggaaacaaaactccaaaatgaagccccagcagcagcctcaggagcaaaagtttttctctgaccttctcctgccctcctgcctcccagtcctgttctctcccgaggctggccttagaaaccacaaaggtcccctctccacaaaggtgaatcatagaaaccagaactcctttccccaaagccagccacgaaacctgaacatattactctaactctccctccacctttctgtgtaaaaattggccacaaaggacaaaggaattgaccggacctaccttgtttgccaattccagagagggtcccgccccacacccagaaggaaggcgtgctgctcagtgaagccatgaagaagctaaacggacaggcctcgctgggttccccacttagtctatgaccattagatcctgccctttttgtccaatcatatttctacacagctgcccatcctttgttgaacctaagcataaaaatggacaatttgcccatatctttttgggtcttcaatctgaaagctcccaggtatacacatgaaattatatgtatgccttttcttcaattaatctgccttttccaagtggatttttcagggaaccttctgttcctcttggcccctacaaaatacaggatctagatctgattattattttttattccctctgcagaat

SEQ ID NO: 328681 - DNA, 116 bp, Homo Sapiens
tagtaatctttatcccttcagagaattcttcctttaagtcttgggtgagatattttattatttttaaggtttatatatctatattgttagaacaagcatactctggcaatgttgtt

SEQ ID NO: 328682 - DNA, 1016 bp, Homo Sapiens
tcctttgttcccaagtgagctggctttttttcttagaaattaaagattatgaaagccacaaactttttagtttttaacttcaaaggcttctttctctttaaaaaaaattatttttaatatagagtcaaaaaattggatgtattattttgagcttctaattgctgccacttggagatgtccaagtaagaaggccttctttttacatgggatgaattgtgcacttctactgatgatgactacagcagaagtgatgttatacgtacaggcacttacactctttcacatattcacacgtgtgcacatctacaccagggctctgatctactctagatcgtttcctgacagagaagccttcttccaggccactaaggtagcatgttatcccactgtggcactgcctaaactccgtgtatcctcgggtggccaacttgctatctggtgggtgacttggggactagaaagaataaagccttttctaaatttgttatatagaggcaacagtctgaactctcctggccagctcacgaaagttaattatacattattctacaaatgcattctgttgagcactaaatattttagttggttttatgttaaccattgtgttagcttttatttcctgggatagtaactggtcaggatatattttaatgatatttgaaaactaaatcttagcattgaagccaccaatgtaattaatggtgtgcagttattttaaaaactacagatcatttcattattttcttaattttggtaattattaaagtctatttctgagatacgagagggtagtcacattaatagaagattcatgagtgagatataagtagacaatctttctactgttgttgctctttttgctttgctttgggttcttgaacaggttttttggatatatgcatgttgtcattttggactagttctcatgctactgcaaagatctattgctagctaatatatgagttaagaaagaaaattagaaaatctgttcattgaaattctgtttacacttgtca

SEQ ID NO: 328683 - DNA, 726 bp, Homo Sapiens
  misc_feature (297)..(591): n is a, c, g, or t
  misc_feature (593)..(613): n is a, c, g, or t
  misc_feature (647)..(681): n is a, c, g, or t
aaaatttgaaattgttaaaaagactccttcccccgtgtgtgtggattttgccctgtaggaacacaggactcaccgctgtaagatacttgcagaagcactgaagctccctggagggtctcctttgcagtctggaagatttcctccacgagaaacaagtccactaagtgggcacagacatcctcacagcaacgggccacacggaccctctggtctgtctctactgcattcctagaaacagggcaatcagcatggaagacactgcacttggggcccacagacactgagggcttgcttgannnnnnnnnnnnnnnnnnnnnnnnnnnnnnnnnnnnnnnnnnnnnnnnnnnnnnnnnnnnnnnnnnnnnnnnnnnnnnnnnnnnnnnnnnnnnnnnnnnnnnnnnnnnnnnnnnnnnnnnnnnnnnnnnnnnnnnnnnnnnnnnnnnnnnnnnnnnnnnnnnnnnnnnnnnnnnnnnnnnnnnnnnnnnnnnnnnnnnnnnnnnnnnnnnnnnnnnnnnnnnnnnnnnnnnnnnnnnnnnnnnnnnnnnnnnnnnnnnnnnnnnnnnnnnnnnnnnnnnnnnnnnnnnnnnnnnncnnnnnnnnnnnnnnnnnnnnngtgcaagagtcggccaggcacagtggcttacacnnnnnnnnnnnnnnnnnnnnnnnnnnnnnnnnnnnaaatcacttcaggtcaggagttcgaaaccagcttggccatcaggt

SEQ ID NO: 328684 - DNA, 924 bp, Homo Sapiens
ttcagagtggaaactgcagggttttattaacacgacttccaaattacatacaatatagttcaaacacatttttttggtacgaaatcacacaaatgaaacacacaacagtacattttcctttcaactacgtcattaccattcttcacacagatcctgaaaaagttaccacagcagttaacgcgaagtgaacaaaggggtggaacaggcaacggcattcccccaaggtaggtgtggtgtgtctgggagaaaacaggatggagatcaaacccagagaaacgcactcccgtcatctctccatgtctcaatttccaacgctctcccagtcaacacagcttcgcccccaaccagagccacccggtgcagcccgcagagtgtacacgcatcagggccgggaggccccgtcggcaaagcagtaacacacggtcagacggccgccacctccaagtggagtgagccacgctaccactaacactgaactcaagcacaagagctccctgcgaaagcagaggggcgggaaacaaagaagcgggtggttaagggcacgaaaccgcacactgcgggacgccggcatctttgaatcgcccactcactcctacagagccaaactgcaaaacaacagaattaaaaagttactctctccaaatcaaagcacctggaggaataaatcgtgagtgaagacctgtcgaagcaaaggttgagaggtgatggagaggtgatggagtggtaaacacagtgtgaaaatcgtcagcaccttcccacccagcccacgtggagttctcaaggctgaggcggagcagagtggcaggaatacggccctcacccagttgaagccaggaggtggagggagaggagcatggaaagccagggagatgggaaggtctgagagagtgagtcttggaatgggacaggagctaccagtgttaa

SEQ ID NO: 328685 - DNA, 593 bp, Homo Sapiens
  misc_feature (34)..(34): n is a, c, g, or t
  misc_feature (97)..(97): n is a, c, g, or t
  misc_feature (140)..(140): n is a, c, g, or t
  misc_feature (445)..(445): n is a, c, g, or t
  misc_feature (459)..(459): n is a, c, g, or t
taggtgggtaacattttcaataacgcgcgcacanacacaggggtgcctgagccgaagagcaaaaaaagccaccgctcgtttctataatccagctttncttttcacaggcgtgggatccaggatggtgtcctctgtgaggntttgaactctggggctttaattccacttgtttaattttcaggtaccacagcagcaaagcacagagtgtgacctttttcatgtctgagctgattctgtttgctccacgtgcctgcttcttgctactgttcatttagtaatgggatcacctcaccatgccatgctctgggctctccctctctgtccatttctgttttgctttcctggctaaacccatctaccattcttaacactggtagctcctgtcccattccaagactcactctctcagaccttcccatctccctgggcttttccatggttcctnttccctccacctcngtgggtttcaactggggtgaggggccgtatttcctggccactctggcttccggcttcagccttgaggaacttccacgtggggctggggtggggaagggtgctggacggatttttcaaaatgtgtttttaccatt

SEQ ID NO: 328686 - DNA, 437 bp, Homo Sapiens
aatggaatatatgtactcatactgttttgtctggcatcttttactcagcaaagctattttaagattagccttgttattgcatttgtcaataattcattcctttttattgccaagtagtattcaattgtatagacatcacatttttaaaaatccattcactgttgatggacattttgggatattacaaataaagctgctgtggatattcatgaacaagtctttgtgtagacatacgcttttattttccttggataagtaggagtgatagttgaatcctgtgttaggtgtatgttgacctttttaagaacctgcctgttttccaaagtggttgtaccattttacattccccaccagtagtgtatgaggagctgtcctcttcaaattgactggagaagctttgcttccatctcttcttcttggctaatagaaggtgcctc

SEQ ID NO: 328687 - DNA, 516 bp, Homo Sapiens
ggccgcttaattaaagatctttttgattttggagcattcggaaacaagaatggccatcccaccacgacagcaatgtcaagccagtaagccctgacttgcttttcatagctgccacccccaggtaggagtcctgggagctggtgaaggacagctgctctgtgagcttcaaggtcttctttcagaatgccattgtgattacagagcctataaaataaaaaagatgctgcaggagatgcttatttaagcacagatcaccagcttctagaatctatgatggttcttcatggtttacttgaaatatatctgtaatataatctggacattaaaatgcagcaactatactgtctctcaacaaagacataaaatggggcagtttgaaaaacttgtttgcgtgtatgcggcaattttaaatccatcagaggaagtaacttttaaccctttgttgactttaatgatgttcaaatccacagctgggcaatctcgttccacattccacctgaatgacaggtatgctag

SEQ ID NO: 328688 - DNA, 429 bp, Homo Sapiens
  misc_feature (13)..(13): n is a, c, g, or t
  misc_feature (23)..(23): n is a, c, g, or t
  misc_feature (33)..(33): n is a, c, g, or t
  misc_feature (86)..(86): n is a, c, g, or t
  misc_feature (101)..(101): n is a, c, g, or t
cccccggtaggancccccggganctggtgaaanggaacagcctgcccctgtgaagcctccaaggtcctcctttccagaaaggcccntgtgaattaacagangccctataaaataaaaaaggatgcctgccaggagaatgccttaatttaaagccacagaatcacccagccttcctagaatcctatgaatggttccttcatggtttactgaaatatatctgtaatataatctggacattaaaatgcagcaactatactgtctctcaacaaagacataaaatggggcagtttgaaaaacttgtttgcgtgtatgcggcaattttaaatccatcagaggaagtaacttttaaccctttgttgactttaatgatgttcaaatccacagctgggcaatctcgttccacattccacctgaatgacaggtatgcta

SEQ ID NO: 328689 - DNA, 593 bp, Homo Sapiens
  misc_feature (165)..(165): n is a, c, g, or t
  misc_feature (206)..(206): n is a, c, g, or t
  misc_feature (221)..(287): n is a, c, g, or t
  misc_feature (371)..(371): n is a, c, g, or t
  misc_feature (415)..(415): n is a, c, g, or t
  misc_feature (421)..(421): n is a, c, g, or t
  misc_feature (449)..(449): n is a, c, g, or t
  misc_feature (473)..(473): n is a, c, g, or t
gtcaactatttgggtcatgaccttttgattttataataaaataccacaagatttttatatagtatgtattgtgtcttttgtacacaggttagattattttctctccacaataattataaagttgagactgggaagcttccttcattttggcagatttggaacccngagacactgaatgattaaaatggcagagctcgccaggcgtnggtgactgatgtgtnnnnnnnnnnnnnnnnnnnnnnnnnnnnnnnnnnnnnnnnnnnnnnnnnnnnnnnnnnnnnnnnnnntccagtctgggcaacatagaaaccccatctctaaaataaataaaataaatgactgagctgttgtgaaagggttagtgatagagnccagaactcttaactgtcaggccaatgtctttccacttcctcanactgancccacataactctgggtatgatagtgantgtcaggggtcagacatgggtctnggtctgctgagctgcctgattgttccttataaagtttgtcaacctcttcttttttttgaacaagttaagaggaaaggaattaaagctttatggatgatcacttttcaaagttcttgaagc

SEQ ID NO: 328690 - DNA, 765 bp, Homo Sapiens
gcccagaaaagtctataatgggtagattcaattgacagtctggagacttgattttatgtcctggctccttccccagattgtacaccataatctctctctgtctcaaattccccatccttcaaacatgtccaacaacccgctatgtaaccccaactttaactgcattgcttatgagtttgaatgaaataacaatatgagtaaaggacacaggaaaaaaaatcaactgtctatgccaatatcaggcttgtaaagggtatggtcactttctatcaagaaaccttggtagttgagtgaaccacatttttctttagtgtgcctttagtgaaaaatgactaattgaatagaattgctagcaccagaacttcagctttcaaaatactaagctatcgctgtgaaggagacagtcctgaaatctgtgaccttggatcaggcacaacaacctatctgctctcaggcaccaaaagcagacttgccaagcaaatattcctggagtcaatttcctgatgaattctttagggtctatgtccataactgtccttcataagaatgagggatgcttaattttgtaggatactaaatggtttggcttatctgctttctccaaaatacatgctgaaaccgtaggaaagctcatggccgaatgaatactcgtataaggagaagactaaagaggtcatgggcaagagcacataatagatatccacaaggggccagcgccacttgggcaggacctgaaggccaaccaagactgtgaatccccaagcc

SEQ ID NO: 328691 - DNA, 653 bp, Homo Sapiens
gcacaaattactaatgtaacaaatggaagaggggtcatcattacttatcccaagtacattaaaagtacaacaaaggaatactatgaacaactctgtacaccaaaaatttagtaagatgaaataagccaatattctgtgaaagacacaatctaccaaagttctcacaaagaaaaacagataacctgaacaaacctgttaactattaaagaaactatatcaataatctgaatagatctgtatctattagaaaattgaatcaacagttattaaccttttaaaacagaaaacaccaggcctgaacagttttactggtgaattattccaaacatttagggaaaaaagtgataccaattctctacaatctcttgcagaaaattaaaaaccgaaggaacatttcctgacttattctaaaagagcagccttactctaataataataaaacaaagagatggtaagaaaagaaagctacagaccagtatctttcatgaacacaggtaacaaaaatcctcaacaaaatattagtaaattgaatccaataatgtagaaaaggaattattcaccataaccaggagagatttatcccaggtatgcaaggctggttctaaaatctactaatgtagccctaatccaccacatcaacaggctaatgaaga

SEQ ID NO: 328692 - DNA, 730 bp, Homo Sapiens
  misc_feature (18)..(18): n is a, c, g, or t
ccaaaagaataaaacccnttttttctgggtaacagttcttaatttctttagggaatccaaaagtttgtcatcttgaaagaaaggaatgaaaatgtgctttttgtatagtaccaacctggggttgaatctgtgtcagtaaactggtgctggtgggctggtactccctaaaaggggtggtaagaccagaggactagagcactgtttttcctcctttgcagatttccaaggtataaatactcccatcatgggtgatttcatactaccaacagaaattctgagtatttaataattggcttttgacatctggtataagccagctccaggtcagtactggtcatgagaccacatttattggaagctatagggcttcattttccacatttgtacaagtaaatgggtaacaatatggaccttaaaggattcccatgagaaataaatgagataacatgtgaaagagacggttacctagtaccctgtttctgagtcttctttcctaatgtaaatctaatgctaaaactaccttcatcagcatgtggtgtagaacacaatttttaaactaacatttctattaccatataaactaagatgaaggaagaagactttctttgagaataaacataggctgctaagaactaaggatggaagagaggggcaattgttagttattattatttgtattattattagatagcctgcagcttgcctctttcttgatttctaatctcgtgcc

SEQ ID NO: 328693 - DNA, 491 bp, Homo Sapiens
gagtaaaccaccgtgcctggccttttctttcttcagagttacccaactgcttcattttttagaaatacagaaatgttggggaaaagacagaataatccaatatttaattattctggctcccagtatggcatttaaataaataaaacaaaatttcaaaatgggaggggaacacaagtaattttcttttttgggtagagcagacactttggtcataaagagatctgtagtacccaagtctctcacacaaagttaactgcaactttcccaacaattccacttttgaaatcactctgatatgcatcttcccatgacttgatatatagtcaccgagctcaaaatacatgccctgctcaggctccagcagtgaacacagcaggcccagaccctgccactgtgaagcttattatactcctaggcgcggggcagagagggagaaaagacaaggagcaagcgggtcggggggtgggggagtgacagggcaggctgcacac

SEQ ID NO: 328694 - DNA, 547 bp, Homo Sapiens
  misc_feature (178)..(178): n is a, c, g, or t
  misc_feature (333)..(333): n is a, c, g, or t
cctgatttcatgttcaaaggtcatgtcctctggggaggcttcccttgatgctcaaatgaggtcagtgtctaggggggtaagctcttgtggcctgtatggcaccctcactagagtcttaagtcccacagcaataagggctttgtctttgcttacagtatatgctcagtgcctagggagnacccctcaccaggtgagcatttgacagatatttgtctagtgaaggaatgagcggatgaatgaatgagtgaatgaatgtcaggcactgtgccaaggcaatttgtacacatctcatttaattccgggaaaccgttcgaaacttgcaaatctcaactngggggagttcaacccagagctgagccaacacccaagcccaggctctttctgctgctaccactggcttccttgagggagagacagttgctgctatttgattttactgataaaaatctgtgatgctacagggagaatggagcaggacttcttctagtagagaaattagggagacattgaagagacttgcattttaccgatgctaatttccttaggg

SEQ ID NO: 328695 - DNA, 335 bp, Homo Sapiens
  misc_feature (54)..(54): n is a, c, g, or t
  misc_feature (62)..(63): n is a, c, g, or t
gccagagggtgcagtaagccaagattcgcgccaccgcacttccagccctaggcnaagaagtnngacccctgtctcaaaaccaaaaaacaatgtatatctcaaaatctttctcagaacatggtgccaattatttcttttaagctgaaataatctgtaccttgggggttataagaagctgcataatcagtaaaaggatagaaaactttaaagtatttcagattttaaaccagaattcctctaagatttcaaaacatggtccatgttttatgttatatttctataaatacaatcaaagcataccattgtacagtactaatctcaactggttctagagc

SEQ ID NO: 328696 - DNA, 908 bp, Homo Sapiens
  misc_feature (68)..(90): n is a, c, g, or t
attttgcaaaaagaggaactttagctccgcactttggagatgccagtgtctttgagatgttaaggacnnnnnnnnnnnnnnnnnnnnnnnaattctttaactatgttacaggtttagcaatgcctccgattcaggaatttgtttaaaaccccccagtggcttagagctgcacatagaataaaatctaaactgtttctcatggtctacatggtcagccattgtttacctgacttaactaacctctccgacttcccctgacacggctgcctccctgggcttgtacgctcctgtgcttattcttgtccccgtacaaagcacatccattctcgctgtgaggccttagcagcacctgctcctgctgcctcagaaggttcttccctgatccttacatgctatagcctgccctgacccttctgtccccacacccatcactgtctaccacatcactctgtgttatttccctaatggtagtaagagttgacaactcttactactcttactactgttaactcatctcagctactattctggaggaacacaaagcactcggctttggtgctaacccactgggagttggccttatcttgaacagttgcaaaactcatccacagttcatcatctgctgaagagtggcttgcagatgatgaactgggaaactccataggtttccctctgaaatgttcttgcccggtatttcactcgtttgtctctcctcatgacactaagctccatgagagtaaggcctgtcctgtcttgtgtatcacaggattctcagcacttaggacaagacctggctctgatgcttcctaaatatttgttaagtgaatccgttttagtttaaaaaaacaataaaacttggtttgttgataagctatgaactcctttacccaaaccctggtcattaacat

SEQ ID NO: 328697 - DNA, 685 bp, Homo Sapiens
atcaatgtctgttcttgaacattatttattgtctttctctattaaacaattccaaaataaaatttccagcacaactaaatattgttgatgataagaggatttttaaaaaagttcttttaaaacagaagcttatatacaacttagaatctaaaaccaatagatttatggtaaaccttaaaactgaaccaaaacaaacaaaaaccaaagttttaatcatttaaaaatcatgtttattgaggtacaacttatagtaaaacctgcccttttcagcgtatagcactgagtcttgacaaatgcacagttatgtaccaccaccgaccaaggcctggcacatttttacctcctcaaagttctccctggctgcttctcccactccttgggcaaccactaacctgttttctgtccttatagtactgcttttttcagtgtcatataagtaggattcacactgtacatagtattttgagtctgacctctgtcaactggcataatgcatttgagaattatccatgttgctgtactggcagtgcattcttttttattgctgagcagtattcaattgcatggctgtaccagtttgtttattcatttgccagttgaaggataactgagatcttcctcgtttttagcaattttaaagaaagtttctatgaataattgtgtacaggtttttaattaagcggcc

SEQ ID NO: 328698 - DNA, 1511 bp, Homo Sapiens
  misc_feature (147)..(148): n is a, c, g, or t
  misc_feature (688)..(697): n is a, c, g, or t
  misc_feature (1288)..(1342): n is a, c, g, or t
  misc_feature (1452)..(1452): n is a, c, g, or t
tccttcataagaacttttttttaattatttagaaatgcagttatatacatagaacaattaaaattaaattaaactttgtacaaatattaaaatactatcttcacacccactgcaatgtacaggataccaaaaaatatatatataacnnaaaataaagcaaacccaaactgattgagtgacatcctgcacagagtcaattatgaatgtgttgttttaaaccattatatgagtaccattctgcaaaggattccatagtggtgcgataacctgaagaagccagggcagggtgtggggactgccacacagcccacgtacatctctcctccttgcttggcaactgagtgctttgcccctgcatccccttctactagctctgctgcttggcagaggggctcaaccttgaggttttcattcacaattctactagggtttcaactggaaattaagagccatttcccagcaaagctgggcctgccaccttttcctctctagggaaccagcaactacaccattcagaccaaacatatgccaagcaaaatattctccaagtcccaccttggggcaccagtaaggactgtccctattccgagagctgacagacccagcaggcccaagagaagctcccagcctcactcgctgtccttggcattaagctgtgaagcctgcatgctgcttccctgctaggccnnnnnnnnnnctttgggggtgaggagtaaggatgcagaaatgattgcagcatatttcattctctacgcaaggatgttcctcggaaatggaggcgacattgttatgtgggaagcaagtggtctgagggctcagctgggactgggagggaaagggctaagggctatctattcccgtgccaccacccatgaagcaggaagagtatacctttgtctgaattgccatctggcttctccactgaactttaaagctggcgggaggagggggagggcaagatgaatgggaaagaaaatattagcttaagatctgtttgcaaatggagtgcttgtatttatagaatgtacattgaaatgccttataaaaccaaacaaactcataaagtggccaggattcagtccatttcacagttcatacccagtgaaacgggaacacagcacataaaatacagaaatggcaaaagatagagcctacctgctaaactaaggcatggaagggacggatattttaagtgattttcaccatattctggcccttgaaagtcattagaatgtgactgcaagtcaccaggatattaaacctgcactgagtcagctcaagtgtgccnnnnnnnnnnnnnnnnnnnnnnnnnnnnnnnnnnnnnnnnnnnnnnnnnnnnnnntcttttaaatgtcctttggtgctggccattctcctgcatcagcctcttgctggaatgccctagaggtgagcccggtaaagcagggctgtggccggtttcttccacctgtntccacctgctccaggctcctcaggcagcctgtcttttaacagcctgccacctgctgcta

SEQ ID NO: 328699 - DNA, 768 bp, Homo Sapiens
  misc_feature (347)..(347): n is a, c, g, or t
gatagctagtatgctaagaggagagtgtagtttgtaattgagtagctttatcctcctggagatttttaagctgtatcctataatatactcttggtcaggttgggtagtatgattcaaggcacttggaaccgtcttggggaatatagcttggtaattgaactgcttaagcttattattaatatttaagctatagttccaggcccattccagaggtcccccagccaatgcacttcataaaagggaagatatatcttaatataccaggtttgtatctcatgctaccattgtagcatccaaaaaaatagacatttaaatcatgggctaataacaaattttaggaatggaantagtttgggtaatttttgtgatttttaaacttttctttttgtgtgtgtgtatatgcagcaatgaaaactactggatgtaatttagataaggtaaatattatccctaatgccctgatgactccactcataccaagcagtatgattaagagtgaagatgttactccaatggaagtaacagcagaaaaaagatcttccactatttttaagactacaaagtctgttggatcaactcagcaaacattagaaaacatctcaaacatagcaggaaatggctctttttcatcaccatcatcttcccacctaccttctgaaaatgaaaaacagcagcagattcagcccaaggcatacaacccagagaccctgacaactattcaaacccaggacatctcacagcctggtacttttccagcagtttctgctt

SEQ ID NO: 328700 - DNA, 812 bp, Homo Sapiens
ataaagctgtttatgttttgttttgtttaaaggcaggcacttcccatctgttgcctcctgaagttgtctttttgatttctcctcaagttctatttgatgaagaaaaaggtttttcctcaggtatccattggagaataaatgccagatatgaaagtctggaagctcattaataatttttcatagaagtccaaagggcctccattgagaggcttggcacctgctgtaccaaatggagcagcactgctggcacccagaaacttttctagacacccaggacgctgagctcccaagtggcatcttctgggctcccatggaaaagaaggaggcatcctggggtgcattcattcactggccacatgcttcctggggcataagcacagaaggcctgggccagccatggagggcacagaggccatgggagacatcaagaggctcacgtcaaaggtttctttccaactgacccttcctgcctgaagtccaatgatatgagagctttccttaccccacgaggaggggaaggtcaccctgttttggggagctcatcagtgatggaaacctggctatggatcttggttcgggccagctgagccaacggtagcataagtgaggaataagaacacagggaaaattctggaagtggacctcctttcccctatctacacacacacattatgaggctcaagaaggcccctggcctaagttgtgggagtcacaggaaaagggatttgtgagcctctattttctctgcccctccctcaccatgaaagaacatggcctcaaaggagcaggaaaaattacttagctatattttg

SEQ ID NO: 328701 - DNA, 395 bp, Homo Sapiens
  misc_feature (128)..(128): n is a, c, g, or t
  misc_feature (131)..(131): n is a, c, g, or t
  misc_feature (304)..(304): n is a, c, g, or t
caaaatatagctaagtaatttttcctgctcctttgaggccatgttctttcatggtgagggaggggcagagaaaatagaggctcacaaatcccttttcctgtgactcccacaacttaggccagggcttnctntgagcctcataatgtgtgtgtgtagataggggaaaggaggtccacttccagaattttccctgtgttcttattcctcacttatgctaccgttggctcagctggcccgaaccaagatccatagccaggtttccatcactggatgagctccccaaaacagggtgacctttcccctnccttcgtgggggttaagggaaagcttttcattattcatttgggattttcagggcagggaaggggttcagtttggggaaaaggaaacctttt

SEQ ID NO: 328702 - DNA, 483 bp, Homo Sapiens
  misc_feature (340)..(340): n is a, c, g, or t
  misc_feature (393)..(393): n is a, c, g, or t
  misc_feature (443)..(443): n is a, c, g, or t
  misc_feature (455)..(455): n is a, c, g, or t
  misc_feature (468)..(468): n is a, c, g, or t
ctttgaatttcatgtaattttcttacatcacaaagtagtctttttattttttaccaaccctttaagaactgtaaaactcatagctcacaggccatacaaaaacaggcaatgggacagatttaacccatcagccaccgtttgccaacccctcatataaggtaatcagggtggtttcatttcctttgccaaagattggttttagcatggacgtatagttaagtcctgacagatgtgatctgcagatgttccttagttcaaaaaagaggcctatgaggaagggaacagtccttttattggccttgggatatgggctgtgttaatgcattaatgcccgggagantgctggcaggccattcctggagggacatggcgggttttcttcaccttttaggncaggaggattaggccaggaaaaggaggaaggggattctggactggaattntcccatggaacnttaactggaaccngtttggatttaggcc

SEQ ID NO: 328703 - DNA, 897 bp, Homo Sapiens
  misc_feature (49)..(49): n is a, c, g, or t
  misc_feature (121)..(135): n is a, c, g, or t
  misc_feature (595)..(595): n is a, c, g, or t
  misc_feature (861)..(861): n is a, c, g, or t
aggaggaagaccacagggccttgggggaacgaaaggccattcaaaaacnggtaaactgaatgaactgcaaaactcctgcgaatcctatcctacaggcaagcaaagtgttgcctattacttnnnnnnnnnnnnnnnccccccaggtaagtcaagtcttcccctagaaaaggttcccagacctttttcttcccataaatttggggagaggcagggtggtgctgagtcagagtaggaggtacctgcaggtttcaaggtctctgttcgtagcgttcggtaaggattcaaacgtcgtgataaagccttctgacctgtaccctctttcaaagaaagcgtgtcgtgggcacagagacagttttagtcggtagcttcggatttgcctgcttgagatcccgcaagcgccaggatcagccacacagccggcaacagcccacatgtacccaacccagagcagcgggagcccacacctgagccaggccccaatgccagagttgactcggcagccagcagggactcccaccctttccacactccacagggcagggcgaaggtagataacccggtgtcggcgcggaggttctggtgtctcccacttgtncaatgtcaagaacatccgtgcggttttctgtgcaccggcctcggacggactctgagagcaaagcgcacagaaaagcagcctctctcccaccctcagcagcatagcaccgccacaggccacagggcgcgcgaggccaagggaaaagacacgcggcgggtcccgccgtttcaggccgcttccaggccacacccaggaaatctacaagaggcgagagtatttttccctctcaatgtattagaaactctcatctcttttcaggcaggtcnctcccacgggaatcccgtgacggccgactccacgac

SEQ ID NO: 328704 - DNA, 823 bp, Homo Sapiens
  misc_feature (293)..(293): n is a, c, g, or t
  misc_feature (479)..(488): n is a, c, g, or t
tcacttctcttggaattactgtatacctttttatgattccattttatctccttgttggtttattagctctaactctattgcggcccctgggtgaactttaaggaatattccctctccttctctggcctcagatagttttctcacacatatgcactaaccagtacttagttaaacactagggtaggacctcctgggagatagccagagtgttctctctgtgcagctttcttctttctggtaatctgccctgcaaacccaaaccactgtggcctcttcagattccagggtctggnctccccagttcagagggacctccagaatatgcctgggctgctcctcctggggctggtatctggaaattgtctccaggcaaccacactactcctcttatttgtttctatcttttgggaatcactgtcctgtgttgcctggtgtccaatgccttccaaacagtttttctttaaatatattttgttcannnnnnnnnncattgtgtcatgtgagggggtaaataaatcgagtcccttttacttcatcttggccagaagaagaaaagaagaagtctcctggtgtcttttaaacactctttgaaaaccaaactttaatagttgtgcaacaatccaaagtaggatgtgccttaatttttcaaaagtattgttctctttttggaagctttaagttgcttctaattttagctactataaataaaaaactacaatgaacatcaacatccttaggaagtaggctatactttcaaggttgacaatacaatgtttgtaggcctatggcaataccacagctttccaccactgggctttctacc

SEQ ID NO: 328705 - DNA, 727 bp, Homo Sapiens
  misc_feature (501)..(501): n is a, c, g, or t
  misc_feature (642)..(642): n is a, c, g, or t
  misc_feature (653)..(653): n is a, c, g, or t
  misc_feature (666)..(666): n is a, c, g, or t
  misc_feature (683)..(683): n is a, c, g, or t
  misc_feature (696)..(696): n is a, c, g, or t
tttgcaaaatctgttatcagctttattagggaaaacatcaggtctctttacacgttgaacaggaactgctggttaacaagacacgattaacttgctaggaatggacaaggacagcgacaggatggtgcttcacagtgcctcctgctgatggcaccttcattctggctgcagaattctcccaggaagggtcccgggctcttcaggaggcatttacttggaagtacaggtcagcgttatccaaagttgtccagcctccggcctggcccatgtcttcaggcagctctgaggcaagaataaaagggacgagttccctgccccctttttacccgctggatcagcttctacgacttggtcaaactatctttctttctgtctgccatgccaggaaatccagtgacagcaagacccagagtcaggcacatttggagggcaggtccatcggccactcctcacttctgtgggctccgatgccagcagagccacctgagcggctgctacctncttgccggaggcagtttcttctggcctcacccacccaaccatggcccccatctaagtcaaaagttgttgctgggaaggcactatgtggagactgcacatcctggcctcctctgcatccaggtggggccacatgactaccangtggccaaganggaccgtgagcanggagtgatgtgtgtcangttaacgagcaanggcatggtaagaatgcagccgtgccttctcc

SEQ ID NO: 328706 - DNA, 1133 bp, Homo Sapiens
  misc_feature (138)..(265): n is a, c, g, or t
  misc_feature (322)..(322): n is a, c, g, or t
ttgatacagggtctcgctctgttgcccaggctggatggaatgtagtggtacgatctcagctcactacaatctctgcctttcaggtcaaaccatcctcccacctcagcctcctgagtagctgggactacaggcatgcannnnnnnnnnnnnnnnnnnnnnnnnnnnnnnnnnnnnnnnnnnnnnnnnnnnnnnnnnnnnnnnnnnnnnnnnnnnnnnnnnnnnnnnnnnnnnnnnnnnnnnnnnnnnnnnnnnnnnnnnnnnnnnngtgtgaaccactgcacctggcctgattttatttattatatattacatatcatcactngcatcactgaaaaatcgttaaaggtcctaaggaagaaaacttacatgaaatgtttgcatgaatgtgtaagataaaagtaaggtgaatttactaattgttaagttatttttgttagtgtcatctaatattttagataatgaataatttttcttttcactaaaatcactaaagtcttctatacgactacataattctgattttttcaggttatgaaagtctttatttccatttaaatatactttatcattttatgattcaacccactcctccattctcaaaataatttgttaattagcaatagtttccccacagtttcaggaatttgtctcttccatttcccattgctgatatcggtaactctttctgttctccttttgttttctttccccatttgatttctgaaacacccatatccacaccctgaaaatatttgtatagttttcctcctttccatcgtcttccttggtttgcctggagtaagttagttctcttaattagcaagagaacttctttgaacttgcctctttcttagaagcaatcactattcctttgacctgcaagatttcaattatttgggatttacagacatctgtaatattggtattggtattttatttccttccttcaagtatttattaaatatccactagatggctttgtcttaaagacatgagctaaattaaatacacatctttttaataataactttagaatttttaggcataaaaggcttgctgctctgctgtattaaatcttcctgcaggcatggtcaatttgctctgtaatgcttatactagggaggtcccacgag

SEQ ID NO: 328707 - DNA, 645 bp, Homo Sapiens
  misc_feature (250)..(262): n is a, c, g, or t
  misc_feature (297)..(297): n is a, c, g, or t
  misc_feature (583)..(600): n is a, c, g, or t
gaaggaaagcttgaaaaggcgcagagcctatacctcatttcctccatgataaaaggatccaagtgaggccctgtcacagcctgtgggtaggggatgcggcgggatcctcattgccatggtactcaaaggtagaagagcctggagtttgttgcttctctttgctattctttcatatcctcttgggcctggtgattaattagcaattctcattcctctcagccaaaggcctgcactgggctttatttgtccnnnnnnnnnnnnnaagcactgcctgccagagatgggcctggggcctgnatggaggaccttagcgctgctcgttctccttttctgttcatgcacacattcctccatggggtggggaaggcaggcatggggtgtggccctcggagaagttaggagtcccccagctcaagatacagtggcaaagacctagtggtcccctacccccacttctctcagttcctggcatgaggagagaagaccctgctctggtggagctgacaacctttgaggctgggaggagagcagcctctgggcatcgttcccagtgtccctcacactaaaacggcgtagatggcannnnnnnnnnnnnnnnnngctgctcaactcttgtgtttgttgttctgtttgccccatttatct

SEQ ID NO: 328708 - DNA, 688 bp, Homo Sapiens
  misc_feature (604)..(604): n is a, c, g, or t
acaccggggagagcccacctaccctgtggggctggtccttacaaaaactcacaactttttgatctctgacttgaagtttttgtctgtttctccccctgcaagcatctgatgctgttcaagatgcagagagagtggagctttgcgcggacacaccctctgctcacctcactgtaccgcaggctctttgtgatgctgagtgcaagaggagttggttggccatttgcaagaagttctggaaacgcaggaggttcactggcagagagtgctctcctttgtgtctgccctggttgtctgctttccagaagcgcagcagcttgcttgaaggtgagcttttacgcgagcccggtggtgctggtcaagagtgtgtgtaggggggtgtcagcagagtcccagctggctgtgggtgagcctctcagtgaagcccttccctacctgcccggaacctgcagtgcctcctgtcgatggaacattcttcgtcagacgcttccataagcactgactgctgctctgagaggccagagtgtccactgctgcttcattcaggtctctagtggtttgcacttgacatgctgtaattgctgtgtagtcttttaaaacttggtgnttgggtgtgcacagtctccttctggaatacctgatcacccagcataactcacgtcatgttcctgctggctgcccttgccttgct

SEQ ID NO: 328709 - DNA, 364 bp, Homo Sapiens
  misc_feature (31)..(31): n is a, c, g, or t
  misc_feature (303)..(303): n is a, c, g, or t
tattatgtgaatatttactaaattcttattnctgggacttgaagttgcttgcagccaaggggaagagacaaatttctaaacagataattgatatagtgtgctcaatgttacagtaaagcagtggtgtcgtgggaaggacatatcccaaaacccattgggatgggcaagaaaatatcagaacttctacttacatttatctattcattgtctgtactttcgttataatttgttaaatacaaaagatttcagacaatatcaaaagcataagataaaatacaaaaacactaatgttcctggcatttnaagaaataaaatattacagatgtcaactgaaagcttgctgtgggccgggcatggtggctta

SEQ ID NO: 328710 - DNA, 703 bp, Homo Sapiens
  misc_feature (35)..(35): n is a, c, g, or t
  misc_feature (76)..(76): n is a, c, g, or t
  misc_feature (113)..(113): n is a, c, g, or t
  misc_feature (193)..(193): n is a, c, g, or t
cctgggcttgggcgtttccgcccctctttggatancctggtaaaatgcatgtggatttggactatgtcacttcatnccaaggcaggccaccactgctgagacacccttcatgnccttttaaggaactactttttgcctcaccacaacacattttcctccctattaaaaacaaagtgggctcatgttagtaatngattgactatttgaaaaaggtataaaagttctgcttttatttttaagtcacccaaggacacagactacacgcttctgtcatctagagtctcagtaaccatgatctgcagtatatatacactgctaaacaagaaaactctttaaatggcttcataataaacaaacagccaacaacttaaaagagaaacataaaattatgttttttactgagcttcatcaaatcaactctgaagtccttccattttctcttgaaaagtgtagactgcctcctgcatggacttctttgaatctagatatagatgcaggataagggttggaagagtcatgattgatagactgctggctgcttaggcaaactttatcagatgtttcctccatctggatctgtttcccttcctatcagaagaggtctctgctacatctcccagacagcagcatgggggaggaacagaattccagcatctccccatccaatggagtggagcgaagagcagccacgctctatagccag

SEQ ID NO: 328711 - DNA, 575 bp, Homo Sapiens
  misc_feature (388)..(510): n is a, c, g, or t
ctggcattctggtctgataatttttgctttgatgtagttcaaattatcaatctttttctgcatggtttctagattttgcatattttctggatgtatacatacatgacattagcaaggctttatatctcaaatgcataattaacaagtgaaataccctagtttcttttctcccctgtaacctggaatcagataatagtgttgctatactgagttcacattggcttatgctgacctagacttcagataggcaactgtctttgattaataaaacatggaagacaaaaattattatgtgtaaatgcaatttggtagggaagaatttcaaagcaatggaggagggaggaagtatatattaaaaaaggaatcttggtcaggtatggtggtgcannnnnnnnnnnnnnnnnnnnnnnnnnnnnnnnnnnnnnnnnnnnnnnnnnnnnnnnnnnnnnnnnnnnnnnnnnnnnnnnnnnnnnnnnnnnnnnnnnnnnnnnnnnnnnnnnnnnnnnnnnncatggtggcatgtgcctgtagtcccagctattcggaggctggggagagaagatcacttaagccca

SEQ ID NO: 328712 - DNA, 681 bp, Homo Sapiens
  misc_feature (305)..(305): n is a, c, g, or t
tttaacataaatttgatccacatgtttttgatttatttctatttaactcatcaaatcaaattaggagccacaatgatgaatgggaacaatgctgatttccaagaagatttttgcgcactttttctcagaattcaaacacattccacccccagccccctacaactgttaaaactaccagactgagctgggtttgaaatttagaacccaaatgtgaaataaagatccacgcctgggcaaagacagaacatagcaggggaatgttcttaggggagtcacagaaagaaggtggggcccagggatgggantaatgaggagagggaagtggggtcagttattcttccttagggtgggtttcagtatgtttaatcgagctttctagggctcccaacagaggccacttctcatgggaatgcttttgtcactaccacccagggaaagggggttcctgctccaaaaattgtggacagggggttccttgtacctatttttttcccttgtgttctcctccatagtagccaattcaagctgctcttccgcttcccttctaacagttccaccccctccccccgccaccccttcctggctctggtggaggcctctccatctggaaacatttaacatgtacaacaattttaatcttgtgcaagagaatcttagacgcactacatacccattaagcta

SEQ ID NO: 328713 - DNA, 803 bp, Homo Sapiens
cttctaaattattgcttatgttagggcttcagtatttcatttgaggtgactttccaaaacagcagacaaatttatattcaagtgtagatataaaaccatattttaagcaaattatttttgtattaccagccatttagatttaacatgtctttgttcctcgattgatatttagttgactacatttggttcccacatgaagggcctagaatgagcagtaggaagtattcaatgaggtcatagtcgcccctgatatttgtcttctatccctctctagatttcaagaaaattatacctatgggttttgaagtttgggtctttttagcaaatgaggcattatttgtagggttaatcacttggcagggactctgagcgtggggacatttttttaagtatttctaaattttaacacaagattaacagactattgaaaacaacattgtttttaagtaatatgaacttcagagtagtataaactttgtatattccttgctgaagaacacaccctagcacaataaaaagaacagtccaatcgtatatgcagtggttctcaaaacttgaatgtgcatcagaatcaccctagagggccacagattgctgtggcctaacaagttcccacgagatgctaacattgttttggagaccatattttgatttaagacatttcttttataatagaagcatttaatgttataagttttcctataaatattgatttagctgtacctcacaaattttgatatagaatggttcattttcatttatattaaaataattgctcatttttcatttcttctttgacccag

SEQ ID NO: 328714 - DNA, 766 bp, Homo Sapiens
cccatgatttgcctctaagtttcaatggtgattgagaaagtggtagattctccttttgtggcacttagcacgtctgcctgcaattttatctaccttcctcctagactataggctattccagaagctcatttatctttgagctctaacactgagcacagggttttggtcttaagacacactaactttccagtcgctcccaagcaactttcatgcccaaatggcctttccccacttgcataaaagaaaatgttctttgaaaagtagggcaggagcagccacgatgctagatggccctgctggctttggacccaatggaccatccaggccagtactgcatctctgtgagacccacagaaagttttccctaataatgccatacacaatccagctgtgccccagtaataaggtcaggcctcttcattttggaactggctgaataagtgtttggaaatgaagaagactagccctaaagaggccctattccctaagccttgttcataacaagcaggctctagccaaacttactattgtgtgtgttgttggcagggaataagtagggagggtgggtttataagaaggatggggactttccaaacaatgtagctgtctaatcacatcaatttctgtgcttatatcagaagatgttaaggcaggtgccaggggtccatgtgggaggtagtggagggctgaactgtgaatgagggaggatgtctatggggacatggggtctattcctcctattatatcgtctgagcatgaatgaaag

SEQ ID NO: 328715 - DNA, 770 bp, Homo Sapiens
  misc_feature (559)..(579): n is a, c, g, or t
tgtgtgggaaatacttccgtaataatgaactgtgctgagttcgtggagcattaaaaagtgcttcggttcaagctattctattccaccttttcaaaaggtggtttcttccctgaaccattgcatagtgagaagtttagtatctacaaaaggtgtggtgtttcgtggttttgcatcttgtttgatcttcacactggacagtagcaactataaattttaaaaagttttctttctaaaattactctggaagcttacatgcagatgaccattgctctgctccaccacctttgctggccccctacagcctctgcaatgctctctccattcattagccattcattaggctcctcccaccctggactttcacccatttaattgttcccctctctaaagggtccatttaaaatgtgatcttctctctcatactgcagaaatactactttttcccttataaatgcccatcgccttaatttctgcctccggtatggccgttgctactttttcattttatattttaggtggttgggtggatgacttacctcttctacaagacctttgaggnnnnnnnnnnnnnnnnnnnnncatgaaagtttatgtctacaagacgctgttgagagcaacttgattcctcattcatttttgtttcccacaaagtttatgcctgaaatgtgtgtataaacaacatttgaaagaagaaatggaaatctcccatcactacatctcagtatgaagagatggagggaagttaagtcctaaatgaccagatttggatg

SEQ ID NO: 328716 - DNA, 616 bp, Homo Sapiens
ttggtttaaggtgactgtcttagtcagcatgggttgccataacaaaataccatagcctgggtggcttcaacaacagaatttacttctcacacttctggaggttgggaagtccaagatccaggactttcgccttgccctcatgtggtgagggggtgaggaagctctgtggggcctcttatatatggatgctaatctcattcatgaggggtctgccctcatgacccagtcacctcccaaaggccccacctcctaataccattcaccctggtaattaaagtttcagtgtattaaatttgggggactatagacattgaaaccataacaagcacttttctaagatcagggagtgagtaagtagcagagctaggacctcaattccacatgtcagtcatcttgccttcactctgctccatgatggctgcctcctagagcattgggagtctcgatgttctatatgctctcatgtgttgtgtattggagatagttgaggctttatgaatacatctggatttgttgacttctagctttgctggtaaccagctgtgaccttgaataagttacttcatctctgagcctgtttcctcttttagaaacaggagtttaaaatgctgctttg

SEQ ID NO: 328717 - DNA, 401 bp, Homo Sapiens
attgtgtctttgctataaacttcgtgctttttcaagcaattgcggttctcctgtctagcccgctgccactggactatgctgtaagtcctctctataaactctatgtcttgcttactggctctgggtctcctctgtagcctctcaaacatggtgccatccctaaaagtcaacagggctccaggatgatggcacatggagctctactaattctctcaatgtatacacctctgagactgaactctaattcctgtaaacctgaactactttcaactttccagtggttttggccaaaaaccttagtcattcttcacttctctctcttcacaattgcagggcattctgtcaaaaaatccttttcattttaactggcaaaatgttgtccaggaaggctggaccccttt

SEQ ID NO: 328718 - DNA, 871 bp, Homo Sapiens
taactagtacataagcatttatttgaggcagatacagtgctgtgggacccctaggctaacagcatcaaaaccaatttttcagagactccattccataggaattactcaaagatccactaacacctgaagcaaagcagagaatctgttaccaccttgcagcaatccaagatctcactagaaaatatgttactaaagttgtatgtaatatgcttacagatcacagtgaaagtatatcgaatggcaaggtgaactatataggctcttaattcaatctcactactttctattactagagaactggtcagcatcttctggcaggatactgcataaaacagtcaactgtgctctcccgggcactgcatgtggctttggggtaacaatgtgggattattaagggctcgttggtgaatcggggggtccggggctgctggtatccatacaggtgacagtagagcacatcgaagcaaaagcagcacatctctgttgacaccaccatctttccgggagcccggcgatgaggacgaggcgggcgggacgatgaggagggtgaggaagaggtggcggcggccggggtagaaagtagggtccccactccgcagctcggaggtggcgacagggcgatccccccgccgccgccgccgcagccctgggggggagagagggtacagcggctgccgctaccttctccggttagacctcccagcccgttgagccgcgtaccggcgcctcctagtcccagctccccagctcggcactggctctctccgctgcagtgggaggaggaggaggcgccaccaccgccacccgagccagaggggggcgaactggacagtttctgcttcttcaccccgcagcaacccgccgccatcta

SEQ ID NO: 328719 - DNA, 690 bp, Homo Sapiens
  misc_feature (660)..(660): n is a, c, g, or t
gagaacagtcactggttttctaattgtgcatggggatttttaacaatcacactttgggcttcatataaaatggagtatatttactctgtcctcttccagggtaacagctggatgaatctgcatgcatgctttcacttgaaaaaattaagtgcccttggagggagaacttcagttataagttttgtaaggtgttttttcaaactctctctggactctgctacgttggttgagtcataaaattgttctgcaattcggtttgtcagagaaaaaagccctggaaaaacataacttcaactcttctttttacaagtgagaaaatggatttttatagggctgaaatgcctagctaaagatttcaaagctggtgacaaaattaggatcaccagatccccctttctccggtgtagcatctttgtacaatgacatgaaatttcctaaagctttttaaatttttttaatgttttgctattgcacaataggcttatttttgtctttaggtccccaatcaattttttttctaatgaagattaatatgcaatagattctttggcgttggagtgcgagattctttccaagtccttggtagtgtacttttttaagtttaggcattccaaaggccgttagcaagcatttggattatgctaatgacttatgctatcncatgttgcacccttgttgatgaaacagtac

SEQ ID NO: 328720 - DNA, 688 bp, Homo Sapiens
  misc_feature (56)..(56): n is a, c, g, or t
  misc_feature (461)..(461): n is a, c, g, or t
  misc_feature (659)..(659): n is a, c, g, or t
aatgcatacagagtttttattgcagatgatgaaaaagttttagatatagacagtgncgatggttacacaatattgtaaatgtatttaatcccacttacgaatgattaaaatgataaatcttatgtttatttcatcactaccaaaaggctgtgggtgcaggggtgctggtttctggtcctagcctaagagactggcagtttccaccttctatctcttgggacagtagctctgggagccctgagctgtcatgcaggaagtccagctaccctgagaccaccatgctggaaaggccacagggaggagctctgtggacagtcccagctgaaccttgccttccagctgtccctgtcaagatgccaggcatgtgagtaaagccatcatggaccctctagaccagactgcccaccagcagggtaccatctggcagccacatggagcagaagaaccgcccagctgagccncttccaaactcttgacccactaagtcatgatccacaatgaacccatcatagggatggttggctttgcagtgtggataatgaggatgtcatgtgagagacagctgaggtactgacccagggtgtgactgatgctccccatgtacccagagctcacttgtgaaatgaggaccatgggacatcatgaggatgagaggcggngatccaggagtgtggacattcagccaatg

SEQ ID NO: 328721 - DNA, 637 bp, Homo Sapiens
  misc_feature (92)..(106): n is a, c, g, or t
  misc_feature (239)..(279): n is a, c, g, or t
ttttttaccaagatttaatgtacatttattcttaacacgtggaacatatagtataaagatttcatactgaataaatgatattcattaagccnnnnnnnnnnnnnnnggaggaatttacatcaagttttagctacattgttgaaatacaaatatgcagattttatcactgaaaaaatctcaattgtgtttcttcatcagaacttcaactgaacctagaactttttcacacctcgattagnnnnnnnnnnnnnnnnnnnnnnnnnnnnnnnnnnnnnnnnntataagttgattggctgctgagacagcaaggactttttacagagacctgtacagcatcgcaccaagaggggcgatatctggcaagagattaaatagctgtgtctcgctttgtgcaggtcaccaacttgttagctcgtcatactataaaggggtagctgggaggaggaccaaactgtggggatccaagggtatgtgcaatgtacaacgtcatatatatacacacgtggcagcgtagccgctgcagctaaaggttaaaaccagttctaagaggtgatctcagggttattcatacaatcaaggaggagagaaagaggtcagggtgttgtaggttcacacatgatactttgggggaaaagcc

SEQ ID NO: 328722 - DNA, 602 bp, Homo Sapiens
  misc_feature (133)..(133): n is a, c, g, or t
  misc_feature (359)..(399): n is a, c, g, or t
  misc_feature (532)..(546): n is a, c, g, or t
ggcttttcccccaaagtatcatgtgtgaacctacaacaccctgacctctttctctcctccttgattgtatgaataaccctgagatcacctcttagaactggttttaacctttagctgcagcggctacgtccancgttgtgtatatatatgacgttgtacattgcacatacccttggatccccacagtttggtcctcctcccagctacccctttatagtatgacgagttaacaagttggtgacctgcacaaagcgagacacagctatttaatctcttgccagatatcgcccctcttggtgcgatgctgtacaggtctctgtaaaaagtccttgctgtctcagcagccaatcaacttatannnnnnnnnnnnnnnnnnnnnnnnnnnnnnnnnnnnnnnnnctaatcgaggtgtgaaaaagttctaggttcagttgaagttctgatgaagaaacacaattgagattttttcagtgataaaatctgcatatttgtatttcaacaatgtagctaaaacttgatgtaaattcctccnnnnnnnnnnnnnnnggcttaatgaatatcatttattcagtatgaaatctttatactatatgttccacgtg

SEQ ID NO: 328723 - DNA, 624 bp, Homo Sapiens
  misc_feature (82)..(144): n is a, c, g, or t
ttttttaaaaagtaggcacggcagtgcacgcctgtggttccatccactcaggaggctgaggtggaaggatcgcttgagccannnnnnnnnnnnnnnnnnnnnnnnnnnnnnnnnnnnnnnnnnnnnnnnnnnnnnnnnnnnnnnagaccctgtcgcaaaaaatacatacatatatacacccatacatatatatgggtaagtaaagtgtaaactgtgcctctttactgactttaaacaaaaagcaatagtccatgtttcacttaacaacagggacacagtcgaagaaatgccgttgttagatgatttccattgttatgagaacatcacagagggcacttacacaagcctagatggtccagcctccgacacacctaggctatatggtgtagcctgcagctcctaggctacatacgtgtacagcatggcactgtgctggatacagtaggcagctgtaacacagccatgagtatttgtgcatgtaaacatagaaaaggtacagtaaaaatgtgatattataattttatgggaccactgttatatacgatctgttgttgaccaaaatgtggttatgtggttcatgactatacttatggatagcacatcaagtcaatggggagaatattt

SEQ ID NO: 328724 - DNA, 719 bp, Homo Sapiens
  misc_feature (215)..(215): n is a, c, g, or t
  misc_feature (271)..(271): n is a, c, g, or t
  misc_feature (282)..(282): n is a, c, g, or t
atgagccacctcacccggcctgatgagaaggtttctaatgtttagctgatagtacaactggcgtttctttatccacttaatattattattttataaaataactgagttttgaatcataaatataggaattttttttccaaatgactttggtctgattttatttttctgtgcgtgccacgtctggtttggcattgaggttatactaggcatacggngtgtgttctagaactctccatcttttcccaagttctagaacacagaaattatatgntccttaaaggnttggtagaattagcctataaaactatttacacctggttgctattggttgtttacttatattggacgaatttctgcaagccaattttaataactggtattttactatagtaagcttcattcagcttttcaaacttagtgcactaaagctgcacctgttcttgtgatacacgagctcctgcatagttataattatgccttatttcattcctagtgttttatgtgccttccatcttttcttctagatcagttttgttcactattatttcttttctagtaacttttcagaaagaaaggaaggaaggaggaagggaaaaatatataaaagctctactaacgcacccattttaaaaactagatacttcattaaaactgataggctgtcttttaaaaatcattctgtccagcaattttattattaatgaagactatgttgcttc

SEQ ID NO: 328725 - DNA, 756 bp, Homo Sapiens
  misc_feature (12)..(12): n is a, c, g, or t
  misc_feature (175)..(252): n is a, c, g, or t
  misc_feature (450)..(475): n is a, c, g, or t
aaatctgtattntgaatgaatacaagtggacccgttgaacaacaatgtgtttaaacctggctgttccactaaaacgcagatttttttcaacccaatgtgtattcatgagatggaaaagcctctcatacggaggggccgaccttttttgtccatgggttcagcaggacagactgcnnnnnnnnnnnnnnnnnnnnnnnnnnnnnnnnnnnnnnnnnnnnnnnnnnnnnnnnnnnnnnnnnnnnnnnnnnnnnnggccttgctgtttgtcattctcctgtgagtgtagtcactgtcagacaatcactcctgtttgaacatctctgagtaggatgagaacatttttctttggggtctataaggctgtgggcagggttttgacagcagtaaacacgccaaaggcagaggctttcctgagacagtccctagccgatatccacagaaggcacaatnnnnnnnnnnnnnnnnnnnnnnnnnngcatagctgtcttctctgctgcgtacacttggaactctaacgttagtctagagctctggcctctctggcttggccctggaagttgcccccaagggcagctccggagagcatggctgcccagacccagggaccaccctgaggggctggctggtcaaatgactctactgaatccagacttattattcctatatctatggaaaagggacgcagaacggttccaaatcttgcaggcttgaggacagacattttcagactcctttacacttgagcaatctgtttca

SEQ ID NO: 328726 - DNA, 701 bp, Homo Sapiens
ccgtgtgcacatgagctgagaagccagtggagttcatagggcttgagcctactcctacattatgggagccaaggaaagtctatcacatcaggtgataagtctgctacacaatcttgggataaagaggcattatcagccataacctagattgtctttcttcaaagacatgattgggaaataaaaatatggtcttaacatataagaagctaggcctctaagacaatgatcagcatgtggtaagcatttaataaatattccaaaaattttgttgaacaaagtacaattttctttttaggccaaaactatttttctacagtctgataacttttcatccaagaaaggcttaaagtattactatttcaaacgttttagcttccattctacttgaaactccatgaaactccatttgtccctcattcaaatgccacattaaaagtcccatcctacttccactttataggtaattagactgaaagcaattaactggcatgccccagagtccccatggtggagaacagacccttgaatcctaattttccctgattcctgggttaatattcttcccctcacatgacactcatttttcaaaagagtgagcccataaatcctaacattttcccattaattcactaacttccagccaatgaacacgaatgagtacaattcactaatctggaaatacttcgatgagtaaacatttt

SEQ ID NO: 328727 - DNA, 737 bp, Homo Sapiens
  misc_feature (455)..(455): n is a, c, g, or t
aaatccagggttattttgttctgctcacgagttgagcctgtaagcctttctgtttgcctttctgcagaaagctgtttgtgagaaccctgtcttgagtacatgactggactgcacatgcagcaggcctgggccttcaactccaactacatctggaggaggggtcccagtgtgaaggggttggataatagtcatagtggttctgtacaatcagaataaatcctggctcctgaagagaagaggggcaggcagcagggctcacactgtgcgtgctgggtgttgtgattctgccatctgtcctcaacttcttggggaggggctgatggaacttgtagagaaggtggacctttagggggcttcatggggccttctcaccagtgagaatccagccctgtcccagaagcagcctcaagcttccgcactttcagtccagtgctgtctcccaaagccccctccgncaaatgaatcccacagccagcttcagcctcagatgctgcccactgccccctccatagaagtcctttcaccctgtgtcctctactaggtctgaccaatgtttcttggattttattggctaagctggataaagacaggccatttaaagtaggaaagtgggatcctgggtgatgtagcaagaccccatctctatgaaaaaaataagaaaattagccaggtatggtggtatatgcctgtagtcccacctacttgggagactgaggttgaaggatcccatgagccca

SEQ ID NO: 328728 - DNA, 709 bp, Homo Sapiens
tgcacaggctcaccagaagactcagactgtaaaaccattttccgcccccaataccttaccgccagatcactaaaggtagaacgggatgactagactagagctgtcactgggtatttttcttccctaaggtaggttaggctctgatgaaaccctagtaggttaggtttttgtgaaacagtttcttctgaggtcacaccttgttaagaagagtagaatgcaatgaagtatttcagaatactttttccctccctctaccaaaagcaggaggggatttttctctgacactcactatgaagacttgtcagagctcctggaagtaaaattcagaaaaagcaatgggaatctcccctatgactggctttccctggggttcgtaaaactgtcagacttgacctcactgcaccaccagcagttgtaattcaggtgttccttccctggcattggatggtctggagatttctgctcttgggtttctgctcctgtaagttgtggtgattctttgtagttgcctatttctctaatttggggggtggtagattgccctgtgacctcacttctctgatggatctaagaagagttgctgatttttcagtttgttcagatttttattaatacttgttgttagaacacagtggcaacttctaagcttatatgccctatattttatcttcttaaatagtcttagcacagtaagtatataaggaaactt

SEQ ID NO: 328729 - DNA, 522 bp, Homo Sapiens
  misc_feature (20)..(20): n is a, c, g, or t
  misc_feature (24)..(24): n is a, c, g, or t
  misc_feature (386)..(439): n is a, c, g, or t
ggcacgagcacctgattttntttnggaatattaaagccttgaggttaaagaaaataataagagttgttaaaaggcagaattgtgtttaggagactcaatatgtagtgttgcaacactaggaggaaaaactacaggtacatattattcactcagtttaaaacttgcggatctgtttatacaacttcagctatagccactataactgctgtgcaaatgactctcaaatcataggcctacccttctttgctgaactccatccagatcttgcaatgttaaactgctgttagatttaagccaaactcatttttttcctatttcttccaaaatttttattccccaatcctatatggtctttaattttagtacttatggtcttcagacatccnnnnnnnnnnnnnnnnnnnnnnnnnnnnnnnnnnnnnnnnnnnnnnnnnnnnnnaatgagacagagtcttactctgttgcccaagctgcagtacagaggttaactgtaacctcaaactcctgggctcaaactgtgta

SEQ ID NO: 328730 - DNA, 1392 bp, Homo Sapiens
  misc_feature (37)..(37): n is a, c, g, or t
  misc_feature (1221)..(1230): n is a, c, g, or t
gataaatggccctgggtaacatctaactatggctccnggctaatatattcggaaaggaatcccctatttttcaaatgcctggtaatggaaagtgattagaaccttcccaactaaattagaatctctaataactattgtgatcagtatcggtagttggtcatttaataaagtaagtaggttaaagtagggaatcataacctaaactgtgtaatatacattcggtttgccgatcttctgatataaagacacggattttcctttgcctaagggtccaatgactacagttctacttctcacataaatcacaccaataacatgatttgggtcccttcttctcagtttagaggttttaaaggtgggatgagtacttaaataaatctatgaagcaatctaagctcagaaattttcttgatttgtatattttccccaatatcttataatattcccagccacacctaatttaaaagcaacttttattggcaactcagcctttatcactttttaccaaagtattcaacttaatttttacagaaaattctttcttttcacacccgtattttctgtgtgtatgtgaatacttaactgagttgtgtacttataagaggaagcagaacttgcatggaggagtttgggatgggtgcacaactccagggagggagccggagcgctgagaacaccagagaacagcctccagctgtgctgtggcaggtggcttacgagagagatgtagactccggggcctgggagtcacacaggcagagtccgttaagagcacttctattgtacttagagggtcttctgactgctaactcagaagcaaaatcaagtgggttttctgtcaatagaaaacagagcccattctttgaggttatcaccacccaggtctgagtggcggggagctgctgccgcgggtctcttgcttcggcctggtagagaggctgtaagccagagctagaagtcagatgctcttctttgctttccttctgtgtactccaatgagaaggtcacattggagaatactgatgagtgctaaaaatatttattaataacatgattcgttgagagatttggtcatcaggaaatagctactgtacatggtcacagtgtcttggaaagagtgttaagtatggattctgtcttgcaagatttttttggcactttatatttttcactgaagactgagcactaaaggtgctggcaacaatgacacctaaactatgnnnnnnnnnntcactgtttgccatcattgcggtgataagcataaaaatttaagtacgtgtttcttgtatattaagactccaaatgcccaaatgcttagatgaatacatacaggaatatttaaaataaatttaaatatagccataacagaggattttgaaaacaaaatcacag

SEQ ID NO: 328731 - DNA, 528 bp, Homo Sapiens
aaacccctgtccctgtcaaggggtgattttattggttttaagtggggaagtaatcccatgtacttatttcttaaatacctaggaagttcttcttggtggctcctcttggccctcccctctttctcccccaacccaccatcctgcaaggcaaggaatggcctctccctccacaggcaacggctgcagagggagcactgtggctgccatcccagttcctcttcaaagccaaacagacacgcgtgactcaaaccctacagtatggagggtggcgttgcattgaaattccaggcctgagtttgatagtggattttaatgtagttgttaaaggtatgaattcatgttttataactgtagaggcaagcaagtttttattttttaaaaagttttgagagaataatttataagtttctgtgcagcaaagtggctaattactcattaaatacaggaaaagaatgtagtatctaaatccagctttttcttacctctggtacacttcagattacttcacctaattacatattgaggggc

SEQ ID NO: 328732 - DNA, 497 bp, Homo Sapiens
  misc_feature (23)..(23): n is a, c, g, or t
  misc_feature (28)..(28): n is a, c, g, or t
  misc_feature (54)..(54): n is a, c, g, or t
  misc_feature (66)..(66): n is a, c, g, or t
  misc_feature (71)..(99): n is a, c, g, or t
  misc_feature (468)..(468): n is a, c, g, or t
  misc_feature (471)..(471): n is a, c, g, or t
gtaatttaaagggggtaaattgngcccnacttggctggcaacggaaaaccttanaaaattaatccncctcnnnnnnnnnnnnnnnnnnnnnnnnnnnnnctgccttgccctcctaacaagttaataaaaaccatgaaattccataccctttaaacaaactacattaaaaatcccactatcaaaactcaaggcccctggaatttccaatgcaacgcccacccctcccatactgtaagggtttgaagtccacgcgtgtctgtttggctttgaagaggaactgggatggcagcccacagtgctccctctgcagccgttgccctgtggagggagaggccattccttgccttgcaggatggtgggttgggggagaaagaggggagggccaagaggagccaccaagaagaacttcctaggtatttaagaaataagtacatgggattacttccccacttaaaaccaataaaatcnacnccttgacagggacaggtggtttctca

SEQ ID NO: 328733 - DNA, 686 bp, Homo Sapiens
  misc_feature (633)..(633): n is a, c, g, or t
atttgcaaggctataacttttttaatgacagattttcctaaaagaaaccactataacatctgtccaagtactccagagaaaacaaaaaatacataaagattaaaagtctattactttaacagcacattgccaaacacggacaactaggataaatgccaagaaaccttaaaaaataactttaaaagatgcaacgttcaagccattcaaacgcgtaggttccacaaacaacaggaaaacaagtccaagagcagttctacttgtgcatgatggtaactcagactgtacttcatcaaagttcattcaggtgtttcataggcgtctgagcagagtttgttttttcttccttgcttggagatgtgtacacagattagaggagaggaaagtcttccagatgctgatgtaagcacagcaggcttggttccccttgataaagtatgaaggcagatttagttgactcaagctttatcagtttccctagtgaaaagtcttatgcatgctgaaatagacgagttactgaatttgtcatgcgaagtatttacataaagtgaggtcagtaacccgacagaataaaaaaggtagttgttaaattattgtataaccttttacaacttgaataactttgtgggtaagtgnacactgacgttcaaactcctcaaacatacattaacaagaaactatttactgcg

SEQ ID NO: 328734 - DNA, 552 bp, Homo Sapiens
  misc_feature (170)..(268): n is a, c, g, or t
tgaggagttcctggagttagaagacaataaactttagtgttatgttaatatctcagataatactcttttagggagttccttttcattaagtcttgtttggtctggcttatgtttcttgaagttcctatacaatttaaaagatatttcctggctgggcatggtggctcatnnnnnnnnnnnnnnnnnnnnnnnnnnnnnnnnnnnnnnnnnnnnnnnnnnnnnnnnnnnnnnnnnnnnnnnnnnnnnnnnnnnnnnnnnnnnnnnnnnnaaaatttagctaggtgtgtgcctgtggtcccagctacctgggaggctgagacggggagatcatctgagcccaggaggtcaaggctgcaatgagctgggattgtgccacagtattccagcttgggtgacagagtgaggccctgtctcgaaacaaaacaaaaaacttccctttgtgcctcttatcattcttatttttgttctactttatcttttttactctatttgtatatgtgaatctatatgacttaaattatatacagtttggggccaagtgtggtggcacag

SEQ ID NO: 328735 - DNA, 691 bp, Homo Sapiens
  misc_feature (460)..(502): n is a, c, g, or t
ggcaatttttctgtatgtctgaaattatttcaaaacaaaaagttttaaaaatcaccacagatgtaataacagctatcacttaatacgtgactgagatggttgaggtgtttttatatgttgtctaattgaccagtgaattataatcacatgaggcaaatattatgattcccactgggcactctagggcctcacccagaaccaagaagaggtccatcttggttggaaagggatgagggaactgaaaggctctcgcccacaaggctcagcacacacacagagcctgctgaagtccaatggcagggcaggaaaatagacacaccttccaggcattcatatcctaagccactacaagtgggaaggttataatcctaccttcaattaatttgatatttgtgaggtcttgaatctaacttaagcagcaatacagcccaggcccggttcaactataaatactaaactnnnnnnnnnnnnnnnnnnnnnnnnnnnnnnnnnnnnnnnnnnngaatgggtttgaacagaaaaggcatgctgttttctggactgatgtaaatattatttacttcagcttctagtgttatttctgtctctgtcattcttttacacaccaggttttactttacttaaaaattaaaagaccctcgaagaagtgatgtgacccactgtaaagaaacaaacagttaacagaatgagg

SEQ ID NO: 328736 - DNA, 519 bp, Homo Sapiens
gtagaagtgcccattctcagacggttgccaccagcgaaggcgagtagaaccagaacgggctttcaagggtatctccagggcaatgtacctgcccacattgctggaattgctgaaaaggaactcctgaagaagactccacgagaggccaccgttgagagaatactgtaggagcacgggttgactcctggggtcaggaacgcctttaccacatcccagtctcatgaagaactgcacaaatctagcatgtgataaatccaggtctcgtgtcatcaacatgcgcaagccatcttcattgaaaaagaggttgtttccactagaaaggattccacactttcgagatggtttcccaccactcattaataagaatctatcagattctagctgaccttcgaaatcatctttgagaaaatcaggatttttggtgcttattttacaggttggacctgagtagccagggtcacatatacatttggttccattgatacagctcccctgtccattacacatctcctcacactg

SEQ ID NO: 328737 - DNA, 489 bp, Homo Sapiens
  misc_feature (436)..(436): n is a, c, g, or t
taaactctaggggttgaaaaagctcaggcgggatcctaatggacttgtctttacattctagcctttctcctaaggcaccagtttctccaatgtttaacttatacatgcatcagaatgacagtgaggcgttggtgagagctgctctggttgctaatggagatctggcctgccacagtgggagcagagcttgcccagtgcgccgggacgactgcgggctccatccattccgctcccagggcggttgtcggccaggaccgtgagctgtcaggtcccccgcgggatccttcctggagcttacactatagtaggaggcagccagtacttgcaagcacggggtcgcgggaactacgacctcacccaggccaggcgacctttctctcaagaaggagatgtcagaggcccctcgtgacagcgagcttccggggacagggctccnttctgcagcagcagctccttgaagggtcgggctctgaaagtgcttactttttg

SEQ ID NO: 328738 - DNA, 261 bp, Homo Sapiens
agccccttaattattactgcctttttcctaagagtttcctctgagaagttatttggaaagaagacagacaatgtgaaaaaatataatggcagaaatttaaatatggaaactatgttaatgattcaccggagaaactcaaatgttataaattatttcctcaacatagatgattaatttccaatttccaaacacgttctcttgaccagtccttgcaataattaagataaaactgaaatggctcgtcagtgttgatgataaatt

SEQ ID NO: 328739 - DNA, 509 bp, Homo Sapiens
gctgtgaaacctcttatcaccaatatcattggaattctcaccatatgtaccaaagatgtattagataaagagttaatatcagctttttatcacacatggacacatttatttaatcttctggccatgctcctgaggaaagctggtgccatcacactcccgtttgttaccgtggccctggccaagcactggacagcggcgattgatatgttctgcacatgtgcaggcttgtctgccacgtgtcctgccctgtatactgccagcttgcaattcctttctgttctcttgaccgaagaagcaaaagggcatctccaggctaagagcaaaacacatttatgctgtagtccaacagtggcttcacttcttgatgactctcaggaaaatcagaaatctctagaacaacttagtgatgtaatccttcagtgctatgaagggaaatcctccaaagatatcctgaaaagagtagctgcaaatgcattgatgtcactgctggctgtcagtagaagagcaca

SEQ ID NO: 328740 - DNA, 553 bp, Homo Sapiens
  misc_feature (65)..(65): n is a, c, g, or t
  misc_feature (75)..(75): n is a, c, g, or t
  misc_feature (109)..(109): n is a, c, g, or t
  misc_feature (117)..(117): n is a, c, g, or t
  misc_feature (139)..(139): n is a, c, g, or t
cctaggtgaaaactattgtgtaaatgcttacctgggggttaatggaatgtaaatgggaccacctnctggaaccgnaagattttttaaaggttggaaccataatcccccnatggtccngtcttataatggacccaccttngaaaccacaaggagcctccattctttccacatgaactaaattcccactaggaaaaatgggaaaaacaactcattttaaaaaataaaacaatgggaggagacctcttagtctgatgcatgtgcacctgtgttctgaaaatcaggcaggctctttgatcctaagacagttatttttgggtaactgtctcacatagaaagacataccaaagcttacacagaccaaaagctaaacttgggcagtctaagaagggcatgtggggaaaacaaggtagctcctgaacatacgttgcaatcttgaatccatgtggcaacctcatcatcggcaatgtccttgtttgtggctgccttcaacagctcattggttcgatcctcctgctgctgaactgtcgaagcacactgtttggagtagtccttg

SEQ ID NO: 328741 - DNA, 518 bp, Homo Sapiens
ctaattttgtcagttttaactcctaaatatctttcagtttcttcgacttttctctctttctgtcacccctcttggcctaagtgcctgttgtcttttctctgggctacatcagtagtctttatatttcccgattccctgctcactcctttcctccctgcattcattctttcccctgtttcattctccacatttctgccaaaatgatacagcacactatactttttcctttattgtgcttcacacagttcataattggatatttgcaggattattttgttgctgttttccccactatactctagggcgtctaatttgcttactctaggaagtttgaggcacttgggtacagcatgtaggtatgtagagtgtgtatgtatgaatgaatgaaagagcaagatgttcatgatctggtggggaagacaggcacatataccagtaactaaataacaaggcagaatgagcatcctggatgttataatagaagcgtgaacaaaggactcctagaatagagaggagga

SEQ ID NO: 328742 - DNA, 310 bp, Homo Sapiens
  misc_feature (82)..(82): n is a, c, g, or t
  misc_feature (288)..(288): n is a, c, g, or t
  misc_feature (290)..(290): n is a, c, g, or t
actggttcctatttctcctggttcgaagaggtccaggacatttaaatagctcttctagaaacaaattcttttccttacaagnccctgccaggtcagtgggttcagtaaggaagaaggttttgtattttgacaattccttcatctgttaatttagtcagacgaggaaggaaacgagaaaagttatttctatttcatccatctaagactttatatcccatttcaggctgattaaaaggcaaaatcttcacagtaggggcaccaaaccctctgtatgccctgcctgcctcnanaaactatgacccggctgcct

SEQ ID NO: 328743 - DNA, 540 bp, Homo Sapiens
  misc_feature (48)..(48): n is a, c, g, or t
  misc_feature (117)..(117): n is a, c, g, or t
  misc_feature (126)..(164): n is a, c, g, or t
  misc_feature (169)..(283): n is a, c, g, or t
  misc_feature (521)..(521): n is a, c, g, or t
aaaccccacgggtaagtgagaacccttacaataaaataataataatanttttaatttgaaccggaaaattggaagaaaatccagttggagtgggaagctccatttaatgttgaacantgaagaacnnnnnnnnnnnnnnnnnnnnnnnnnnnnnnnnnnnnnnnccgtnnnnnnnnnnnnnnnnnnnnnnnnnnnnnnnnnnnnnnnnnnnnnnnnnnnnnnnnnnnnnnnnnnnnnnnnnnnnnnnnnnnnnnnnnnnnnnnnnnnnnnnnnnnnnnnnnnnactttttggcttttaaacagtgatatggatatctaattctccataccaaataaatgcatatgactaagaggtgagctattagagcgcataattttattccgtaaaatttgctgagtgaattgaaagaagagactggataacttttgcgtgattttaaatgcattttagtgttgcgaaatgtcagaccagacattctttactaagttatgaattgttcataaatccagggtattgaagnctcatggtgctagctctct

SEQ ID NO: 328744 - DNA, 427 bp, Homo Sapiens
cgttgtgttattagaaactgttcattaatgtgatgtccgttctgtttgtagagttcactcgtgtcaatatgggtgttcataaagcattgcagatactaaggaacagagtgtacttacagcatctctgtggatatgtcaccatgttgaatgcttccagccaacttgcagatagaaaactcagtgatgcttctgatgagagaggttagccaatagttggattctttggattaagataattggttttgagtttgacacagtgttaatatatgaaaagcagcagacctttgtggggatgctgaattattgaatactcaatattctttcactgaaggcacgagggaaatattttggaacatcatttggacaaatgtcagttgttcaaatgaagaaaataggattggggtacagaatggtttgggacttttgg

SEQ ID NO: 328745 - DNA, 430 bp, Homo Sapiens
aactgttgaaagtttaaacttagagctgaatgagaaaaagaaatcggccatgcaaagatgaggggacaacaaggacaagcgccgtgtgttcgaggaagggccaagaggccagcgtgtgtgaggtgcggccggcatgtggtgcggctgggtgcagcgggccagcaggagagggacataacgtgacgtcccagcggcatgagggctctgcgagccaggctgaggatgagttcaggtttccagggcaactgaagggcatggcagggtttcagcaaaggtttaccagatgacactggctgccatgtggagagtagatcacagggagcccacgctctccagtgtgaaagcagcaaggaggtcactgtgatagtgtaggcaaaaggtgaagggactcaggagtttggatcatgagaggaagaggaatccgttttgg

SEQ ID NO: 328746 - DNA, 708 bp, Homo Sapiens
  misc_feature (76)..(132): n is a, c, g, or t
  misc_feature (381)..(381): n is a, c, g, or t
actcaagtcatcctcccacctcagcctcctgagtagctgggactacaggtgggtgcgcaccacaacaaccagctannnnnnnnnnnnnnnnnnnnnnnnnnnnnnnnnnnnnnnnnnnnnnnnnnnnnnnnngtgactgcatcttgcttggttgcccaggttggtctcaaactcctggggttcaagtgatcctcccacccctgtgtgttcttcctttcagtaaacatttaggacctgtgaggcacagttctcagcactgggggccctgaaggttacgcagatgtaggatcctgccctaaagagctttacaggctaagggggactactaagggtgagaatatacatcgtcatgctacaagacagggcacggtagggcttggnaggggaagatatgggatcacgtgctaagggaactcccacttcctagctcctccaagaggtgctgtgtctgcgcaggtaaatttggacgggaggtccccacccagtctgacgggttccttgcacatgccaggttggccctgtgagtcacggaaggaatagtgtttccagccattccttttatctcatgggccggaaaagcacgcctgacatggccatattccctccctggccagttgccaaagaacttggttcaaaggcctgagaaggagctggatcaggatcgctctcccagctgaaaatgaactagcaactgcagggcttcaagta

SEQ ID NO: 328747 - DNA, 452 bp, Homo Sapiens
  misc_feature (401)..(401): n is a, c, g, or t
  misc_feature (416)..(416): n is a, c, g, or t
  misc_feature (423)..(423): n is a, c, g, or t
gtacttgaagccctgcaggttgctaggttcattttccagctgggagagcgatcctgatccagctccttctcaggcctttgaaccaagttctttggcaactggccagggagggaatatggccatgtcaggcgtgcttttccggcccatgagataaaaggaatggctggaaacactattccttccgtgactcacagggccaacctggcatgtgcaaggaacccgtcagactgggtggggacctcccgtccaaatttacctgcgcagacacagcacctcttgggagggagcttagggaagtggggagttccctttaggcacgtggattccattttctttcccctccaggggccttaccgtggcctgtctttgttaggcattgacggatgttttatttcttcacnttagttagttccccnttaggcntgttaaaagctcttttagggggcagggtt

SEQ ID NO: 328748 - DNA, 689 bp, Homo Sapiens
  misc_feature (15)..(15): n is a, c, g, or t
  misc_feature (176)..(176): n is a, c, g, or t
  misc_feature (251)..(251): n is a, c, g, or t
  misc_feature (349)..(349): n is a, c, g, or t
  misc_feature (542)..(542): n is a, c, g, or t
  misc_feature (575)..(621): n is a, c, g, or t
  misc_feature (666)..(666): n is a, c, g, or t
taaatctgatgctangttactaatgagaaacattgaagacaaggcaacggctttgtcaaagatgcagtacaaaagtcagcatgtccgacatatgaatgtcagaaaacagccaggagggcaaaagaacactgggccagcagctagaacttcatcccaccatttactggttggggcangtgactttctgcctactccttattctcctcatctgtcaaatgggggctaaaagtcctactttacaaaactgtagntgagattttaaaacactaacctaggtgataagacttggcaaagtctatgacaaaaagaaggaattttgtaagtgtttaatgaataaatgaatgggtgncctcaaagtcaaaatagaccctctgataatgaaagatgaataaaatgacactccctctgaacccttttttaacagtgggtaactcttaaagcatgagcaggcaaaaaggattcaagatcttttagcaggtttatgccatcacactgtgctatgtgcagaccaatgaggcaaggtccacatctataaccaaaanagtccaaaaaggtagctgggcatggtgcatgtnnnnnnnnnnnnnnnnnnnnnnnnnnnnnnnnnnnnnnnnnnnnnnnggaggcagatgttgcaatgagccaagatcatccactgcactccancctgggtaatagagtgagaccct

SEQ ID NO: 328749 - DNA, 462 bp, Homo Sapiens
  misc_feature (442)..(442): n is a, c, g, or t
gtcctggtttaatgtttggtaacaaacccactacgcctatccattttttgtttccaaaatcctactgtttaacatgccagaaggcaggtaataaagtgcccactgaggttggagacataaggacgtccaagggatctgaaccatcgcacacttactcttgcaacaagaacacgcccctgagtctgtgcatgttggggccaagtgcataaccgggagttctccagattaatgtcaatgtagaacacaatatttatgaaaggataaataataaagatgtgatgaatttgaagcttacatatacttactacataaaatccaacagtaaccacggagattgtttagaacttaggccataaaaccatttttttctggaaagagctttgcctttatcgctgatactctttcttttgggatggagtttcactttgttgcccaggatggncgcgacggcgccctcgtgcc

SEQ ID NO: 328750 - DNA, 1008 bp, Homo Sapiens
  misc_feature (111)..(111): n is a, c, g, or t
aaaaaaggcttatagtttacttgatttgaattttgctagcatgctttttcttctgaattcaagtgactagaactgaaattattccacctggggagaagagacagctgaaancaatttagtattggttttcaaatacatgaagggtactcagagagaggatgattgccaaagaaaatggtctttgaaccatagaaagaatctgagcttgctctaaagttaaatttcctgacttacagagtttatgacattaaactgagagaccaagggatcctttttggagacttcaaaaataggatagatccttaaatgcctgagatggcttgggatgtggctttgtctgaagtcaggagggataaatcttaccactgatggtcccttcagggcgtgtgaatctatggggtttgactgggcatgtcagaagctagaatgccagcccaggacatctagagagtcatctctccaatgctgggtagcagtctatcaatcgctctcactgcctcaacatctctcagctcgcctccaccaccatagggaacccaaggcctgctcctgtctgaggctgatttccaacgtggcagagaactctgctccctcactgtaccacagcctccaccaatccctcggagagcctaagtttttgagaaaaacaaaaagaagtctcatctgtggtagtagaaattgtgtgaatgccaattttttttaaaaatcagtatttaactttgtagcactcctttttccttcttgaggaaagctaatagcccagctctgcttccaaaacaaacgtctctaagattggaccagtctttgcttttctttttgctggacaaccttgtcccaacttagaaatggaggagatatccatagccttagaccttcagattgggctcaagagcctttgtgtggacccaaaaggggaaccctaggggacacacaaggagctggaagttcaactcccccttcatctcacctgttgtggccttacaggcttagaagtgcagagttcttcag

SEQ ID NO: 328751 - DNA, 433 bp, Homo Sapiens
  misc_feature (18)..(18): n is a, c, g, or t
  misc_feature (36)..(36): n is a, c, g, or t
  misc_feature (48)..(48): n is a, c, g, or t
  misc_feature (101)..(101): n is a, c, g, or t
  misc_feature (163)..(163): n is a, c, g, or t
cacctgggggtaagtagnaaatgtgtggaaaggccnaattggtttttnaaaaaatcgagtatttaaactttggtaagcaactccctttttcccttccttgnaggaaaagctaaatagcccccagctctgccttcccaaaacaaacgtctctaagattggaccnagtctttgcttttctttttgctggacaaccttgtccccaacttagaaatggaggagatatccatagccttagaccttcagattggctcaagagcctttgtgtggacccaaaaggggaaccctaggggacacacaaggagctggaagttcaactcccccttcatctcacctgttgtgcgttacaggcttagaagtgcagagttcttcagggatcctggaaaacctctggtcaaacctcaatctgcaatgcatgccccttagtcaaagctcc

SEQ ID NO: 328752 - DNA, 683 bp, Homo Sapiens
ttttttttcatttgctaggagagtttattcaagttcatctaaaattccctgagaaaaaaatgcactatttaaggtagattatgtctcaaggtgcaaaccctgatttgatagagaggcactagctaccagcttccaagtttccatcctttaaatcagtgaaagaaaggaaatccaggctcttcagtttagcttcagcactatcagtaaactccctggaggctttctgcagtggaagccggggtgggcccattggaatcccagagaccagagtcatgatggctttggtctgtgacactccaaaacctagtttgacaacaaagttgataaatctctggatacaaaactgcccactgctccagttgctcccatcaccagagcactcaacaattgctcatccaccccaaaaaggaaagcaaactgttgctggcgattctgatcaacacattgcccgaagtctaagagatctgtatcactgaatttcagcccttggaaggtggggatcttatccagaatcccatccaacaactcctcagcacgaatctttacccctgtcaaggcaggaatgtgatagtaataaaatggcagggcaggggcgcagcagccacttcctttagaaaattaatcaggatatctttggtccatggcttgaggaagaacggtgcaatgacagcgatgccatcagc

SEQ ID NO: 328753 - DNA, 489 bp, Homo Sapiens
  misc_feature (62)..(62): n is a, c, g, or t
  misc_feature (109)..(118): n is a, c, g, or t
  misc_feature (329)..(337): n is a, c, g, or t
aaaaacccaatctaaagcactcactgtatttacaagctttcagttaagatgcctgtattccntgttcctttttgaataagcaaatccccttaaaatttgtttaacctgnnnnnnnnnntctatcccataaaaacgaacatagaaacaaagccaaaccaaaacgggaaggagatttcatgaaagaggcaggcgactggcatgcagcagtgggaggatcgcgccacagaaggtagaaatcctaaaagcacaccggttccctattactctgcttggtactatgagggggaaaagacatacacatatcagcactcccggtgagtcacaaaggnnnnnnnnnggcctgcaaggtgacactatgataaagggcaagcatgttttctttcttagattgcaactgccctcagcaacatttaccctgaggtattcctatgacaggtcaaggattttcggtcatttggaaatgcagttacttctgcaatgcatagctct

SEQ ID NO: 328754 - DNA, 756 bp, Homo Sapiens
  misc_feature (344)..(344): n is a, c, g, or t
  misc_feature (350)..(350): n is a, c, g, or t
catgcaagaaagggaattttgggaaatgtagttggtctaacgaagatgatgcattatggagccaccacacatgctagcatgctaatgagctcaattttctatctgctaatacttctaaataaaacatgaagctaacatctcccaaggctctgttttgttgtttcagttctgcaactggcctagagaattctgaagatccttgcagccagctaacgttatctttgagtggtaagattaggagtacttttcaagtttttccttatatttttctgtggcttagaattcttcccacataaacccacattatgattgtaatcagaaaaaaattagttactttttagaangccagncctgtgaacccctagggagaccatgccatccccacttaagggcaacccaataacatccatgaattaaactgtgtcttctacattcttccctggaaatttcacctgttcttgactttgtacaagaacttataaaacgtaagttatggtcatcagatttcctgaagccctctgcttctctcctcccatgttctcaaagtgatcccaaggatattttagaaactggaagcaaataatataaggagaaaagaaactggagtggaagtcttgcacgtagaagggagaaatcatttttagataagtcactgggaaagtgaagaatagagagcgcatccttgatatggtttggctgtattcccacccaaatctcatcttgaattgcagctcccataattcttacatgttgtag

SEQ ID NO: 328755 - DNA, 527 bp, Homo Sapiens
  misc_feature (288)..(288): n is a, c, g, or t
ggcacgagggaagacaaaatactatataggacgaaagtagatcattcttgaaggtcttcatgttgaatagtagactgaggaggaggaagaggaggggttcgtcttgtctcagaagtggcagaggttgaagaaaatccacatcagcctgtggtagctgttcctcttgttatgccagtttgtagaaggaaagaggatgaggtgtctatttggaagtgcccccttggcaaagcaggcaatcatatcagggcctcttaatatgccagccagccctgtaaaaacaaaaacggnaacagctccattcttccagtctctcagtcctaataccttggaatcatctttgctttctcttgtactatacatctaatccatcactattctcgtactcagaatcccgcccattgtcagttcctgttaaagccatgttgaatatatctgaaagctgtagaagtcctgaagaaagaatgaaggaatttattggaattgtttggaatgcagtgaagcatctcacactacagcttgaagtacaa

SEQ ID NO: 328756 - DNA, 656 bp, Homo Sapiens
  misc_feature (326)..(326): n is a, c, g, or t
  misc_feature (504)..(504): n is a, c, g, or t
atgagctaccactcctggcctagacatctgcctctcaaagtgtgaggactgtgggtagtatagtagctaagaccacagcctagatttgaatcctgggctctgtctgcactctgtacctcggcatccttttctataagatgtggggaaaaaatggtatgtgtcttagaaggtatgaagctcaaatgagaaaatccattttagggggtttgggcttgggtgcctgggctcacagtaaaccaggaaacaccaagtattaggctaacaaacaagccttgtttcctcttggctgtcaggcactgctgctcgcggtccttgcctccaacccnacgccgtcacagcccggtccatacctgaagaacggctgccgcggtccgagctttgccccacgccagagtcatcggcctctgcctgccccggggcggccgcggcgtcgctgctgtcggcggacacggcttctgaggtgcccacacccaggccgctctcagagggctcctcgggccggcncaggcccagggcgccgcgttgctgctgctctccacctcgttctcctccatctgatcggcgggctgcctgacagcggggcgtagggtctgggaacttcactccgaggctttcgtagccacgttcctctctgactccggcaatcgacgaggtcg

SEQ ID NO: 328757 - DNA, 731 bp, Homo Sapiens
aaaacacagtgtagtcaatttttcagtgaatgtcattacaacattacagccttgatgctaattcatctcctaacctactttcccaggacttggtagtaaagacttaatgctgttttcagcccttttcatcttcaaagctcttactaaaatgtctaattaatcttccaaatgtcactaaggtaggcacaatccagtgctgccactcctctcggattctcttcatcttttcttgtcaattgtggaattatggcattagaggagacctggaaggctgtttggttgaaaatcatatctgatgcttgatttccacattcttgccaagtgtttattcagtgtaagggataatttgggggtgttctttcagcccaagggctgagaattgctcaactttatctagaaatcatcccacctaagcagaactccccaggcagctaggtgaatacaacatgactccccgtccaactgctgttgattgaacacctgcagcaaactgagccaatcagagtgcactcctccataacagagaattggaatgaagctaccacagtctcagtctagactatttcttgtgacacaattaataaccttggaagtgctggtacatcaaccttcttttatgtaagctgatcagcaaatatagaagtattaagcagatgtccaacaaagaacagagatccaatatggagaaaagaggtccctctgaatttccaatcactttcagcttactggtt

SEQ ID NO: 328758 - DNA, 762 bp, Homo Sapiens
ccattttcagctctgttttgcaaacactgagcaccgactccgtaccagacctggtagtgacgatgggggcagggaggcacggaacaaagccacctcctggaaggcattcacacactcctggtcatctgcacctcacccaccctgcccaaggctcaagagggccatcacagcctgtcagcaatgaaaggacccagaagacacaagtgaatatacctggccctcctgcaaactttgcaggcaaggtggtaagaatgaaggcaaaaatatgcacgtgactaagaaggtaatgtttgctgacttgccagcaagaaagatggccggaaagaccagctgtcccgagcctagcgcggtggcccatgctaagcagccactcagtcaaataagtgatggctgaaatggaagttcgcccaggcattttcagccctgaaaactggacaagagcctgcccttccaaagtcatttccctgcaattagcagcctgcagtctttaggttcttggggctgcctcttctgcccttcataaatattgcctttcccaaggacactgctggcactggcagtgtcgtttcatagcaggagggagcagcagtgacaactgaaataaatacagccgtggcacggatctcagaggcataagccagccaagtgcaacatcggagaaatcagtctggtggatgtcagccttgctggaaactgacaacctcattttctcaagctgaagattgtgcaccgcagacccttgactcagtccaaccagatcag

SEQ ID NO: 328759 - DNA, 654 bp, Homo Sapiens
accaggggacaggaagggctaacctcatactttggagcctcagtccatgagtctaactgaaaagagaaagacagtcctctgaagttgagatggaagagctgctcagcggagttgtacactccaggatgggttgcgccaaaagactggtcaatctgttcaatggtaggagctatggcctgagaattaaaatgcacgccactgaaaaacaaaaatattttttaatactaggcttcacaagatgggcccacagatcatgtgagatagtagctgggagagttatttttaagacacaggcaggtgagtctctaattatatcaaaatacaaagcttaattagagaacttttaaataagagcattaatgaggtcaggagaaggtcagttctcatgaggctgatatacagagttgatcctctggggctttatgacaccagtgactcttaagaaaagggtagagaagagaagccaccagaccctgaggtatgaaggccccagtaaaactaaaagacaactagaacctgcaggggccagtggtaccacacatttgcttgtctactcctctatcagcaaaactgcctgagcctgccccaggaatcaggtcctcttcacaccctcaaaaagggaaagggaagccagttaaggagacttactgaaag

SEQ ID NO: 328760 - DNA, 770 bp, Homo Sapiens
  misc_feature (760)..(760): n is a, c, g, or t
ctaaaacttttgtgtcttgctgggctgtccctttcctggttatttggttagagaaagtcagcttttattgttgtttttctaaagtctgtgccgattactgtttctgggttcccagcgacttcggctccaagtctggatacatgaggcaaaaagaaagtcccctggagctcatcactatggcgcccctcaagtctcaaggaccctaatcagtccgtcttcttctctttaccttccagaatgttcttacatttgttttatgtatgtctagggattttaggtgtacttagtgggaagaatagggcaaagtatgcctactccatcctcttggaagcagaagtagagaaatcgaattttcaaaccttaactagagcttctgcaacaaaagccccttttaactgaatcacagcgtatgaaaggatgacttaatttggtgattttaataaatgaaaacttgaaaaacactgcatataatagtgttatataaatttctttcagaactgtcctgtgtgtggacaattgtttttaggtactctttcaggctctaattttatatcactaaattaagacataaatgatcaatatgacccatgtttaagataaaattgtaagatatcactccttgaggggcatagctcagcttctgatcttagttgcatagatttcataaagttcaccttaccagtttacatcacatccagatagtccaggcaaatgacagaggtttgactttccctttgtgtttgctcaatcaccacagggncttaaagtgg

SEQ ID NO: 328761 - DNA, 202 bp, Homo Sapiens
  misc_feature (59)..(59): n is a, c, g, or t
attcaccctatgtgacctggtcctttccacccaacacccatactttccttgatcactgnaagcctttaaaaataagttttgaaagtccaggtagtatcagtacctacgattcctgttccttcctctttccaatatcatgttggcgtattctgggtcctttgtctgtcccatataaactttagaatcagtttaatatcccaca

SEQ ID NO: 328762 - DNA, 669 bp, Homo Sapiens
  misc_feature (340)..(340): n is a, c, g, or t
  misc_feature (470)..(503): n is a, c, g, or t
  misc_feature (525)..(576): n is a, c, g, or t
cccatataagcaggatttttatttgttaagaactgtatgactttgaaactctgtagtctatcttttagagaacttgttatatatgtaaatgaatgccaactgttcaagatttttccgttactggggtggaatttttgtatacgttttggggcaggcaaagtttgagtattatcatctgatgtaatgtgttaggcatgagatttaacattcttggataaattgaaataataccaagaaaatctaaatcagtgataaaatccctacataggtgctgatatttatgttatgttactagaagtgcttattttacaatgctatggatatgtgtttgtgtgtttcntcaaaatatataacacttgggatatattaggttgctagcattatctgttaattgacatgcagaaacaaatcctaaattaatgtttttaaagagaaagaattgcttctctgagaatgtagtttcagcaagnnnnnnnnnnnnnnnnnnnnnnnnnnnnnnnnnngagacaggtctcactttgtcannnnnnnnnnnnnnnnnnnnnnnnnnnnnnnnnnnnnnnnnnnnnnnnnnnntgggcttaatcaatcctcccacctaagcctcctgagtagctgggactacaggcgcatgccaccatgcccggcagatttttgtatcttttgtag

SEQ ID NO: 328763 - DNA, 726 bp, Homo Sapiens
acgtcttaatttttattttccaagaaatcattttagtgacagggacttaatacatgctgaaaagagtttgtataacacaagcgatatttaggaagattgatttggtggtcatatgcaggatggctcatgatgaaagactggatagagagtccccagaggcaattgctatgccctgaccatgatctaggtagggctggagctggggcaaggatagaaaccatggatgtcagatccaggggtagaaagactaaagaggacggtggataggaacagtgagagaagagaagcacttaaaatgtctctggaatgttgagcataggtgcctaggggaatggcggtctagcaacaaaagcagggaaaggagaggaagtgacctggaaggaaagtcatattgagtttgaagtcatccaggatatacaatggcaaagtccctcaggactgaaaagtgaggctcctgtactgggaatgtggatttcacgccacctagggaaatgcagtagttgaccctggtgagagcacagcgaggtgtttctatgcaagagagtacagagaaatgaaaaaacagattctctggaaaattgctctgctggggtgagcaaaagtaagaaaatacggacacagagaatgcgggggagaaagggcgagaaagtaggcaagaactaggagagtgtcttgctgtagaagccaagagggcatgaatggcaaagagtaaaaggtcagcagtat

SEQ ID NO: 328764 - DNA, 533 bp, Homo Sapiens
tacgtgacaggcattttacatatgtttatatgttacaggcatttaatatatatttatgtgtgtttacataggatttatacataatatatggaaccaattacagcaaccccatcaaagtatataaatgaatggattttatatcctgttaaggtgatatacctagtttcttgaggagattaaggtggaaatttgggccccagatctttggacccccaagtccattctctttctgctagggctaaagaacaaattttgtcaggtctctggaatctgttttccaaaattctctgtcttctctccgcaacacatttaacctgttgattatacccagtatctttttaccactctgtcttgtattgctgtaattgaagatggcattaccactggattatgtaataacctctttgttggtctgtcagcctttttagttccttaacactcttgccacaactgtctaaaaaacaaaagttgaattcttcatctcctgcttaaaaactggctctttgataactggatatagtcccaactcccag

SEQ ID NO: 328765 - DNA, 914 bp, Homo Sapiens
  misc_feature (112)..(146): n is a, c, g, or t
  misc_feature (385)..(435): n is a, c, g, or t
  misc_feature (501)..(627): n is a, c, g, or t
ccattcattatttactaggttaagatgaatagacactgaatcaaagttattcatcaacaaaaaagaacagttactaatggaaagttattaaaataagttctataagagtacnnnnnnnnnnnnnnnnnnnnnnnnnnnnnnnnnnngtgcgaagaaccattattgagtttgcaagataagatgtatttgtattttctagtgtctttttatttataacaacacttttttggcaatcagtttgtagctgtgcccttatttttatagatagtttgccatttcttgggtttaatgtttaacaaggctatagaagtttaaaatacgtggacaaatgtttgtgaatacacttttaaaaaattgttttaaaagagaaaagcggtcttgcttnnnnnnnnnnnnnnnnnnnnnnnnnnnnnnnnnnnnnnnnnnnnnnnnnnnaaatttttgtgctcagatgatccttttcatctcagcctcctgattagctgggactataggcgtgtnnnnnnnnnnnnnnnnnnnnnnnnnnnnnnnnnnnnnnnnnnnnnnnnnnnnnnnnnnnnnnnnnnnnnnnnnnnnnnnnnnnnnnnnnnnnnnnnnnnnnnnnnnnnnnnnnnnnnnnnnnnnnnngtgtgagccaccatgcctggccccatgaatacactactaatattatttgtaaatatgtattttataatgtacaatgcttggaaaattttcagagtattctagtttaaaaaattttttctaattctgtaaattctattacaagtatgttgtttattacaactcattacaactacctaaattttaggtgttaactgtatttaagtaaatgtgttatttttgcatttcatagccagaaaatactgatgttcacttaaagatattcagcaattaaaatgttaaaacttgaa

SEQ ID NO: 328766 - DNA, 618 bp, Homo Sapiens
  misc_feature (397)..(397): n is a, c, g, or t
  misc_feature (540)..(550): n is a, c, g, or t
  misc_feature (580)..(580): n is a, c, g, or t
tctacttaatacctctccatgccaaccccgttgtcatttcccagcggccgcctctataacgggcacttttcagggacaaagaattggtccgttaatgttcctcaaattcgaacgcgcctaggaatagttcggggatcctgttgaagtgcagatcaggattccgtaggtaggggtggggttccaaattctacatttctagtatcttcccacacgatggtgatcctccttgtccctgaatcatggaggagggcaattagggagatgtgagcctgggatgcatggtggccttggctatcttaggtgttcttgcccattaaccaagctgggaggaaccgtgtgaatgcatatctatccctgttaattaaaagggtagtttgaagggagatgcttgacaggnagaataattaggaaatgttttttcttcccaatccaactatatgcaatacactttataatattcattttagaaatgtcatagataagatttgtaaacattgacatttagcaatactaaatatcactgctaggtctccctccacnnnnnnnnnnnaaacaaaaataccgacagtatgtattgtangtcttcataaactacgtcttctgcatagtgtttcatga

SEQ ID NO: 328767 - DNA, 528 bp, Homo Sapiens
  misc_feature (233)..(384): n is a, c, g, or t
  misc_feature (513)..(513): n is a, c, g, or t
actgcgcccagccgatgcatttctttaagatagggaacatgacaatgttacctccattgtccttgaggccacttacctttgtcctccctgccatatgtcctgctgccaattcccccaacatttggcatacaataggaggcttccagctctatgccaagagaggaggtacatgcaagaggtaagagcaggaagggaaatagcaaaatgatcaggtatttcaggatgatataatnnnnnnnnnnnnnnnnnnnnnnnnnnnnnnnnnnnnnnnnnnnnnnnnnnnnnnnnnnnnnnnnnnnnnnnnnnnnnnnnnnnnnnnnnnnnnnnnnnnnnnnnnnnnnnnnnnnnnnnnnnnnnnnnnnnnnnnnnnnnnnnnnnnnnnnnttagctgggcatagtggcatgcgcctgtatctctcactatttgcaacagtaatagtaatagtgggctacttcactgagcacagccagagctgggagctggatggtatgaggtctctctaattgaggagnatggaattgaaagtt

SEQ ID NO: 328768 - DNA, 806 bp, Homo Sapiens
ttaaatgtatagaaattgttttattcaaagactaagggggaaagggtgagaaattaagtctagcagtacaattatagaacctctggtgtattctcatgggaaaattaatgttttaggtaaaatggagacgacagtagttacgacaaatacttgagaaaagcctatgaaattactgactttggtagtccagccaaacatttgcttcaggaaaagcatccagaaatataatgatttagggatatcaaggtatactatataaagcattgttgtatatattatttcctcttttcccttgggaggtaatatctgaattattatcagactcctaatgaggaaacactctgagaagtgagaagcctgccttgtgtcagagtgggtaaatcagagagacaaaggcgttagggcttgaactcaggccctctgactttgcagggttctattgaagtggccaccttgcctgaggctatgaggctgaaggagtgggcagaggaatacactgtggtcattcacacctgaaattatcatcttaccaaggaaccacctttcccgattaggtgaccaattcactatttatccttttactatttcttagaaaccccaaagccaatacatacgctattcctttgtaaattatagggtcaatgaagttgaattgattgtttctggcccctctgataaaggtaaattgagtaaagtgtaaacgtgaaacagcatgggttaggatacttttcaaggattttggtgccaatttatgttttccccatggctaccctcatattatctttgcttttaggcattttttcctt

SEQ ID NO: 328769 - DNA, 491 bp, Homo Sapiens
  misc_feature (40)..(40): n is a, c, g, or t
  misc_feature (47)..(152): n is a, c, g, or t
cacgggtttcaccatgttgccagctatctcaaacccctgncctcgtnnnnnnnnnnnnnnnnnnnnnnnnnnnnnnnnnnnnnnnnnnnnnnnnnnnnnnnnnnnnnnnnnnnnnnnnnnnnnnnnnnnnnnnnnnnnnnnnnnnnnnnnnnttcctacccttatgtacctttagataacattttacatagtaaacaataaataaataaatgctgtaaaaaaatttttaaatagcaagataagtgggggtacaattttttaaagggtggtcaaggtaaacctcattgacaaggtattagtgagcaaagacctaaaggatctatgggagctatccttggagatagctggaggaataacattcctgacaaagaaaacaaacaacacaaaggctcaaagagggaaggttaactgagaaacagtaaaaatgccaatgtggccagagtagaaccagagaggacaagaacttacgaggtgagctctgagacatagta

SEQ ID NO: 328770 - DNA, 615 bp, Homo Sapiens
  misc_feature (104)..(244): n is a, c, g, or t
tcaaatgttaatattttcactttattattacatctaccaagcttagtggaaggacagggctaggggaaatagaggttaaacctcaataagaaatagtattttannnnnnnnnnnnnnnnnnnnnnnnnnnnnnnnnnnnnnnnnnnnnnnnnnnnnnnnnnnnnnnnnnnnnnnnnnnnnnnnnnnnnnnnnnnnnnnnnnnnnnnnnnnnnnnnnnnnnnnnnnnnnnnnnnnnnnnnnnnnntattaatagtattttagttgggcagtgaaaatgggagaatatcaatagacatttgaaaaagagggaagagctttcagccaaaggccaggggagagaaaagccagtggtgaatattaggggctggcatacaactctaattgtgggagggaagatggcagagttacagtaaatgctggggagcagtaaaacaaaaggcttgaagtaggctgtatcagaatgtggtcatccttgagagccaggaggtttgggggagtaatggacattgttgaaactttcctgatgatatgctctcatctaagctcttggaagatacctaaggcagtgacatttgggaaaggaggcatacgtatttccacttctacacactcttc

SEQ ID NO: 328771 - DNA, 719 bp, Homo Sapiens
  misc_feature (702)..(702): n is a, c, g, or t
tcaatgactaaagaacccagaaacccgcttgcctgtcccctatattggtgagttccattcctatgggtggtttagtgtgttaaagaactttgactaattcctctagtttgaagttagaaatgccaattcaaagaaagccatggaatgggtatcctcttctgggaaccaactccagggcaggtataaaaatggttgtatttagaaacagaggtataaatagctttattttcttctaaagatcttcttctcttaggaaaagaggttgtccaatattttctatccaatgccccctcttttaagattttggcactttgtaccttgcttggcctgagaagatgtaatgattacatcttgcggatataatgatgtccaaaggagctctgtggtgtggaccaaggagactgacatacaaaaagctggaagccaagtgtcttcattcctccagtccacgcttagccccctattcccctggatcctgactctttggttgagaagaacttctctggagtactatttcccaaagtataattcatggtgttaagaaaggctatgatttaatcagtcaaagctgtggttttctcatctgtaaagcaccaatgataggaattaataacgttgttttcaggattaaatgaaataacacatggagaaagagcttgcccggggctgggctcctaggaactgccgggttcttttgtcatnctcttcctttttcttct

SEQ ID NO: 328772 - DNA, 463 bp, Homo Sapiens
ctaaaaaatattttaatacttgaaaacttctaaaacaaaaggtaaggtaacatgttctttcaaaagtgaatttcacatgcaaaccattaattatatttattttactgtgagataaaagcaaaacataacattcggagaaagagaccagtaactgacctatttattttatattatattaatgtgaatcctcattagaaatgtgataacgttattgcacaaacaaaaccgtgggcagaaacatcccagcaatgcaggggcgcccataccgggttacaagggatgtccagcatgtgtttccctggaacactcagagtctgcacttttcctgcaaatgggaccatgtctgattatttattatgaaagaacactttaccgaccatttttttctcagttggtataatgtagaaataggcttttttacatccattaaatagtcttgaaaacatttttgcactaaatcaaa

SEQ ID NO: 328773 - DNA, 772 bp, Homo Sapiens
  misc_feature (27)..(27): n is a, c, g, or t
  misc_feature (42)..(42): n is a, c, g, or t
  misc_feature (50)..(50): n is a, c, g, or t
  misc_feature (52)..(52): n is a, c, g, or t
cttatttgtgtgttttttaaaatcccnaatcaaccagaaaancaccccancncagagctatgaccagcaggcatggaagaaatccaacgtttgtgtgagaaagcatactgaagcattacctgttcccatttgaatgctgagaaagagttagggaaataacatgattctccacttaataaaacttcagcatgtctttttcattagaagtgatgattgacagggatttgttggtgacactgtgtggtcctgggagcagaagtcactgtgtaaacaacactgtgctaacaaaagaggactgttcacatggctggcactagcacagcctcgagaagatgaaaagacggcacacggaatttcctgatttggggccaagatggacaacaatgactatgatattaactgttggattttatggatttttattgaataaatggaatagattttgttaatttgtttattttcctccatgaagatgtttgcaaatgtatcctgaaaatataaaatattttcatcatataagttggaaaactagggaaagtttagggttaatttaatccccatgtaattcttttcaagtgcttagccttaaatattacctcttacttcagttaagataatagttttttaaccccttttttcaatatgttaaaacattttgaagcaaatcttccagacatagtgaaaaaaacctgctctagatggttacttagtgtcacaattcatggagggaactatatagaattcccctatatggtgattttctgtggcacta

SEQ ID NO: 328774 - DNA, 424 bp, Homo Sapiens
  misc_feature (148)..(148): n is a, c, g, or t
accacgttggccagactggtcttgaattatttaccttttacaatagttcaggactgtgacaggagatatgggggaaaatataccttcatcttcctattttgttccagactgattgtctgcctgttctccataaaacttcttccctctnccccactcccagtcacccagattgggggaactgaccttttgaatttgatggcagtcatagcaagccccagtcattgttggtaatatttctaaagcttctgaaggtcacctaggattaagataggtgccgcatgctgctactttaattatgaaagacacgagaaataaaggaagcccttggaaagaaaagaagaaaatccctgccacagcccaacagaatagagaagcggctgtctgaagaggacagagatttgagataaagaggcacatctatttc

SEQ ID NO: 328775 - DNA, 493 bp, Homo Sapiens
tgctgcttgggagaggtggaggccattagttcagcagaaggccccatgccactgaagctggtctgtggtaaccccggaagcacactggagctgctgggggtcacggtggcgaaggcaggctgtgtggtctctgagttcgaagtggtgggtggcgtggatagggaagtggaaagaagatgtcccatctgcgccgaagaaggttgcctaaatggagaggggtctcccaaggttgacagggagattgccccagtgagttctggggtttaccacgcctccaagtggcacctcaagttgggttgggagcaagtgctgcgccatgatgggcatctctgctgaaaaggtagctgccatattatcaccagagtacgatgttgtgtggggagaggtgatatggtcactgtagggagacggcacatgctcactatcataatggcttccatggggtgaggagtgtgagtgatcactgctgtattgctgtcgtgaggtgattagg

SEQ ID NO: 328776 - DNA, 479 bp, Homo Sapiens
atgatgaggacataggagatgaagaccagacccatggggaccaggatgacaaataacctgacaacaaaattgattatctcattgatagtggtattaatacaggagagtttcatgacagggaggatgtcacagaagaaatgaccaaccaccgtgtgacaaaaaggtaaggtaaatatggatgttacctggacagctgccatggccaggccaatgctaaaggctccacacaccagctggacacacaccttcttgctcgtaatgaccctgtatctcaagggattgcagatggccatatagtggtcatagcccatcactgtgagcaagaagcaattgttgatggccaaggtaacaaagaagaacgtttgggtggtacaacctgctagggagattggctgggtctgggttacgaagctggagagcatctgtggaatgatgaacagtgtgtacactgtctttgagctagccagcatgctcaggaa

SEQ ID NO: 328777 - DNA, 799 bp, Homo Sapiens
  misc_feature (30)..(30): n is a, c, g, or t
  misc_feature (723)..(723): n is a, c, g, or t
tcctaataaattacactttatttgccaagnatcccaaaaagttcttagtaatgatcatagttcttactttatcctctattattatagtgttagtgctttgggactccaagacttttagctccttaagtgtaggaacagccctaaagttaacaaaatcgatcatcccctgtggcacctagcaaagtagaggaattaaaaatatatctgctgtccagcctgggcgtggtccacttacgtccccagccctgcctgcctttccaggcactctctgcacgctgtgcaggcaccccatcctggacacaaacttccctggaccacagctctgccttgccacttcatccaggagctcagctgtggccctgcttcctgactggcctgcggggtcccactatccttgggcagcattcccatctgtcttaaatgtcaagtcctttcaattatcacattgttgaattttcaaaatttacatcaacatttagatttgagcagagggtacagaaactgaaactctgagaaggttcattccattatatttttatacagtgacagatgtgaactattattgtggattaaccacaacacattccagataaatggagacagtaacatttgtcgatacacacacatacaagcaaaagggcattattttcagtgacttagtcttttcaatgtttcttaataagtgtaagatgtatattcattagtttagagcaatgaataagntacaaaaacactttatgaaaattgcaagtgaataccaccaaattatcacaggaacttaaattcttgggctattttt

SEQ ID NO: 328778 - DNA, 783 bp, Homo Sapiens
tttacacatgcaagactaagtctaaggcaggctaaactgcaaggccggagggttgctgagcctcagggagagaaggaaactctttgagcattaaattcaaatggtcttgaagaggaccgacctctgtggaaaggtatgaagcccttctttttcatccaatgctaacagtgtatctatggtgtgtcttctgaggaccacactgcggcactcccccaatctcacctcaatggaagatcaaagggtgagggggcaggagagcatttaggtcaaaatcaaagcaatcatgtctccatttccttctatgtgtaacagagataacagttctcacctcatcccctggtggtatgtatttaatgagatcttagcacttagtcttgagagagtagctattatcctaatgatctaagtggaaagctggttggcaagtggatgagcacctgagttctgctgtcagggagacatgggttcgaatcctgcccctgacctcagctaatctgaccgtacaatggaataaatgagatcgtctatgcacagtccactgcacaatgcctgccagtattcttttttctctacactcttaacaagcctcaacaatggcacctgcctgtaggcatgacctattctgagagcgtggccaaaacaagacagtttgtagaaaaacattttaaaacatgcatggctttgacaccaaaatgaccttggttctgatcctggttctgtcttatagctaggctgggtgtctgagagtaaatcgcctctcctctcaggggcttggaatcctca

SEQ ID NO: 328779 - DNA, 513 bp, Homo Sapiens
  misc_feature (212)..(212): n is a, c, g, or t
caaacctaatgggtttcccttgtgaatttggtaaattaaaagtaacaaaattaataaaagatgttgcaacactgcctgatttccccccttcctcaagcccccctcccgggaacccaacataaataacattacaaaggtcaggtgatccctaagaatttttgttgttgtaaatattttgtttttaaaatcatattccccttcctcccctgcanaactacctctgagagtttgtaacacagcagcatggaatggacaagactggggacagcatggaggtctaacggagagagcgcagaacgttgcttctcactgacgggcaccagatgggcttccgcatttccattgacaacagaggctacgacaggaagcagagaatgtgcaatgcggcttcatcctcctccaaagagaaggctagctggaccactgagaaaagccctaaaggcattgaggtttttggagacagagcacagctccagaaatgtcttggctcagtatttacacaatatcttgaag

SEQ ID NO: 328780 - DNA, 466 bp, Homo Sapiens
  misc_feature (25)..(25): n is a, c, g, or t
  misc_feature (33)..(33): n is a, c, g, or t
  misc_feature (40)..(40): n is a, c, g, or t
taacaaaggtcaggtgaaccctaanaattttgntgttgtnaaataatcttgttttttaaaatccatattccccccttccctccccctgcaaactaccctcctgaagagtttgtaacacagcaagccatggaatggacaagactggggacagcatggaggtctaacggagagagcgcagaacgttgcttctcactgacgggcaccagatggcttccgcatttccattgacaacagaggctacgacaggaagcagagaatgtgcaatgcggcttcatcctcctccaaagagaaggctagctggaccactgagaaaagccctaaaggcattgaggtttttggagagcagagcacagctccagaaatgtcttggctcagtatttacacaatatcttgaagctgcactttccttttaagaaatgtgtgtttctgaaggtgcctcttctgaggttggttgggggaaaggaga

SEQ ID NO: 328781 - DNA, 751 bp, Homo Sapiens
tactcacttgacagatgggcattagaatcctaggacctggttttcattcttctaggggaaaaaagctgcataaaatgaaaagttccaaggtaattcagaaacataagatactaaattttgtataatacactaaaaatgatctctaaattgctctttgttccaaggtaattcagaaatataagatactaaattttgtataatacactaaaaatgatctctaaattgctcttttagccccctggatgggaagaaaaccagggtatggtgctacagtagagttcatatatttgaatcaggacttctcagcccttgcttggccgctgattagtggtgttacttgggaaagttactgaacctctccaagcttcatttttctcctcaagattagataggagagctttatttttacagctcaaacccttctcaaattctgccaataaatataaaagtattaaaacggttaggaaggtaatcaatcatttttccttcagatccacctttgataataagcacacgtaaaatgatggtaaacgttgacttactctaaaagtttaagctgttataattaagatgaaagagcctcttgttgatttagaaagatgattctgaactctatctttgggagctctcaaccacagacaagggagagcagggattttctcagccacacactgccaagaaggtggagagaaacctagcccccatgtcactggggcctagagaaattcttggcctgcatgttgctacatca

SEQ ID NO: 328782 - DNA, 811 bp, Homo Sapiens
  misc_feature (23)..(23): n is a, c, g, or t
  misc_feature (29)..(29): n is a, c, g, or t
  misc_feature (108)..(173): n is a, c, g, or t
  misc_feature (186)..(212): n is a, c, g, or t
  misc_feature (376)..(476): n is a, c, g, or t
  misc_feature (478)..(538): n is a, c, g, or t
aaatcccgtcttactaaaaaatncaaaanttagccaggcatggtggtgtgtgcccatagtttcagctacttgggtggacgctgacgtaggaggactgcctgagcccannnnnnnnnnnnnnnnnnnnnnnnnnnnnnnnnnnnnnnnnnnnnnnnnnnnnnnnnnnnnnnnnngcaccctgtctcnnnnnnnnnnnnnnnnnnnnnnnnnnnctgtatcaatgtcagttcctggtatccataatgtactatgattatgtaaaatattgttataggaaggtgggtactgcatacatagggactccggatgaatttagttatttcttgtgagtcaaactatttaaaataaagagtgatactttttaaagtctgtggannnnnnnnnnnnnnnnnnnnnnnnnnnnnnnnnnnnnnnnnnnnnnnnnnnnnnnnnnnnnnnnnnnnnnnnnnnnnnnnnnnnnnnnnnnnnnnnnnnnnannnnnnnnnnnnnnnnnnnnnnnnnnnnnnnnnnnnnnnnnnnnnnnnnnnnnnnnnnnnnttgactatgagcagtcatactatattactctgaaggtaaatcttttgccaccctattaatgactcctgaggttatcgtggtccacctggggtgggagcttcctaaagggactgacccttgaggtagattttgacagagatgcattagttaaggagaaaagaaaagcatagcattcaaagctgacagaagagtgaggaagcaaatggcattaacagacctacaagtaatttggccaaagacaaatttatgaagaatctgtatgtcatgtcaagt

SEQ ID NO: 328783 - DNA, 519 bp, Homo Sapiens
ttgcctgacgacggtccttgctgatgctgtgaactaacaaagttgtctttttgtttttaagggaacccaccctggcgtctggacagcaggttaggtttgggtggttttgagctagcactgctgtggggcaggggtggccgctccctggtgaagctaatgctgtggaagctggaatgttccttcctaaggagtgggatcatgcccctaccccagcagaggtatctcatcactcgctcatgtgcgagattctaaataaattttgttcttgggcatcttctacttaggcctcctattaaaatagatcttgctgtttttggtttgtgttaatggaacctcactttctagagataattgtttagttttttatttaggaagttttcaaaatatacaaagcaggaatgtaaggaacccgcatcacctcaaattcagtgttacccacacttgaccatgcttgccccagctgtgccttttttctttccttgggtattttgttgctaaagtattttattattactgctt

SEQ ID NO: 328784 - DNA, 761 bp, Homo Sapiens
  misc_feature (399)..(399): n is a, c, g, or t
gtttttgttaactctttgcctgcaccatccaaatagttatttactacatagcctgaaaaacccatccaatgtccctgtgaaggattcattcttacatctcatatatgccacaaatatgtcccagagtggaataatacaggcatggccatatttgccagtcggtgtcctcccttcaacaaccaagagtcaagcccagtgatctttcaccctatgcctgcccttcacatcagcccctaccgacagtcccattcttcagaactcaagtgtagttgactctctcacacattacactcacttgtataaatacccgggggatgtcagttttccttagatctggtatgatcttaatagattattaaatagggtccgggagccacaccggtaagggatctttttgangttttacccttccttactgggttgttttgagggtaaaatggaataaaatgagatcagagaggtaaaaagttgaaaggaccatggtaaaaatctatggtagctttactgttcggaaagaacgtgagtgaattccaacacggttggatggggtttgatctacttaagtgagtagctcagagaagtcgtgacttccctgatttaaattattaatgataataaacatctttaagtaattagggaaatttttgaccagtgagaaccactaaactcccaagtcattccacattaatgaggtgttagagatttcaattagcacacacttgaattagtaaaagggattaagtactccatttattcttctg

SEQ ID NO: 328785 - DNA, 781 bp, Homo Sapiens
  misc_feature (92)..(92): n is a, c, g, or t
  misc_feature (410)..(537): n is a, c, g, or t
ctgcagatttctttatgaccttccagtctggtactcttacgagatgaaatttggggtctatcgcataaagaagagagtctatgtgagcccanctttcctcaatgggtgaaaagatatcataattatgggggggagcaaaaaagtgttggcaaggatgtggacaaagtgaaatcctcgtgcactgctgtgattgtaaaatggtatagacaatgtggaaaagagcacgatagttcctcaaaaagttgaacacagaattaccatacaattcagcaacttcacttctaagtatatgccccaagaaactgaaagcaggcactccaacagatacatgaacaccaatgttaacagcagcattttttacaatagtcaaagggtacaatgacccaagtgtccatcaacaaatgaacagnnnnnnnnnnnnnnnnnnnnnnnnnnnnnnnnnnnnnnnnnnnnnnnnnnnnnnnnnnnnnnnnnnnnnnnnnnnnnnnnnnnnnnnnnnnnnnnnnnnnnnnnnnnnnnnnnnnnnnnnnnnnnnnngtaccaaattttgacacatggtacaactcaaatgaaccttgagaacattaagctaggtaaaataagccagacacaaaaggataaataatgtctgagtctacttacatgaggtacatctagcatatgcaaattcacagagacagaaagtagaaaaaaggttgccagggaccagggaaaggggacaatggggactcagtttttaagagctaagagtttcggtttggggccaggcacggggctcacg

SEQ ID NO: 328786 - DNA, 761 bp, Homo Sapiens
  misc_feature (61)..(201): n is a, c, g, or t
gttttactgatggctgcgaggaaaccaagtttatttaaccattaaaaatcaggggtttagnnnnnnnnnnnnnnnnnnnnnnnnnnnnnnnnnnnnnnnnnnnnnnnnnnnnnnnnnnnnnnnnnnnnnnnnnnnnnnnnnnnnnnnnnnnnnnnnnnnnnnnnnnnnnnnnnnnnnnnnnnnnnnnnnnnnnnnnnnnnntgtaatggcatgcgcctgtaatcccagctactcaggccaatattttttatacaactttctgccatcttaaaaggaaggaattatacctactaataacactgtgaacttgctatacaggtctgtagaagagattccctcagagcatgcattcttctcatcctggttgatctaagcacttagcccattcaataaactagcctctcagttcctttgcttccttatctccagtggtctacacctccaagactttagctactcctttcacagccacacttgaaactgtcctcctccaaaagacctactttctaaccacaaccacatagccttccaaaaatctcacttccttatatttttcacaacctcgcagtgtcttcaccactattatttttacttatcagtcttatcctgtcttcattttcatctctatccaaataagatcccaagggtcaagtgaaccactctcttgccaatatatttaattatcttgccctactgtcctttattctgccttctggtaaaataatgttacagtaatcctcccatatttgctcaagacagct

SEQ ID NO: 328787 - DNA, 1016 bp, Homo Sapiens
gttttaaacactttatttataaaaaagtacatttttaatcctcagtacattttcaacccatcattttttttcaatacaagtaaaagggggtgatgcaaacaccccccaggtcagaaccaggaggatctgctgggctgtccctggaccaaaggcggaaagggcgacaagacgccgaagcaaggtagcgcatcacgctgggaggggagggtggcagcttctcctgggattcttttcatttatacaaaaaaggaaaaccaattttttcgaccaagaatcccattcctcacagcaggggtcagaagagcagcagcaccgagtggggacaggggctcctcctggcctcacaagctgggcagtgttggcagcagtggcagcagcagaggggcctgcctcctggcatccccggtactgggcagtgtgtgaagcctccctgtgggtgtggggacctggggcgcacccacctgcccctcactaggagagggtttcctgttggcagtcaggctttgggggtctctgtctggactccctgagggcctgggagcactaccctcctcccagaagaggggacatccgtgtctgcttggcttagcagagctgcccacacccacctaacacaattcccaatttctctgctctgaggaaggcagaaaagttattgcaccagtgacttgggcaagtgggggttggctggcagaggaagcgcatgcccaggaaacagggcccctataaggctctcttgcagcccgggcactgggaaattcgtttctccttaatggctttcagcaggatcagaccattccctctgccacatctgtgctgagtggccatctggctgtgcatgcatgcgtgtgtacatgcgtgtacacatgcctgcgcgtgggtgtgttggaggtgtgagtgtgtccactgtgggcacacgtactgggtctgaggtggtcgcacttgcaggcctgtgttcacctactctgtgctgctgcttttcagacccttctgataaaaggggactcggctggttc

SEQ ID NO: 328788 - DNA, 584 bp, Homo Sapiens
aagcattaattattaataatggcttacaaaactgtaccttttataaaggtttgaaataaagaatcaattgagggtcccaaacatttaagtggaaacccagtttgctcacttagccacaaggcatacatgtgccttgtctcactggaacagctgccaccaattcaagttggaagatactaggttcccggcaatgacatatctccaaagttaggaacatggccctttctccagaacatacttttccttctgccctgttctacctgtaatgacttacaaataaccgcctctccctatgctgtccttctctgactttgaaagtcagttcatcttaataactttggcccatgggtcacccaaaggatatatatggcttgaggtcccaggctagggaaaggttaacaaccagtagtcagcaaagaccggtctaggaacataactgagcattccaagagattgaaaagttttcaacattcatagacatcttcagaagctgttgaagttttcttggatttgctctaaacagtatggtaataattttcaatgtaaataagagatctataaaaggcatttatatcttgcctttt

SEQ ID NO: 328789 - DNA, 1009 bp, Homo Sapiens
  misc_feature (523)..(523): n is a, c, g, or t
taagatgaagtacaatgctttttattacacacccaattgttaatgagaggaaatgcaatcagcaactcctttccacactctacatggaatcaaggagactgctgagtccagaaaagatgcagccattgatggagcccaggaaacttctccccaccccctctgcctgccccctaccaccaatcctcctcttgggtgtggggaagaaagagagagaagagttgcaaatatgatgagagtatcatgtctgagaagccacagggtcacttgcagcaaaggcctggggctgaaatcttcactgaacagcatttaactcttccaagtgttgcattttctggctgatctggctcatgcgagaggaggacactctcttcatacactttcttctcaggtgaagcagacagagaaaaaaggttgaaggggcgtacgggagtagatgggaagaggaacagaaacaaagagaaggcaggcaggaggcccaaatcttccagtgtatacattcttgtgttttctttttcttgtcccnagaggctatacagagggaactctgtctcctcctaagcatattggggctgggctgctctggcccaggtgcttggcattcctgcagttaacagggagacactgggcactgggcttgaagctgcatcccccataccctagaagtgggtctctcccagcaggctatacagggaaactagttcttctgcttaatggcaaagcaagagagattctggcaaaacactaaatatatttataagtcacctttgtctggaaccaatgggaaaaaactaggtgccagaggtgaaaggaggagaggaggggaggtttaaaagttccaatcattcacaaaagatagaagacatcttctgatagcagcactgaagcagtcagttgtgctgagtagaccgtcctgggccgactgcagaccaactgtgtcccaacaggagtctcaaagccctgctcctcggctagtccagggaaactgggcagtagtttgattgttactgtt

SEQ ID NO: 328790 - DNA, 505 bp, Homo Sapiens
  misc_feature (353)..(353): n is a, c, g, or t
  misc_feature (441)..(441): n is a, c, g, or t
  misc_feature (464)..(464): n is a, c, g, or t
aacaataataaatatacagtctttcatttctcatttaaaaaataggtggaaaacaccaaattcactttctgttccattttaattaggtttcagaagtatcttggaaatcaaggtatgctgcaagaggatattaaaataagaatgttagagagtccttttagaaaggcagtcttgggaatttggaaaaggatttttaaagcagctttcatcagctagactgttctccagcctttctttacttcctctttgaaaggacatagccctggtttctttttgacacaaaggaaagctatgcaaatcatgatctgtatgtagaattggtcacaagtatgttgttgcataggctgtacagntgggaattagaaaccaaatgctacccagagacctaacccaattaagctctttgtatttctccttcaagaaataaatcttccttccttntttcttcctctttcttttaattntaaaaaaattcatcctgatttttttattttctatcttattt

SEQ ID NO: 328791 - DNA, 328 bp, Homo Sapiens
ttttaaaagaacaatctccgtttattaaacatgtttttttctgtttcaccacacactccagaaaaaaaggaaatggggctgggagtggagaaaaggggacagtgaggggggatagataaggctgggagtggggtgggagaatgggactgaacgggaactctccatacaagagaaagaggagtagagtctaggagagtctcaataccaaacgcaaaaggatgaagggggcaaggctgggtaggggacagcagtcagggaagagggggtgccaagtagggcttctcccctcccatggcctacccaccccaaaccccatccatcctacctc

SEQ ID NO: 328792 - DNA, 335 bp, Homo Sapiens
atatttaagcaacatagtttaataattgctataaattcttcacaggacaatagatttttttcccccaaattaaatgatagcttttctatttggctaaaatcctagactagaaaacaagtgtttcaatagaaaataaaaactgaaataaaacaagttattcccaggggaaattcatatgaattttttcaaaaacaaagtataaacaatgttttcctaggtgacaaaactcaaatgatggcaaccttgacagttgtttattgtgtgtatagtttttactaagagaataaagtaggtagaattttacttcagtgcccagttaatctgttcaattattt

SEQ ID NO: 328793 - DNA, 528 bp, Homo Sapiens
ctgaatacagatgggtctaaggtccttttgttcctaatcaattatttccatggctttatgtaggtcagttagggcagcaaggaaggcttttccatgagatagaaggtatcaataagctggctggaaaaacaaggatcacattgctaacccacatcaggagagctggtgtgccttggcttctcccatggcttgtttagagccagcagaatcatctccatgaaactaacacatgaaccttcaaaatgaaccaaatttcacaaagctaagagggaaactccatacaattttgttagcaagactccttaagcacattcactatttgtttcttgtccccttgctgtttctgggttcagaatccttctagagcccgttaagttcttgctgtcattcgcgcttattttcatccaatcagaggctgacatagagtttccaaccttagccggacactattcttgatcaacttgtgctaaaatctagtgtccttgggctaacccaaggacaaccccgaggcccttagctttattgtct

SEQ ID NO: 328794 - DNA, 839 bp, Homo Sapiens
  misc_feature (182)..(190): n is a, c, g, or t
  misc_feature (225)..(243): n is a, c, g, or t
  misc_feature (327)..(327): n is a, c, g, or t
  misc_feature (477)..(477): n is a, c, g, or t
tcttctatttttagaaaaacctattttaaattcagttggacagagttgtcttagcgctaatcggacttgagtctctgaactgtacacaactagaaaaaaacaaagaaaggaaatgtccataagacagtcattcaatagccacaaatctgcctgtgaaaatagctacctagggacatgatgannnnnnnnnccatcagtgtgatagtgtgaaaccaacaagcccannnnnnnnnnnnnnnnnnnggttaatttgtgataaattagcacttgaaattaaccaggttcttcacatcagaagttctaagtaagtaaatatttttgcaactngtaaaagagatggtttctccactacaaaacttcaaaccttattcttacataagggtcaaaatggacttttagaaactttttaaggacagagcagatgctccctgggtttgggatggggcttggaacaaagctagaaattgctggggtcanatagtctatcagagttggcaatggagagagggtgacattgttccacggcctcaaagctggccttgggctcactcttattagttttacttcctgccatgttcccatgagtaagtttactgtggctcattcctcctccttggtcatgctttctccttggcccctaatccccaatttctggttttcagtattggtctggtgcctggaaactttgagcttggatggaacctcactgagacccttcttgggacctaaattattcttttagttgttggcattgagctgtttcctttatcgtgctgaattatgtagccatcagcattgtactaatattgtcacccatgccgagccttatgcagtaaaaa

SEQ ID NO: 328795 - DNA, 673 bp, Homo Sapiens
  misc_feature (613)..(613): n is a, c, g, or t
  misc_feature (643)..(643): n is a, c, g, or t
  misc_feature (650)..(650): n is a, c, g, or t
ttcttttttaatgttcagcaatatcaaataaactttggctaagcaaaaaatgttctcccaaggactcataaaaagctgaggaatgagaattgctaaaattacaacttgtttgcaaacttcctgagcgcactgctataaactgtaccaccaatggactcataggggcaccattgaagtttggcagtgggaagaggagagatgactgctcgtaaacatctctgcatggcagtcgacaccaggggacatgttgtgagcatttctgggtgccacttcttatggaaacacaatcaaattttcatcctccagaaaaatataaattagatgtgccctgggcctaaaaagaaaaatcccaagcaaagaaatgcatcaactatgaactctttgagggccataacttgatttagaagaaaactgtttcctactggctatagtcctggccattccctcttgtgctgaacgaagctccctagctctgctacagggaagagaaggggactgacagtcacctggccctactacgtgtgtttatgaaaaataaggctggccgggcatggtggctcacgtctgtaatctcagcactttgggagatatttttggagacattttgttggcnttattttcttaattttttagtttacctcgngccgaantactgtggccgcgcagggccaaa

SEQ ID NO: 328796 - DNA, 295 bp, Homo Sapiens
  misc_feature (46)..(46): n is a, c, g, or t
  misc_feature (105)..(105): n is a, c, g, or t
  misc_feature (130)..(130): n is a, c, g, or t
ctgctatctctcaaatgcaaaagtgattttggaatatgaagaattncttggggttgaattacttagaagtttgtcactgacctgaactattcatgaatatatggnctaataagtagtttctcttcataantaattaacaaattctttggataaaaaaacatggggcaagcttgagaacggatggggcccaggccccttgtgcccctgcttctgggagctgagggccagagagttctgtggaacagtcaggacctgcttcagcctacacaccctgggttgacaggctgcgcaagtt

SEQ ID NO: 328797 - DNA, 752 bp, Homo Sapiens
  misc_feature (494)..(526): n is a, c, g, or t
  misc_feature (714)..(714): n is a, c, g, or t
tggcctggaggggatgaagtggaaggagccatgtcccctctgcagggtcccctccctctgctgagttaatcagggcaaaacaatagagatggcatctcaggtagagtgatcagaaggggcaaaggtaaggaggcatgaacaatgcatatttgggaaggaacaaaggccaagtccatctggctttgcggctagggtctccgaggtctatgcaggggcccgagccgtggacttgccaccccgggaggcactcaccatacttggctgccttagcggctgctgctgcagctgcagctgcagctggagtcccaacgcctgaaaacacagccacagagggtgaggtccttgccctgtggccatctcaaggacacacccgccccctgctgggacagatgttacctgcgatgcctccaattccaggaattgccccaggcacgccaggaacaccagcccctccaacaccagggaggactccggctgctccagcaccgaacttnnnnnnnnnnnnnnnnnnnnnnnnnnnnnnnnnctgggggccaacccctgtccctgttgggtaaccagccttgcccgctgcaccagccactcctccgggcccatagccatagggcagtttccctgtggtgtagggcagtccatagccaccaggcagcttgggggccttgatgggataccccagtgggactccaggttgcggtcccccaaagggtccaactncctgtggggataaagagagcaagttcaggtcccagcac

SEQ ID NO: 328798 - DNA, 442 bp, Homo Sapiens
cctgaaaaattattttttaagcaaaattatttcttattaattggcttgtttcctttctattatgctctgtagtgataaaagcccttagtcttacttaaaagcattatttccacctgatgatgatagctttcatttattaattgattaattgttgttttgttcaatcattcattcgtggatgcctgaaacatttactgagcattgcagtcaatagcaggaacacaagaaggaacaagacacagtgttactctcaagatgcccacacttaaactggattggctgttcatgcttgacgctcctgaaatgaaaaggtcaaacttggaaaacaataaaatgtccggctctgatctctactgggtaaatctcttcccagagacgaatcttaaagaagtgaggttttattaagaatgtagctctctggggaactcctattcatcctttg

SEQ ID NO: 328799 - DNA, 491 bp, Homo Sapiens
accagttacctggccccacccatcaccgctctcttcctgctggccatcttctgcaagagggtcacagagcccggagctttctggggcctcgtgtttggcctgggagtggggcttctgcgtatgatcctggagttctcatacccagcgccagcctgtggggaggtggaccggaggccagcagtgctgaaggacttccactacctgtactttgcaatcctcctctgcgggctcactgccatcgtcattgtcattgtcagcctctgtacaactcccatccctgaggaacagctcacacgcctcacatggtggactcggaactgccccctctctgagctggagaaggaggcccacgagagcacaccggagatatccgagaggccagccggggagtgccctgcaggaggtggagcggcagagaactcgagcctgggccaggagcagcctgaagccccaagcaggtcctggggaaagttgctctggagctggttctg

SEQ ID NO: 328800 - DNA, 384 bp, Homo Sapiens
aaatatatacaatatattaccccacatgttccacctttacctaattaccaaagagtttaattttagcattgtttatccctgtaggaagtcatttcccattgttacagtgtatggcatgcatttttctttagcaaatatcctagtattttatatcttgtgtagaaatatgctttggtgtgattatgagatggtttcttgattaatactcttagaaaactgacttgagggcggttggtgggtgaggggagagaaagcattaggacaaatagctaacatatatggggcttaaaacctagataatgggttgataggtgcaacaaacgaccatggcacacatctacttatgtaacaaacctccacactctgcacctgtatcctggaaca

SEQ ID NO: 328801 - DNA, 628 bp, Homo Sapiens
gtaacaaaatttaaaaaatacaaaaggatgtacagtgaaaagtacatctcccttctatccctgatccccagactctcagaggctgcctcctttagatggggcgggtgctttccagatgtccccactctgcatcaactggccctctttcacttatctgcattgtctgcctgacccctttagacatctgaagctgccctcccaaccccattttaccacgcctcttcctgcatcccccttaaacacttggcatgtctgtcgttagcactttcacacaagcttctttacaaggctgtgtctttttagatggggagattcacagatgcatgaggttaggtttacatcttcttttgactatctacatccctgataactaggatgggtgtcagacttatggcagatgtacaagtttgttgagtgaattaataaattaatgaatgggcaaattgtgtattgtttccagggtcctgaggtgtgacgcaaatagcaattcagtcaggtgaaatcaataatttagatcccatcaggatcccagccgagtccccagtccatcttgtaacacttctccccagaacatacttaaattacctggaaataatgaatcctctgcccttacagaactggatccaaa

SEQ ID NO: 328802 - DNA, 514 bp, Homo Sapiens
  misc_feature (461)..(461): n is a, c, g, or t
  misc_feature (466)..(466): n is a, c, g, or t
  misc_feature (475)..(475): n is a, c, g, or t
  misc_feature (491)..(491): n is a, c, g, or t
aaaccccatcccgtcaaaaaaaagattcagcattctctccatcccaccccctcactgaaggtttgaagtggaagtgacctcactctctcggtgtccctgacccacgatccctttcactcattggtgagcacaccagattaggtacaagaatcaccagagcagcatcgtgaagcaccaggctctccagagattcctgcagcccctcattcccccagaggtgcagctttaccagagtggagggtgagagcacaaaggctgggtctgtcttcaggaagaagagcttttgcagaagcctgatgagagtttcaagttcacccccagggatagcccttccagaaggcagaaggggctgagggccggagaaggcttagggtttaccagagttgttaagtattcgggttttgattcaccgttttgtaccgtggtagctgttttgtgttcctaaactacagggggatttnaggtngggtagctngtttggacaaggtatnctgccaggggaacacacaggagg

SEQ ID NO: 328803 - DNA, 459 bp, Homo Sapiens
acctcaactcccctgtagtttaggacacaaaacagctaccagcggtaacagagcggtgatcaaagccgagtaacttacaactctggtaaagcctaagcttctccgcctcagcccttctgcttctggaagggctatccctgggggtgaacttgaaactctcatcaggcttctgcaaaagctcttcttcctgaagacagacccagcctttgtgctctcaccctccactctggtaaagctgcacctctgggggaatgaggggctgcaggaatctctggagagcctggtgcttcacgatgctgctctggtgattcttgtacctaatctggtgtgctcaccaatgagtgaaagggatcgtgggtcagggacaccgagagagtgaggtcacttccacttcaaaccttcagtgagggggtgggatggagagaatgctgaatcttttttttgacgggatggggttta

SEQ ID NO: 328804 - DNA, 443 bp, Homo Sapiens
  misc_feature (46)..(46): n is a, c, g, or t
aaaagttctccatggtaaaatctgtacagtatttactaaagaagcnaccacgcaagattggaaacagagttattgtcctatctttaataatttaagctgggctggggatggcttctgttgaacgcgttgaatctgaaagacaagaggcgcagggttagtgagttggaggcaggcggcggcgtgtagggcttattcccggacgccctgccagctgctcccgaaggctggggaagctcttccttgaggagatcactctgccttctctgccttcctgagtggaaatgagggaactggcggtgcgggcagctcagccagggaggcgccatctgctgggcccggccaccacccgccccagatgcctcctccacctccatcctcacagcccctcactcaggaagtttagctccttaattagggttgggcctctcccttgaggacacatt

SEQ ID NO: 328805 - DNA, 374 bp, Homo Sapiens
ggatacccttaaggcaagagttgacaaacttttccctgcaaaggacccagatagtaaatattttaggcttccgtgggtcataaagtgtctattgtaactgtttaacccctaccttgtagcatgaaatacttaaacaaatgagtgtggctcaaataatataaaattttattcatagacactgaaagttgaatttcagataactttaacatgtcacagaatactcttaaatttttttcaaccattaaaaaatgtaaaaaacgatccttttatatagttcatgatcatgattaggtgttcatgcacgtatgtgaaagatgccacccttgaaccttgttactattaatacgtcagcacattacctgtctgacttgatt

SEQ ID NO: 328806 - DNA, 427 bp, Homo Sapiens
  misc_feature (12)..(12): n is a, c, g, or t
  misc_feature (38)..(38): n is a, c, g, or t
ccattttgaaancccttatgaaagaaggccagtgtggnaaaattccacagtgtggataaataaatcccctaaaatgcatccatacaacccatacttgtgtttgggagactggaacccattttaaagaaaaaagtatcccaaagtatccccattcttgttcaagtcaaatgctgaattgtgtagtgcacagcctatgctacccagggtaggactacatagctttacctcccagggcatgggaaggtgggcagctcagtgtgatcagaggcgcagaacctgccgcatgatggccaggctcagaggagcatctttttacccatatcttgttgattccagctttccttgattagtcatttgcatgctcatttttgttctgttcctctctggcggggtctgttaattactaaacatgggagacttaacaacc

SEQ ID NO: 328807 - DNA, 294 bp, Homo Sapiens
  misc_feature (57)..(57): n is a, c, g, or t
  misc_feature (63)..(63): n is a, c, g, or t
agaggtaacctacctttgttgaccccaaagtgtttattatttgagaaaggttttttnttaaanccccttgattgggtgtaaagctatcatttaactaatttcctgacattctcctagttttgttttgttctgacacatttttaaagttaagttttatgtcatttataatgatgctaaaagcattttggcaggagctaggttaattctctgtagccttttctcttggcacatgtgaaagagaactgctggttggcgggtggctcacccctgtaatcccagcactttgggaggcta

SEQ ID NO: 328808 - DNA, 1062 bp, Homo Sapiens
  misc_feature (274)..(274): n is a, c, g, or t
  misc_feature (877)..(877): n is a, c, g, or t
  misc_feature (887)..(887): n is a, c, g, or t
  misc_feature (889)..(889): n is a, c, g, or t
  misc_feature (899)..(899): n is a, c, g, or t
  misc_feature (909)..(909): n is a, c, g, or t
  misc_feature (934)..(934): n is a, c, g, or t
  misc_feature (938)..(938): n is a, c, g, or t
  misc_feature (958)..(958): n is a, c, g, or t
  misc_feature (981)..(981): n is a, c, g, or t
  misc_feature (1026)..(1026): n is a, c, g, or t
  misc_feature (1046)..(1046): n is a, c, g, or t
actggaagatgtagagtgggaggactgggagtgagggagccagagggagcagctcccccacccatggcatctctcgcctccctcgctcgtctcagcccagccctggaagactgagaatgttcccccaaatctcctctgccaaccagagctctgggcacagattctggtggctccctgctggccctcttggcttcttgctcacacctgggaaggggctctctaaatcccggccagaaactctgacttgtgccaacaataggatgacccaagggangaggaaacctatcctcctcaccagaagagcctgtgtttttctgctgaacacccactgttcctgaggactcctgctgggaagtcccaagggatagttctagcccttctgcctgtgtagacagaagctaaaccaccagtctctctcggaggaagctgagacaacatactctgtccatacataagcaggcagggagggccatgccacctacccttggctaaacagggacagtgaacacattttggttcctatcccagtgggtaagaggcacttatctctgggaaatttgcctctcttgggactctccccctcccaggcattttccattcctggaaaggctcctttggggttcagaatccagagaccaaaccctgacccacctccttcctttcctccagcccacgctggtctgtccccatgccttcccagggcttcttcatgtcagatgcacccaagtccttagcccagctgtgccacctgcaggagttcgctcttgcgttttctttcccctccccaagaagggagggggtcttactttcaggcccttctgtgtgttgcctggcaggataccttgtccaaccagctacccacctcaactcccctgtnagtttaggananaaaacagctnaccagcggtnacagagcggtgatcaaagccgagtnattnacaaattttggttaaggctnagctttttccggcttcagccttnttgtttttggaagggttattctggggggtgaattgaaatttgatnagggttttgcaaaagttttntttgctgaagagaggg

SEQ ID NO: 328809 - DNA, 505 bp, Homo Sapiens
  misc_feature (31)..(31): n is a, c, g, or t
  misc_feature (37)..(37): n is a, c, g, or t
  misc_feature (42)..(42): n is a, c, g, or t
  misc_feature (73)..(73): n is a, c, g, or t
gaacactttcctaccacggctgacccatggnaaaaancccgngtatataaacccccatggaaaaaaggccccnggaatagaacatcctcaaaggcgccttaattacagactcgggtccgattacttgtaatttccatgtaatgttccctccaagttagacatcctggtgcaagaccaaccgggagaccatggaattgtcaaaagtacaaactgacagtgtgtatatttaatttaaagacttatttaaaaactcacaagctctcacctagactttggagagcagtctgttttctgtaatgtctgatactagaaactaatttgcttattttagttgtattccaggatttgaagatgtattttatagacaagttctgtttttgaactttgtggaactgttccaatcaatcaatttcccagttatgatgagtatttacattatgaatgtataacccagacatgatttgtaaagccgacagtatgtttctattacacaacactttttgaa

SEQ ID NO: 328810 - DNA, 589 bp, Homo Sapiens
  misc_feature (524)..(524): n is a, c, g, or t
  misc_feature (533)..(533): n is a, c, g, or t
  misc_feature (567)..(567): n is a, c, g, or t
  misc_feature (574)..(574): n is a, c, g, or t
ttttttatcgctgaatacaattccattttatggatgggccatgttttatttatccattcataagttggtgaacatttgggttgttttctctttttctgttatcttatgggtgtaccatagtttgtttaaataacttaaagaacaattttaaaaaggtaagcctggtcatgaatactgtctcaaagaaagtaggcttttgctagattggtattttttaacaaaataagttaggccttttaaaattccatgggctagaatctagtagaatccaggggagcttgtctctccatctatccatctcttcatccatctgtccatctaaccattcattccaggcaactatccgtgggatcctttaagcatcagatatgtgctaggtagtgggagacacagagagccactgatttcactaggtgctcacagagtgtgggcatgggggcaggagggcagatggacatgtgtattagtcagctcaggctgccgtaacacaataccacacactagggaggggcttaaaccacatnatttatttnccctatagttcctggaggctagaagtacaaaganccaaggnacttgggtagaagtt

SEQ ID NO: 328811 - DNA, 935 bp, Homo Sapiens
  misc_feature (854)..(854): n is a, c, g, or t
  misc_feature (857)..(857): n is a, c, g, or t
taatttggctccatttgttttaattggacccttttcagcctggggctccccccagcccccaggccacagcctgaaggtgtctctggccagccacagcatccagctgctggctcccagatctgtccagttgcccagaggaagaagggtgggtgggcagaaggaaggggctggagacagatcatcagccttcccacccaccccgggtggggccctccctgtctccagaaaggtggcccaggggcgccagtccagtcaccccagaaatatccaaggcactggcgggggggcaaccctttacagccagccccgcccggctatgtggctgttgtgtgcctgttggtcagacgcccggccacccggctccgagggccatcagtgggggctggcctgggccctccagctgtccccgttctttagctgcagaggttcctgggccgccgccgcctcctcactggagtctgattcttctacatcactacgaatgtccttctcccatctggcccttcttcatgaagctatagagcatgcgcagaatgaggcaagaccagaacacgtgcagcagctgcagcaacatcagaagcccgttgaagaagtagtagccgaagaaggggcccctgttgctgatggactcgtagtatgtggtgtagaggatctgggtgggaaagaggaccagtcgggtgtagaagaagacaaaggagaagatgaggaagagagcgtcgcacacttgctgatactgcatgtagttgaccatcttacaggcctccagcaggtagtcagaggaatcatgtaacagcagcaccagagagccaatgcgcagcaggttggcactgtaggagaaggtcatcaggatgacncgncacgaagtggtgtatcacctgctccttgaaatccttgcgcttgacatcaaagggcagcctgattagcagtgagaggta

SEQ ID NO: 328812 - DNA, 380 bp, Homo Sapiens
gtatagagtaaaatttattatagggttgtagaattcatacaacctaaactccttacagcattcagcacctacacaattttgtgcattccacaatacagatagtagtgagaaagaatcactgcattagttaaaaatgactgtctcatgaaaattgttcacatataagtcaggttaattacagagcacctaacagaactgcaaagatgtaatttctaaattcaagaaagttgtacaaaatgaaaaacaaaagaaaccaacaatgttgagatctgatatattttacacaaaaggttcaaaaacattttaaaatatttcaaattttaaaattgctccaccataagatgaataaagagcttacttaaaggaaaagaaaaaaggaa

SEQ ID NO: 328813 - DNA, 298 bp, Homo Sapiens
atgaaccaccaagcccagctaagaggaactttttaaaggcaagaacttgacattgccacctccctgcttccaccttcccattgcagttgggatggcactgaagttcctgggtcatgccctccaggccctgtgggatcagacctgctgcctccctctttcccttctgcattccagccacaccagctttatttctggtttttgaacttgccaagctcagcttgactcaggaccttggcacttactcctccctcttatggaatgtgtttccctagatctttagatgtccggttcttctggt

SEQ ID NO: 328814 - DNA, 445 bp, Homo Sapiens
  misc_feature (237)..(237): n is a, c, g, or t
cttgttaagtttcaatagacaaccaacacgccggtgttggggttaggggcttttgagaaagagatgaggatgctctgagacaagattccaaccgagtgaactaattttttcagacaaggaccacagtagattctgtagctgagttgagatttggttttgagtttctggtgcctacaaagcaggtggttagggctttctaataagcagtttaacattggtttacagcaggcctcacancccagagtctttggggctaactataagagcaacctacagagcaaccttatatgtaaggaactgttctaagcacttgagattacatttacaagctattaaaaacagtatttgagactgtcaggacaatcatatacattttatacagctatataaaaaattgttctacagtaaggtttcctggccgggcatggtggttcacagctataat

SEQ ID NO: 328815 - DNA, 523 bp, Homo Sapiens
tacctcggggataaatcctatatacctacatacatttatggagattttaaaagccatgtgtgataacacaatgttacagtattgtttagggatacagacgtttgtaaaattttaaaggcaagggctatatgcttgaaaggtaagaaatacacttctaaataaataaatactcaactataaatcataaaactagaagacattttgatctggatgttcatgaaagtactacatacattgaaatttgtcacatgcaattaaagacttcctaggagaagttgctagcttttagtgcttatattagaaaagaaaaactgcaaattaattagctagggatacatctcaaggaaccaacctaaagaaagaaaatattaaagatgagcaaatatgatgaaatagaaaacaaatataccttagatcccattatgttttataagtctctgataagattatcaagggggaggaaataatacagcacaaataaccaatatcaagaataaaaaaagaggccgggcatggtgctcat

SEQ ID NO: 328816 - DNA, 392 bp, Homo Sapiens
  misc_feature (285)..(285): n is a, c, g, or t
ttttttttaaagactcaaaaagttaccagtttcttaagacccaaagcagaatcccttatatgaagctttataaagatttcgtaatggagaaagcctacatttagcttttgatgtcttttataacaggctgttatctagcataatttatattgttaatatatcttacaaaatgcagataattactaatactggtataggaattcttaaattttggagaagggggtttaattttaaaagggcataatattggaatcagcaatgtaaaattatcaaagacaactagantctgtattttttaaattggcaaagatatcagagtaaatagtattttcctgtgagtttcaagttaaagttttacttaatttccaaatcttgtgggcttttagggccag

SEQ ID NO: 328817 - DNA, 581 bp, Homo Sapiens
  misc_feature (568)..(568): n is a, c, g, or t
gacccaaaaaaaaccaaaagtgagcccaacccctggggaggagtctacgttcagctgcagggagccagggaattggggccgaggtgtctggcacagaaaagctttgggcctgtctcaggtaaatgaagttttgatatagattcaactcccctgccccccacaattgaactgtttttgggggccagcaattaggggctaatttgtgacagtgactttattttcttcctactaaagtactggtttattcggtggccttggtgattagatttaggcataatagttaaatgtaatagaagtttatgtaacaaacagtgattaataatgttgctgtccagattcccgttatagcgctaacctgatgttatgaactgagattaaatttgaatttgagtgcttacattattttgtaaaggtggttgtatattcacatatccacagtttttttctataaataacgtgaaaccgtgcttggtttctcttttccaaagtttgccttttccattacatgggcaagtcctgaacctaagccgagacactagtccatcatctccagcaatgaatgtcatanatcccagacttca

SEQ ID NO: 328818 - DNA, 632 bp, Homo Sapiens
  misc_feature (115)..(126): n is a, c, g, or t
  misc_feature (527)..(527): n is a, c, g, or t
  misc_feature (570)..(570): n is a, c, g, or t
  misc_feature (576)..(576): n is a, c, g, or t
  misc_feature (591)..(591): n is a, c, g, or t
  misc_feature (609)..(609): n is a, c, g, or t
  misc_feature (619)..(619): n is a, c, g, or t
tcaaaattgcatttcttgtataataggtcagatttattaactactcatactttttctttacactaatcgatacatttagaaaaaattttctaagttagagacaagtttaaaagtnnnnnnnnnnnngaattagccactggtagtctactgtttaggtaatcggaatcaccaattattttattagaatgatggcttgagtaaaaagctgtggaaagaattaaaggattatgagctaagctgtattttgcagaatatggttctattttagtagagcagagatgagacatatccccaccggccacccagccagaggtctcctacctgggggccctaaagggatgcagaggtctggcccaccctccgtgcataggcacctctgtccaccaccagcgtttcagcaatccaaccagtaagcatatgctgtataggaaaaataaaagtgtgtgggaattggatttcttttgttgtaacacaattccaggtttttggctatttaaagtttgacattaggctgacatcgaggaagnaagtgggttttcctaagttcccaagatgtgatttaaggaaganaacaangccatctccagggtnggtcccagggcagggaangtagcttagncagatgttaggga

SEQ ID NO: 328819 - DNA, 432 bp, Homo Sapiens
  misc_feature (14)..(14): n is a, c, g, or t
  misc_feature (32)..(32): n is a, c, g, or t
caaagccccccggnccaatgaaggtccatttnccagttttaccaaccattttgagggatgaccaccttaataaaaagggtaaaccctttcctcagccgtttaccaaacttggcttttgagaagggaaaaatccctctttgcctatttcctggaagaagaataactgagatcagctattatataggtttgcatggatggtgtcccacaatacaaatgtaaacttggacaggaataggataaataaattgctttcatcataaaggccaatcatccatttcttagtccaaggagattaaatataaataggacacccctgagatttccagtaaggtatttgaaaggattccactgggagggcagggaatatattttttctcagagcatccagtttgtacccagttttctatatggtttgtgaactgtagctttttt

SEQ ID NO: 328820 - DNA, 394 bp, Homo Sapiens
  misc_feature (339)..(339): n is a, c, g, or t
  misc_feature (359)..(359): n is a, c, g, or t
  misc_feature (367)..(367): n is a, c, g, or t
  misc_feature (374)..(374): n is a, c, g, or t
attttatttattacagactaagtatctattaaaaatacagcagaaacacaatttattgactcgcaaaagatgctgtgtaagttccaaaagcaaagaaaaaatataagcgaaaacgattcaacttttttgtaagcatatactataagcaaaaatacacagaaaaagacctgggatgaacctggaataaggattatgaatgatttttgtcttatatttatttacttgtctgtattttcaagtttttaaaataaatattaattacaaaataaaaaggttttttacacaaaaacattttaaaatcttaaaggcgggccggcaatttcttccccggggtggggntgtggtacccctccaatttnaattattnaaacctntattttaaggggcccctggg

SEQ ID NO: 328821 - DNA, 475 bp, Homo Sapiens
  misc_feature (15)..(15): n is a, c, g, or t
  misc_feature (409)..(409): n is a, c, g, or t
  misc_feature (427)..(427): n is a, c, g, or t
ttgacccctgcactnggttctaccatatcagagacaacaagtgaagcttggagtgtagaggtattgccaagtgactcagaggccccagacctaaagcaggaggagcgtctgcaagaactggagagctgttctggactgggtagcacatctgatgatacggatgtcagggaggtcagttcccgccccagcacaccaggcctcagtgttgtgtccggcataagtgcaacctctgaggatattcccaataagattgaaggacctggagattctgagtgcagctcttgattttgggggtaaagattctgtcactagtccagacatggatgaaataactcacggtgcccaccagcttgacctctcctccttctcagtcagagtctcttgctggccattgttttgatccactgtntttcacatggaagggggnttctggttgtgggttaagggccaaaggttcattatggttagggcctgg

SEQ ID NO: 328822 - DNA, 522 bp, Homo Sapiens
cttatctcatacaaacattatgtatctttatttaaatttgcaaatgaaaacaacacatatttcatgttagttttaataagagattccctatcctctgccccagtaaaacctaaccaagccagcctgacaggttatatcaatacagggagctggagtgggagccaagggtggtgttagataggggtggggtacagatcaagggggcctgggagactcagtgactggaagtctctgcccctcactcttggtgagtagctaatttcagcagctggcttcataaggaggagtcaggggtgggtggaggctcctcccaattccagatccacttcctcttctccttctgtctcctggacacttaggtcttactgagatggttttcccacagtaaagagaggtgggggcagagtactaagggtcaggagtgtgactctttcccatgactcaggcctctgtgctagaggtgacccctataggaaggagagaccccaaatcctttagccaatgagtggtggggtcatcata

SEQ ID NO: 328823 - DNA, 432 bp, Homo Sapiens
ttttttttatcaacaacagaaatttatttctcacaattctggaggctgggaagtccaagatcaaggtgcttacagatttgttttctggtgaggacccacttcctggttcgtggatgtttgtcttctccctttcacatggcagaaggggtgatggagctctctgggtctctttatataagggcactaatcccattcatgagcgctgttactctcctgacctatcacttaccaaaagccccacctccaaataccatcacattggaaatgagatttcaacattagaattctgggtgcacacaaacattcagtctacttgcagacattaaataaggaatctaggggtaatttctaacaaaggaatacatttggggttaaagggttgaaacataagggctttaaggaaaggaagggacagtgaaaatattctttagg

SEQ ID NO: 328824 - DNA, 393 bp, Homo Sapiens
cattagttaatatatgaattttatagatgaaatgggcatgtatttataggtatatgaataaaaaggttttattgtaattaaatattccttagttttagaatttatttactaaattatgataccaaaagtataggcaacagaagaaaaatagataaactagactttatcaaagttaatgactgttgtatatcaaaagactcatcatcagattgaaaagtcaacatggaatgggagaaaatatttccgaatcatatatctcataagggattaatatctagaatatatacaataaagaactcttacaactcaacaacaaccaaaaaaacttgattaaaaaatgggctaaggacttgaatagacatttctacaaagaagaaaatccataagcggcaa

SEQ ID NO: 328825 - DNA, 457 bp, Homo Sapiens
  misc_feature (15)..(15): n is a, c, g, or t
  misc_feature (27)..(27): n is a, c, g, or t
  misc_feature (72)..(72): n is a, c, g, or t
  misc_feature (101)..(101): n is a, c, g, or t
  misc_feature (337)..(345): n is a, c, g, or t
acgggttgggccccnatgtaaatgaanccctcggaaccccacggcctcagcccattttgagaagtgagatgnaggaggcccacgcccacagagggcccctncggggcacagctgcccatgacaatatgggcccagtgcccaggaataggaaggatcaagttaaatgtttgtgatcccaataacaaaacccacaacatgggcccccattaagcaaggtttaggtagaagctaatgaactgaatctaattttcttttgaccatctttgacaaggaataagctctgctataatgagtttcttaggcaattcaaatatagacattacagtggggctcaatnnnnnnnnncaactctcacaaaggagctgatctcctcaaatagactctaaggtggtttaactgggaagcatatatatatttctttaaaactcttccgtgaataatcaggaataattatcaa

SEQ ID NO: 328826 - DNA, 436 bp, Homo Sapiens
gtttttgagaacaaaatattttatttctctcacaaaactatagtttacagtagtatttactaaataaattatataatttctcttttacaagcaataaactagatcacaaatatttcaaagacaatgtatgtacacgacataaggccttttataaatagctttgcttttctcatttcactagtaaacagtgaaaaaatctttatagaagctagttttctataaagtgaaggcagacctagtatattgatctttaaatgaaaccaatttaaactttcaatgacatgaactataattttgcaaaagaatttatacttaatttaccatgtgtgtggatggatttttaaaaatatataagcagattacatatgttgcttatgtataatcactggatgcatgcacaatgaaataatgcaaaagtccataggaaaatagcact

SEQ ID NO: 328827 - DNA, 387 bp, Homo Sapiens
agaaaaccttttttacaatttatttcctgttgttaatctttaaagatgaggttctagctaagtgcagggtttcagtggtgaaattttgaccatgtgaacacataaataaatatttacagtctttggcaaaacacatgacgtttcatcaacctatacgataaatttgtttagaaaaacataaataatttacaaaaaatatggtacattctaaatattcacatcatcgtcactcccacaccattgtacggttgaccccacaacacaggaaacaggaaaacctggcacgctgttgacaggtcggctacatttaatggaggtatcccaacgtttcgttgggtctcggggattacaggctccacaggcaaaaaggtaaaaagtgcaggcaaa

SEQ ID NO: 328828 - DNA, 491 bp, Homo Sapiens
  misc_feature (435)..(435): n is a, c, g, or t
  misc_feature (441)..(441): n is a, c, g, or t
  misc_feature (459)..(459): n is a, c, g, or t
  misc_feature (474)..(474): n is a, c, g, or t
ttaccaaaaaatgggatcatttatttctatttaggaaaaatacatttttcttcacatatcttcttcaacttttcttgttttacatgtaaaatcagaatgttcactgtcataaataaatataaataaatattacaaaagaataagatttacaaatttgactatggacatctcgattcagaaataatatataatcttttcttatgttaatattgtagtatctctggatacttttaaagacattaagtcaaagaagacacctttcacaggctttttccaaactctatttgtgcaacaaaggaagattcagtctttcattctatattcctcccttatcaccatcaacaccccctggttcaccagcatgttttacctttaaaatattttgccaacccgaggaagagatgaaaatgccttacagccaaagatacttataantgtggntcatctcttttagcaatntgcttagagaactanttgggttttattgcttt

SEQ ID NO: 328829 - DNA, 372 bp, Homo Sapiens
  misc_feature (124)..(124): n is a, c, g, or t
  misc_feature (261)..(261): n is a, c, g, or t
acagtttccaatgttcgaaatctctcagacaatctccctgaaaggcacattggcccttgacagtatctgagcggaaggaaattttcccccatcctcacagggctgtcccactggaagccgggancgtggagatcccactgtagagcagagacttgacatgcccaaacgctcctcccacaccttgctctacaccccacgaaacggggagacactggtcccgttgaagcttcgatggcttttaagtgttattctaagaagggnaaataagcatgaaagattcaagggggaaatggactatctcttaattgtttatgcctttaattgacatgtatggcgcttggtttttatttcttttcaatgtggatatacatt

SEQ ID NO: 328830 - DNA, 800 bp, Homo Sapiens
ttttttgagagaaaaaagaaatttttttatttagctaaattaaaatggctgtgttacttatttgaaatatgcaaagctcaaatcaagtcatggaaaccctgaattctccctaaacagaaccaaaattgcttatacattaccaaaatagcttcactaaaacaaagtagatttaaatttcttaatatgagaaaacaacaaggtaggttaggttcgtataacaaacaatacacgctctataaagtctcaggaatacccaaatgtgttctggtttggatatgaaagagggaccacttctagctggtgttggtaagcaagccaatgaggtgttgcagcaaacaaaacctgtcactaaaaacaactcaacaggccattatgagtatgagcccatcacagccaaaatcctcaactgtgaccggcaggaccagcaagggggggtgttgaaggggttatgaacagcaaccataaagaaaggaatctccaacagaagggacaatggccagcagtaggtgaagggaacccattcttcagctctgttgcatcatacacattcctgagggtcaggcacctctgccttttagatgacaccacagtcatctagaagtcaggttttctcttcttttggttcttctttttatatgctacctttttgcctctctgatttatggggaggctcttttagtaaacattatacaagatagtacaaggcaaaagaaaacaaggaccaagaagcagtgctttgagtaacttaggaaagcagcagtaggagctgccagactgaaaaggtaaaagggtttaaaacc

SEQ ID NO: 328831 - DNA, 428 bp, Homo Sapiens
  misc_feature (336)..(336): n is a, c, g, or t
  misc_feature (370)..(370): n is a, c, g, or t
tctcttcctcttaaactccttgtttccgttgatggcaccacttcttccctcattgcacaaactggaaacctgtgtcttttccctctttctgtgcctaattcttcctcaaggccctctcctttttacttgctgtatcctttagaccgtgaccctctatttcaacccgatggctgctgcctccattcagactttgctcattttaactggccatggctcccacctgccccctgctctacttgccccttctctccttaggacacctgttagtgatgtcgcctcctgcttaaactcatcctggccttcttaggtttaatgctaaggaaggaaaggggaatnaaatggaactaggatggtggaacttggaggctgnggaggaaggagggttaataaggggggaaatttgggaaggggcctaaataacaggccaa

SEQ ID NO: 328832 - DNA, 606 bp, Homo Sapiens
acaatccattgacactctttattttaaaatgtacaattacggttattattgactatagtcaccctgttgtgctttcaaatagtaggtcttattcattcattctattttttttgtactcattaactatccccatctcccctccaaccccccactacccttcacagtctgtgatagccattcttctattctctattgacactgtttttaatgagccagaggatgtgaactttctcaagtgtgtaacaggaggctttcttagggacagttgctggtgcagttaaactgcctagttgaggtgtgccttgcctcgcacaatagattaatgcatccccaagttggataatatcgtcatgcatgaaagcagcctgctagtctaagggagtcctatagcaaaccatctttataaagtgaacagtgacacccaatttataaatctaaatttttgccattttcttaaaatgaaatatagtttcaaactggggtactaatgtctgaaaaggttttatgcctctacagttaatttaccctgagacagtaatttctagtaactctagtcatttctaaatagtctgagtcagttttcctagaatttaggacaggacctca

SEQ ID NO: 328833 - DNA, 258 bp, Homo Sapiens
ccccccaaaatcctgcatagattatttagtataatggtaagttaaaaaatgttaaaggaagattttattaagaatctgaatgtttattcattatattgttacaatttaacattaacatttatttgtggtatttgtgatttggttaatctgtataaaaattgtaagtagaaaggtttatatttcatcttaattcttttgatgttgtaaacgtactttttaaaagatggattatttgaatgtttatggcacctgacttgt

SEQ ID NO: 328834 - DNA, 255 bp, Homo Sapiens
  misc_feature (160)..(160): n is a, c, g, or t
aaagaaaatggtgctttcccttcctacttattacagtaattgacaggaacaaaacaatcaagggtggacccagaggtgtacagtgagggcgtgggcatgtgtcctcctgggacgagggagatctgccagcaggggtgagacactgttacagagggtcttnggagtcaggacaggtgaggacgccgtgcctgcctgcacctcacagaggccaagcggcccttctgttggtacttacttgagattttctgagcccat

SEQ ID NO: 328835 - DNA, 754 bp, Homo Sapiens
  misc_feature (400)..(409): n is a, c, g, or t
agtgctttggggggccattcgcctaaggagcgatgcatccgatcatccgatgatgaggcctcttagcttgctgttcaggcctagctctgaatagttggacatgatgctaagatgatcgattacctgctcattctcagcaagattcgatctgcccgtgtagcagcatgatacaagaaagacatgttgtacgtatgtctcagagcaaggactttctcatgtgagaaaacgctttgccctaagaagctacctcaaaccaaagggatgaagtgatgtatctgtgtgcaacactgggcttgggggaaagtgaagctgtgcttgctttgaaagagctgtgctaagtatctgcagaatagctgctccaaaaatggaatctttattccaggtacttggtttctaatannnnnnnnnnctcttgcaggtgtaaccttctgtgttttctttctccttgttgtcttgtttcttagcaacttattcaaacctccagtacttataggaatttgcaacccaccagttccacacccgtaattctacagggacttaagatgtttttagaaaacggtgaaactttggcgtggaggctcttgggggagttcagtgggttaaaaggagagtcagcagcaacttacaggcatgcaacctcccagaaaatcagcaatctaagtgctgctcaaaatcttcacaccaaatagtggtgcctttggggaccttttagatagaagacgtggaaagtttagcatggagaaaaaagttactt

SEQ ID NO: 328836 - DNA, 395 bp, Homo Sapiens
  misc_feature (18)..(18): n is a, c, g, or t
  misc_feature (26)..(26): n is a, c, g, or t
  misc_feature (201)..(214): n is a, c, g, or t
cccccggatggaaaaccngccttttnggagggagcaagcattacctccgaaaagtagtcatctgcctcttgccccccccatgtgtgtattttaaccaaatacaatttccattcctatgttgacctctgtgtttataatatttaaagaacccatgaaattaagaaatcctcaggattgttttagtgagaacttccccattcnnnnnnnnnnnnnngggcaattctgaccctaagatatcatcaattttatgataacgcaataagatttccctttaggttaagatgacatgggtctctagacaagccaagtttatctaactcattctgtatctaagtgcaatgctgagtgatgggggcaaggtttcctcggtgataccaaatcagatttgaagctta

SEQ ID NO: 328837 - DNA, 462 bp, Homo Sapiens
  misc_feature (25)..(25): n is a, c, g, or t
  misc_feature (74)..(74): n is a, c, g, or t
  misc_feature (80)..(80): n is a, c, g, or t
  misc_feature (90)..(90): n is a, c, g, or t
  misc_feature (156)..(156): n is a, c, g, or t
  misc_feature (191)..(191): n is a, c, g, or t
attaacctacaaggtgtatgcctgnggtaaccttgaattccccaattcctaaagatgaaatttcaacaaagccnataaancgtgaaaatnagagctggacttaagactcattggccgacccatcctgtgtcccctgcgtggccctgcagtaagaancgtgtctgggtcctggagaagggtgccttcccganagtgtgcaggtggcccttcccccttggaggcgagaagagagaatgtgctgtctatcttccctggttttcagtccacagagtcggtagccccaggggttacgtgactggggaaaatctcacatctccttgtctgaaaacatttcccctgctgttctctttctaacatgttgtggtaaatctgttcagatactgctcatctgactgttttgtacatgtgacaattgccttaaaacctagcacagtcctcagaaatgaataccgtgtttccact

SEQ ID NO: 328838 - DNA, 1079 bp, Homo Sapiens
aacaatttccatttgtctttttattttacatttaaaaagtggttattgctctaagtggatcagaggtaaggacctctcccctaaggagccttggccttgcagccccattcagcagggatggaagtcacaagacaatgagtggagcctcatgccctcccatgaggaagcccttagtattgctgacatctgccctttaatcctgtctctcctccccagtgctgtcacacttgggcaaagcagagtgggtggcagacccagccttgaagagctcttgtaagaccggaaggaagggggcggtcattgggtgatggcttctggctctctggcttggggaccaatgctcttatcattcatttcaacaaatatttactggagtaccaggcttgcactaagtgtggttctcccacacccatccttgaccaccaatggaagatgcagatgtccacctcttcccatgcaggcatctggcagccgtaaactcgtcagtcctagggaagagtctaccttccctcatcaagcacccatttttttaaaccagaaaggggcagtggagagagagacctgtcacctcacaccactcaggctctaaggaaggacatgaggaccctgggtaactttcatggaaccctggatgagatggcaagatatgaagaccccagaggccagtggtgatagccagagctgctcttcctgtccgtggtgaatggctcaggcctgccttccagcagcttctactccagaaggggtgttttggtagcccccagaatgccagctgtgatgtgacttttcagttgtccaagctagcatttctgaaactccaagagatacttcctaaataaattggaccagtaccttccaaactgatgatctttcagtcataagggtcaaagaagatagaggatgcaggcaaccagctcagtcttcgggggaatttctctgccctctagaatgcagccttctgatttttgttttccaaaagagacaaaccaggtaacatcttacacgcttgcaaaagtgtgcatcacaccacaaacatgtccttgatggctggatccagaaaaggcttgatggcagccatg

SEQ ID NO: 328839 - DNA, 668 bp, Homo Sapiens
  misc_feature (115)..(158): n is a, c, g, or t
  misc_feature (333)..(333): n is a, c, g, or t
  misc_feature (429)..(530): n is a, c, g, or t
gatgaataaagtcaactgtgtaaaaatgtttaacaaattttacctggtaccaaccactacaaacaaaagacaacctgagaaaagaatatatgcaacttgtcacaggcaaaaggcnnnnnnnnnnnnnnnnnnnnnnnnnnnnnnnnnnnnnnnnnnnntgcattgttaatttttgtgcattgctagtgagaaggtaaagtagtgcgatctttgcagcaacaatttgtaagtatcaaaattataaatgcacatgccctttgacttaggaattttacttaatggaattgtgaatgtacagccttattcattgtagcattgtttaaatgggcagtnccctcaaaaatcctatcagtagggacctaattaaatgaactctggtccattatatagtcatagaaattaatgaagagcccaggcacagtgctgaannnnnnnnnnnnnnnnnnnnnnnnnnnnnnnnnnnnnnnnnnnnnnnnnnnnnnnnnnnnnnnnnnnnnnnnnnnnnnnnnnnnnnnnnnnnnnnnnnnnnntgttagcaggatgcagtggggcaagcctgtggccctagctactagggaggctgatgtagaaggattgcttgagtcccagaggtgtaggctgcagtgagctgtgattgcaacaattgcactccatcctgggcaacagag

SEQ ID NO: 328840 - DNA, 693 bp, Homo Sapiens
  misc_feature (153)..(254): n is a, c, g, or t
  misc_feature (262)..(262): n is a, c, g, or t
  misc_feature (521)..(564): n is a, c, g, or t
gagacaggatctcactctgttgcccaggatggagtgcaattgttgcaatcacagctcactgcagcctacacctctgggactcaagcaatccttctacatcagcctccctagtagctagggccacaggttcgccccactgcatcctgctaacannnnnnnnnnnnnnnnnnnnnnnnnnnnnnnnnnnnnnnnnnnnnnnnnnnnnnnnnnnnnnnnnnnnnnnnnnnnnnnnnnnnnnnnnnnnnnnnnnnnnnttcagcanctgtgcctggctcttcattaatttctatgactatataatggaccagagttcatttaattagtccctactgatagatttttgaggtactgccatttaaacaatggctacaatggaataagctgtacattcacaattctataagtaaaattcctaagtcaaagggcatgtgcatttataattttgatacttacaaattgttgctgcaaagatcgcactactttaccttctcactagcaatgcacaaaaattaacaatgcannnnnnnnnnnnnnnnnnnnnnnnnnnnnnnnnnnnnnnnnnnngccttttgcctgtgacaagttgcatatattcttttctcaggttgtcttttgtttgtagtggttggtaccaggtaaaatttgttaaacatttttacacagttgactttattcatcttttcattaatggct

SEQ ID NO: 328841 - DNA, 166 bp, Homo Sapiens
ataaaaactatttttaataaacatcatatttacaacatgacgttttgatatacatatacatagtgaaatgattattccagttaaacaaattaatatatccatctcctcatacagttaccgctatttttgtgtatgtggtgagagcacttgaaatctcttctcttag

SEQ ID NO: 328842 - DNA, 467 bp, Homo Sapiens
  misc_feature (416)..(416): n is a, c, g, or t
  misc_feature (450)..(450): n is a, c, g, or t
atgaaactcctcagctttattaatgcaaacatatttttattaaagaatgaatgcatttatgctaaagaatagcttacatatgttgtaaagcaacaagcatatcttcaagaagtgagtcctcctcaatatgactccatgcttattctacatgcctgaaaactgggcccacacacaggggcacacgtacacgcacacaaacgcagatacggacacacagatatgcagaccgaaatgctgacaccatcgctctctagattggattagctctcatttaaggcttcttaggtgccgcagtgcccctaatattaccagggttgaaaacagacttttagggaagggagcagcattacttcgaaaagtagtcctctggctcttgttcctccatgtgtgtatttttaccaattacatttccttcnatgttggactctgtgtttataatatttaaaggancctggaatttaaggaat

SEQ ID NO: 328843 - DNA, 712 bp, Homo Sapiens
aggacaaggctggtgggcactgtaacctcagactgaattactgatgtggaaatgtcattaggagggctgcttgttgcagggactggtgctgtggctgctgctgtggttgggactccagcaatgctacttaagaaaggaggtactactggaaatgttggtcctgtatgactaaagtttggaggtgctgtgttgggtccttctgtcatttgggcacgtctaagttcagaaaaggcctgttgtagactaagggatgatgcagagtgagacaagttcattccagggctctgagctgtagaggcagcaactgtatctgttatttcactggggaaaacttttgattctcgtaatcggctttctggcacaggactcactataaaccgccttcccgcagaatgaacaacttgagttaaagaactggtaggaatgcctatttgctgtggcatggaagacgcaggaattggttgtttgaactctccttccaatttctgagaacctgaaaagccatagtcatcctttccttgtagactctccaatccctgatcaccctctggttccacactgacatcctcactgagcatttcatcagctttttcaataatttctcgcacttgatccacaaacgactctctctctattgctagaataaagtcattgttcaccataattgttgctatctcctcggggttgtcatcatctaggtcaaatttgaatg

SEQ ID NO: 328844 - DNA, 438 bp, Homo Sapiens
  misc_feature (25)..(25): n is a, c, g, or t
  misc_feature (30)..(30): n is a, c, g, or t
  misc_feature (86)..(86): n is a, c, g, or t
aaattgaagccatgggacattttantttangggaatagattttaaacctatttactactattaaggtagattttcctatggcatgnccattagctatttcatgatagatgattaaggggtttcctcaaaacctgtgtgtgaggaaattgcacacagtagcaaaatttggggaaatccataacattttcagaccatgaatgaatgtttccatttttttctaatggaatgtgagagtttatttttattttattctgaaggactttaaggaagggatacatgattttaaaaaagcctgtaagaggtgaaatatgtgatgtttgaagtctctttatagactttttatatatattttttaaaacactcatctagatgaggtgctttgagcagttctgaaaaatgcagttccaggaaagcaactgctttggttcctaaggaaga

SEQ ID NO: 328845 - DNA, 449 bp, Homo Sapiens
cctagagatttttatccttgcacataagatggatgaaagagctgttcagagccttggctcccccatcccacagactttcagattgaggtagggagggaaagtccctcagaaaattttgggcagagaactccaatgttagaaatccataccacatagaaggctgcatggtgtactgaagttacagaagtttcaatcatgatgatttaaacaatgctgaataagaaagaatgtgtaatttttattctaccctgacatacatttcctatggacctctttagaagctatttcaatatttcagatttctagaaattaaatatgatttacaaataggaatactttgggatacaaagacttgagtccgctcggtgtaatcaaaagtcctgtgctcgcctaactacaatattttaatttcaatttgtgcctttgaacctgccattctccttctcaca

SEQ ID NO: 328846 - DNA, 502 bp, Homo Sapiens
  misc_feature (68)..(68): n is a, c, g, or t
  misc_feature (90)..(90): n is a, c, g, or t
  misc_feature (101)..(101): n is a, c, g, or t
  misc_feature (203)..(203): n is a, c, g, or t
aacttttaagcttgaatgactggagtttaggttttaaattccccgggaaccaaaaccgtttgaagccntaattaaccatccccggaaggnaacttaacacntaaaaactcctaaccgcttccaggttttctgaccttgaaggaaagggaaaatgaagagacccatggttcccacttccgaagcaaagcctgaagttctgtgcnttagaaggtggtgttcccatcctatgattgccaggagtcctggccttggccttggtggaggagccttgtggataaggccgaaggaaggtctgttttcattgggggtagaggagggtaaggagttgaaatgggaaggatctcttttttcttgctgtctaaaacttgtcttttcagacacatatcaagcctttccctctctgagctactgaagtcctgggcagaggttttctgtcttacaatacagacttttaccttaggcaatacctgacagagcctttaaataagtaaataaattgctt

SEQ ID NO: 328847 - DNA, 414 bp, Homo Sapiens
  misc_feature (31)..(31): n is a, c, g, or t
  misc_feature (52)..(52): n is a, c, g, or t
  misc_feature (72)..(72): n is a, c, g, or t
  misc_feature (91)..(128): n is a, c, g, or t
  misc_feature (176)..(239): n is a, c, g, or t
cccccgggcctcaaagaaaccccctcacccncagcctccacgaagtagtacnggacccacatgctcaccccncccaatgacctagcctaannnnnnnnnnnnnnnnnnnnnnnnnnnnnnnnnnnnnnagagacaagttcctcacctatattgcctcaggctggtcctaaaactcnnnnnnnnnnnnnnnnnnnnnnnnnnnnnnnnnnnnnnnnnnnnnnnnnnnnnnnnnnnnnnnnattcagtcttttaatttctttatactctcttttcatatgcagttaaactagtagactaatttatattgcatatatgtgtgaataaacccaagaccagatcataggtttcttcataaattttacattttatgtattataattcatttttatttcctgggttctatgtttgctaata

SEQ ID NO: 328848 - DNA, 239 bp, Homo Sapiens
aaaaataaaagaaaacagttgtgctttattaatataaaacaaagtagactctaagacaagaaatattacaagagatattataccttattaagagggctaacaatcgtatacattaaaaaattaacatgtacctaataatacaggttcaaaatatgtaaaggagaacttgacagaactaaaaacagggataacattccatttacatagttagagattttaacaacttctctgagtaactg

SEQ ID NO: 328849 - DNA, 935 bp, Homo Sapiens
  misc_feature (95)..(95): n is a, c, g, or t
  misc_feature (108)..(108): n is a, c, g, or t
  misc_feature (120)..(120): n is a, c, g, or t
  misc_feature (144)..(144): n is a, c, g, or t
  misc_feature (153)..(153): n is a, c, g, or t
  misc_feature (164)..(164): n is a, c, g, or t
  misc_feature (269)..(269): n is a, c, g, or t
  misc_feature (275)..(275): n is a, c, g, or t
caggcgacgcatatttttaacacaaccttggcacgaaccaagaactaagcaacctactcgcgaagaatcaacctatgtcggcactcaaggaccangctacgtaattcnttcgaccacaancccgtaccgtacggctcatcgatnagcgacgtngaagatcgtcncttcctatacgactcgaacggattccaacgagttactctacccaaggttcagtcacgcctcacacgacgcagtcaagctaactaacctcactaacggatagcctncgcccntaataaagatcctgcttcttgtgtttctaaaatcccaattatattatcttttaaatcataaaatatattttctcttcgttcatatttaaaactatttacaggggcacagagaagccagagttgcccggccgaggtcaggatgagtccgtgcagggggacggagggggcgggaagagatggaagtagctcctctcggtggcgggcgagggcgggcagctgtcctccgccgacagtactggctgtggggcgtgggtgggggtggataggggtctgagtccgagttcaaatccaggtagtacttgctggccttccagcggctggcgctgtagtcgctgtcacacacgtcggtgctgcagggcgtcgtcgggggcgccattcctcgaatgatgtagggcctgtacggtctcgcagtggccggaatgtttgaagagtagaacatgtccatgttgtacagggaggggtccgtggccggggagggcggcgggttcaggatcggcgggtacagcgtggccttcgtgctggacgagctgctggacgaggcccctgtgacgtggttccggtcgtagagggcaccccgccccggccccccatcaggtcacggagctcatcatggactttccgcatgcgatgcctgtgaaggggccatgctgggaaccgccc

SEQ ID NO: 328850 - DNA, 273 bp, Homo Sapiens
  misc_feature (53)..(53): n is a, c, g, or t
  misc_feature (61)..(61): n is a, c, g, or t
  misc_feature (185)..(198): n is a, c, g, or t
gtcaaaatactttttaagtcctgagtgctttccagggtagttgttaaaaaaanttttaagngccaggcattggtggctcgctcacacctataatcctaggatcttgggaggtcgaggcaagctgatcgcttgagcccaggagtttaaggccggcctgagtagcatagcaagaccctgtctctacnnnnnnnnnnnnnnttagctgggcatggtggcatgcacatgtagtcagagctactgggggtgctgaggtgggaggatcgcttgagccca

SEQ ID NO: 328851 - DNA, 428 bp, Homo Sapiens
atctttccaatcctgctgatgtggcagtcaatggctgcagggctggcaaacctccccttagccagtcagcacggcattgttccttatcaggaataacaaaggtactacatctttccagccatcagcacgttgtacaacttaactttttaacatagtccgtctgtttactgaggcactggcgagtcccagggctgatacagaaccttccctagagggaataccagagttagctgggtatagaggtggctcaaaggaagtgtccgtgggcagggggaggaatgaacaaaatgggcgctgtttctttggctcagactcctaggaatgcttggacaagacagaatttttttgggaagaacctcatctcactattagttactttttttcacttttgttatatatgtatttatttagagcctttggaatattgg

SEQ ID NO: 328852 - DNA, 503 bp, Homo Sapiens
  misc_feature (113)..(113): n is a, c, g, or t
  misc_feature (146)..(146): n is a, c, g, or t
aaataaggttcacgatcggctgcagaagtgtctttcctcctcaaagtcaataaaccttcctgtgaaagctcctaccagttccatctaggtaaggccttgtcaacattcaccantctttaatttgccttaatctgaatttgctttgnctttattggacttttccacttccaagaatcctggttgttgttggtttttagtaagggtggtggaggttcgtgatgtaggggtgaagaagcagaactgctttcactatcgctgccatcacttaagctaactctgcgacttcggctgcctcctctatttacaggcctctccatttcagagtcattgtcgttatcctccacttcatctgattcctcctcattgtcatcagaatgcagatctttcattatagacctcaaaggaccttgttgcctggtctgggatggtgtgaagctggagctggagctggagctggcaggactgggttgttcagaatcagatttagaggatatattctcctc

SEQ ID NO: 328853 - DNA, 516 bp, Homo Sapiens
  misc_feature (478)..(478): n is a, c, g, or t
  misc_feature (493)..(493): n is a, c, g, or t
  misc_feature (501)..(501): n is a, c, g, or t
tttaagcttacttatggttgaaaactggcacacacaaaacgaacatcatctagcagtgcccagcgaaggtagaaacccacgcatctcattagaaaaatctgcttttaatattttggtttcaagaaatgatgcatgacttctcaaatccttcctgcaattaatccctccatgttcctgtgtttagaaaatgattcattacctttgaaccttccttcctttgccttcggttgtccttggggagccattagcacacactgtggcgagctagggttacctaaccgccagcatcacggctatttgttttcacaggtgcagtatgcaggaattgaaactctgcagcagccacagccccctggcggaaggaagcgcaggttcttcttaggggcacacaccgactttgggacagcagcacccaatattgtgtttggttgagtaggaccaatgttatggctgttttcagtggtacccaaggtgttcnttttgaaatgcatgncctgtggnaccctctgttatact

SEQ ID NO: 328854 - DNA, 389 bp, Homo Sapiens
gataagaaactgaagacccgagagactaataaggctgcttcccctaattattataatcatttcatttgcctgaatgttttaagcaggaagtagaaatactttggctgcccaaatgtatcttttggttcctcttagaagtaaaataagctacatacaataaaaatttatttcagaaccccatttctagaaaataccaccccagagtcctcatttgatagcatctgtctcctgcagacctcatcattccacagtatttccctgccatgtaaaaatcctgactttgtgcgtatataaaatgtatgcaattaagtctgtttaaatgatatttaagttttaaagactgtattttgttgacacatactttgtgcagtttttatgtatgtatgtat

SEQ ID NO: 328855 - DNA, 524 bp, Homo Sapiens
  misc_feature (357)..(357): n is a, c, g, or t
  misc_feature (505)..(505): n is a, c, g, or t
cctctggatcctgccacttcacatctactcttccatggccccatttctccattttgtggaccaagccatcctgagggcatggacattgtctctgaggaaattggggccacccttaagataccaagaaaagctcctgcccatggtcccactggaaatggactctgctgagcaaagccaccagttgaagagaacagaatccacacctgcattgaatacctgtttctccatgtgtatcgtctctgagattaccttcttgccctttccaacaccttagtgattcctcaatttctcccccattgggaaggccatagggcattaactgaaggaactgacctctctccttttcctgtacctttnaacctttagtctgttcaaggaaaacccttagggacctctgaatcaagagggattgagtttgtggggtgaacctggaaggtggtctttctgttacaggggcctgggggagatagcatgggagtgcattgaggaggcaggcttcaggacntaggttgaaggagttgagg

SEQ ID NO: 328856 - DNA, 290 bp, Homo Sapiens
  misc_feature (47)..(47): n is a, c, g, or t
  misc_feature (62)..(62): n is a, c, g, or t
  misc_feature (72)..(72): n is a, c, g, or t
  misc_feature (99)..(99): n is a, c, g, or t
atgtacacatgaagactttcagacattgcaagaaacatacttatgcnacactatgaaagaanatttttcccnactaaaccttttttgccatagaaatcnaatatttctctttttaatggttatttacaacggaatgatgagttgttttattgaagaactgagtgccatttcctcaagtatagcgcaagtgttactcgagggttgcttctctttgttcatcaagcttgtgaaagaccaaatttaccttgaaactttctaagatttccttgacattggagaattgcttgaac

SEQ ID NO: 328857 - DNA, 298 bp, Homo Sapiens
tatcttcaaagtgttcataagtatgttctgcaatgactgaaagtctcatgagacatacacagtaaagatactttatttttacttttttgtgtaactctcatcagggccaaacctatcttattcagcaaaaaatccctgttatcaacctgccaaaaataagattcaataaaatatctgcagctgggtgcagtggctcccacctgtaatcctagtactttgggaggcagaggtgggcggatcacaaggtcaggagatcaagaccatgctggctaacagagtgaaaccctgtctctacaaa

SEQ ID NO: 328858 - DNA, 358 bp, Homo Sapiens
  misc_feature (20)..(20): n is a, c, g, or t
  misc_feature (131)..(131): n is a, c, g, or t
ttaaaggaatttccattatntctcccggtaatacacagagcatcgggattaggaaattagcccattttggattctgtctgcccacaaacagacctattcctaaacagtgctattaaattttagactgttgntcaaatattttattttctcctaaactactttttatggtgatgaataattaagaccatttaaaacacgggagtacaagtatttttttgaattaaattaacttgcaaaaaccaaatttgcagtggttgggttgtttctagacagactttggtatcaatttaaaaccaagataatttttatattctttccaatagaatttcatgacaactcctgcagttttcttaaccta

SEQ ID NO: 328859 - DNA, 219 bp, Homo Sapiens
ttgtaaagtttagacctgtattccaattttctacaaactaaaaaggtaactgctggtaatctagatttaacagtattttattccaaagtaaacatctgaatagctcagagaactctttattatcttactacaagtaaaatatcattctaatggaaaacattttatgacaatctatgcaaagaaattcttgaatataaatttcataaaatttaggattga

SEQ ID NO: 328860 - DNA, 499 bp, Homo Sapiens
  misc_feature (81)..(81): n is a, c, g, or t
  misc_feature (83)..(83): n is a, c, g, or t
  misc_feature (306)..(306): n is a, c, g, or t
  misc_feature (359)..(359): n is a, c, g, or t
  misc_feature (404)..(404): n is a, c, g, or t
  misc_feature (441)..(441): n is a, c, g, or t
  misc_feature (447)..(447): n is a, c, g, or t
  misc_feature (474)..(474): n is a, c, g, or t
  misc_feature (485)..(485): n is a, c, g, or t
tcagtaaaacccattttattgcagggaggtggagggagggatggcaagcagaggaggggaggcagctgccaggagagggcntncttgaactgctggctgggaccactcagtaggaacagatgaaaggaagtcttctgaggcagtgggctcgacgccagtagcctcctcgggtacacagggccacgcagtaccaccgcgggaccagggctggtgagcagccagttacgcaaagttccagcggctgccgtcaacccactgaaagcgtctgcagcgacccgagcctgtgatcctgcctccaatccaganttaacccgggttgagcgcgttgacagaacattggattcgataattaatatttnaagttttgggatgggaaaccagggtttgcccctgttaggcacctncggcaagttaaaccaagtttgattaaacgtttgaagntttttnaccggggggtaggcggcaggttttggnacccggggttncccacctttttatt

SEQ ID NO: 328861 - DNA, 501 bp, Homo Sapiens
  misc_feature (460)..(460): n is a, c, g, or t
tttccatttcagtaaaacccattttattgcagggaggtggagggagggatggcaagcagaggaggggaggcagctgcccaggagagggcactactgaactgctggctgggaccagctcagtaggaacagatgaaaggaagtcttctgaggcagtgggctcgacgccagtagcctcctcgggtacacagggccacgcagtaccaccgcgggaccagggctggtgagcagcccagttacgcaaagttccagcggctgccgtcaacccactgaaagcgtctgcagcgacccgagcctgtgatcctgcctccaatccagactttgaccccgggtttgagcgcgttgacagaacactgggatttcgataatttaatatttgaagtttttgggatgggaaaccagggttttccccttttaggcaccttccggcaagttaaaccaaggttttgatttaaacgttttnaaggtttttttaaccaggggggtagccggcagtttttggga

SEQ ID NO: 328862 - DNA, 840 bp, Homo Sapiens
  misc_feature (825)..(825): n is a, c, g, or t
ttttcagtaaaacccattttattgcagggaggtggagggagggatggcaagcagaggaggggaggcagctgcccaggagagggcactcctgaactgctggctgggaccagctcagtaggaacagatgaaaggaagtcttctgaggcagtgggctcgacgccagtagcctcctcgggtacacagggccacgcagtgaccaccgcgggaccagggctggtgagcagcccagtacgcaaagttccagcggctgccgtcaacccactgaaagcgtctgcagcgacccgagcctgtgatcctgcctccaatccagacttgaccctggttgagcgcgctgacagaacactggattcgataattaatattgaagttgtggatggaaaccaggttgcccctgtagcacctccggcaagtaaaccaagcttgactaaacgtctgaagacttctcaccaggaggtagcggcaggtctggcaacccagggatgcccaccacttttactgtgtcctcttcctcaggacacgtaaggtttttgtccaccatatctggcactgagatagactcaacagccccatctttcttggaggcatcttcacttccagagccccactcctcctcttcctccagctccctgcaaggggtctcctccatctcctgctctggtgtctcctcatcctcaggcagcgtcttagcaccaaaggggtctcaaaggtggaagtctcagaccttagatgaagagcagaaactgccccaaatagaagagccagaagtagggggagtttcatcttggctttatcccacccagagaccttcctgggtctttagatctngacctgtgccgaatc

SEQ ID NO: 328863 - DNA, 591 bp, Homo Sapiens
  misc_feature (20)..(20): n is a, c, g, or t
  misc_feature (45)..(45): n is a, c, g, or t
  misc_feature (532)..(532): n is a, c, g, or t
taaaccatccttttttaaanttccattttgctggacttgattaantgattttccaggttctggaggactctttctgaacttttgacactgcaaagtttatcccatgggttaatccagcttgggtaatactagcaacctggaccatggaacttcgaatcttggcaaagggagagactgctctgctgctactgctctctgaaggagaaggagttacatgaagccctgtctcaagttcaagcatgctggaagcggaggtgggggtttttttgagatgcaactgaatgcgctggctcaactgacaaaaactgtgggcctgttgcagaaagagagacatctaattgcgatggccgagaaggtgtctgttctgttgattctgattgggtttcatttgaaacttgattggtcatttgatttctttcctgactagcctgctgagacacagatctggtctctgataggtgggtcactttgttctgtgcatcttgcacaaatctgttggcagtaaatatccataggcttggcaaagccagtncaatatgtgtacgtcgccagcagaaggacttttcttcaaaggagactcctggccttttc

SEQ ID NO: 328864 - DNA, 567 bp, Homo Sapiens
  misc_feature (547)..(547): n is a, c, g, or t
tgatggtggaaatcattttattctcatacacaggttattacagcacaattaggaagagacaatcacaactcacacaatgctatattcaaattatgccaaagtcccaacatattcatttcatttgcaagttaattcctaaaagatcagagcagagtgatacacaagtttattaacacagactacaacgtcaatgaagcctcctggcattgtcggaaatagaaaacatgtataaaaatcttcgaaatgcaggttaaaatgcaaatccaagtgaaaggaaaaagcactactgtgaagcctaacggcaattatttcccgtcaaaggaggtttgtgtccagctggagagaaggcctgggtggacagaagacaaaggaaggcaaaattcctaagggagaaattcaaaaaaatgatgggggtgctgccctctgctgggcctctttggcagtcggacttcaacttaatgcattagcgccgtaaggttgtaagagaagcaactctgggctttgatcttaggaaaagctggatttttctttttgggcagcctatttnccggtgaggaactgatgggg

SEQ ID NO: 328865 - DNA, 752 bp, Homo Sapiens
  misc_feature (50)..(50): n is a, c, g, or t
  misc_feature (55)..(55): n is a, c, g, or t
ggcaacccaaaaatcccacttaaaaaacactgcgggttaaaaacaattanaatanaacaatgaaggacaccaaaatcccaagaggtgtttaagtgtaaatgagtgttcagatgggtggggcagggtggggttcccccatctgaccctctagggctctggggtgactcattcttccttgggctcagaggtggagctgatatttgttcctccagttgagccctgctccccctggcccttggcgttctcagtgtctccagacactagagccacgttcctcagataattgatgttgaagcagttgacctgttcatccccaggactcaggtaacagcagagggcagggtctcgccagatgttacgtcggggaccacacagatcattgatgaaggttaatttctcctcctctgcacagcaggcctgttctggaaatggcaggtcacagcagcgggcagtcatgttgtggatcagcccaggaatatgtttatgcttggtgagaactctttggtttccacagaggtggcccatgaggttgggggtgactcgactgatgtcaatggtcaagatgtcccggtcatagttggggtaagggaccgacgggcaaagcactcatcccgagtagggctgggagggtggcggcaacacaagtggtggtgggtcttcacagcatactcccggtcacagtatttgtcaagggtatcctcccaggccttccatgtacaggtgtgattgttccctggcggcagcagcgtctg

SEQ ID NO: 328866 - DNA, 489 bp, Homo Sapiens
  misc_feature (234)..(234): n is a, c, g, or t
  misc_feature (330)..(330): n is a, c, g, or t
  misc_feature (342)..(342): n is a, c, g, or t
  misc_feature (344)..(344): n is a, c, g, or t
  misc_feature (363)..(363): n is a, c, g, or t
  misc_feature (373)..(373): n is a, c, g, or t
  misc_feature (392)..(392): n is a, c, g, or t
  misc_feature (411)..(411): n is a, c, g, or t
  misc_feature (429)..(429): n is a, c, g, or t
gcgagaccctgccctctgctgttacctgagtcctggggatgaacaggtcaactgcttcaacatcaattatctgaggaacgtggctctagtgtctggagacactgagaacgccaagggccagggggagcagggctcaactggaggaacaaatatcagctccacctctgagcccaaggaagaatgagtcaccccagagccctagagggtcagatggggggaaccccaccctgcccncacccattctgaacacttcattacactaaacacctcttggatttggtgtcctcattgtctattttaatgtcttcacccgcagtgttttaagtggancttggtgccctngnccaggagggcactggcgtnttcagacacnccacagacaaacacacccncctaagcctgcttgtattnccttcagtgcctgccccntgagccacgccctgcccccttcactgagcagatgttcacaggctgtgggatgggcccata

SEQ ID NO: 328867 - DNA, 272 bp, Homo Sapiens
gaagcctacaagagggaaaaatatttagatcaaggaaatcagaaggttttctggctctaatcagcccatcacaaaaatgagatgagtatttccctgttgtcataaccccttagggtgaggagtgtatccttggtgacagaccaaaatcaaatcatttttacaaatatttatggagtatggtttgagaggatgaagaagaaaagcatgtggaaacatggggcaaattgggactttttatatctctcatttaaataaagacttgttggctgggc

SEQ ID NO: 328868 - DNA, 876 bp, Homo Sapiens
ttaaattaaaagtttaacaaactggctgaaaactcaccaagtgtcagactcaccagcaatttaaaaaatgataatttaccagcatctcctcatcagagttccctctccagtaagggtatacctacatctgtaagggtcagtggactctgaatcaattttatggttgttttaaaatcaccgtgtattaggatactaatgatagtccctatatccatccagaaatgctggcagaaagcactggccaccatacaggacagaccacaccacagctccatacccagcgtctgcctggaggctcccccacgctgaggtccgggagaatgcctggtttcagtcatttccggactaactgtgacaacgcgtgagaggggagcaccgtgcgagtctccgggagggaatcctcctggggccccagagactcctccacccctggggagggcagacaggctcgggagggcctgccaggccactggaggctggcagggagcaggcatgtccacccgcaagcctgggaggctaactctggcatttcctggccagagccgccatgctcattggtgggccagtttgggacatccccgtactcaaagaccatatggcagcctctgggaaaacaaaaccaaaacatcaccttctattaaactctgtatattattattttttacaatagaaagttaaaaatcaagacttagatttactatacattttttctctcagattacaaagtttatattatataactgggttccctaaattgatttcttttaaaacagtcttaaagagaccagaagtgaatacaaaagaactaaacaaaataaaaaattagaatgtgctgtagctgaaagctgtctatacctgtaagcctccaagtttcat

SEQ ID NO: 328869 - DNA, 527 bp, Homo Sapiens
  misc_feature (476)..(476): n is a, c, g, or t
  misc_feature (516)..(516): n is a, c, g, or t
ttacattctggaatcatttattaatccaactggttacttttgaagagttttatggttagactaatatataacaaattgccaatcgttacaggtattacagagaacccagcaggcccctacggcagaagaacagataaagagcttatagactggttgcggctgcaaggagctgatgcaaagacaattgaaaaggtaaatttacaacaaagaaattcttatgctgttgttacacagctgctcagctcttaaggatctgatctttgtttcagattgttgaagagggttatacactttcgggatattcttaatgaggatcactaagggaaggatctaaggataccttcggactacgggtaaggggcctccaaaacagtttgtataagggggattacaactttttatgtgtgaatatgcttcaagggccggaaaacaaagggctggggcctccccccaaactctgggagttctattagggntcaagctgggggaaaaagccaggtgggggcaggaaacttnaagccggggca

SEQ ID NO: 328870 - DNA, 354 bp, Homo Sapiens
  misc_feature (37)..(37): n is a, c, g, or t
  misc_feature (44)..(44): n is a, c, g, or t
aggctgttaaagtagatgacatcatgtgttagcctgnccctaancccctagaattgtaatgtgtgggatataaattaggttttattattctcttaaaaatcaaagatgatctctatcactttgccacctgtttgatgtgcagtggaaactggttaagccagttgttcatacttcctttacaaatataaagatagctgtttaggatattttgttacatttttgtaaatttttgaaatgctagtaatgtgttttcaccagcaagtatttgttgcaaacttaatgtcattttccttaagatggttacagctatgtaacctgtattattctggacggacttattaaaatacaaacaga

SEQ ID NO: 328871 - DNA, 473 bp, Homo Sapiens
  misc_feature (349)..(349): n is a, c, g, or t
  misc_feature (375)..(375): n is a, c, g, or t
  misc_feature (449)..(449): n is a, c, g, or t
atggcttttctctgtcccctgctgctctgaggggagaggggtgggtctcctgagccactcagatgggaaagtcccttactcggcccctccctccccagcagccccaagctttacactggatgcagcgatcaacccaccactcaccaggcctctcctcccctctgcccccggctcttagctccagctgctccaggtagttggttcatccttccccctctctccctccctgcttccccttcagtgcttacttggctccagccctccagctgcagcccctgggggaaaagcagcctcccttctcctcttccctccctccctcagcccctgtcttttgccagggtgcctcctnttcagtcagggtttcagagcagcctngggagacaaggaggggccatgtttaaaaagttttttcaaaaagttttaagaagacaagtgggagggtgaagganaattggtgggggggttttggcaac

SEQ ID NO: 328872 - DNA, 470 bp, Homo Sapiens
  misc_feature (11)..(11): n is a, c, g, or t
  misc_feature (26)..(26): n is a, c, g, or t
atgcttcatanatctggaaaacttcncaattgttaaaataatttatttaagtattgcagaaccaattaataagaatctgcaagttttccccaagaaactctggaaccatagtgcctaatgccctttaaaatcgatactaaaggagagagaataaaaggactgcttgatgtgacagtcactggtgcatccctatccagtcagaaacaaaactgtagctccagaattgacctgatgatgagcatctgcagctctgccttccagggtctatctcctctctttcactgggcgtgcaggaacttcaggtaaaatgaggacccccagagcgactgtccttaccaggacttcaggaacgttttggcctccgtattctgggcatccatttctggagttcgtcatataaagcagcctccgacctagctccaatggaagcacctgcatttgggagtcagtctctccagagggcagatgct

SEQ ID NO: 328873 - DNA, 444 bp, Homo Sapiens
  misc_feature (249)..(249): n is a, c, g, or t
  misc_feature (354)..(354): n is a, c, g, or t
  misc_feature (426)..(426): n is a, c, g, or t
gggaaaacttgcagattcttattaattggttctgcaatacttaaataaattattttacaattataagttttcagattataacatttgtattaatttttactgattttccaagatacttcttagatttactatttacgtagctttatgtacattctctgtaaaaatagacctctaaatatgaggctttacatgaaatttgtacacacatacacactaatgttaggctccttaaattgctgcactaaggtnctgggttagtaggagatgggacggagcctcttcgcgttttgctcttcaggatgtgtttaaagggcggcacgtgttacctggctcttcagcgggcagtgcgggccnttcccccatttggctgggggtgcccatgggcccttccctggcaggcctcagtggatggacctcgtttggccngggggacacaggtttttc

SEQ ID NO: 328874 - DNA, 451 bp, Homo Sapiens
  misc_feature (34)..(34): n is a, c, g, or t
tcccttgtggaggaccattaatttgttttaatgnataggagtaaaaagtatgtgagatttgttgtgggaaaattagtttgggctccataaataaaaagttaagagccatggataaagtagagatttcactgtgaaaagggtcaatgaggagaagttaaaaccagatataaggctcttttcagacagatcacttttcagaaataaaaatagcaaaacgagaataggaaaaaaatagctatagagtttttcatttctaacccaaggggctttgataaaatcactttaaaagaaggatctctctcttaaaacaacccttaaacatcttattttttccccctcataagacccctgtgaggtagagagcacttacttacagggatgaagctaagaagtaaagttaagagtttaaaaccacatggatagtgaacaggctggagcagatgttatgtct

SEQ ID NO: 328875 - DNA, 585 bp, Homo Sapiens
  misc_feature (11)..(11): n is a, c, g, or t
  misc_feature (21)..(21): n is a, c, g, or t
  misc_feature (66)..(66): n is a, c, g, or t
  misc_feature (84)..(84): n is a, c, g, or t
  misc_feature (99)..(99): n is a, c, g, or t
  misc_feature (126)..(126): n is a, c, g, or t
  misc_feature (138)..(138): n is a, c, g, or t
  misc_feature (155)..(155): n is a, c, g, or t
  misc_feature (167)..(167): n is a, c, g, or t
  misc_feature (196)..(196): n is a, c, g, or t
  misc_feature (479)..(487): n is a, c, g, or t
aagaataatanatctttctcngacaaatctcagatcctacccatttatatttaactgacatggctnctcatccttctctaatantcctcccccctccantctcaaccaaattaattacattttacntgagcatcaagngaggccctcctcagagngtctgtacaggngaggtggcggtggtagagtcatgagatantcctctctgtgtatggagaaggtgggcagctttcatagttctcctcttgctgacaaagtattggcttcggggtgtgggaggtgggggcacaggttctgaatcatagttcaagtcactggtagtagccctttgctgttgccactgaggtcattctccgactaggagcatagtcactgtcacaaacatctgtgctgcagggtgtggtggggggtgcaaagtgccggtagctatatggcctgtagctggtatagggagaaaataaagagaagcagttagttttacnnnnnnnnntgatttcccctctcagaatagaggtattagatgtcaactaccctatgaaaacaataagctactgcaatttaaatttacacagaccaagaggcaatttt

SEQ ID NO: 328876 - DNA, 873 bp, Homo Sapiens
ttttaaaaatgctcagtaacactttttaatatacaagaatcaaaagtacagcagttttacaatgtaggaaaatttaatacatactatataaacaacattatttacatcagaaatcactaggacagtggcatttttcacaaatataaattaattactgtttagtcaacaggttttaaaagtccacaattttacaataaagaaaaaccatctgtccccagatgagtggggcacagatggcctaaagcagcctggacccttggcatggctcccctcgcccaacgtggcagccctcagaggagccggaagaccgctggtgctgggcctgggctgctgctcctgctgacaagtggattttggtctgtaggatttcagtgtcattgtgtgacttcctaaatcaactgtgtttgcaccgtgaggactgatgcaactttcagacacaccaggccagaatgtctgccagcacagcgtgcaaagtgtttgggcttcccttcgaagggctgaggaatgactgaaaggagagtgagccccgggctctgctggcacctgtctgtccggctctgaaagaccgcagtgattagcttggggtttcacctggcccttttctaaggccatagtgtatcatgtcaacccttgttcacgtgcaggttttaggtgatgctaactccctctttctcaacctgttatttctaccaacaatgaaatctttcaaagccagactccagggaataccatcctcacagattcctggggcagcttctcccattcacaagtgagagaatttaccgtgtgcaaattttttatttaggcatataatattcatactgatttaaatcaatgaagaaatgcttcctttttcccagcacactcttcaaa

SEQ ID NO: 328877 - DNA, 595 bp, Homo Sapiens
  misc_feature (11)..(11): n is a, c, g, or t
  misc_feature (28)..(28): n is a, c, g, or t
  misc_feature (39)..(39): n is a, c, g, or t
  misc_feature (55)..(55): n is a, c, g, or t
  misc_feature (211)..(211): n is a, c, g, or t
  misc_feature (266)..(266): n is a, c, g, or t
accttaagggnttggttttccccggatntggatggattnaagggagggaccgggnggatccccggtaacaggtttctggcaaggcccctgaaatttgactgcaccaggcttgtatcttgactctgtcacttactacctttgttaacattttgggttctgtgcctcaacttttcataaacccaaatttcaaactcctattaaatggtggtanttaatctcctacacctcatcttggtattaagattaaataagaatccacataaagnaagtgagcaagctcaatacatggcatatagaaagtactcaggaagtggtaactgctattatgattattgttaatctggaaggattactcaaataaacgtctcactttgaagttcacttgggacttgccccacagtatgtgcaatcccatttggaaatgccatctagttgattattaattcacctaccaaaagctctttatacctttgtctttagagactccacaagatagcaagagggaacaggatagtgagaggtaaattagttcctggcctaaaagaataggtgaataaaatcaaagcaggtttggaggctctttttacctattttt

SEQ ID NO: 328878 - DNA, 593 bp, Homo Sapiens
  misc_feature (65)..(65): n is a, c, g, or t
  misc_feature (435)..(435): n is a, c, g, or t
tgcttcacccttcaggatcttctccaacacagtgaatatattacccatgaaataacagtgttgantatttataaccttttgacaatagtggagatgctacacaaagcagaaatagtccatggtgacttgagtccaaggtgtctgattctcagaaacagaatccacgatccctatgattgtaacaagaacaatcaagctttgaagatagtggacttttcctacagtgttgaccttagggtgcagctggatgtttttaccctcagcggctttcggactgtacagatcctggaaggacaaaagatcctggctaactgttcttctccctaccaggtagacctgtttggtatagcagatttagcacatttactattgttcaaggaacacctacaggtcttctgggatgggtccttctgggaaacttagccaaaatatttnctgagctaaaagatggtgaattgtgggattaattctttgtggcggattctggaatgccaatgatgggggccacagtgtctgttctttggggagctttgcagcaggaaatgaatgggggttttttgacactacattccaaagttcacctgaacaagggc

SEQ ID NO: 328879 - DNA, 274 bp, Homo Sapiens
  misc_feature (234)..(234): n is a, c, g, or t
  misc_feature (244)..(244): n is a, c, g, or t
tacattttggttaagtgattgacctggtgagttataattattataaatttaaaaatgtcatccagtagtatttgcctatttggaattaatagccttactttctcagtgagttttgccttttataatgttaagtgctctttatatgctttgaaatgctttgtactttgaaatattatagaggtcctattagtatattttggggcatttaattggatgaagaaatgatttcatttncatggccatnaactcaattatgttaacagaatttgtttgc

SEQ ID NO: 328880 - DNA, 508 bp, Homo Sapiens
  misc_feature (33)..(33): n is a, c, g, or t
  misc_feature (41)..(41): n is a, c, g, or t
  misc_feature (76)..(76): n is a, c, g, or t
  misc_feature (117)..(117): n is a, c, g, or t
  misc_feature (165)..(165): n is a, c, g, or t
  misc_feature (169)..(169): n is a, c, g, or t
  misc_feature (241)..(241): n is a, c, g, or t
  misc_feature (254)..(254): n is a, c, g, or t
  misc_feature (341)..(341): n is a, c, g, or t
ctgcaatcctagttgtaatcaatgacatgcccnataaatcngagagtacttctatgaaaacagtcacaccctgttnaagtcaggataaaactcctcagctttaccttttaagatggntctaatacaatttccagaattcatgccctctttcttcaactctctaancttnattcatccttggcagtaaaataattttaccaattgctttccctatgacattgtgaatgaaattcccatttcnctttgctaggtantgttagctgccatctctgggaaggagaaagtgtttttatagacaagccattgtcaaggacaaataatggagctgaaaatgcaagggntggatggcaaataaattgcatcttgtgaactaactccaactaatttctgcctggaacactgtgtttaaaaggattcctaggccacatctggagggactcaggaaaaaaacaaaagagaagtaagaaaggtatgtggagaatcagtaaagtgtagtgccacagtagcc

SEQ ID NO: 328881 - DNA, 497 bp, Homo Sapiens
  misc_feature (45)..(45): n is a, c, g, or t
  misc_feature (369)..(369): n is a, c, g, or t
  misc_feature (408)..(408): n is a, c, g, or t
  misc_feature (430)..(430): n is a, c, g, or t
  misc_feature (435)..(435): n is a, c, g, or t
  misc_feature (442)..(442): n is a, c, g, or t
gcatttttaccatcactgagttttccatggcaggaaggcttgttntgcttttagtattttagtgaacttgaaatatcctgcttgatgggattctggacaggatgtgtttgctttctgatcaaggccttattggaaagcagtcccccaactacccccagctgtgcttatggtaccagatgcagctcaagagatcccaagtagaatctcagttgattttctggattccccatctcaggccagagccaaggggcttcaggtccaggctgtgtttggctttcagggaggccctgtgccccttgacaactggcaggcaggctcccaggggacacctgggaggaaatctggcttctggccagggaagctttggtngagaacctggggtttgcagacaggaatcttgaaggtgtnagccacaccagggattagagantggancactagnacaaggccagaacttgaccctggagctgaccagccgtgagcatgtttggaagggg

SEQ ID NO: 328882 - DNA, 464 bp, Homo Sapiens
tctgacaaacccactatgaaggacagactatatctaaaaatcagaggggtgcttaggagaaacctggtcattaattcccaacatactttgaagtctgtcaacatccacaatttttttaaggacatctcagagcagtttatatcaaagaaaactgcaatcaaataactacaccagagggcagttaagctgaccctgtcacagtgaaaaatggctctcctgcagcaccaatgcccgtgaagatgctggatttctggaaatctaggctaatattttcaatgaaagaagacagaaatacacacaaaacctgctctgctcaggtggtctgataagacagcaatccatatgggtctgcagcttccctatgaaaactatgaggaccaagagtagcagagccagatgctatgtcatttctttctaatcctcgcatgtcaggcaagattggataattatgctgtgcctgggat

SEQ ID NO: 328883 - DNA, 632 bp, Homo Sapiens
  misc_feature (493)..(493): n is a, c, g, or t
  misc_feature (495)..(495): n is a, c, g, or t
  misc_feature (607)..(607): n is a, c, g, or t
tggtcctgggggtaatttctgagatatatgcagacagccaggggttcccgtacacaaccctaccacctagaattgctactcctatttgtgagcttggatgtgtatctgtgggggaagatgagagtttagagactctggaaaatattccaagtatttccagctatgaactcccctcagacaaaggtttcttccagcaccctagttgtttaaaagtgagctaatggagatggcaatatgacaatgctttcctaggatccctccagggaaaattcatctctccctccctcacacccttcttagcacatatcacagtctctcttgattaagttcattttcctgtgtcagtctccccaatcacctctgagtttctggtgggcagggaatgggtcatttctgtatttgtctcactcaggatctaagagaggccgataaacatccttgaattggacagagttgtgaccaagcagcccgggcgtcacaggggcctctctcntnctgatctggcccccacaaagaacagacgtcctggttgctggctggtagtggcagaattgctgcttcagtctgaagagaagccttgccagggtgtactcagattcacaacccntggttactaccgtttgtgtgatcct

SEQ ID NO: 328884 - DNA, 375 bp, Homo Sapiens
  misc_feature (157)..(157): n is a, c, g, or t
ctgagattctatttgagactaatttgtttgaactcagctctcaacatcaacatttatttctcactgtgtttagctgcacaaaactatttaagagaaaattcggcaaatcaccattatcatgtcatagtttccatccaattttttcaatgtgcgtcangtgacatggagtatatttatcttctgacggttgctgtgaccaaccctctggttacccctaaagctatcaccctgcacatcggctggcccatcgtcactggctacacaggagagtcagaagctggaaatatactcaaaagatcatcattagatgtgagtaaagaaagcctcttcacaaaacagcaggtcattattcaacttacttaaatctttccttgg

SEQ ID NO: 328885 - DNA, 335 bp, Homo Sapiens
  misc_feature (335)..(335): n is a, c, g, or t
cggttttcgggcccaatttccccgggggaacattccccaattttccctggaaaaacccccaaatgtgtcccccaaaggtttgaaaaaccggggggttttcacgaaaatccgggggtttggggagagttgggtttgcacatatcccccgggaaaaaaccccctaagagatctcttgaaaattttacccccggaaaatacccttttccctctacccagttgccacaattcctcttctcgtctccctttcccctttacaagggtatttttttccctttcctttctccgagtcacactcaagatttctccctattccaggtctattttcattcaacaan

SEQ ID NO: 328886 - DNA, 490 bp, Homo Sapiens
tttgatttattttgtttatttaaaatcataaggataacacaaatatcagaagttctttcacagttagattgaaactggaaaaaagaagtatgctatatagcaaatgcacacacgtaggcagctagtagctaactctccaaaagtttcttaattattttcttgtacagcggggcttgcaggtccaagcaaattttccttccattcttcagcgtggctatcagttgggcagtggggcagtggggtccggccttgatcacctccaggctggtgatgtgcctgggacggacctggggaggtggtcttcacacacaggcactgcaggtccccatcttcttcagcttcagcgctggcgaaggcggaccacaagtgggcaggagcagcaaccccaggaacagcagcccggggcgtgaggcgcagaacccggctgcggagctcatgctgcggcagacttccagcaggatctcagtgctcagtgcgatgggaaactcgg

SEQ ID NO: 328887 - DNA, 518 bp, Homo Sapiens
  misc_feature (20)..(20): n is a, c, g, or t
  misc_feature (33)..(33): n is a, c, g, or t
  misc_feature (50)..(50): n is a, c, g, or t
  misc_feature (65)..(65): n is a, c, g, or t
aaacaacaaaatatcaaaanttcctttcaacanttaaaattgaaaatggnaaaaaaaagaaatangcctaataataacaaaatgcaacaacacgtaggccagctaattagctaaactctcccaaaaatttccttaaattattttccttgtaacagcggggcttgccaggtcccaagcaaaattttccttcccattccttcagcgtggctatcagttgggcaatggggcagtggggtccggccttgatcacctcccaggctggtgatgtgccctgggacggaccctgggaggtggtcttcacacacaggcactgcaggtccccatcttcttcagcttcagcgctggcgaaggcgaacacaagtggcaggagcagcaaccccaggaacagcagcccggggcgtgaggcgcagaacccggctgcggagctcatgctgcggcagacttccagcaggatctcagtgctcagtgcgatgggaaactcgggctgggtctattaaagatctttaattattcttcca

SEQ ID NO: 328888 - DNA, 367 bp, Homo Sapiens
  misc_feature (187)..(198): n is a, c, g, or t
  misc_feature (322)..(322): n is a, c, g, or t
  misc_feature (355)..(355): n is a, c, g, or t
atgtgtgcataatcattttaaatctaagtaacctatgaagtctgtgctcggtgtcatgaatattttaaatgttttatttcatgatgggggagaatttgcatgaaggaaattaaatatagttattgattgccaagtgagaagttggattgtttttagagataatagataataatgggcatatcagggnnnnnnnnnnnngtaagtctagaaaagtttatgtgctgtagaagagatctagtctatatgttaagacattcccttgctaattattttcttctctgttgttctatttttttggtccagtttgctgtttttaaagttnttgagtcccagctggggccctgtacatttaacntgaaaaaaatgg

SEQ ID NO: 328889 - DNA, 376 bp, Homo Sapiens
  misc_feature (11)..(11): n is a, c, g, or t
  misc_feature (27)..(27): n is a, c, g, or t
cccaattgccnagccccctgagggganacgctccttttcgaagatgctgactggctgctactaggaagttctttttgagctcccattcctccagctgcaagaagggagccatgagccagaaggaggcccctttccacaggcagcgtctccacagggagaggggcaacaggaggctgggaaatggtggggagtggggccgtaactgggtacaatagggggaacctcaccagatgcccaacccgactgccctaccagcctgcacatgggtagaagaggccaaattgaggcacccaagtgatccactggccccacgtcacacagttacagtgaagcccaagccaggcctggttgagggtgataaacgccactgtctcta

SEQ ID NO: 328890 - DNA, 248 bp, Homo Sapiens
atcaaacaattgatttttattgcagtaagagtaacaaggaatcccacccctcacatgccctttgctttatgtaaaaacctgtccagcagaataagcaacagtcaccctcaggaggcgatttagccccaagtgcccatagaacagcctcaggcacgacttctgtgctccctcgctgttcccagagccatctgccaagaccaggaattcacctttggagtctaacttgttttctctttttttcacctctc

SEQ ID NO: 328891 - DNA, 374 bp, Homo Sapiens
aaattttttcatatggtgaggcattgactaacataatgggtattggctttaacaacagttttggaaaagatgtaaaagtcttcataactatatttcttccatcccttcagtagaactcaagccatagcattacatttcacaaaaacacttccataggaagttatgataatatgattatcaaggaatgatgctttcaggcatggtattcaggaacatatgataatatgattatcaaggaatgatgctttcaggcatggtattcaggaacatttctcctttcatcagcaaaaagtcatttatacctgtttttaaaaatcacttattgaaacttttttctcctttgagcacctttatttacatttgttcttccagtc

SEQ ID NO: 328892 - DNA, 493 bp, Homo Sapiens
  misc_feature (37)..(37): n is a, c, g, or t
  misc_feature (49)..(49): n is a, c, g, or t
  misc_feature (70)..(70): n is a, c, g, or t
  misc_feature (111)..(111): n is a, c, g, or t
  misc_feature (137)..(137): n is a, c, g, or t
  misc_feature (145)..(259): n is a, c, g, or t
  misc_feature (281)..(311): n is a, c, g, or t
ccctccctgtaaaccccaagcactttggaagcccgangcaggtggaatncatgaggtcaggagattgaanaccaccctggctaacaaagtgaaaaccccgtctcctaattnaaaaatacaaaaaaatttagcccggnccgtggtnnnnnnnnnnnnnnnnnnnnnnnnnnnnnnnnnnnnnnnnnnnnnnnnnnnnnnnnnnnnnnnnnnnnnnnnnnnnnnnnnnnnnnnnnnnnnnnnnnnnnnnnnnnnnnnnnnntgacagagcgagactctgtccnnnnnnnnnnnnnnnnnnnnnnnnnnnnnnngataatgtggcaccaaatttgtaagatactttgaaattcataatttcagatggatgtggctggtaaggatcttaacaagcccccagtttgggctgacttttactaatgaggaaaattgttaggattaagcagggtcttgaggaatcacctctaaaggctcagactttaaagtgcttcccctc

SEQ ID NO: 328893 - DNA, 371 bp, Homo Sapiens
  misc_feature (340)..(340): n is a, c, g, or t
gcaccatgagcttcaataccctggatgtcttccccttctactcttgtgtggactgcacagtgtagctgtcagctcttccaccctgctgactggactcactggttcctaggtcccttctcttcccttattttcatttatattcctttcttttcctgaaacccatcaactattagctcctagaaggcatatggaaggtaaattttcgtccttgcatgtctaaggataattctatctacttttgttcttgatcaatggtatggttgattgcagaattcaaggtagaaaagtgttttcttttaaaactttgaaggcattctttttttctagcatccaatggttngtgctttgaaggttcaattaccattaccatt

SEQ ID NO: 328894 - DNA, 272 bp, Homo Sapiens
cctgggattcccaaaaggcatgggaatcactgggtgcctagacggctgggtttaggacagggccctgaacgtaagcagaggcaattcacgtgctccctggaaatatcaggaacagaaaggagctcttgagaggctggcactctcatcttcccagtgaggcaaccagtgcccagggagaagggccttcccaagtctgaaaggagctacagttcatgcttcacttctccccatttaaaagccagtttccggccaggcgcggtgctcatgcccat

SEQ ID NO: 328895 - DNA, 451 bp, Homo Sapiens
  misc_feature (425)..(425): n is a, c, g, or t
ttcatctttatagtaagtttattgtatttttatttcagctcaggggagcaggggtggagagtgggcacaaatgcaaagtaagcaaatggggagccccagcagcaataggggggtcttcctggaagaggcaggctttaaagacaggaggagaaggaaatagggaaaaggagttgggactgagggaagtggtgaggaagggtaggaagagaggggatcctgagagaagtggatcaagaagatttgtaaccctgatttccctgtgtcctgaatggtctggaggagggtaagggagggtttggggcaggcgcagagcctgggcacaatcacctttgaggtcccttggagggttccctctcaggctagctacccccttttccccagcaaagcttcgctttcccagggaggtttcttgcacagggtcagtnacttggtcacttgggctttttttcct

SEQ ID NO: 328896 - DNA, 890 bp, Homo Sapiens
gcatctttatagtaagtttattgtatttttatttcagctcaggggagcaggggtggagagtgggcacaaatgcaaagtaagcaaatggggagccccagcagcaataggggggtcttcctggaagaggcaggctttaaagacaggaggagaaggaaatagggaaaaggagttgggactgagggaagtggtgaggaagggtaggaagagaggggatcctgagagaagtggatcaagaagatttgtaaccctgatttccctgtgtcctgaatggtctggaggagggtaagggagggtgtggggcaggcgcagagcctggcacaatcacctttgaggtcccttggagggttccctctcaggctagctaccccctctcccagcaaagctcgcttccaggaggttctgcacagggtcagtgactggtcactgggcattctctcctgcagtgcctgtgctcccagcttgcactctgattagaaggaccaaaggctttgtcctctggtaacagattctgccaccagcgggggatgaaggagggattttagacagggaggccttcatccctgctcgtaaattctctgagatggacccttcccatgggtgctgtgcttctgtgaacccaaaagtacacattgagtacccaccactagcccactggtgagagccgtgtggcatttgtccctgcattcaagaggcagcagtggaacttgggacaagggacctgggttagtcccgactccagcacttgctagtccggcacttggtaatcaatcatctagcctctctgagctctggttctggtctataaactggagatgatcatcttagttctgtcactgccagccttgtaggatttttctaagtctcaaatagacagaggatgtgagacatcc

SEQ ID NO: 328897 - DNA, 440 bp, Homo Sapiens
  misc_feature (361)..(361): n is a, c, g, or t
  misc_feature (383)..(383): n is a, c, g, or t
  misc_feature (405)..(405): n is a, c, g, or t
ataaagttatgctgccttcagttttccaatggcaagtagacaggatatgttcaaggttttctgcactgtaggcacagtctctcaagcatatcctgatcatgtaatgactgcataaactccatcaacctaaggtgatacttgtaaataatttatttttaagggatggtgactttaaaaattattaatgaactttgagaagttttaagagtgcttttaaaacttcacagtattgccaattatcttaggttattcagtattcaggtttgtgtttctctgttttaaactaaaatgtgttttctgaaggaaaaaaataataggtttacacaaatgtacaatcataggaataaggcattttaaggcnggcgactaggtgttctataggnttacaaggcaggaaaactttcnttggagggtaaatgaccctttggccggaggagtac

SEQ ID NO: 328898 - DNA, 656 bp, Homo Sapiens
  misc_feature (21)..(21): n is a, c, g, or t
  misc_feature (89)..(89): n is a, c, g, or t
  misc_feature (114)..(114): n is a, c, g, or t
  misc_feature (147)..(147): n is a, c, g, or t
  misc_feature (308)..(338): n is a, c, g, or t
  misc_feature (521)..(521): n is a, c, g, or t
agggtaaaagggcaccttcangccgcacctcagaggcccagagtccttacacccatctgcaaagtaacttcccacccagcattcaactnattttaagtgccaaacaattttttnaaaatctgtgattgcagcgtctgtcttccctgnaattacattacgtcagaaagtaacagttttctctatgagtgcattcaaggttgtcttcctgacccacctaaggtatagaaaaatcagtgcaaaaacagtgaagcactataacagctgaatttcaggggatttcttgtccaagaaacattttattttacacnnnnnnnnnnnnnnnnnnnnnnnnnnnnnnnaaatttaattacattgaattttagagtaaaaagcaagaaaactccatttcttattttttactgcagccccaaaagaccggtttaaaatggaaacaacttctttgggtgagcagcgggagcacggcgccgcagagtgagccggtcaccgtcccaacagtatcgccgacgtccaccgcctgaggntccgccggctggcacggctcaggcgcagctcggagctcctcctcgtcactccctcgagtccaagtcccgggagactgtgcgcgcagcagtgaggtcgctacactacagttccacctggagaactggcctggcttg

SEQ ID NO: 328899 - DNA, 406 bp, Homo Sapiens
  misc_feature (318)..(318): n is a, c, g, or t
  misc_feature (375)..(375): n is a, c, g, or t
attcaagatagttttaatattaacttttgtgaattagaaatatcactcttaaatgatgaaaattactagtgaagtaactattttccccaattgcagaattacaatatttatacatataatacagagttgattgcattggaaacaacagtttattttacgtaaaataaacgtcaacgggtaaaaagggcatcttcacgccgcacctcagagggccatgagtccttacacccatctgcaaagtaactttccaccagcattcaactatttttaagtgcaaacaattttttaaaatctgtgattgcaggcgtctgtcttccntgaattacattacggtcggaaaggtaacagttttctctatggggtgcatttcagggntggtccttctggacccacctaaggggttagg

SEQ ID NO: 328900 - DNA, 354 bp, Homo Sapiens
  misc_feature (36)..(36): n is a, c, g, or t
  misc_feature (131)..(140): n is a, c, g, or t
cacgcctgtaatcccagcactttgggaagctaaagncaggaagatcatttgaccccagcagtttgagatgagacagctataatcttactacactccaaccggggcaacagagtaaaaacctgtttcaaagnnnnnnnnnntatatatgtagggattggggggggagaataattatcttttattctgagaaaatgtccatgtattatttattttattatttcttgccttcgatattttaatattctgcaacttatcatggtaaaatttcataattcgactttagctttatttcttctattattccaactgtccttttttcccattcctgacccattatttacatttccatgacta

SEQ ID NO: 328901 - DNA, 691 bp, Homo Sapiens
  misc_feature (538)..(538): n is a, c, g, or t
tttttcatggaaggccatgctaattttattaacttatatagtgcataaagtctagaatttaaaattacaaaggttttctacaaatcaataagaaaatacaaataacctatattaatcagaacagaaactcaattcaattatcttaaacaagaaagggactttattggctcacaaaactttaaagtccggaggtaggggcaggctttaggcacagctggatctagggcctccagaaaaatgacatcagaacttagttctctttccatttctgctagcatccgagtttctcctcagacagactctctccacatggcacaaattcaggcttacatggtccttggttccctgggatctccataaagccttctttccagtagttccagcagaagttctgttaagggctttccttagccctggcttaagttatatacccattcttttatcactgtggctaggaagctgtgggactcaggaggcccaggccctggtcacatgctcacctaagcccacagggaataggttccccacaaataaatanaaggttgtgttaccagaagatggggaaggagatgctgaacaaataaaaacaatatatccacacataacccaatagaaagcaggtaagggatacaaacaatccacagtaaactataaatggccaataaacatgaaaataaccccaatctcacca

SEQ ID NO: 328902 - DNA, 421 bp, Homo Sapiens
  misc_feature (28)..(28): n is a, c, g, or t
  misc_feature (35)..(35): n is a, c, g, or t
agcagtttgcctaacatggcaagagganggagaanacggaaagcctcctaggtggaaagagtgtcaacaccctgggatgccctccaaggctccctgccacatgaacttcctcctttcctagcagagcagcccggacttcctacttgacagctcagaggaggaagacagcgttgcccagtcttgttttcttctcacaagaaactgatgggcatgaagattgcagtgactgaactgtctccctgcgtttcttctcacataagcaggtctatgcttcagtttcttcatctgtaaaatggaggttgtaaaaatatcatctacccatagggttatggtgatgattaaattagttcttctatagaaagtgcctgcagcagtggttagcatgtggtaggcactttgtatgtgttatctgttatgtctg

SEQ ID NO: 328903 - DNA, 478 bp, Homo Sapiens
actcctctcccctttctctttctctctgtttttaaaataatctaaagaaagcacattttaccattgctgttgggaggaagcagaggcagatgggaaagcagagagaggagcgcgcttcctttcctccccgtgccgcccaccctggggagagacttttgcggggagggaaagcggagctgaggacagccacgtccgccctcccaaggctgtgcgttcctgagggccaggtcgggggcaggcatggaggggaggaaaggcgtccctcttggccctccccagagtggctttcctggcaccctggcctgggtgtctggttctgttttcttttcttccccttgtgtttccagtcacctaacttcccttcctcaggctcccccggcccaccctgctcagtgaccccacaggaagcttacacattttctcagaggcctttgtgctcccacctcttctaccctccccctcttctttcccattttaa

SEQ ID NO: 328904 - DNA, 366 bp, Homo Sapiens
  misc_feature (229)..(229): n is a, c, g, or t
  misc_feature (329)..(329): n is a, c, g, or t
cagggcagggctggcacctctcaacgtctgtggactgaatgaataaaccctcctcatccacccctatttatctccatcaccatttccccctctttcttgttcctggaaacggctgctgagtctccatcggccaaacttatcttccctgtgatttctttgacaattctccttttcccccagaacccaccctgggttgaccagagtctgggaagaatgacaagagaacccngcaaactccctcctaggattaactttgtaaagcacccttgccctgtagctgcaagggctgtggaacctgggcagcccgcaaccaccttttagctctgggncccccagggcagtcctggagcatggctgggttgggcc

SEQ ID NO: 328905 - DNA, 759 bp, Homo Sapiens
  misc_feature (691)..(691): n is a, c, g, or t
  misc_feature (717)..(717): n is a, c, g, or t
ttttcacttggctccctgtttaattccacctgagaaaaatctcagggtgagtgggagtgaaaaggagcatggaagacccagtcctcacattgtccccgagtctgggaacagttcagaacctcaagactctgggtcatttggtgccacatcaggtggctgggtcatgtagatggctgcttggtgttgggacagtttgtctaccctcttcctgaccccaaagctaccacttagatgttccttctctttcatttcatgattacagggttttgcaattttcagctttctctgcacaatgaacactcacaaggagacattcttatatgggctcatccctctctaatttacaggttttccctcagaatccactgacaaagcagatggggagatgaggatattgatcgcatactggcgtgattaacccaggttctacacagattcgactgtgaagcatgagatttcacaaaataactaggccaaaggaggctgcaggtacaggacagaactttagacttaagagatccatgttgagttgtggctggaggaccagacgattccagaaccctttagaatctgtttgtcaacccgatcatctttgccccatgttgtatggatcaaatgaaatggcatgtgatatggtttggctgagtccccatccagatctcggcttcaattgtatcgcacagaatttccnacgtgctgtgggagggacccaggganaggtaattgaatcatgggggtcagtctttccctgtgccgaat

SEQ ID NO: 328906 - DNA, 391 bp, Homo Sapiens
tgaaaattattaagaccctggagcatttttcaaaaataaactagagaggccttttccctctgatagtctattttacaactagtaaagcgcatcatacagaaacttcccaattccttagaagactacaaaggaataaaatatgacacaggtacagtattagatggatggaagtttgacagaagcataaaaactccacttcacactctgtacaaatttggtattgaccaggaggcagtttttcacttaagatctttgaaaccaagcagttgggtgaaaaattctaagataacatttcgaatgctttaatcaacagacatatacaaatgaattttaaaataaaaccaaggcatcaatgaagaagatctaacatgaaagtcaccctgtgccgaat

SEQ ID NO: 328907 - DNA, 457 bp, Homo Sapiens
ccgtgtaatgttatttggagtactttggcagaaaacttgggactgtcttaattgtaaaaacatatagctacattttactgtttttctcacttctcttgacagttgaaacttgtaactgctcccttcttgaaacttgcttggctcttgtgatgccacagcctcctactgcttgtctggcctttctggccatttctcagcaggttggttttcctcacctgccggttgaatgttttcagtcttgaagggactgttggagttctcttttcactcttccattccccctggacatcctcacggacttaactagtttgagcacctatgcagtgtcggttcccaggtgtgtaccttagctctggttccacctgcttgctgggcaacaccttccttggctgtcccatgggccccttggattccgcatgcccacagcagtccttgtttcttccccacgccgagccct

SEQ ID NO: 328908 - DNA, 341 bp, Homo Sapiens
  misc_feature (230)..(250): n is a, c, g, or t
tgtggattcctctgtaaaacttacatgttgccttctctttgtaaccttgcctgacagcccctcttccttaccaggtcctggggtagcgctgattgcttcctcctttgtatttttacagtacccttttcactcctttcttacaggtggatcatcttgttttgtaattgtcaacttgccttctacactgttagttcaagcttcttgcaatggggaactgagtctcatgcttnnnnnnnnnnnnnnnnnnnnnctctgcacctagagccatgttttatacgtggaggggagtggctcagaaatatttgttgattaaaaaaattaggctggaaacatcagctcat

SEQ ID NO: 328909 - DNA, 406 bp, Homo Sapiens
  misc_feature (396)..(396): n is a, c, g, or t
tttttaactctataaaggcaaattaactttttccagtgataaatggtagcagaggactggtgttacaacacttgtacttaattaggaatttatttcagtctgacaatatcaactacagtatgccttccagtaagtaaatgaggtctttatgttaaagtctgaccaaatcatggttagaatgcaaaacttactttttaatagtaggaagaaggataaagaccttaaactcaggacagatgaaacatggcttgatgaatttatacctcttatctgtcttctcaaagatctccataaaacaaatgtacagttaacacactgcaaggagttgtaggacagaacctacaatatccctacttccttatccttcctcttccaattacacaaaaacgaatactngaaagggttt

SEQ ID NO: 328910 - DNA, 424 bp, Homo Sapiens
  misc_feature (23)..(23): n is a, c, g, or t
  misc_feature (359)..(359): n is a, c, g, or t
ctatggggaatttggcccctcgngcccaagaattcggcacgagttttttattgagcaaaatgtttacatttatattgaaatatacacctaaaacagaatgagttcctacctagtcaatgaaactttgcccaaagcaaaatcacaaacttcccaatggggaggtcccagtcagctagcagcagtgatccccaagcaggaacaccaagaaacctgggggacccctctccaaaaagcctccttttcaagaggccctaactcacttctcccacatgcacccacacggatttaggagcttggacatgctcctcatttccatatatttttagtttcttcttcactgcaataaatataaagttggncaatgctcatacaccacagcacagacaatatttcagggctttagcatacaattgtaaacagtgaa

SEQ ID NO: 328911 - DNA, 148 bp, Homo Sapiens
gtgatctctcagtaaacaccagccacaaaataagactcccctaccacctacacacaccaaaaatacaatcctcagaaaagcatgatcacatggtgcaattagagaagatttcagccccacggttttggattctattttctggataaat

SEQ ID NO: 328912 - DNA, 640 bp, Homo Sapiens
  misc_feature (18)..(18): n is a, c, g, or t
  misc_feature (31)..(31): n is a, c, g, or t
  misc_feature (571)..(571): n is a, c, g, or t
  misc_feature (586)..(586): n is a, c, g, or t
  misc_feature (595)..(595): n is a, c, g, or t
  misc_feature (608)..(608): n is a, c, g, or t
  misc_feature (628)..(628): n is a, c, g, or t
ccggtccccaagaaaagnaaatacagtcccngagggttattgccagattaaccagaaagacaccccaaccggaccccatgtcccccggcaattaaaacctacctccaacccttttggaaagttatccaaaatcctaaatttgggaatgaatgcatttcctattttttgtctacttttgggtgataaaaagtactagccccttatttatagatatgagaaacataatgttctaaccaacaacattatggtatttgtgtgacttttatttgaaaaaatgtgagcagtaatttgggttagcctaccttcattaattctatcacatagatttcagtttttagaagggtttctgtcatcatggaagaggtggtctgggactaggtacttctcgtcttgtgagctaaggcttgtgtcatgaaagacaagaggcctctcttaacagcccagtccttgtctgcagggggaggcctgagcatttcccagccccagtgtccacacctctcagaaaagaggaaaaaggaatgttcagtttagggagaaaagcttccttttttacttgtgtgggttatgtgtnggggctgggcacccngaaaatgtnttgacattcagcnttctaaacgatggccggggngagtctgtttgc

SEQ ID NO: 328913 - DNA, 795 bp, Homo Sapiens
  misc_feature (549)..(549): n is a, c, g, or t
  misc_feature (590)..(590): n is a, c, g, or t
  misc_feature (661)..(661): n is a, c, g, or t
aaagacagggtttccctctgtgtaatcacaaaggcacagtcacagctgatttgcagcctttacctcctgggctcaagtgaatttcccacctcagcctcctgagtagctggaactacaggtgtacaccaccacatccagctgatttttaattttttgtagagaggagatctcactatgttgcataggcttgtcttgaactgctgtgctcaagcgatcttcctgctttgatctcccaacgtgttgggattacaggcatgagcaccacacctggccctatttgccttttatgaagtcttttaataaagcaataaaaatattgaaatgtttttagaagcttctgcacatcaataggcatccttgaagactaattgaggacccctcatttttaagtgctgtgttgttcattaggaacggtccattgtaattttaagttacaaagattttgccatttctgtaagtagttatttcttctgaggcctaatatttatacattctaccttatagctagaaggtagaatacggtgttcttcagatactcaggatccaatntttccctagaatcctggatttggtcctcagatccccttcancaatttagttaatgatttttccctacctaagggtacaagaaaaagaatgtagaacacaaaaatctctgcanatttctgaagtctgcacccactgtaatattaccatttctgctagtttctgcctgatcctggacatctgcagcctcttaactgaatccaagtcagttaattatcagatccaatccaatcatggatccagtccagt

SEQ ID NO: 328914 - DNA, 493 bp, Homo Sapiens
  misc_feature (479)..(479): n is a, c, g, or t
ggcaatattagcctcattttacagatgtctgagaagatgagcattaatcaaaataataacttttgtagaccttgtcaggcaccttttagagaaactactaaaaacgtaccaacttgttttaataagaaaatctagagattttcatttctaaagccttagaataaaattatggaaaatattatcaaatcatctttgacaatgcataaagtttaaaaaaagaattttttcatatggaaacatactgttattttaggatgtagtgactgagtttgatacctcctttgtgaggtttgtttggtggagaaatgtgagaggaggttgtattgacccctaaggttttcccatgcaagagtaagacagtgatagtcctcttcaagaagaaaagggctttcttctttataatatctgtggggcaaaagaagaattcccacacattcattggattaaggtaacatgggcgtcaaacatgtaattctgcngtttttgtgttggt

SEQ ID NO: 328915 - DNA, 468 bp, Homo Sapiens
  misc_feature (29)..(29): n is a, c, g, or t
  misc_feature (45)..(45): n is a, c, g, or t
gtatcactacctgtgcccacccatacacnttttccatatagacanatcctacgtcaagtgtaagtttttcccaagaattcgaaaagtgattacggatctgaaactttcttcctcaaaactccacatttttgactttaaacagtccctgtcactgttcgctccttgcaacgagcagttctcccagacagacaaagttccttctgaaagtggctccggaaacttaagtaatcggttgaaggctgagggaaatctaaaatcaagtttttctcctcgtggtgttttaaggcagaggagatatcattaaggtccaagagatcaaactgcagatcccacgctggttcttctgggaggtcggagaagacatggatcgcagtgagagagaggcccttggagtcagcaaacacaacgcgcttcttggcttggttgtgtgagcacttccagtcattctgtgatttggctatgtgttta

SEQ ID NO: 328916 - DNA, 278 bp, Homo Sapiens
  misc_feature (172)..(172): n is a, c, g, or t
  misc_feature (176)..(176): n is a, c, g, or t
  misc_feature (197)..(197): n is a, c, g, or t
  misc_feature (238)..(238): n is a, c, g, or t
tcacattgctattttaattctgcacttttcttctattagggaggttgaatagctttccaaatctttcttagtcttttgtatttcctctttcgtgaattgtttgtaaccccagtgctagtgatctattcactcaactctctcctgagggctttgcttttagtgtatccctcangtcngctagggtagagagaattggnatatttggagccatctatagggtgtttatagaagacatggntaatacacacaacataaatcaaaatatgaaacactcccaa

SEQ ID NO: 328917 - DNA, 391 bp, Homo Sapiens
  misc_feature (11)..(11): n is a, c, g, or t
  misc_feature (39)..(39): n is a, c, g, or t
  misc_feature (46)..(46): n is a, c, g, or t
  misc_feature (88)..(88): n is a, c, g, or t
  misc_feature (346)..(346): n is a, c, g, or t
  misc_feature (354)..(354): n is a, c, g, or t
aggctgagccncctgcactggggattggggccccaccgnggaattnccccctgcctcatagggaaaagacaagacagaaaacggatgntgggagggctgatgaccccttcccaaatggctattccctgatgttcccctggcaatgagcagcctatgaaagggacaggttcacatgcgactacacccatgacttttgctgtgccccagtgtaacaggaggttatagacaacagttttatttgcatatataacctttgcttggcttattaacatattgctgatttaaattctgatacattgtcaaagtagaaagctgttcgggtttttggcaagcccagtataaaaantgcaggcntgcaacaaataggtagtgaatattcacatttaaatac

SEQ ID NO: 328918 - DNA, 431 bp, Homo Sapiens
  misc_feature (309)..(309): n is a, c, g, or t
  misc_feature (381)..(381): n is a, c, g, or t
tcaacactgaatgaagtttattgaagagaaacacgtactgaaaccgttgaagagaagggaatcacaacacagagagaaactgcaaacggccaccacaggacacaggtcccacacaggtcccgggccccctcctcctgaggttcctggcaagacgcctcatctgctcctactcctgctgcagcccccgctgccaactccctccttcctgagggccccggggtctgcctcttgccaggaaggtagactctggcagtgtccactggctttagggagccccctcccaagcccatctgctggggcagggcctgncctaatgggcccgcacagggacagtcacaggacaattggaaaacacagcagggggacacccttaccagggtnaagggaaacttgagttcttgagttaacaacaggggttgggacaccaaagg

SEQ ID NO: 328919 - DNA, 464 bp, Homo Sapiens
  misc_feature (117)..(161): n is a, c, g, or t
caacttttcatagaagttggttgtaacttgtaaacatgtttttaaattaagaattaagataaagtgtagtacccgttccgttacaaagtgccaagacttctaatgtggttggttgcnnnnnnnnnnnnnnnnnnnnnnnnnnnnnnnnnnnnnnnnnnnnnctagtttgttttattgcttttgtgacattggaatttgtggattttactattatgacaaccattttaccgatgaaaaaactaaggcttaacggtgttatacaatttatttgagttcgtgcgtatttttaaaaaataggctaacaaggttttcttccaaaatgatatccaatgctctttcaggctcacccactgtcccatgcagaaatcgtaaccaccttcaacagtatgttcttagaaatgaaagtgtgatagtgcacaaggcatatacccagattgaacatgggtaacagacacagattaatc

SEQ ID NO: 328920 - DNA, 388 bp, Homo Sapiens
gacggactaattttttggatttgagtgtctatgtcgactggtcagaggaagaagagtcagaaaaacagcctgagcttcggtttaaaaactgtacagttttcacaacagtgccagtctgatgtatgctcaccgcagaacatgcagcatggcctgtgcttccttcctctccggggcacacctgctattcctcaatgactctctactaagggccaccccccaacctgcccccgaccaccgacctctgtcctcccaagttgcctgtgcggcactttagtaggccaaacaagctgagaagtcacgtggctttggtgtcataattctgtgtgtgaacttcattttttgttgctgtttattatatgcttttatttgtatttgccagggcaatact

SEQ ID NO: 328921 - DNA, 287 bp, Homo Sapiens
tttcctttgcagcaagtccttaaaatcaggtacacagtgtgggtcttcccagctttattcttttatagaattgtttgagtatttaaggttctttgaccttccataaaaatgttagaatcagcttgtccatatctccaaaaaactcttgccaacattttggttggaattgatattaaattttagatcagactggggagcattgactgtatatgtagcatcttagcaatataaagttgccaacacatgaacatattatgtctctccaactacttaggtctttgattaag

SEQ ID NO: 328922 - DNA, 161 bp, Homo Sapiens
accagccactgtgctcaccctggcattctgtatggggctacagacagagttagattttctgctatgtccaccccatcagagcaaagatgacacgcacgttctcagcagtccctgtgtcccccatgcccgggttgaccctcttcagtctctgcaccacttcc

SEQ ID NO: 328923 - DNA, 464 bp, Homo Sapiens
tatgtaacacataacataaaaaatatattaatcccactgttaccagtaaggagtctggtgaataacagttaaagttttggggagtaaaaactgtttccaatttttgacctgtgttgggggttggtgcttcctaatccctgtgttgttaaagggtcgactatattgtatttttgaaaattgctagagagtggacgtaaagtgttctcactaaacaaattataactatgtgaggtagtgcatatattaagtagctagatttggtcattccacaatgtatatgtacttcaaaacatcatgttgtacatgagaaacacagttttatctgttagtcagttttaaaaataaaaaatattccaactagaaactctgttgtagtttttgaaattacaacttggaggctttgaggaactgattagaagtctcctttctgtttcaggctttcatatccaaaccatagatcttta

SEQ ID NO: 328924 - DNA, 865 bp, Homo Sapiens
ttttttaaattatggtcaatcaacttttatttttaattacccaagtgtgtactgtcctttgtatgaagatacaatggaggatacaaaaggaagaagagataaaatttctaccatcaaaaaagttaaaatcagctggagacacaccgcacaaaacagtaagacttaaggctatatactgagtagcatttgagaagtgtaagacaacttagcacagagtaaacccacacaacgggacaccatcggtaactatgacagggagtgaaggaggataattggggaaaacatccaaagaggtgggaaaagcgttggatttgtgttctagtcccccagataccagtggcttattgtggctcttaggtaattaagttccacctctgtggggcttcagtttgctcaactctaaaacagaaggtgaggactaaatggtctttactgtctttcagctgtaacaatacagtattctaaggacgaatgcaaagaactagggaaggtgaggatattacaggtaagaggaagaacaagcacaaagccataatggtaggaaaaaattccattcttgtgcatgggccaggtgtgttgtggggcagcaagaaccttaaacaagccaatttaactattctaaagattttgagggcaataaactgggaaacggtgaaacagaacgctaagccagtaagggacactaagccagggccacaacggagaagagatccctgtatttaacgtccggtttggattattcctcctgcttcccggctaattcaaactattggtctcatggaactttactgcattcctttcccaacctctttcccaattccggtagaagaagatgtgatttaagacacctcttccttgagctctc

SEQ ID NO: 328925 - DNA, 392 bp, Homo Sapiens
tagttttaaatacacgtttactatgccttgtatgtacacagcacactctatcaccttggaagctacaagctgggtatcattaaatgctgaagggtaataaagggaacatcttagtggtcttatctctacttgggtatatttttggaaacaatacttgtgatgtttctattactgcctatggctcctatgtaactgaaacaattaatgatctactgatttaaaaaaggcagttaaatctagagcattagttgccttgtgcagactcccatgacagccatgtcctagaataatgggacactctgggaaatggggctaggatgttgaggcagcagcctcccaaatcacagtatggcataaaagcccaaacaggtgacagggctcagtaagggagg

SEQ ID NO: 328926 - DNA, 470 bp, Homo Sapiens
  misc_feature (280)..(280): n is a, c, g, or t
  misc_feature (402)..(402): n is a, c, g, or t
  misc_feature (420)..(420): n is a, c, g, or t
  misc_feature (447)..(447): n is a, c, g, or t
  misc_feature (458)..(458): n is a, c, g, or t
attatttaaattatttcgatggaattttaagttgtcaaaaatgttctttaactgaatctagcaaatctttattgagtaccccttgtatattgaaaagtggggtgtacaaaaattaatgataagcagtcttaatagcaggcaactaattataatacaatatgattggtgctgctatggaaagaagggctctagtattttgtttacatatactggaaaataaaaatgcttgaggaataaatgcttgagggaataaaaatggaagaagaaaacatgtattacnggaaagagcaatgaacaatgggcaccatgttttaaatgtaccatgatgttgggggggaatgacctaacatatgtaggggtatacggtaaggcatgggtccaaaagcctggcctagggaaacngggttggatgatgggggnctttaggtgcctacgggaccttccttntggaaccggtntccggtagcctc

SEQ ID NO: 328927 - DNA, 355 bp, Homo Sapiens
  misc_feature (287)..(287): n is a, c, g, or t
  misc_feature (330)..(330): n is a, c, g, or t
attacatcttttatgccacacaaaaataatcatatggaacagccccatccccaagacactgactcggtcctcagacctatgggcttcctatgacccacctctcaccagtctctcagaagtacatcagtatttcttttacctgattgattacatatgagttctctgatgagatccttctaaggatggaagagatgagctctttctaaagatgaacggaactaccctgagctcaggtaatataacgaaataaaagaaaacaagatccagtggaactaagagaaacaggnatgcaatcaagccacatgcagctgggtcaaagcacacctcatntcagggggaaatcccccacggtggg

SEQ ID NO: 328928 - DNA, 512 bp, Homo Sapiens
tatttttgtggctttatttctaggctttttttcttaagatatacaaatacctatgcttacatattacagatatttttacaaaattgggatcacactgtactatatatgtttctttgtgatgtgctttttctactttagtttcccatcactgaactctacaagactccattttcaacaataaaaagttggttctataattccttcttcagaggttgccgtgagtggccatgactgcaacagatgctgggagcacctgggaggccggctgtcatgctgttgggagaggacactccaacagccacagcactgatcctgggcctgccatccctggtttcagcctttgtaaccgtttcaggggccagcatgtgggggactcaggatgggggctcaactctgaatgagttaggggggaaatgaatcagcaaaaggaagccctgtgcccagtcctggtgctggtccagcaatgggaatgtggaatggggaggccagttgggacaggagccacacagtcc

SEQ ID NO: 328929 - DNA, 351 bp, Homo Sapiens
  misc_feature (234)..(234): n is a, c, g, or t
  misc_feature (239)..(239): n is a, c, g, or t
  misc_feature (280)..(280): n is a, c, g, or t
caaatgcctctttcaaagtgttttagaactattccttgctaagacagtcttagctggtcaatgtgcacccatattactttagagaaaaataagacatcagtataaaaaacctataaacccaaagaccaggggaatattcccacatccataattgagtgcagcttagtaccattttgaggatgagagaaagagactatatactggaagcttcagagccttctcaaattttccagngactnttatgcaagaaagctaggcattttccaaaaatcaaaggctntttgccattcattttctaaaattccaaatggtccacttctgattaaagttcaccctttacaatggggacat

SEQ ID NO: 328930 - DNA, 359 bp, Homo Sapiens
tttaacaaccttaaaaatgtaaagacaattcttagctatgggccaaacaggtcttaatttgacccgtgggccttactttgcaaacctctgaaaagccttgatatcagaaacctatatgcctataaataactataatacaagggagatatattaatgctatgtacgaaataatgaaattggtggatatgtagaatatggttcttttccagtgttcctttgctcagcaacggtatcattatccataaagctatgaagctggaaaccgttgagtcatcctcaacatgactctctccctttctctcatgcattatattgaatctatcatcaagttccatccattttacttcctaaacgttttt

SEQ ID NO: 328931 - DNA, 566 bp, Homo Sapiens
  misc_feature (551)..(551): n is a, c, g, or t
ttaagtgtaacattaactttacttattaatatgcaattacagattatcttctaaagcaatgcataaacaagtgggccttcttgcttaatatctcttttttctcccttcacttcacttgggacgtttagtataagttgcagtagcaatcgcagggaatttctaccttgagcaccagtttcaccaagctctccagtccttggctgtggtcaggagggtctgcttcgttcacgcactgtctgtttggtagtgtgcagagatggttttcttttgcacctttaggggtccatctgggagtaaaaggggaagggaaacaattccttgtctgaatcagagggagcccttgctttaagggactgcccgagccagtggctttaggcacatcgattaagggcatgctctggtcctgaagttttgtccctcaggcctccacaggaaccacattttgggggctaagggactcccaaggccttggggggactcactgagggggaacatgtcctgttacggttttccatttcctccccattcctttcttttgaggtttttccctngttctgccttctggg

SEQ ID NO: 328932 - DNA, 416 bp, Homo Sapiens
  misc_feature (233)..(233): n is a, c, g, or t
  misc_feature (304)..(304): n is a, c, g, or t
  misc_feature (322)..(322): n is a, c, g, or t
ttaaatttcaaatttttataagattactcctggccagtcaggtaaagatggaaaacgttcacatttcgaacaactttctcttgaaaagaaataaacgtggggatttgtagtaataaccaaacgaacatcaaagttaatagggctgacacttaggaatgtttgaaatgtttggtaggtttccttatgtttactttttctatgaaggtttggtagggcaaatgggctgccttccngactgtcaataaagctttcatgtcgtggggttagtaggtagctggcccaggccaaggttctgtgttggggncagtttttactctattcntacacaactgggcagggggaccagggaaagttttaaccagttccatttatttgggcacagtggggccccccagtcaccagtgggagggttttgt

SEQ ID NO: 328933 - DNA, 490 bp, Homo Sapiens
  misc_feature (63)..(75): n is a, c, g, or t
  misc_feature (326)..(327): n is a, c, g, or t
  misc_feature (404)..(404): n is a, c, g, or t
  misc_feature (424)..(424): n is a, c, g, or t
  misc_feature (454)..(454): n is a, c, g, or t
cttattttatttataatgaaatacgaccacaaggttacatagtagtaaattcacagtagtgannnnnnnnnnnnncagtaacaaatccgtaaatcacaaacactacccagaaatacttaaatcactttacaatcgcagggtctctgctgcaggactatttaaataaatatgctaacatttctgtgctactgtaagtaaggcttccagggtagtgaagtttgagcagtaattttcttagagcttgacctttgtttgtttgtttcttgctgttttcagagtccctaaagcaagaaagagtttaatggacttgcctgcaggacagcagnntccccagaaagacagtgctgtgctaaaagacatttactctagccgggagaagccagtttcagtgaggggaaagggantaaagcaggggagggaaaantcactggtttaggagcgacctctcaaaacncagggttattaagtcatctctcaaacacaggggtct

SEQ ID NO: 328934 - DNA, 400 bp, Homo Sapiens
  misc_feature (366)..(366): n is a, c, g, or t
attttatatttatattaattttttagagatggggtcttgctgtgtggcccggactggtttcgagctcctggcctcaagctaccctcccacgtcggctacccagtgactgggattacaggtgcgatccactgcgcccagcccaacaacaattcttttctaattaaacaataaaaaatatctcacagtgacagttcagtcagccctgcactgtggtaaaggtaaaggtaaaggagagagtagtacatctccatttctcagctagagaaactgaggctcaaagggaaaagtcggtcatctgaggttgcccggcagctcagcagcagcaaagcaaggactccagcccaggctaggcagatcccatccggncctccaacaggtgtcccggggcttaagggtggcc

SEQ ID NO: 328935 - DNA, 445 bp, Homo Sapiens
  misc_feature (399)..(399): n is a, c, g, or t
  misc_feature (405)..(405): n is a, c, g, or t
  misc_feature (413)..(413): n is a, c, g, or t
tatgattttagcttttggtttgagttttaaattactaccaaatcatgaaagatcagagctgcagggcctttagggagtctaaggcagggctctaaatggaagtagttgggcctaattcaccatgtcttgtgagaccaagcacagatctaaaataattttgacttctgaatacctttgaaaagaacacaccctatcccattcctccaggtagccaccattcttggacttataccaagcagccttgctacaaaacacttctgagtttgctaagatccaagagaccagaccttctcatgacaccactgctgtcttcttgtcttcctctctgtgcagccaccttaggcaaggctcagtctcaggtcttgcctccagtcaccatccaaaattaaccaccacctncccttnacccccanacaataacctagggtgctcagggaaagggcct

SEQ ID NO: 328936 - DNA, 426 bp, Homo Sapiens
ttttttctagagaacatacatgagtttagaaaataaacaaaccagacagacagatttacatttggcaaaatgatgtgaaacacaaatggacagatggaagccaggccaggagcgggaaggcagggagtgaagcagcccctgggccccagcagctccagtccaggcctaactggcaggaggctggccccgtggtcaacgctccctcctccacgctcaggcaggaagggggtcttccctgggcctgcgcaggagaagcaggggaactgatactgcctcttttggtctcactgaaaatgaagaggcctggggcagtgtctttaggaacaaactaaatagaaaatgacttcaagaaagccctttgaagggcttggagaaagtatctctagagaattccagcttcccctgccacaagcttgtgtggggcca

SEQ ID NO: 328937 - DNA, 461 bp, Homo Sapiens
  misc_feature (352)..(366): n is a, c, g, or t
  misc_feature (378)..(378): n is a, c, g, or t
  misc_feature (413)..(413): n is a, c, g, or t
  misc_feature (429)..(429): n is a, c, g, or t
  misc_feature (442)..(442): n is a, c, g, or t
cacttcctttaccagctgttttgtatttcattttgtacatgaacatagtttatttacacgtttgcccataaatagaaatctgggctatttactctgaccaaggagcacacaaagagatgaaagatgacgtcagtgttctattagtggagtaacagattggatttatgattgctcattgcaacttctttagaaatgatcaaatcaaataaaagagtgtcagcataaaccaatgatgatgtttcatgaaggcagagatcatggattaatccaattagggttcattaggaaaaagttctaggaatataacctaaggggtattttctaggtattgccccatggggactttctttcnnnnnnnnnnnnnnngccttgaggacngggtctcactctgttgcccggggtaggaccccccngtggctcgggggtccncccacctcggccncccgagtagccaggggcta

SEQ ID NO: 328938 - DNA, 120 bp, Homo Sapiens
cccatggtcacgcatccacacaaatgagtcttttggatgagaaaagtcacagcaacttgagttctcctaatgaacagatgactttttagccctgtttgtttcaatggggacaacaatgac

SEQ ID NO: 328939 - DNA, 448 bp, Homo Sapiens
  misc_feature (251)..(251): n is a, c, g, or t
  misc_feature (268)..(320): n is a, c, g, or t
  misc_feature (384)..(384): n is a, c, g, or t
  misc_feature (395)..(395): n is a, c, g, or t
  misc_feature (411)..(411): n is a, c, g, or t
tccccaacttttaatttatcaaagagtttcctttaaaccttctctcttaagactttcattgctcaagttttacaaaagacataaggtcagcagttttgaataatataaatactccaaaatcaatgtctactgctaaatgcagaaaattctccttggttaaagttttacaaacatttcaagtcttaaaaattaggatctatgttttaaatattactttgagttaatacagatgtccaaattaatcataaganatatgctgggtcctcgnnnnnnnnnnnnnnnnnnnnnnnnnnnnnnnnnnnnnnnnnnnnnnnnnnnnntaatcccaggctactcggggagggctgagggcagggagaaggcactcggaaccgggggagggtnggagggttgcnggtgaggccgaggatncgtggccactgcatggccagcccggggtgacagagca

SEQ ID NO: 328940 - DNA, 403 bp, Homo Sapiens
  misc_feature (289)..(289): n is a, c, g, or t
  misc_feature (375)..(375): n is a, c, g, or t
taaaattaacagccctttctgctgagtatttgttacttaacaatcttcatgtcttctgcatgtttcacttactcaaacatttactgggggctttggagagccagagatgctggggaagatacaagatgccgaaagggaaagacacagtcccatgtcaaaggcactcccactccaacttgggaaagacacacacatacaccagtgggatttatgatcatgtggtaagcactagatgatggaatgcacagagcacatttaaactgggccacgtgggctgagcaagagtttntcagatgggaagggacagggcccagctactagaggaagaccaccttataggccatccaagggaacggggatcatgtgacgtggctnctgcataggggagggagggcagggcagg

SEQ ID NO: 328941 - DNA, 527 bp, Homo Sapiens
tttaactttttttatggttatatttgaaaatgagagtgatacaggcttcattatcaatgataaggtagaaatttcttctagaaagggtactgtgttgtcacaatatcctggatcagcctccactggtagaggaactcacaggaaatcatccacccagattgggcctagatttacttccatggcactttgatgttcccttcatgtgctccagaattaaacaaagatatcccagacaacctgcagggaattcattgaacgtacaaaagacacatggatatatcagtcacactcacaggagagtgagggaacacttaggttgtattgactatttctttcctgtctcagagaagagacatgggtaagaaaaagactcaaataattgaaccaaccctttattacatactttgctaccaataagtctatacatatcccatggatacagattctatctctgtgacttaccatgacacatgacacacagaattattaagtaggttgataaagtgtgttatggaagcatgaatgtc

SEQ ID NO: 328942 - DNA, 315 bp, Homo Sapiens
catcccttattaagtcaagaactttcaccttcaagcaatttacagcttctctttggcatatccaaatagctgtcattgctacttttggacttagggactgtcattaagtaaaataagggttacttaaaactcaagcattgccctgccccatagtcagtctgacaatctgataactgagatggctactaagtgacaaatggctggtagtttatacaggtgaatacattagacggaggggagattcactacccggtcaggtgagatttcatcaggctactcagaatggcgcacagtttaaaacattgttgtggctca

SEQ ID NO: 328943 - DNA, 312 bp, Homo Sapiens
tcgaggacttaataatttgttgcaagtcacatatccctggaggtgcagcccaggtgatttcagagtgtgtgatcttaaaacgctaggctaggctgtctccccatttacagaggtatgaacctggactactgtccatgtgttcttcccacagcaacatgccaaggtagaaagaggactggactaggttcaattgatctgggttctaatcctaatgttttctctgtgcatttttgagcaaattaatcactctaggactcaccttccttatttgtaaactaaattcatcactctagaactcactttccttatttg

SEQ ID NO: 328944 - DNA, 500 bp, Homo Sapiens
  misc_feature (455)..(455): n is a, c, g, or t
  misc_feature (463)..(463): n is a, c, g, or t
  misc_feature (471)..(471): n is a, c, g, or t
  misc_feature (485)..(485): n is a, c, g, or t
ggtggttggttttccatccttttgcttggcaggtttctgctaatagcttcaacctcaagagtcccattatacagacactaatagcacctactatgtgtcagtctgtagtgcctactatgggccaggcattggagataatataatgatgaacaagataaacatgacatttggaaaagagagtctggttcccactctcagcccaccccaaagagaggccagaattgggcttccaaagaaatcagatgcccttgcatcacctccctgaagaggacgggtgaagctttgggtgtctgcagagaatttgggctgggacaatccccctgttttgggaacgatggggaaggagctgccatctgtgtttaagatgagaagtggggggagtgggctgggatatcagcagaagccaagttgaaggagaaggtttttgtgagttcccatgcatagtgggagacctnttctagtnagggtccngggggctgagcctntggggtcagtgggaa

SEQ ID NO: 328945 - DNA, 392 bp, Homo Sapiens
  misc_feature (12)..(12): n is a, c, g, or t
  misc_feature (110)..(110): n is a, c, g, or t
gggaatgctccnaaactgcctctgaaaaataacctactaccacttttctttcccccaccaaacatcccaagcgcccgcgggtggttttccgcatgggcccctcccagttntgtccccggggacagcatgcaagctggccatcaccggcggcaatgaggagggctttttcaccacccggaaggtgagcccccaaagtggggtggtggccctcaccaagcctgtccccgagcccagggacttgctcctgaccgtcaagatggatctctctcgccacggcaccgtcagctcctttgtggccaagcttttcatctttgtgtctgcagagctctgagcaactcttccgtcgcggggtctccctcctgttgctttcctaaacactctctccggggcgt

SEQ ID NO: 328946 - DNA, 528 bp, Homo Sapiens
gacaccatttcctccctaaaatcacaggttaattttctgcaaaagagagcttccatccttcaggaagaactgactacatatcaaggcagaaggtaactgcacgagagaatgcaacggatgcaatttccaggctgtgctgtggacttcttccagcaggtttgaagatttggatattgtaaactgtgagatcagtggcattttttaaatccttaaatgtaattaagatcataaaaacatgcatcattcatacactagtggggtggttttatttgtgtctgcctaagttatttttttaacattcctttatttccgattttcatgtttgtgtgcatttgagtatgtgctgagaactgcttatattgggcaaagtgatttcctatgatatgtcttgttaatccttttgcatagaattttaccagttgcgtacgatcaaaatcacgtttgtagtatcatatcaaaaattctaacctgtttacattgttttcatgttcatgttcctatgttattaaaatattattttgtaaaaaa

SEQ ID NO: 328947 - DNA, 382 bp, Homo Sapiens
  misc_feature (295)..(295): n is a, c, g, or t
  misc_feature (326)..(326): n is a, c, g, or t
  misc_feature (341)..(341): n is a, c, g, or t
  misc_feature (346)..(346): n is a, c, g, or t
  misc_feature (362)..(362): n is a, c, g, or t
aggtaataaaacgtttattgagtaaatgtttatttagtaacagcaacacatagtttctcaagaagaggatgaactgaaaactcctctaaggcaggacgaagcaactttccattattcttagtttagaccagaatctttaattttatattctcctttaataactgtcaaaatacaccaaatacttagaggaaaatattcacagtataccaaaacattttaagataaagagcagtgtaagagtagtattctctacataccacaggtatacaatgatgccttcctgcaggtttagganctattactacttcaaaattttaatacatttntggcaaaatggttgnggaanttggaatacccggcanccttttcccgtttggctttc

SEQ ID NO: 328948 - DNA, 554 bp, Homo Sapiens
  misc_feature (289)..(289): n is a, c, g, or t
gtatctgtttcatccaattttattctttttcataaaagcaatgcagtaaagataaaactaaatgtggaccctgggaacaaggagtccagaggttgcccaaagagtcgcaaagtgcatcaggaaacctgaatgtgaagatcggtgaccgagagcctgatgccagcctcctcttgggtcttgactgaaatcttcccaggttgctattggattttgcatgtacgagcctccatcagaggatagacttaggcatatggtttgcccagtgaattgaagaatctcccagaaggtntttttttaaaaattttgggaattgaagagtgggatgaatacaatacacagagcaccgaagcaaacacatcagaatcgaggcaactcccctgggagaaaaaatggaaaccttgagctgaatagttcaaaacaggttgtcacaaactgggcatcttggggaccttttacccccaagaactggaatctggaaagatctctgcctgtttaccatgatttatttttcctgggaggtataaattcccagtgccctcccctctatcgtactg

SEQ ID NO: 328949 - DNA, 417 bp, Homo Sapiens
  misc_feature (126)..(136): n is a, c, g, or t
catgcttggcctagacacttttcaaaatgaactcataatcaagggttgacagacttttctggaaagagcaagttattaaattgtttaggctttgagtgcagtcatatgttcttgtcatatgttctnnnnnnnnnnnaaacaatcttttacaaatgtaaaaatcattcttagctttctagctattaataaatagctgaagtgtggggccatagtttgctgacccttgatagatatctgtgtcatctatttgtaggattagatttttcagtggtgtgtgtatgttcgtatgttctattttgccttaatgaacagtgctggaaacacttggggaacacttaaagtatccttatctcttactttctctgatatgtatatttagtccttaaacagcttaagctttccctctgaaagtaaggt

SEQ ID NO: 328950 - DNA, 424 bp, Homo Sapiens
taaatcttttatgtatttattatgtttgttgcatcgagtggcataattgtttgaatacaaaactaaagaaattcagggaatttctccctaacatgcactgtaatagttaaaacacatacagacaactgcagattatgttagaatacaagattgttatttgctatttaccacaattgcaaaatcaacttgtcaaggaaagacaattagggtccttcaaatatcttgatgtttatgtgtttgatagctgtaatatacatgtaaattgtgggagtatgacatacaaaaaattattgctttaaatatcattattgctagccccaaaaagggttgccaaaacataggctaaggtgtatgtttttttcacatagcaggcatttgctcccattccttttcctcaataaacaataggataaaggtctaaagc

SEQ ID NO: 328951 - DNA, 404 bp, Homo Sapiens
  misc_feature (208)..(208): n is a, c, g, or t
  misc_feature (231)..(231): n is a, c, g, or t
  misc_feature (321)..(321): n is a, c, g, or t
  misc_feature (341)..(341): n is a, c, g, or t
  misc_feature (357)..(357): n is a, c, g, or t
  misc_feature (363)..(363): n is a, c, g, or t
ttttgaggaggagaaggaagaaaggatgggataaaaagctgagcaagaggagaaaacagcaaaaaaatttactatttacatcttaagtgctcttataaaagtaataggttattttcagaatataaaagttgaaaatgtattatgagcagcttgatgtactcatgaaattatcatatttgaaacattcagaaatgtcaaggttcaaggnaaaacaaaaaatttcagaagggnaataaaatctcttcccattgttaattccttcctgcccctcaacagcacacagttagtttcgtagggcttcagtcatgccgggcctttggnaggttctaacatttctgccnggggacagaggtgggnccaggncaaatactttcagtcccggctcatgtggcccctggtctctc

SEQ ID NO: 328952 - DNA, 448 bp, Homo Sapiens
tttagtcagaatcagactttatttaacaatctgaaaatgtgttcttccggctttaagtcttgcaaaatgggtcgtaagtcaaagacagatttgttcactatcctctgagtgtgtgtggttatgtctctgtataggcaagtgtctgtgtctatagatacttttgctttttatagtgattaaagctccactttagttaatgtataaagtcttattctaataatgctaaaaccagaattaaatattccctgagtctaatgttctcttctccccagcctgcctccctccatccctcccgtaaggctgctcctccgcctccattaatgccaggtctttagacagcaccagcattcctactgagaacccagggatggatgctggctcttatatccctctgacctataccctctggttgaagagcttctctggcgaggtttggggcaggaggagt

SEQ ID NO: 328953 - DNA, 444 bp, Homo Sapiens
catagctccttctatgaccttgagcccctcctttccctgcacagtagagaggggttggacttttattggattgtgtttgtattgtaattgtgtgtttttccagatgtgttttctagccacaggaagagatactcaaataagtctttcaacagtatctattatgctgacattcacacttgtttgtgttattttgtacgttttggaagccttctgtagttaagtattagttgagctaattccttactgtttttgtgtcatactttgttatggagcaacgtaatatgtgtatgttgttaactgaatcgatagaaatctaagaatcaacttggtctatatcatctgatgattcaggggctggtttggatcattgataaagtaaattattccctgttttacttaactccttagtggcagttttctagattcccattattggcttgcatc

SEQ ID NO: 328954 - DNA, 388 bp, Homo Sapiens
  misc_feature (258)..(258): n is a, c, g, or t
  misc_feature (369)..(369): n is a, c, g, or t
tactgcagaaatctagatgaaggatggtggcttggattaggatgagaggtgaacacaggaaaaagtagtaggtaaagccaacagagtatcctgacagttggatatgtggtgtaagggaaccagagtagaaaaaggatcacttcaactggaagatgttgccaccaaaagatagttttcaacctactttcttattaccttatgttccaaacatcttctattttttcaaattattaagcacttttgtagctgatatataanataccgaaataccagcctcaagcagtttagtttccaaatcttcaggataagagctatcttacggtaaactccacctagggagaagaggatgagtgttttaacttcaggatnggcccctgggttacggtaa

SEQ ID NO: 328955 - DNA, 470 bp, Homo Sapiens
  misc_feature (28)..(28): n is a, c, g, or t
  misc_feature (40)..(40): n is a, c, g, or t
  misc_feature (49)..(49): n is a, c, g, or t
  misc_feature (70)..(70): n is a, c, g, or t
  misc_feature (98)..(98): n is a, c, g, or t
  misc_feature (113)..(113): n is a, c, g, or t
  misc_feature (122)..(122): n is a, c, g, or t
aaaaaactgactccttgaaaagaaaacnaacaaatataanggataatgntactatggccaagggtccccnaaaaccccaggctgcagatcagtactgnaggtgaaatggtggncaatcgaancaattactgcctgaactctgcctcctgtcagatcaggagcagcaggcatccagattctcataggagcacaaatggtattgtgaactgcacatgcaagggatccaggttgtgcactccttatgagaatctaatgcttgacgatctgagatggaacagtttcatctcaaaaccgtccaccccacaatggtctgtggaaaaactgccttccacaaaactggtccttgatgccaaaaaggttggggaccactgtactatgtggtttataaaatatatagaagtaaaatgtaaggcaaaatagtacaaaggtcaggaggggaaaatagaattgtactattttaaggttcttgc

SEQ ID NO: 328956 - DNA, 504 bp, Homo Sapiens
  misc_feature (35)..(35): n is a, c, g, or t
  misc_feature (48)..(48): n is a, c, g, or t
  misc_feature (62)..(62): n is a, c, g, or t
  misc_feature (75)..(75): n is a, c, g, or t
  misc_feature (104)..(104): n is a, c, g, or t
  misc_feature (231)..(231): n is a, c, g, or t
  misc_feature (283)..(283): n is a, c, g, or t
  misc_feature (315)..(315): n is a, c, g, or t
  misc_feature (373)..(402): n is a, c, g, or t
gtttctgaaaaaccaaatatgccggacagggtgtngccacacattgangacgggaagacctngcttgtgaccctngcttcccatgtccttctggtctcacccgngaagtgccctatcctggaagtatgaaatgttagccaattaataccaagacacctcatctgctccttccccagtggatggggttcttctgtaaaactgtttgcacatggccaggggagggaactaggnacccttgtgtcctgtctgaggccttatggtaggcaggtacggtgtcattggncggatgtgtcctgcttccattgagatgggatnggcaaaccccatttttaagttataatttctttgatttttgttaatttagaggtgtagnnnnnnnnnnnnnnnnnnnnnnnnnnnnnnaagagaaacatttatgaactggatagcattgcagtgaaagcagctttgggatgttggagcgaatgccagctgtttataactgctctttcaagacagcctccc

SEQ ID NO: 328957 - DNA, 670 bp, Homo Sapiens
  misc_feature (18)..(18): n is a, c, g, or t
  misc_feature (598)..(598): n is a, c, g, or t
  misc_feature (650)..(650): n is a, c, g, or t
acttgtatttcaacatcntgtgagtttgaaaaacctgaaaggccagaatgcttccttttatttctcaccatttgggcagcacctaagtggttttgtaaaatgcagcatctggtgctgtgggtctctctcaggccttgagggacacttccttcctccccactcgcctcctctccactagactttggttcctagagggcgtggggccgggtctgaggttcttgcctgccttccctcccattggtctttggttgctcatccctctaactgcaccccttcttggtccttcctccacagacttcagataatagataagtcattagcaaaccagaccgaatctttagggtgaagagctccccaaagccatctggtgaggtcattgtggggaccagggactgattatttggtcacctgggatcacaaagatggggactgtctgctcaggctggtggtgacaggatcctgacccgtggtccttctcccgttccctttggttcaccagggacacatgtataggacattgtgctgtgtgcagtggagaaatctccctggggccaggggaaagtttcagacagtgcctgttagattgtgtttttgcctnctccaatgttaggagtttgacatgtgggaccccagagcccagcaggtttttnttgttcagacatgttagggt

SEQ ID NO: 328958 - DNA, 439 bp, Homo Sapiens
  misc_feature (112)..(112): n is a, c, g, or t
  misc_feature (363)..(363): n is a, c, g, or t
tctctgatgtatatcagcacccagaacaatacacagtacaatgatagtactcaaatatttgtcaaatgaatgaaaatactttttaagtaactgtataattcatatgtaaaangtgtcataaagaaaatatccacaatactgtaagagagtaattaggagatccctgacgtagtcttgggatcttgtaaagtttccctaaggaacacctgagagctgaaggatgaacaggagttagagtgggcaaagtgcaacccataaaaagggaggggaaagatgatctcacaggtatgttttcggccaactaaaatccagagaatgacacatggggagttgaggatctggaaactgcccacacaccactgncagagtctctgtgaactccaaggtgttcaaatgcctgccctgaagacagctggtccacacctgctatctctccttc

SEQ ID NO: 328959 - DNA, 495 bp, Homo Sapiens
aatctggatgtcaccgaatctccttgggattgtcaacccaatcgtactccaaatcttccattatccatcttgaggcacctcttagaaaaaataacacactaaaaagaaatattttcaactcccaaaaagtgttgctaagacatattttacagaagtctcttcctcaaaatcctctttaattgcctttgctctttccccaggactttctctccccaaaatcgggggccatatttctttctctttcctatttccaccaatttttctggacctcctcctcacaccttcttcaaaatcctacttgcttgtacccagcaggacaaaagccctggaacacctactgttcttgaaacacaggaaagtgaaaagaaaagtcccagtttacacaggaattttaacagagtactgtactttcaaaaaagaataaacctggctgggtgcggtggctcacacctgtattttgagagccaaggcaggcagatcacccaagtttggaag

SEQ ID NO: 328960 - DNA, 106 bp, Homo Sapiens
gggagaagcattttaacactgacattgtttggaattgccagtgcatggtaataataaaaagcagtcagttaagaccagcctgggcaacatagcaagaccctatttt

SEQ ID NO: 328961 - DNA, 389 bp, Homo Sapiens
  misc_feature (51)..(51): n is a, c, g, or t
  misc_feature (63)..(63): n is a, c, g, or t
  misc_feature (117)..(117): n is a, c, g, or t
  misc_feature (229)..(229): n is a, c, g, or t
gtgtagagaaaccgttagaaagggtgacaccctacaaaaaatgtgtattantttaaccatggntatccacctagattttagcctttttttaaatatttttaacaaagaaaacattgntcccaccccatttccctgtatctttttagcagatttattaaagagtatagtacttagcctcacgaatcataattaggaaatttactagtatttctcagccttttccctaggnacaagggaaaacaggaagcatataatacggtggtcgtttcattgtgtttttcttccttttaaaaattaaaaagttttacaattatgtgaaacgttcaaaagccagcttaaaatttttcttgtgaggaaatattatacatgattcacatgatttcttagat

SEQ ID NO: 328962 - DNA, 540 bp, Homo Sapiens
  misc_feature (338)..(338): n is a, c, g, or t
  misc_feature (368)..(368): n is a, c, g, or t
  misc_feature (431)..(431): n is a, c, g, or t
  misc_feature (438)..(438): n is a, c, g, or t
  misc_feature (454)..(454): n is a, c, g, or t
  misc_feature (489)..(489): n is a, c, g, or t
  misc_feature (506)..(506): n is a, c, g, or t
  misc_feature (514)..(514): n is a, c, g, or t
  misc_feature (522)..(522): n is a, c, g, or t
aatttgatctacgctgccgtgaaaacacgcacactcatatatagggacaacatttgggtgtctgtggatactgtaacctttttggcaaatgtcaaagctatatagaaactcaaatctcattcaaagtattcttcaaagaagtacaatatctctggacagaaggatcttctctaatgccccagagtaatttaggaagctaaaactctggcaggtattgcaggtgccagatgagacaacacaatcagaatgctcaccctaaggcctctgcccattatttaaaagacattttccttccacacagggtaaggataattctacccatactttccctaattccnccctaggaggaattcttccaaaccaatccncaggaattttttatttccaaattgccccttatggctccaaaatggcttaatttgatggtctcnggccggngcactgggggattccngttgctggctccaggggttcctttgggggtctggncggtccctcccctgggnccccggcngggggggncccaggccttccacctcc

SEQ ID NO: 328963 - DNA, 530 bp, Homo Sapiens
gctttcttattattattttattgcagcaaattccagatgtgtctccaacgggaaaatatacaaccctcttgcctttgatgattattcttatgatttcaggcattaaagaggttatatacatcataaatgacatggcagacaaaatagttaaggaacacaaaactgttatgacaagattcatgggacacgtttaagtggaaagaggtgaatgtgggtgacactgtgaaggcctcgaatggggagctccttcctgcagacacagtcccgatgtgttcatatagcaacatctaatccggatagagagacaaatgtaagacacggcaggctttgccagaaacagcttctgtatcagtgcagggacatccttcctccaggcagcaagccttcaagcttcaagcctcagggcccaaccctaaggctgggggctctccctgcaggcaggactgggcctggagggcctcctcatacttctggagctgagaccagaagcccgggttcggttctgctaccgggcgagcgctcttcaccat

SEQ ID NO: 328964 - DNA, 360 bp, Homo Sapiens
  misc_feature (17)..(17): n is a, c, g, or t
  misc_feature (69)..(69): n is a, c, g, or t
gcctgaccccccccacngtggccttatattcagaaagtaaaaattacctaaggcagcctggaagtgagncccgggaacctactgggggcaactagtatgaacagcactatttacaggtctctttctcttgcctttgattcagagctgtcattctcagtaaatattggatagttttattgaaacaaaaggggtctttagccatgggaatagtaaccagcagtgccataatccaagataattcctgtatccttcactctttttctctgcctttttttacttaaaagtaaattcagactcttaaaatggtatagaattattagcttgaacattgaattatctcgtcttaactagaatgttttt

SEQ ID NO: 328965 - DNA, 370 bp, Homo Sapiens
  misc_feature (22)..(22): n is a, c, g, or t
  misc_feature (38)..(38): n is a, c, g, or t
  misc_feature (63)..(91): n is a, c, g, or t
aagtggggaatttttggttaangtttgccaccttgtanaatggttggaaacctgttatccacnnnnnnnnnnnnnnnnnnnnnnnnnnnnnaaatcctatttatttttgcaaaccctggttgctgtatttgttcagtgactattctcggggccctgtgtagggggttattgcctctgaaatgcctcttctttatgtacaaagattatttgcacgaactggactgtgtgcaacgctttttgggagaatgatgtccccgttgtatgtatgagtggcttctgggagatgggtgtcactttttaaaccactgtatagaaggtttttgtagcctgaatgtcttactgtgatcaattaaatttcttaaatgaaaaa

SEQ ID NO: 328966 - DNA, 411 bp, Homo Sapiens
  misc_feature (24)..(24): n is a, c, g, or t
accgcccctttgaaatggggaagntccctccaaaaccttgtatccccccactaacaagattgccacataaacatgcattaaagtatatacctaagaaacccctctgtcccaacggctcatgcatatgaagtccgaacatgggagtttgcccaattgcattcatcaagtcgttttgcggagtcagatccctgatggaagagctccaacagctctgccttccaagtccctgggttcctaactggtgaccttagccctggggtctgtggggagaccaaccctggcttccaagaaaaccacattccatggactatcagaaatagacacagatttgggtgacaaagctggctctgtatttgcattttatttttgtgttcttgtcagtttgggaatgattaatattaaacatttatt

SEQ ID NO: 328967 - DNA, 456 bp, Homo Sapiens
gtcttagagagttctatcctgttgcttttgaaatgaagacttaggaaacaaatacttctttaccattcagtccgaaaaagaaaataattctgtcctagggaaatcagctaaggaaaaggcatgaggaagggaaaaagagacagagaaggaatgcagagagaaccagggcacaagacacaaaccagatctctcagacctgcctcctgtcctgcttctcgacttccccagcacacgcatgtcccactgtcttgtcctcgcggcctctccactcaggcgtgtacgcgtttggcttctgggtgagagagggagggggagaaaagggcagccagaggggagacacagctgcctcacctttgctgagctgttggggttttattgatctgtttttgtgtctgcacttcgggcctgttctgtcctgattatgtccactgctttgagtcctgacccttatttctc

SEQ ID NO: 328968 - DNA, 430 bp, Homo Sapiens
  misc_feature (284)..(284): n is a, c, g, or t
  misc_feature (319)..(319): n is a, c, g, or t
  misc_feature (359)..(359): n is a, c, g, or t
gagccaggttggtctgttaggatgaacaaaggttgaggggagggcaggattcgtgcatctgggggccaaacacatgttccgtcttgattgccttaagagttactagcgaggtcagtgttaggcttgcaatagggattttaaaatacactaactagttccttagctaccttcacatacattctataggccttcttaaattagcactaacctccacttccttctctgccccattgcctcccaaatatgctatggagctatttttgttaccacgttataacgtgaantatttatacagtaggcctcttcaggctttgtaatnttcattccaaaaatgcccggtgtgatgctttacactctanaaagtatggtttaaaggcacaaggtcatgggcctttgtcatagcagttgaattgtgcatttgacatatttt

SEQ ID NO: 328969 - DNA, 627 bp, Homo Sapiens
tattttcagtccctgccaatttacatcaccaatcccatcccttggtgtataagagagcaacagttctcaaaatgtagtctggggactcctgggagtcctgagacccttctgggaggtctgtgagatcaaaacttctgaattcagagaagttatttacctcccatgtctgtgcacttgagctttccacaggctccatcacctgttctgtcacaacagattgaatgagaaatggagaatccaggcagtcttctctttattatgccagacattaaggagatttgcaaggctactctctccattaaattaatttttaaatagttatttttcatcaaaaatgatatctatattgacatgtaatgggtttactgttgtatttttaaggacaacaaataaatattgacatatcctgcataaacaaaagctctttggggtcctcaacaatttttaagagaataaagggctcctgggaacaaaagtttgagaactactggtatagagatagcaatctgcaatatcctggtgtcaatgagaagctggtttctattgtcaagaactctgctaatccctagagatgctgatgctggacacctgccagatggggatgttgtaaaggggattcaaatgttg

SEQ ID NO: 328970 - DNA, 744 bp, Homo Sapiens
tttccacattaaatgtttacacaatttattttccttaaataataatttgctacaatcctgtcacaaatttaaaaaaatttaacacggtattcacaaaggcagaattctttaggacaatcaaaatgatggtgttcttagaataaattaacatcagattgtgtttatattcagatagtctgatcctctcctttgaaatgcaatggagaccattgtgactgggggtgaatgcacacatttgttcttccatacagagactcattctttatatatactcaacggtaatttgaatcgttaggaatcctgagaaacactcacccctgggcacacacatgtacacagccccacggtcaaccctccagaagctgggtttcccatggttcaattactagaagctcttttctcagaaggccaaacattcggaatatttagatgacactgtcccatctccccttgggaaaatcataaggtttcaagtcggaggagcttgaagtagcagcaatacatgtaggagattcagtagtcggtgattccagtcctgggtgctgagtgtgcagtaggaggcaagcagaggcaagagacacacctgcttctacaactaagccacaagatgaccagaacacactgagagtaccagttctcagagcctcagctgaaaattcacctgattgcacattactaatccaggttaggcacccagagggaaccttgagagggacacaattcttagaaacatgaatatttgaa

SEQ ID NO: 328971 - DNA, 298 bp, Homo Sapiens
  misc_feature (239)..(239): n is a, c, g, or t
  misc_feature (276)..(276): n is a, c, g, or t
aaaagtcaaaatgaagccacgtggcatggcataaatgttttgtttataatagcaagcagaatgtctgaggaacatagccatagttttaggtattaacctgcatatcacaattagagaagacattaaactagaaagatgtttgctttctagcagggctaggctggatcttgagtctgggtagagagagagacgaatgcccaagtgattgttttcataatgttttccaaaagtcagatgantggtgtggagtcttcattcttttttgtgttgttggcnagacttctgtggtttgtacagt

SEQ ID NO: 328972 - DNA, 282 bp, Homo Sapiens
tttttttaaaaaaaaggaaaataattaagttgaaaacttaagaacttctaaacagcctacttaagataattagaatggagttatttcagtattaaattgtgtaaaatttaactatttaatgtactctcagacaaacaaaattatttaattattttaaaactttctctttgacccacattcttaaatggctgcaggaaacccaaggaccaagtgtaaggtatatatcactttcatttttgcagtctttttacccaatatccaggcaggtattaaaattttggg

SEQ ID NO: 328973 - DNA, 540 bp, Homo Sapiens
  misc_feature (422)..(422): n is a, c, g, or t
  misc_feature (493)..(493): n is a, c, g, or t
  misc_feature (507)..(507): n is a, c, g, or t
  misc_feature (514)..(514): n is a, c, g, or t
  misc_feature (519)..(519): n is a, c, g, or t
attattctgcccacttagcgaatattgaggttatggtcaggatggggtcatttgcaatgaaattcaaggttgagactatgttgcagttatctgtctgcttgtaaaaagtcacccccacattttgtttaaaacagcaagtatgtactatttcacacagtttctgtgggtcaggaatccagaagcggctgagatgggtagtttaggatcagggtctctcacaaggctttggtccaggtgcaggctgcagtcctccagaggcgggactggggctggaggtctgcttccagacggtcactcacatggatgtgggcaggcggcctcagttccctgccacatggccctcctcataggacgcttgagtgtcctcgcggcatagcagctgggctttccccagagtgacccaaggtgggaaagaacaaggncagagggtgacagtgtcttttataaggccagccttgggaagtgacgtaggcatcatttctgccttattccnttgggtcacacagncaacccnatttnggaaggagacatcacaaggac

SEQ ID NO: 328974 - DNA, 975 bp, Homo Sapiens
  misc_feature (243)..(243): n is a, c, g, or t
  misc_feature (820)..(820): n is a, c, g, or t
  misc_feature (839)..(839): n is a, c, g, or t
  misc_feature (842)..(842): n is a, c, g, or t
  misc_feature (876)..(876): n is a, c, g, or t
  misc_feature (878)..(878): n is a, c, g, or t
  misc_feature (924)..(924): n is a, c, g, or t
  misc_feature (952)..(952): n is a, c, g, or t
tttctaaaagaaataatctctctgaggttttcttggaggtgcttgcctgaaagaaaacctagactccacttcgaagacttggtgttacggctttgtttttgaaccttgtctatacaagtaactgattccctccatccagaaactttaaaaaggaagagcttattgctgaggtgtaagtcaagctgaaagtaaaataaattattagcaccacctgctggttaccattgagtaccattgagtctntaagttttccattttggggctattttggttttttattagttagattttggacaggacttgatttgaatgaagaacagtgtgagccactgagaaatttgtaaaggaaatgttaacagctaagagtttgaacatagataaaagctaaacagattctaaaataaaataaacatatatagcatcacagttatatttcttcagctaatttttctgcatccctgtgtttccatatcaaaggtgtctggccagaaggatctgatgggacagatatcaatgcactggtgcgatcccacaatagaaaggtgatagctgttgccgatgacttttgttaaagtccatctgtttcagtatccctgctccaaagcaaaggctcccagtcacaagtacagtgcccacagcagccatgtcaccaatgtcagttttactcacaatgacagtcacctgatatcaactggtggaaaagacatgagcatcattcagtggaaacttgtggaaaaagttatctttgcctcagaatgagactgtagcggatactactctaaccaaagcccccgtctcttccactgaaagtgtcatccantctaatactcccacaccgnctncttctcagcccttaaatgagacagctgaagaggnangtagaattaagcagttctcccacacttctggagaacaggcctgggnacaaactgtgggagccaagttgaaggancacagcgagggagggagagtttc

SEQ ID NO: 328975 - DNA, 287 bp, Homo Sapiens
  misc_feature (243)..(243): n is a, c, g, or t
  misc_feature (261)..(261): n is a, c, g, or t
gtgtgaaccactgcgcccggcctgacttatttgttcaaacagcctatgtaggtagaaaatttctaggtatgtaattccaaggtaataggtaaattgtgcctgattaagcatgaattttatttccctatacattagtaatttctgagagttgtatttaaattcgatttcagggtccttagggtagggccttagggacactacacacagtttcagtcttcatttgcttgttattttaaatttttnccacacttttccaggggncaacttgggttcccccttataatttt

SEQ ID NO: 328976 - DNA, 604 bp, Homo Sapiens
  misc_feature (576)..(576): n is a, c, g, or t
tcaatggcctcccaaactgttgggattacagacgtgagccaccacgcccagccagaattttttttcctaaagaatagaacaacattataaaattttagggattaagggacaaattttattttatgattttcatttccggtgagtcacaagatattcaacacaaaatgaaacttcacaaaatttcacaaaatgaaaaattcatttcagattcaatatccacctccatcatccatattcattcttccaatgtctcaggccagaaatttggagtatgtggcttctccacctcacacaatttgccctaactttaatatatactcagaaattactggcttttcactgtttctatgattcccatgtgtaatatacaatactcaccatgcatacaataatacaataattctgtggtcacaaccacacctaaattgggtaaggtttataagggttataaggctgagggggttttggctggatcttgggctgaggctcagctgggggcagggtcttctggggtcttgggctggggggttcactggacacacaggcaggctggacaggttgggctggatctggggnggggcctcagctgggggatggacagggc

SEQ ID NO: 328977 - DNA, 398 bp, Homo Sapiens
  misc_feature (303)..(316): n is a, c, g, or t
  misc_feature (375)..(375): n is a, c, g, or t
tttcaaaatataaactttattattttacattcaagtgaaacttccatctggaggggctaaacacagctgccggccacattcactgatttattactttgttgcctttttcgttcacctgatggaagaattcaaccctcttaaaaacataacaacaacaaaaacagctggagagtcccagccgtaatactaggtgtagacacgcacaagcacacacacaaattcaaaaacttctacatagaaaaataaaggataaacattatccatctattttgtactgtgtaatgcaacttttatatacataannnnnnnnnnnnnnactgttttcagtcactgcaatttttcttccctcctctgggggtctagggtcccgggggngggagggctgcccccagtggagg

SEQ ID NO: 328978 - DNA, 248 bp, Homo Sapiens
tttgaaaacagatttttaaaaactgttttggaacctcctcatacttgcacaaaaaaattcctcttgtacaaaggcttttctctagatttaatgttgactcttttatctttcttccataagatctacttttaatcctttgttccttttttgaaaagacagtatttcttttctatttgcatccagccatttttttatcctatatttgtgaatttgcaaaataaaatataagttgtttaattctgcccttc

SEQ ID NO: 328979 - DNA, 437 bp, Homo Sapiens
  misc_feature (16)..(16): n is a, c, g, or t
  misc_feature (379)..(379): n is a, c, g, or t
  misc_feature (386)..(386): n is a, c, g, or t
  misc_feature (410)..(410): n is a, c, g, or t
ctagctgtcaccacangacttctttaaactcttaggctaggctagttgccctcctctaggctcacaccatgctctataatctgcatcacaaccccttaccatgctgtgttgttaattacttgttcttgcttgtaatttccagcagactaaattctgtgggggaaaataatcttctttgttttattctctgctgttttgatgagcatctagctcagtgctgggacatagtaggcactttcgtaaatttttgataaatgaagtgggtgtattgttctgtgacaggaatgggaaaaggacagcacaggatgccctccaagggatgaggctgggtccagaggatacaacagggatggaataccatccccccgggtattggganctattcntaatgagggcagggacctttcccngggggctattttagggtccagagctgg

SEQ ID NO: 328980 - DNA, 394 bp, Homo Sapiens
  misc_feature (129)..(129): n is a, c, g, or t
  misc_feature (368)..(368): n is a, c, g, or t
ttttttttctaaaaactagtgaatcattttaatgtttaaatcataaaggattcagagggactatttctttaacgttggaaataattggaagttatgtaatttgcacagaaagaacaaatagcttaaaanaaaccctttatctccttttcttgcaccatctcaagggccctaaatccccactggaaacatttttaatgacaaagttatctttatgaaattgcaaagttctagtaaattaaataatagaatattaagtacctattctgtgaaaaagcacggcactgtgccatgatgatgtctataacacagaagcaagttacagacatagaaagacaattaacaatacaggataattgtacatggcacanggagtccagacaatcaaaaggtggaa

SEQ ID NO: 328981 - DNA, 411 bp, Homo Sapiens
aagtgaccaaagggttaaatttcatgatattaatcagactttttacaccctgagctagaaaaaggaagcctaaccagaaaataagccaaaagatatgactaagcaattcacagaacagcaaatcaaaataaacagcaagcatatgaaaagatcctttaggctgggcacagtggctcacccctgtagtaccagcattttgggaagctgagttgggcaaattgcttgagcccaggagtttgggattacaggtatgagccaccacactggctggtttccttcattttctgaaaaggattgctgtcacaattaccctcactatgccccccacaagtttctgcagatgcttctaatcagcatgatggtgaagtgcaggtatgcatgtatagtttaatgatataacccatattacca

SEQ ID NO: 328982 - DNA, 355 bp, Homo Sapiens
  misc_feature (318)..(318): n is a, c, g, or t
ttttataaacattattaaattttattaacaaaacattttgtacattttaatacatgtggaattttacatctaggtaaaataacaacacattcaaaatttaccatttatacaaactgttacagaataacaaccagtgggttaaataagtaaaataaaccacactgattttttaaattatctacaaaagatttgactttaaaattcccctgaacatataaaaataaattaattttacttttcaattaaatctaccaattagaaatattacaaatcaaaatatcaatgttatcttatgaatttgtcacaatacaaaacagnttcaccaaaactttatttacaggaaatgagggtagga

SEQ ID NO: 328983 - DNA, 497 bp, Homo Sapiens
  misc_feature (306)..(306): n is a, c, g, or t
  misc_feature (313)..(313): n is a, c, g, or t
  misc_feature (374)..(374): n is a, c, g, or t
  misc_feature (397)..(397): n is a, c, g, or t
  misc_feature (410)..(410): n is a, c, g, or t
  misc_feature (425)..(425): n is a, c, g, or t
  misc_feature (447)..(447): n is a, c, g, or t
cataaaaaccatcagagccaatctttgtgaaaggaaaagggggcatctggaagattacaccaagaaaacagggcttggtgcctccgcctacagaacaaatttcagctatgtcgtgtggccctgtcagcctagccgcttagggtggtgcacgcagggttagcagagcaggagtactggctgggtactgccttcgtgggagaggggagagggaaacccttttgaaacaagcatcccatcatgggagtctatttgatcctgggtcttcccttagggacagggtgggtaccatgcccattatccccactnggccgtnggccataggagtcccccacagggcggggattgggggaagcaccaggtcttattggggaccnggtagggatgctcccatattatnggacgcttccctncagggggccagcttnattggggggaaagggagctttnaagcttggagggcagcataggttttttcagccattttcagtttttcccat

SEQ ID NO: 328984 - DNA, 430 bp, Homo Sapiens
  misc_feature (379)..(379): n is a, c, g, or t
  misc_feature (398)..(398): n is a, c, g, or t
  misc_feature (414)..(414): n is a, c, g, or t
aattagtttgtctttttaaatgttttattatggaaaacttcaaaaatacacaaaagtaggaaaaacagtctaatgaactcccacgtaacaagcttcaacaatttagatgcagcactttaactactactggtttgtcatctttaataacatgacagcttatattttcaaaaggcatagtttttatcattcccagtgtaacggggactgtaggtggaggttagaagcataagcaaatttaactctgggaaaaatgactcaagggcatcctcttgaaggcagtgctcagaattgtagggtctcaggcatacactgggagggaaagaggttccccatttctgtggggttgggtatgtaggcatggggtggactttatatgganccattccaaggtggaaggncctgtgggctcagggnaactacaaattttggg

SEQ ID NO: 328985 - DNA, 476 bp, Homo Sapiens
gtctttttaaatgttttattatggaaaacttcaaaaatacacaaaagtaggaaaaacagtctaatgaactcccacgtaacaagcttcaacaatttagatgcagcactttaactactactggtttgtcatctttaataacatgacagcttatattttcaaaaggcatagtttttatcattcccagtgtaacggggactgtaggtggaggttagaagcataagcaaatttaactctggaaaaatgactcaaggcatcctcttgaagcagtgctcagattgtaggactcagcatacactggaggaaagaggtcctcatttctgtgggttggtatgtagcatggatgactttatatgatcattccaagtgaagtctgtggctcaggaaactacaaattttggtaaattgtatgctaaactattaactcaggaaggggacaacaaggaattatgtgtgaatctggcatcccaaggtcatcc

SEQ ID NO: 328986 - DNA, 373 bp, Homo Sapiens
gcatgggccactgtgccagatattttttgaaatccatattttcttgacatgaggtggctttttagcagcatttcgggtgctgttccccaaacatagtgttgtttggcatgataccagattggaggatatcctagtcatctaggagaattatattttgttgcagttgaaggtgctgttctagatatactaatgcagtgggagagaaataaagcaatttgagaagagggcagcacttttatagggaaaggaaaataggatacccaatcccattgctgatccaatttcctcctacttaaggcaacattagggctgattttaattatccaataaggtattaattacccaatttaggggaccaattccaatttactgg

SEQ ID NO: 328987 - DNA, 614 bp, Homo Sapiens
  misc_feature (398)..(398): n is a, c, g, or t
atatcagtgagatatatttttaataactatttacttaacaataatctatttactaagaaaaatctctcaattcctttccttcactgaatttagtctatctactctgtttcttacgcaactcacattgcatctgtggattttgttcttttgaaaaaatatatctgtacagccttctttgagttaccaaatgcctgaaggtagtacccacaccccctggccccccatattcttccccattgccataagcatgaggtgtatacagcaatgcaagaataggtgactcccagtccaagataagaaaatagaatggattttcttggttgtgagttttcagatgtgcacagtgggtagcgacagcagacacctcaaagaatccagggagggacactagaggtttnggagcaagctgctaagtgattcaaaagactggttagtaacacctttctgtactgggcacaggccgctattttaaccatgcagcttctgtggttcatgcattgccttatgatctatagtccttcttgctgtagggcttgttgcgcagtatgttatcaatctcatttaccacatgtgatgtcatctttgggagaacctgaatggcaccaaggttttca

SEQ ID NO: 328988 - DNA, 498 bp, Homo Sapiens
  misc_feature (456)..(456): n is a, c, g, or t
tttgagatggagttgcgctctgtcttcaaaataaatcaataaatacatataaaaccaaacaggaataaccatattaatcttaggcaaagtagaattaagagcaaagacattacaaacagtgaaaaagatttacttgtgtcattaagcaatatatttcacaatgattcttaagtaattatggaccattttagcccaataatatagcaacgagaaacataaagcagaataagaaattggcaaaaatacaataccattgagaaattttaagttttctccaattgtgatagatcaagaaagcaaaaaacaaacacagaaaggatctgaaatatatctgcttgcaatcacaagctatggatttatatggttttttgctaacgaatcaatgaagacagattttattagggcattcccatattcccatacactcattttgaaaggaacatttctgtatttccngatacaatgtttctgagggtctgaatctaggcggaatagttc

SEQ ID NO: 328989 - DNA, 333 bp, Homo Sapiens
atgttgcttgcttcagaaggaactgtacattacagctgctgggataatttcacaatggactggacaaggtacagctcaaagcaggacacaaacacaaatctcaaagggaaacaaatgcaaacaagtacacagctgtgggggatccagagacatttccccatccatgctgggacttgagaggggataaaaagtttaggaaacttaaagtggaaaaccagagtaggtcacacatggccccaccacatgggctgctaaggtgcaacattcacataccaattagggctgggactgtgtgcacagggaaagtaattttcatttttccttatttgctac

SEQ ID NO: 328990 - DNA, 431 bp, Homo Sapiens
gtctggggtcaggatttggcccacagtctatcagtttgcgtcatctagttttagttttgactttaggtttcttgaaggaagggaccaagcctgcttttgtcatcattatatcctcacggcttaggtgtaagcctgtcagagagcctgggtacaggaaaggcacctgtttgtaaaatagatgggtggatggaggggagggtaggcagatggatgagtgaataaattcttacagtcttcagagcacaagtatttcaaagcagcctacctgggaactgctcatggtcctgctggccacctagaccaccaatgccctgacttctatgccctcttgcagagaatccgtgcctggggacaagtagtccgagaggtgatccgccgccagaaaggttatggcatcatgtagccacagcctccaaggtgcccatcatggg

SEQ ID NO: 328991 - DNA, 581 bp, Homo Sapiens
tcaactgcctggagaataatctatccagcctatatactagacaaacagttagtgttcttactatataacgaactaataattgagtgacaaaggaccaaagacttgatagaacaactgtgaagagacatgaacatactcacgtaatgatataaaaatggctctttaaaatgaaatattcaaactaactcattagagaaatgtaaattgagataatactgagataccatttatcatctctaagaaggtgaaagaaagaacaacacatttctgttaggcaaggctatagggaaacacactgtcatcactgttggtaggaatgcaaactagtatgacttctggaggggaatttgtcagtacttaacaaattgcagaagcatttaccctttgacacaaccatttccactgtgggaatttcccttgaagatgcacctccaacagtacaaacatacagatgcacaagattactcattgcagcactgagactgcaaatattggaagcaaagtcatgttcatatacacgagaaagcctgagtaaaccatggcaccaatggcatacccacatgatggaatattattgagct

SEQ ID NO: 328992 - DNA, 409 bp, Homo Sapiens
  misc_feature (216)..(261): n is a, c, g, or t
  misc_feature (349)..(363): n is a, c, g, or t
tgctgggcttgtgcttgatttcaggacacttattttttcacttgaggcagccactggccattgggggtgagagatagaaagtgagaagaaacctagactacatgatctacaaattccctctcagttctacaaaactgctccctgaaatacagcacaaatattagcatgtacaagacgtttattattattatttttgagataaggtcatgctctttnnnnnnnnnnnnnnnnnnnnnnnnnnnnnnnnnnnnnnnnnnnnnntgaactactggggctcaagtgattctcctgcctcagtctcctgaggtaggctggggactgttgttatgccaccatggcccaggcaaannnnnnnnnnnnnnngtaggagatgggcatgttggctatgtttgcccggggtggggtctca

SEQ ID NO: 328993 - DNA, 641 bp, Homo Sapiens
  misc_feature (565)..(565): n is a, c, g, or t
  misc_feature (576)..(576): n is a, c, g, or t
  misc_feature (628)..(628): n is a, c, g, or t
gggagagcctgggtggattccatggagagggcttctaagaatcttaagggtcggtgtacccgacgagaactgcaagtaccttcaccctcctccacacttaaaaacgcagctggagattaatgggcggaacaatctgattcaacagaagactgccgcagccatgttcgcccagcagatgcagcttatgctccaaaacgctcaaatgtcatcacttggttcttttcctatgactccatcaattccagctaatcctcccatggctttcaatccttacataccacatcctgggatgggcctcgttcctgcagaacttgtaccaaatacacctgttctgattcctgggaaacccacctcttgcaatgccagggagctgttggcccaaaactgatgcgttcagataaactggaggtttgccgagaatttcagcgtggaaattgtacccgtggggagaatgattgccgctatgctcaccctactgatgcttccatgattgaaggcgagtgataatactgtgacaatctgcatgggttacatcaaaggtcggatgctcgcggggaggaaatgncaagtaatttncatccttcctggcacaattggcaaggccaggattcaagggcaggttcatcantcaggatggaacc

SEQ ID NO: 328994 - DNA, 443 bp, Homo Sapiens
attcggcacaggcagaaaacaagagccacttgtagctggtttaattagacaaggatttactacctggcccctggtggcttgcaaaattgttggaagagctggagaagcagactctgctgaatttccaggaactcccagcgccagattcatcatgtctgttgtgaccaggaaagctgcccccatctgcaggaagccactatgccagaaagctgctgactgcagaactaggctccctctgccacggtccgtgccagccaatagatgtcctgaggcctgcccctctcccacttcacttcagttcccaaatctaaatttttacaagagattctgtttgggggaactttaagtcagatccagaaccttgggctggcaaggggagtttggggaaatgttcaatttcccttagaagggaagttaaggggtgggttgggagcaagccccca

SEQ ID NO: 328995 - DNA, 456 bp, Homo Sapiens
  misc_feature (22)..(22): n is a, c, g, or t
  misc_feature (27)..(27): n is a, c, g, or t
  misc_feature (72)..(72): n is a, c, g, or t
  misc_feature (79)..(79): n is a, c, g, or t
  misc_feature (90)..(123): n is a, c, g, or t
ccccattaccctttaaaatgtnacacngaactgaacccacacttacacatttgtccagacgtggataattantgttaanccttcaacagnnnnnnnnnnnnnnnnnnnnnnnnnnnnnnnnnngaggcaatggaacaccattctccattcccctggaccaaaagaaaaaagaaaaccaagcatgatatcatactgcccttaatgttgaagagctccccttaaatttgtcttttagctagcacagtcaaactggtgtaagtgctttggcaaggtgggatgcattccatcatatctgcaaaggcctgcttttctctgttggtggttcagcttatgaagaacatatatgcaaaataacagctctcacattgcttcaaactcatcgattcgctgctttgtattgccttgtcgaatctgtcgcagagtcttgtacttatcacggcctgctttaacattctc

SEQ ID NO: 328996 - DNA, 303 bp, Homo Sapiens
  misc_feature (262)..(262): n is a, c, g, or t
atgatccaccatgtgctgccaaaatatttaccttaggggaaaaaacagggcttgaataaacactattaaaaacctatataaccccatactagtagagatcaggatgcagggaatctggggtttgactcaagtccactaatcttcatcctacttctggaatattcctatcatggatatataggtatttcatgttttccattcttctaagtgacacaaaaatatctagtttttgtgttttgcacagtgccttttcaggaatgtncccaccccttaggagtaggcagttatggcacaattggcctg

SEQ ID NO: 328997 - DNA, 443 bp, Homo Sapiens
  misc_feature (24)..(24): n is a, c, g, or t
  misc_feature (51)..(51): n is a, c, g, or t
  misc_feature (69)..(69): n is a, c, g, or t
aagccatacctttttagttagggnctcaagcatttgttgaatgaatggaanggtaaacagtgaaagttnctatttgtgcccatattagcggggaactgtgggataatgtttaaaggctttgagtaccttagaactccaaaccagttgtaacccttgattttcccacaagtatcaaataaactctagatctagttaattccctcttgaaattcaaaagagggaagggaagggaagggaattaaatgattaaatgtattgagggcctgctataaacaaggtaccatgtcaaatatttttaatattaaatccccacaacagtagctaagcaggtagccagtgtcctgtcttacaaggagcagagaaattcagtggggctctcaagaattgtgcttaataagagctcttaagcatgcccatttcactgttgcttgcaaggggctttt

SEQ ID NO: 328998 - DNA, 471 bp, Homo Sapiens
  misc_feature (33)..(33): n is a, c, g, or t
  misc_feature (45)..(45): n is a, c, g, or t
  misc_feature (65)..(65): n is a, c, g, or t
  misc_feature (72)..(72): n is a, c, g, or t
  misc_feature (83)..(83): n is a, c, g, or t
acttcaaataaggacccaacgtgctgtttaaanctgaaaacctgnaatttcatgtctcttccttntcttgangctccttgttnacatgtatcctaatggtcactagatagctctccctggatgacctccccaggaaattcaatttccagcacgttccccaattgaattccgggatcttccccctcaatccctgctcttaccttatacattttacataagagttctgatattactcagttgaccaaagtggaagccttgcattcctccatctcttctagctcccatttttaatcaccaagtcctactattctatcacttgaaatgtgatagaacattttaatattctcttaaactgaatcctcaaatctcctaggaagtttatatggctggggaggcagtgtggtgtaatagaaaagatgtgtcagacaggcgtaggtttgaaactctgctttacctctaattaatgtacaa

SEQ ID NO: 328999 - DNA, 131 bp, Homo Sapiens
  misc_feature (95)..(95): n is a, c, g, or t
  misc_feature (118)..(118): n is a, c, g, or t
cacgcctgggcaaattttaactttctgtaatagatctgtgttcattttatgggtagtaaatgataaaattagactaccaacatatattttatatnttcatggacattacctcactttncttaattttttta

SEQ ID NO: 329000 - DNA, 444 bp, Homo Sapiens
  misc_feature (81)..(93): n is a, c, g, or t
  misc_feature (403)..(403): n is a, c, g, or t
tactgtgacacaataatgtgatcctaaaactggcttatccttgagtgtttacaactcaaacaactttttgaatgcagtagnnnnnnnnnnnnnaaaaacaaacttttatgtcaaattttttttcttagaagtagtcttcattattataaatttgtacaccaaaaggccatggggaactttgtgcaagtacctcatcgctgagcaaatggagcttgctatgttttaatttcagagaatttcctcatatacgtagtgtgtaggaatcaagtcttttagtaattcattttttcttcataatatttactcaaaggttaaggcttaaaaataagttttatcttaaaatcatatttgaagacagtaagacagtaaactattttaggaagtcaaccccccattgcactcnggtggcagttaatccggggaaaaatagggccaaagtggacc

SEQ ID NO: 329001 - DNA, 354 bp, Homo Sapiens
  misc_feature (312)..(312): n is a, c, g, or t
  misc_feature (333)..(333): n is a, c, g, or t
gaattacctaaagtggaattgctctattatgaattaagtgtgtgttaaagaaactgtgaaaagttttctaagtggccgtgtgaccctcctccaggcaggactttagagttccagttgttccacgtcatctccagcgtgctcaggccttcatctcagcctttctcatgggtgtgtggcactttctcattgcactgcggaacttttgactgcatttttttgctgtttgactcctgacagtctcacccttccctcttccccctatgccccacatgtgggcaggacaaggaaatgctgctactcctttcctttggntggcccatgggaaagggaggnttcagcccacggcaagtcctt

SEQ ID NO: 329002 - DNA, 795 bp, Homo Sapiens
  misc_feature (659)..(659): n is a, c, g, or t
tcaatgtactgaatatgaactttattgtgatttggtttatgtaaggcagtgtagtgaaggcactgcagaagttaaacagactggaaaacatggtaaaaaatgagcgagctaaaaatgaatgcttgctggtctaggtaggctaagtactacaactatgtttctttttcatcattgcagaagcgttgaaatattgttgaaggtgggggtttggggtggaattagggaaggcttcatggaggaggtggcatttatactgggccttgaaggaggggcagaaagttgataggttaagatggagggaagtacatttcataatgactgactctagagaaaattctgtaagaagtactgaaaaatgagagggcaaacaaacacccccagcgagtgaagcatcccaactgagagaaaagtctgaggagtctgggctgggaccaaagtctcaagtccccagatggggtcttccagtacaaatgatattaggaggcacaggacaatgggcttgtttgtaaacctagcagcagcgagaggtttcacattgcagtcaggggccccaaactggctgtaatatgtctggatgaattctctcatcttttaggtgtgtatggtacttacttatctttcctcttgcccactgactgcctgaatggtagttcgattgngcccatgtgcgcgtgtgtgagtgtaggtgtgtgtggatgggtgggggaccgaggctttgtctcccactgcagcttcttccacttttccgtcttgtggcacacagcaggcttccaattgagctgaagctcaggcccc

SEQ ID NO: 329003 - DNA, 457 bp, Homo Sapiens
  misc_feature (16)..(16): n is a, c, g, or t
acgcagcctactgagncctcctaccctaagcccagctgtaaagggtggataacggtccccatatttaagtaagtcacccaaaaatgccagaaatgtttttagccataagtttctctctgtcaagagaatacacctcacattttggtatctcatcaagctgaatttcttcccccatgtcagacaggtaatgtgtgcacaatgcaacaaggtttgagagaggcctgtctcacacagtgtgaaaacccaatcatcaggcttatgatccacaaaaggatcctcagcaagcttaatttaatctaaagtcaggtggtctggatcattaagaaaatctggggcagggaaaatgaattactcaagttatcaaaatccctttataactgaaaatttatactgttctaggaaaacgcatttattttttaaattctctttttaacctcaatttctcagctctgctatc

SEQ ID NO: 329004 - DNA, 152 bp, Homo Sapiens
ttgattgttatcttttattttcatatgaaaaatagattttaagcaaaattcaaaaataactcgacactataaataaagagggccttaagtacattctttttgttaataagatttaccagtttgtaggttcaaatatgcagttaaaatcactg

SEQ ID NO: 329005 - DNA, 667 bp, Homo Sapiens
ttccttcccagcttcctgtgcatctatttgaatcacaaagaaagtttctggactttattcagcatgaatccagctggaaactaatactcaactgatatgaacattaaatttacaatggtttatttaaaaggagaaatataatgacttagtttatagaggactttatcaagttataagtagcttggtttttcaaattgctgcttttgtccaattttgccagttgaaactggactttcagatatagcaatggtttttttctaaagaaatcctgtcaacattaaagaggttttctccattgtaactaaactggaacaaagacagaaagcttatgggacaaactaaaactggctctcgacccgcagttgtgtcatgttgttttttggacatttaaaaaacgtatttattgaaatatatgcttgttccaaccacccaaaaccacaactgcagtaaggcccaaaaccagacagaatagcaggagagttcccacaagggactgccccaaaccaacctaagatgcgaccagttgggatttcaaagaaggaagtggtaagtccaaagcctttattagtactgtatacattgtgtgctgcattagtcctcatgattgacagggagaaaagagacgttctaacctagatatggggaatcggatatggagtttattatg

SEQ ID NO: 329006 - DNA, 475 bp, Homo Sapiens
  misc_feature (21)..(21): n is a, c, g, or t
  misc_feature (417)..(417): n is a, c, g, or t
tgtgaagattttgctcatctngtttatgccttttgacattgaatgacctattactgtatgcgcattacttggattttgaggggcactctaccttggttatgattcagtagaggaaaaagaccacctttcttcaatttacaaattaaatcttctggagggtcgctatcacaaaacattgacgatgtatgtattataattttttagaaaaaccaccattgtgtcacgtcgacgatgccaaattatgttaggcgtgagaggaaacaccgtgggggaggaagggcaggcagctggaaggaaaaaagctcaaatgatctaggtcactttcgatactgtacttcagatggcggaaatgggatattcgagtgggaaacctggacaaagtggcgcctgctttggatgttgaactgggtattaggncattgaccagttggctggggtccgtgggggtgttctctctgttgaggcacaaagggtt

SEQ ID NO: 329007 - DNA, 465 bp, Homo Sapiens
attcactttccaggattataacagtatggtgattgatgaagtacccttacctaatgtagtagcctaactcccactttggaagatgaaagaaaatggatgtaaatgagcccagatgtggaaaagatgccaggaaacccaaaagtaacacaactatataaatgccgatttttttctggtgagtggtctgagttttgtaagcttgtactaagtagtgaaaaactttttgtaaaatatgatctcattctcacctcagaaaccatttacaacccagattattatagtaatttgcaccagactttccttagactgttaagtaaaaatggacgtgtacttttggccagcaaagcacattattttggtgtaggtggaggtgttcatctctttcagaagtttgtagaagaaagagatgtttttaagaccagaatactcaaaataattgatgaaggattgaagaggttcataatt

SEQ ID NO: 329008 - DNA, 602 bp, Homo Sapiens
cccaagtgtgatgcattgttcttcagatgttgaaaagaaagcaaaaaataccttctaacttaagacagaatttttaacaaaatgagcagtaaaagtcacatgaaccactccaaaattcagtgcattttgcatatttttaaacaaagacagcttgttgaatactgagaagaggagtgcaaggagaaggtctgtactaacaaagccaaattcctcaagctcttactggactcagttcagagtggtgggccattaaccccaacatgggaatttttccatataaatctcaatgaattccctttcatttgactaggcaaacccaaatccatgcaagtgttttaaagcactgtcctgtcttaatcttacatgctgaaagtcttcatggtgatatgcactatattcagtatacgtatgttttcctacttctcttgtaaaactgttgcatgatccaacttcagcaatgaatttgtgcctagtggagaacctctatagatcttaaaaaatgaattattctttagcagtgtattactcacatgggtgcaatcttttagccccagggaggtcaataatgtcctttaaagccagaagtcacattttaccaatat

SEQ ID NO: 329009 - DNA, 395 bp, Homo Sapiens
  misc_feature (41)..(41): n is a, c, g, or t
  misc_feature (51)..(51): n is a, c, g, or t
  misc_feature (71)..(71): n is a, c, g, or t
attttgtgggagtaggtccttacccaatcaaattacatttngttttaagtnttatacttgtatctgaattntcctaagcaatttattttcctatcaaagaatttgttttgtcaacccaagaaattcagtaataatccttctcattaaaaacctttctattatcttaatttattaaaagcttaattttagtttgttattttctaaagatatttgctttcaaaagtaattattcatatatatcagttacaaaattcttctactgagagttccccaccaaaataagccaggcatggtgtgcacgtgtactcccagctacttgggaggctgagatgggaggactgcttgaacctaggagttcaaaaccagcctggaaacgttagactccccgagacctt

SEQ ID NO: 329010 - DNA, 395 bp, Homo Sapiens
  misc_feature (12)..(12): n is a, c, g, or t
  misc_feature (351)..(351): n is a, c, g, or t
aattcggcacgnggaagaagcagatatgcgacttaaaaatgaaaataacataacaacacggattattgtgatagatcctgtacctttttaaagactctgacattccacttaggagtaagatggaaaagtcccttgttctaaaatttgaaaatgataaaaataagtcatattaatggaaattaaagaaagaatatgtccattgttaggttatgtaaagggtacacatcttcacttctttcacatcgttttttgatttaaattaatgtaactaaattttaaaatgacggatttaatattcatgcctagcagtttatttttaatgtgaataaaattaacagtaaaactatcatnaaaagataggtgggggccgggcacggtgggcttcacacctgtaa

SEQ ID NO: 329011 - DNA, 608 bp, Homo Sapiens
  misc_feature (241)..(254): n is a, c, g, or t
  misc_feature (261)..(325): n is a, c, g, or t
  misc_feature (419)..(419): n is a, c, g, or t
  misc_feature (596)..(596): n is a, c, g, or t
acattaactttattcttacacaatagttattcaggtactatcacaattaccattaaaatatcagtagggatttaatgcaacaataggatgtggaagatatttctgctcagtactttaagacttacatttagcctaaaaataggcttccatttaacatgtaaatgaaaggcattattccactcagcttggagaacaaaatgctaggcagcacagattacgtcagaacatttttgaagatacnnnnnnnnnnnnnnaagtatnnnnnnnnnnnnnnnnnnnnnnnnnnnnnnnnnnnnnnnnnnnnnnnnnnnnnnnnnnnnnnnnngctcaagcaatcttcccacctcagcctctcaagcagctgggaccacaggcacatgccaccataccaggccattttatttatttttttaaatagnaacagggtctggcactggcccaagacagtctcaaactcctaggctcaagtgatccatctggcttcgggctcccacagttctgagattatagggcacgagacactacgcctagactaaagatattttcatattccctagttatgcaactaaaagatgtgcactggaaattcacctacnaatggtatatat

SEQ ID NO: 329012 - DNA, 425 bp, Homo Sapiens
tttcataggtaaaatttttatttatgaatgtgtggacacatgactttggatccagccagccagtgacataaataaacttgagcaaaagtttcaagctagaggatatatatgtatagaaaattatatatttgtgtgtgtgtgtaaggcctcttggaacagtgccacaaacctgggacaccaaccaacagaatactcccgtcctttgaaatttccattaagagcacaatgggggtaattataccaggatgctccaatcgctctttccatcttgtgcactcacatgcccgccaaacatgaaatgttcgccttctcccttccaatgtgatggttgttgaacttatttttagtgtcatttggataagcctttgtgcttcacagagaggacatcccactggacccagccactggtcattgtctataccagt

SEQ ID NO: 329013 - DNA, 561 bp, Homo Sapiens
  misc_feature (63)..(63): n is a, c, g, or t
  misc_feature (90)..(90): n is a, c, g, or t
gataagagatgatctctatttttacattgccacatacctagagcaccatgtggcggcacactngctgagagctacatgctgcagtggcangttggacacctttccaactatcagtacctccttcacctcaacaacctggccgaccgcagctgcaacgacctctcccagtaccctgtgtttccatggataatacatgattattccagctcagaactagatttgtcaaatccaggaaccttccgggatctcagtaagccagtaggggccctaaataaggaacggctggagagactactgacacggctccccaggaaatgcctgaaccaaagttcatgtatgggagtcactactcttccccgggttatgtacttttttatcttgttaggattgcaccagagtatatgctgtgcctgcagaatggaagatttgataatgcagatagaatgttcaacaggtttgatacaaatgccttgcttatcatttttaacactttctgattgtatatatacaacatacttgtttcaaagcactggatataataaaaaagtaaagaacatgtaa

SEQ ID NO: 329014 - DNA, 364 bp, Homo Sapiens
gtaacataataaattttttgtcttccgatactgtgaaaaaattactaagacactaagggcatcgtgatccaaggaagtttgggaacctcagacttagaaaaacattcttcctcaccgtcattttcagagtggtaatattttgcagcacactgtttttagttaatgtacagaatcacagaatttaaatttaatctctcacaagggaagggaatcccatttataggctatgctgttatcattggctccaatgattgagagctcacttcctcaaagatagcctgttacacaactggatccagctatccactgatgggaaatgcatgtcacttattgaacaggaaattctgcctcctcttcaaaaaaa

SEQ ID NO: 329015 - DNA, 234 bp, Homo Sapiens
aattgacaataattgtatatatttttcagatacaatgtgatgattcaatgcatatatacactgtcgaataatcaaataaagccaattaacatatctatcacctcaaatacttatcctttctttatggtgagaacatttaaaatccactttttcattattttgaaatatacaaagctttgtaaaagaatagaggaaaaagtaaagcagacttacttctccagcataggagataag

SEQ ID NO: 329016 - DNA, 810 bp, Homo Sapiens
gacagtttagcatttatcaacctgtatttgaagtcacggtctgacgcaagtttcctgggatttgctcaggaaaagtatatccagttagtgaggcagagggccctggagggagccctaggaaacaccattatctacaagtcccagacagcaaaaggtactccacaagaaacagaaggaacttccagtggtagcaaaagcaatgtgaggagtgggaagagagttccaagtggcaggatggtcaacattcgcattttccagcagaagtcacgtaagaatagacaagagtccattggatttggcaatcctgatgtcagggtaaagctaatgggtggagattaattcccattaagttctttcttgaccttagtatgtggggttgcaatttaaagattctgcattcaaagttcagatgagtagagtatgtggaaggagcttggtatggagccaacttgcaaatgttctcttccattagatggtaaattctttgaagcataaggaaggcacataaagatgagtaagacccagtcctaaccctcaaagtttataaacaatacgaataagacaactgtagtacaagatggggcattacaatttataaaatattatggggactcaaaagaggaatacacccatatgcagtcagaaaaggttgcttacttctcagctgttaacacagagaactgtacatactaaatacttaaactacattaattgcttttgcgctcaacaaatttggtgaattagtaataaagacaaagtcccattcatttcaaaatccaagcaaacttcaaactcattcatgagatattt

SEQ ID NO: 329017 - DNA, 390 bp, Homo Sapiens
  misc_feature (56)..(56): n is a, c, g, or t
  misc_feature (285)..(285): n is a, c, g, or t
ttctggaatgttcttcaagctttgcaaccctttcttggaagaaggaagccgggttnacaacccacaagtctggaaaaagcagatgaccctccaaccagaggcaccctgggctcccacattccagccatcggggaatttcaaagtctcctctttgaataacgccacaatcctgaatcctcagacccagctaccagtcacggagcggttctgttcagacacttttgagtggctggtacggagctcataggccccgaggatgacacaggactcggcaccaaacaccantgcttccagcttccaaagctacaaaatcaagctttcaaaacgagtgttcacttccagaagtgcttccgtcacaggtgtgatgtggacgccaagacacacgcaggt

SEQ ID NO: 329018 - DNA, 441 bp, Homo Sapiens
  misc_feature (155)..(155): n is a, c, g, or t
  misc_feature (315)..(315): n is a, c, g, or t
  misc_feature (343)..(343): n is a, c, g, or t
  misc_feature (365)..(365): n is a, c, g, or t
  misc_feature (389)..(389): n is a, c, g, or t
tagactcctattttactcagttagttataatccattatttttattgtttattttgctgctcagattgtcccagccctggctgtagttccttttgactcctgtgtccttttacagagtcagtggtcttccctctcccagctctggagccagccatnttttccacgtatctctatttccttttagtggagaatggtattcagaaaccaaacttactgtctataaatattattctgtacattctgctgaaagtttaaaagtgtttgctttttatattttgaatccttaatactccctgggaatttagcgtatggagtngagggagatatcaaattttcattttttntcacacatattataaccaattnattttccaggcattcttctttatnatttgtgggagtttgtcttgcttttacccagattagtctaacaatgtctgat

SEQ ID NO: 329019 - DNA, 436 bp, Homo Sapiens
  misc_feature (383)..(383): n is a, c, g, or t
  misc_feature (396)..(396): n is a, c, g, or t
  misc_feature (409)..(409): n is a, c, g, or t
  misc_feature (414)..(414): n is a, c, g, or t
cttcataatgacttggtttggtatttgaccttagtttttttggtactcattttcaagtaatgctagttttcctgacttttagaagggaagacttaattagggtagtttttctaatttcatggctctcctttctctttattgattcatctcaaattcaataacaattcaataagttggcccttgataagctgattcagtatcttatctggatgagaaaaggcctaagaatagccaaagaattcctgaaagagacggattaaatgaaagattgccctatcagatgtcagaacatattatacagttttaataatttaacactgttattaggtgtaggttatgggaaacacatacaaatggaaacagaatggggggaacccgggggnaaaaactgacctntttccaaggccgnttttngttaggtgtccggcttgtagga

SEQ ID NO: 329020 - DNA, 462 bp, Homo Sapiens
  misc_feature (30)..(30): n is a, c, g, or t
  misc_feature (45)..(45): n is a, c, g, or t
  misc_feature (66)..(66): n is a, c, g, or t
  misc_feature (82)..(82): n is a, c, g, or t
  misc_feature (267)..(267): n is a, c, g, or t
ttccttcaaatggttaaaagccaaaggcantggtttccttaccgntccctttctcaattgcaaccnattccagcgtcagtgncccctcatgagaaaacacacccaaaagcccagtgtgccttctacccccaaaactttgtgaaatttcctagagtcctcaaaaaaagtgaaatatgtttaaggccagtttaataaaagcccagttggacgacagttccctaaagttaggctggtagtggcttgaacaggggtcttttgggccacccntgagacccggccccacgggtgatgtctgtagttggcgagcgatcctcagccagaaaacctggttgcacacaggcgcagacacgcgaacatgttcctgcgaacgagcttgggcgcatgttttcctcccttgctttctttaatgctcagagaccataaggggatttatcgagaagcattcggtgcccatgcccggtt

SEQ ID NO: 329021 - DNA, 479 bp, Homo Sapiens
  misc_feature (186)..(186): n is a, c, g, or t
  misc_feature (385)..(385): n is a, c, g, or t
  misc_feature (429)..(429): n is a, c, g, or t
  misc_feature (443)..(443): n is a, c, g, or t
tgaatttaaaatactttttatatgtttactaacattaaactattttcaatgcaggaaataaatatttccccaaagaggaatcccccctcaattactttctttcagacttaacaaattggagtagatgtggttttgctcattcttttatctgctggcaactattttaagtctcctgtgcaaggcagnattccgatgacctcgggaaagtcacaggacctcagtttcttcaatgggtaaaagcaaaggcagtgggtttctaccgtcctttctcactggcaccatttcaggcgtcagtggccctcatgaggaaacacacccaaaggcccagtgtgctctacccaaaacttgtgaaattctagagtcccaaaaagtgaatatgtttaangcagtatataaaagccaggtggacgcagtcccaaagttaggctngtagtggcgtgaanagggcctttgggcacctgagaccgcccccggtgatg

SEQ ID NO: 329022 - DNA, 388 bp, Homo Sapiens
  misc_feature (350)..(350): n is a, c, g, or t
  misc_feature (359)..(359): n is a, c, g, or t
atattggcatgaaccacagcacctgacttgcatatttgtgaattccccaaattgctttttttaaattgatttctaatttcatttcattgttatggggaacatactttgtatggtttcaatgttttaaaattaattgagacttgttttatgacttagcatatggtctgtgttgaagaaggctccatgtacacttgagaataatatgtatactgtgggttgttggggtgggattttctatgtatgtttagggtgatatgggttttatagtgttgtttaaggcttctatttccttctttttctgccccagttttatttttgaaagcatactgagggctcccaactcagtgccntagcctccngagcagttggggactacagggcatacgcc

SEQ ID NO: 329023 - DNA, 464 bp, Homo Sapiens
  misc_feature (436)..(436): n is a, c, g, or t
caccagatattttgttcccatcagtttagcccagagatagacagtagaatgcaaatacctccctcccctaaactgactggacggctgccaaggaggccccaaacccaggccccatgcaaaggcacgtggtttccttttctcctctctctgcatctgcgctttccagataagcccaaagacagcaacttctccactcatgacaaatcaactgtgaccctcgctccttccatttctgtccattagaaaccagccttttcagcatctcacccattagcagccccatcacccagtgatcagtcgcctcagtaaagcagatctgtggatggggagcctacgggtggtaaggaagtggtgttttgtgtttcatctccagcttggtgttccatgggcccctaggcgagggtgatcaggggagtgggggccaatgggccccggncctggggcttttgggggaccttgtggct

SEQ ID NO: 329024 - DNA, 421 bp, Homo Sapiens
attataaacttttttctactctaagtgtaatgcacttatataaggctaagaaaagcatattttggcataaaaacaaaatccaagaagaaatttacttttgtaattccactatctccaatatgtaaaaatagaaaatgagttggaattctgttgtttttccctgaaaatttatagcttgttttctgatgttgttatgagaaggcattgtctgaaatttgaggatttagttcttatttttgaaatgtagtaaactaaaaccaattactttgcaactaattttcatgaccactttatgggttattgttcatggaatctgagtctaaaaggcagttgtttctacttaggaatagggcatagtagggtatggggcttggatactaattacaggacatgtggctgtgtggcacctaccgttccccat

SEQ ID NO: 329025 - DNA, 325 bp, Homo Sapiens
agcccacccacgccccagccccattattcccttcttttaattcccacagacatttacacactctccctactgtgtgcccaggcattgctttagattctaataattgagcagcaaatgatccttgtccttgggaaacttagaatctagtgaaatattcattcattctttcattcattcacatatttactgggtgctcacgtgttctggggatacagcaacagaaaacacaggaccctcaggtaaacgaattacattccaaagggtagaagcgaaagcaagggcaaaggtcttgagacagctgtgagcatggctctcgtgccgaatt

SEQ ID NO: 329026 - DNA, 399 bp, Homo Sapiens
  misc_feature (193)..(216): n is a, c, g, or t
  misc_feature (298)..(298): n is a, c, g, or t
atatatttaaggttgtgattttctcctaagcacagggttattagcccatggatttttatacttatcactctttttaaacctagatgttctaaagcaagcttgtccaacttgcagtccatgggctgcatgcaacccaggatggcttcgaatgcagcccaacacaaattcatactttcttaaaatattatgagannnnnnnnnnnnnnnnnnnnnnnnagcctatcaatcagctatcattagtgttactgtattttatgtgtgggtctaagacaactattcttcttccagtgtgggtccnggggaaaccaaaagactggggcaaccctgtcttaaagtttgatttctctttaatccgggggtttttttaggcctatggtaaatttttagggtaggttaagg

SEQ ID NO: 329027 - DNA, 597 bp, Homo Sapiens
  misc_feature (499)..(499): n is a, c, g, or t
  misc_feature (546)..(546): n is a, c, g, or t
  misc_feature (557)..(557): n is a, c, g, or t
acgaaattcttttgggaatgagttttagggccattaaaggacatgacctgaagtttcctctgaggccagtccccacaactcaatataaatgtgtttcctgcatatagtcaaagttgccacttctttttcttcatatcatcgatctctgctcttaaagataatcttggttttgcctcaaactgtttgtcactacaaactttccccatgttcctaagtaaaacaggtaactgcctctcaactatatcaagtagactaaaatattgtgtctctaatatcagaaattcagctttaatatattgggtttaactctttgaaatttagagtctccttgaaatacacatgggggtgatttcctaaactttatttcttgtaaggatttatctcaggggtaacacacaaaccagcatccttgaacctctaagtatgaggacagtaagccttaaggaatataagaataaactgttcttctctctgtccggttggaagtgtgccctgtctntttcctgaaattggcttgtttgaggacgctgaggacgtggcggcacnggggacagtgncagcagccgtgggatttttgtcagtggaggatgtcttttt

SEQ ID NO: 329028 - DNA, 475 bp, Homo Sapiens
  misc_feature (23)..(23): n is a, c, g, or t
  misc_feature (98)..(98): n is a, c, g, or t
gcaaaagacattccttcaactgnacaatattcccacaggctgctgcaccgtgtctcatgtgctgcacgtctcatgcgtcttcaaaccaagccaatttncaggaattggaccagggcacaacttccaccggcagagagaagaacagtttattttatattcttaaggcttactgtcctcatacttagaggttcaggatgctggtttgtgtgttacccctgagataaatccttacaagaaataaagtttaggaaatcacccccatgtgtatttcaaggagactctaaatttcaaagagttaaacccaatatattaaagcctgaatttctgatattagagacacaatattttagtctacttgatatagttgagaggcagttacctgttttacttaggaacatggggaaagtttgtagtgacaaacagtttgaggcaaaaccaagattatctttaagagcagagatcgatgatatgaaga

SEQ ID NO: 329029 - DNA, 427 bp, Homo Sapiens
tttaaggggaaaactgggttttattactgtgttttttaatccatttagtagtcagtgtacttatctgaacaaaggagatttcctctgaatcattgaacaatagtccatgtcaaatcctacatatctacaaaattatgccagaacatctaatagtgttgggggagaagtgtgctgctctgttcaagcaagaggataggagattccgtggcccgtgctgggcattaggtcatttgtgtctggcacaggcttgatctatagtctaatgctgtgtttaacttgtctttatatctaatcaggcaaagacattcttcactgacaatattccacagggctgctgcacgtgtctcatgtgctgcacgtctcatgcgtctcaaacaagcaatttcaggaatagacagggcacacttccaccggcagagagaagaac

SEQ ID NO: 329030 - DNA, 206 bp, Homo Sapiens
aattgctatttgcttttcttcccaaaacatacagaattagagtgaatagtataataaattgaactccccatgtacccatgcccaatttagcaatattagcacatagtcaatattatttcctctgtatcccttccattattttgaagcaattctgttattgtcaaccttaaagcggtcattgtatatctgtaaaatacaaggacttt

SEQ ID NO: 329031 - DNA, 427 bp, Homo Sapiens
  misc_feature (280)..(280): n is a, c, g, or t
  misc_feature (316)..(316): n is a, c, g, or t
  misc_feature (339)..(339): n is a, c, g, or t
  misc_feature (388)..(388): n is a, c, g, or t
  misc_feature (404)..(404): n is a, c, g, or t
agttcagaatgttgacagagtatctgggtatcatggaacagccaagctgacacataaaactaataatcacgagcaggtattgttatccttatttataaagatgtggaaaccgtgaatcttcaaggtcaagatgactcttccaaggttacacagttattaagagctgctttcagtgtactttctgccacatacagctgtctcgtaaaatctatgatttctagtattacaatgtttaatttttttaaattgatctatactagagaaacttctccatgggatnaaccaagaacatgttgggaattcctcatggattttncttttttgtcttctggacacttnattctctgaggtgtcgtacaatttcaattcaattctggacactaccccngaattaggtggaaggnccccacaaatggaggggctttgg

SEQ ID NO: 329032 - DNA, 494 bp, Homo Sapiens
  misc_feature (27)..(27): n is a, c, g, or t
  misc_feature (44)..(44): n is a, c, g, or t
aatttcaattccccattccattaatanggtatacaaatggtcangcccagatgaaagaggtaccatgggaggaggactggaagggtccatgagcacaggagccctctgcctccccacagagtcagggtgtgcccgcccctcctagtatcaggaagctccccctgagcatggtgtccccgggtttttaatgaggtttcattatgtaggcatgattgtattaaataattggcccatatgactgaacttaatctcccagttcttctctcctcctaggaagttaggggaatggggtgggtttgaaatttccaatctctaatcacatgtttgggctttttgatgtgacagccccttccttggaactatgtaaggatcccttagatagttccataataagccttcctaatagagtccactaggaaacaataaataaataagtttaatggctgaaacttcattttcccacttcacaaatattaggatggctactatttgaa

SEQ ID NO: 329033 - DNA, 671 bp, Homo Sapiens
  misc_feature (548)..(548): n is a, c, g, or t
  misc_feature (553)..(572): n is a, c, g, or t
cccaagtatggggttcaagagagtaatgggtttcatattccttatcacccacagtaagttcctactaggcaaaatgagagggcagtgtttcctttttggtacttattactgctaagtatttcccagcacatgaaaccttattttttcccaaagccagaaccagatgagtaaaggagtaagaaccttgcctgaacatccttccttccccacccatcgctgtgtgttagttcccaacatcgaatgtgtacaacttaagttggtcctttacactcaggctttcactatttcctttataatgaggatgattattttcaaggccctcagcatatttgtatagttgcttgcctgatataaatgcaatattaatgcctttaaagtatgaatctatgccaaagatcacttgttgttttactaaagaaagattacttagaggaaataagaaaaatcatgtttgctctcccggttcttccagtggtttgagacactggtttacactttatgccggatgtgcttttctccaatatcagtgctcgagacccagtggagcnaattnnnnnnnnnnnnnnnnnnnntccctgaatgatgattagagacatcaccgctaaaaaactacatttataagctaggatttgttatatgcaaatattttctgcctcttcttttgttctgtt

SEQ ID NO: 329034 - DNA, 410 bp, Homo Sapiens
aagcattggatggcacatttaaaaagatttgttttctgtttataaatattttccataagaagaaagcaaggaataatcttctgacactgtattgtaaaaaaatctttgtctcttttccttttatcttccctaggcatagagattttatgagaatgttttggcatcaaggtttttcttggaatttttgtggggtgatgtgtcctcagccaccctttagtttttttcctggtcctgggttccagtactgtctgtgaataaaccaagatatcagtcatgggctatgtctgcaagactgtctaatgaatattaattcctggggtcattttctcccatagggacaacctgtgggtatgggagtgtagcctctgaagggtagccaggtgtattccctggggctgaggagggatctc

SEQ ID NO: 329035 - DNA, 632 bp, Homo Sapiens
ttttttgatagcgacagggtcttggccatattgcccagctggtcccaaacttctgggctcaagtagctcgcccaccctggcttcccaaggtgctaggattacagatgtgagccactactcgtcaagaaccctatgtttttccattattcttgtttgaggctctccacaaatggtctccagcttgccttcctggctttgttttttttgataaagacacatattcctctgagttgctttattcaccttttccataccacactttgttccctacttcctttatcttgattcctgtcaattccccttcatctctgttttctagctccagtactctgttggcatcctgcctgactcaggtaccagtccacttttaaagcttttcttgacccacttacgtctatagtgttctttttactgaatccctggggcttgccacagattatcttatagttgtggattttgtatatgtatctttcctaccttaggagggggccttaagggtaagtcccagactgatttacctgtttttccccaaatgttaaccatttgaaagaaagaactaaatggatatttctcaaatggcttttgatagatacatgtacaatacatctgttgtcatacctggttggaaaaaa

SEQ ID NO: 329036 - DNA, 384 bp, Homo Sapiens
  misc_feature (368)..(368): n is a, c, g, or t
ggaaatgtcagtctctgaagcaagatgggcaattaaaggaggagcagaaataaaaaagggaaatatgataaaataaactccatgtgaagttttacgaagctatctgcaaagaaaccgatttgtcctttgaaggctattaactcaggacaattaagttatccagcagccatgctgaggagttcatagtctagcaatacgttgcacacaggcaaatacacttaagacgagttggagatatacagaactatcatttaggaaatgattttactctgggatgggctcaaaaaactttgaaaggggctatggaaggaaaacttgaaggtctgtccaaagggaggaggaggtaattaggggattattttagggcnggttgccccgcttagg

SEQ ID NO: 329037 - DNA, 228 bp, Homo Sapiens
tttttttcaacattgaagtaattatttaatgacacaggaaaataacatgttatgaaacaagctggttacaagtagtaggtagatgacttaatttttgataaaaaaattaaaaagcatgaacatgcatataaaaattagattatgtacaaaataccaacagtatttacttctgctcagtaattaaatattcttccctttgtttttgtcttttaaaaaacattatttctg

SEQ ID NO: 329038 - DNA, 440 bp, Homo Sapiens
  misc_feature (305)..(305): n is a, c, g, or t
  misc_feature (310)..(310): n is a, c, g, or t
  misc_feature (330)..(330): n is a, c, g, or t
  misc_feature (343)..(343): n is a, c, g, or t
  misc_feature (358)..(358): n is a, c, g, or t
  misc_feature (372)..(372): n is a, c, g, or t
  misc_feature (411)..(411): n is a, c, g, or t
  misc_feature (421)..(421): n is a, c, g, or t
gcttcacatatagaaccaggaaagaaatcacctccccaagtcgacagggcttagacagactggatgaagcgccccattttgccacattgtctccaggctggtctctccagccacacattaagccagcaagatggcccttttagtcacattcatctccaacataggcagggagcaagacaaggaagtgaaagggactgcctatgagcccagggatcttgccctcaggatggggacggaactgggggttgggtgagggagccaaccccacctgtctcaagcctcaggctaggaacagcacttggctncaggncagggaccaagagccagggntagggtgctgctnggctgagaaccaagnaaaccagttccctntttttggaacttcggaaggggttggacaacccaggcccnttcccttttnaggtcacaattttttcctt

SEQ ID NO: 329039 - DNA, 374 bp, Homo Sapiens
  misc_feature (26)..(26): n is a, c, g, or t
  misc_feature (185)..(185): n is a, c, g, or t
ccttttacccaggagagcttaatgcnagactgtcatgggtggagattgttcctctgatgttcaaattcccctactttgtatattgagtcagtatgagatgcgatttgtttggcaagcacctttgttcctgctgttactgacccttatcttgtagcctcacagctactatgcttttgtccagtccnaactagataggagcttcttcctctgctgcagtgactggtctcacccagggctttcaggaaggtgagaataagcaccttcctcctcccaggaagttttgagtttcctgtgtttcatttctgaatgtaatgtctccatttattttcaattatgtttgattatatttgattaaaaacaataatttttttggc

SEQ ID NO: 329040 - DNA, 515 bp, Homo Sapiens
  misc_feature (116)..(116): n is a, c, g, or t
tcaaggttgatgtttattagttttcccatctaaagactaggtctgacgccaacaaatcagacttttttttcctgcatctatgatcaagcacttgaacatttccccacgaatgtgantgcgccctgggttagaattgttttctgctgtgagccaaggctgagttccagctctcatttacctgcaaggtggagagggatgccaaaggatcgtcagtggtggagaagatgcccacttttttggctgttttcccacagcattcagattcatatctgagttcaacatgctttgtatgttttccccacatgctggggacaggcctgtttttaaagacaaggttgaagagttgggagagaagaggcttgtttatgcacatggtcatcagtacagcacaatctgtctccaaaatgggaaaggtcccctcactagggatgagcttcagttttggtctgtctctggattctcacctacctgattttccactcttatcccccaatcttgggcctgtcctttaactg

SEQ ID NO: 329041 - DNA, 433 bp, Homo Sapiens
aatctctgcatagcacaatggaaagagaaaagattcagagtccagaaacctggaattgtgtcctaatttcacctcttattgagtgacactgagactgagcctccattttctcatttataaaaaaagatattaatacttattcttgaattttcatgaagataaattagatcatttatgtcaaagaactccctaaactataaatcacacaagttagttgctgctcttagtgatggagaactgaacacccttcgaacatctcttccattccttaggaaggcagtaatcatcaggaaaggttttttcatggcatatgcccaaatccacctcctgttaacttctaattattaatctcgggtttactctttctaactctgggccatggtttttaatgacaatacttagttgttgagagtgtgagaaatcagtattccta

SEQ ID NO: 329042 - DNA, 354 bp, Homo Sapiens
ttttagttgataaaaactttatttaaaacatgtaaagaatcatatagttcaaaactgcaaaaataaaagacaatttcttgtaacttaaaaataaagtatatatctagaaaccaccacattaacatctactatttatagtacaatctccaattcaaagctaatctttgtatttctgtattttgcaacttttgagctagaatcttcctccctatccaactatactgttatgtaaccccattgttttaacatttaacaatacaacttgggtattctctgacaagcaagaatatatactattgatcacttctatacaccaaaataaaaacagttcaaatgactagaaactaattttac

SEQ ID NO: 329043 - DNA, 498 bp, Homo Sapiens
  misc_feature (19)..(19): n is a, c, g, or t
  misc_feature (32)..(32): n is a, c, g, or t
ggtccgggattcaaaaccncttggaagtgaangtgcacccactcacccattgccccctaatgatcctccccgcaaaaattttttgccataactgttccccttggacattatgttcttgctgggcctaagaggtccttagtttccagagggaggaacactgccacccaggagacacaacaatgattcccattaaactggaagttaagattgcccacccggacactgggcttctcctacctttaagtcaacaggctaagaagagacttacaatgttggctggggagattgacccagactgtcaagatgaaatcagtctactatgccacagtggaggtgaggaagaatatgtgtggaatacaggatatccattagggcatctcttagtattaccatgccctgtgattaaggtcagtgggaaagttccacagcccaatccacgcaggaagacaaatggcccagacccttcaggaatgaaggttttggtcactccaccgagga

SEQ ID NO: 329044 - DNA, 350 bp, Homo Sapiens
  misc_feature (63)..(222): n is a, c, g, or t
tcttttattgtgaactttctaagtagaagaaagaattgtaaggccggtgcggtggctcacacnnnnnnnnnnnnnnnnnnnnnnnnnnnnnnnnnnnnnnnnnnnnnnnnnnnnnnnnnnnnnnnnnnnnnnnnnnnnnnnnnnnnnnnnnnnnnnnnnnnnnnnnnnnnnnnnnnnnnnnnnnnnnnnnnnnnnnnnnnnnnnnnnnnnnnnnnnnnnnnntcaaatctgggcgtggtgggatgtgcctgtagtccctcccagctactcgggaggcgaggtatgaggatcacccaagcccatagatcgaggctgcagtgagtcactccagcctgggtgaccctgtctcc

SEQ ID NO: 329045 - DNA, 389 bp, Homo Sapiens
tgtaatcccctggggctgaaaggaaatctccctggtgtacttttccgtttgaaaaagctaaccccttcagatgttaagactgtgttcacccagcccgactttcctttctttgggcccacattgctggtcaccccaatcaaatgctggtattgagttgaaaacaaataatttctgaccccttgattctctacaatttgtgaaaaaagactagtatctctgccaggcacggctcccggcttgagttagatcttttaaaagtaggaattcagggactacagccacctcagtcgaattgcctaccacttaactattttcactccctacacaaaactgatcttcccctgcatttttcacaggtgtcctaagcagggtctcaaatctactcccac

SEQ ID NO: 329046 - DNA, 399 bp, Homo Sapiens
  misc_feature (237)..(237): n is a, c, g, or t
aaatgtgatctccccttatcatcattcccaaacgtgtctaattctacatcacttctaaatatattgtgtttttcccagtctcccttggttcaagctcctgagggagactgctttgtcaaagcctgaacccacaatgggaaggaaggaaagcataatcttagattgacaaagaagaaaatacagatcaaattccattagtaaccaagatataattaaaaatagagtctccgagttccnagccatcatctatgtaagttaatactcaagtcagtacagttttagtatgtaggcaggcattctcacagcaagttactggtcatttaccccgtgtagtatttgggctatgtacacgcttgctttcgtcgacccttcagggtattgaagctcatggtgctagct

SEQ ID NO: 329047 - DNA, 601 bp, Homo Sapiens
  misc_feature (197)..(255): n is a, c, g, or t
gctttcaagctaaaaaatttaaaaacccttatttttattgatctgaaagttgaaaaaccatgagcattttaaagttacgttagaaagtgagttttataagcttcttcttaaactcaatttataatctacaattattgcataaagtgattttaaatctttaaaaatcttgaattggctggcactttgggaggccaagnnnnnnnnnnnnnnnnnnnnnnnnnnnnnnnnnnnnnnnnnnnnnnnnnnnnnnnnnnncagcctgtattttttttaagacctactatatgtctggaactgttataggtttggagaaccagcctaatagtaaacaaactaatataaaaatgatgtaatcaagtaatttaggaggattttatatattattgttgccaaaaaggtgatcaagtaggattttctttgttcaaagaacataacagtttttttcatcagtggcatgataattgagtacttttggaatcacaacactttaaacatttagacaggatcctatttacattttagaaagagattaagagatattctatagatgtgtcagtatgatggaaagaatgcattgtttttagaaagtcaatgagcactt

SEQ ID NO: 329048 - DNA, 711 bp, Homo Sapiens
  misc_feature (33)..(33): n is a, c, g, or t
  misc_feature (40)..(40): n is a, c, g, or t
  misc_feature (101)..(101): n is a, c, g, or t
gcccctgtggaccagaaggcccaaaaggaaggncaaattncctaaggggagaaattcaaacaaaatgatggggtgctgcccctatgctgggccctctttgncagtcgacttcaaacttaatgcattagcgccgtaaggttgtaagagaagcaactctggcttgatcttagaaaagctgattttctttttggcaagcatatttccggtgagaactgatgggaaaggtggtgtggattcgtggacgaagtctctaacgtaatcttgactactgaagggtaaagacttgcccacaggttagagattacatgaattatcccacaacgaatggtagcagatggatgggtcaggggtattttaattgtacagcataacactttagagagctgggaagtatgggacatcattcccgtctttcttcactcagtaactgattatcttgtttcttgtccacagatatttaacctaaataacaatgctttttgaaggttgtttggctaacccagaggtagtaaaagacttcataagtctttctattactgaagaggagcttagtaataactgcaagtctatttatatatgtagcagatggtaacaatctccagagccactgacatatgcagcagaaaagcacaaagaactttgtatttgttataatttctactgcattgtccagatacagatagaaaatactgatatgtagtgtggggaatc

SEQ ID NO: 329049 - DNA, 468 bp, Homo Sapiens
  misc_feature (372)..(372): n is a, c, g, or t
  misc_feature (391)..(391): n is a, c, g, or t
  misc_feature (415)..(415): n is a, c, g, or t
  misc_feature (420)..(420): n is a, c, g, or t
  misc_feature (431)..(431): n is a, c, g, or t
  misc_feature (438)..(438): n is a, c, g, or t
ttgctgttaccaacgacactgcagtgagcattcttgcagctaaatctgtaaacacatcctcgactgttcctttaccccagcttcttagagatggggtggtgggttaaattgtttgcaaaagtttattttcattgagtgatctttctaaaatggcattttgaccttgttactgtcttgctttaaagcctccatctgacttcctgggagcttccgggacgggttccaaaaaataaggccttatcctgggcatggaagaccctttagggttgtgcttgggaacttgccagcctcagcccctccccactggtgtttacctgctaggcgcacctcacccccacggggcttacctgtttctctcaggcaggctccctnatttcttagggttttgcgncgggccatggctttttcaggccanttttnttccccgggcnttaaagnaggcaggcttgaaaatattcctggtttggg

SEQ ID NO: 329050 - DNA, 321 bp, Homo Sapiens
tcaaaattacactaataccactgtcaacaaatataataaagttcaaacaacaaatgtaataaagtttgggatttcttcgcagttattttaatttttaccatgtatcgcagagggttacaaggataatgtgttccacctgtggttatattaccaacatgatatatagttatttgtcttgatatttaactttagcattttattttaactaatccttgatttaatttttaacctaatcagatatgagtgtcacaaatcctgctcttcaatctacaatatttttaaaggagctgctttatttctatccagtcaacctttcctaat

SEQ ID NO: 329051 - DNA, 381 bp, Homo Sapiens
  misc_feature (81)..(81): n is a, c, g, or t
  misc_feature (115)..(115): n is a, c, g, or t
  misc_feature (118)..(118): n is a, c, g, or t
  misc_feature (183)..(183): n is a, c, g, or t
tccgcaacctgggtaacttgctctgcctcctgccttgaatcaggtcgaaaggggaaatggaagagatctgctcccaggcgncgtgatggccactttctcctcccaggtccctggnctntccgctccttcaccaggtcatagtacacctttcccgtgcagaagatgagccgctgcacctgcctncagggcccgtgctgcggccccatcttcaggaatcacccgctggaagctggtcccggataccatttggtcaaagctggacttggcctctgggtgcctcagcagagatttaggtgtgaagataatcagcggcttgcggaagggcagcaggatttggcggcgcagcacgtggaagtagttggccggtgtggagcagttgat

SEQ ID NO: 329052 - DNA, 294 bp, Homo Sapiens
tggtgtgatcttggctcacgtgtataccagcctgggcgacagagcaagactctgtctcaaacagaaaaaggaaatgaagtgtttaattttccttcagtcacaggtctatttttactctaaaatgtaacctttgtatgcaaaaaaaacattaaattctacattgacaaatattctagtgtgtataggtttgctatattctcattctcttatttgccaaatcccctatactccctttaaaaaccaactacactaactggactgataacccagttctttcgagcattggtgtatcca

SEQ ID NO: 329053 - DNA, 323 bp, Homo Sapiens
ttctctatgcaagtttacagaaacataacaaatatgtacataagaaagaagatggttttgggatagcgataagtgctggatgaaaatgaaaccaggtgataagccagcgatgactccactgagggaggttgtgagcgttacacaacatggtcagaaaagaccccgttggaccccaagtcccagctgggtaaggaaagtgccagcttcatgacggttgggagaagcattccagtatcaccgttttaaaatatgagcatcctaaatattacacaaaccatacttacgctaaatatttgggatctacactaaaaatgtagtgtagt

SEQ ID NO: 329054 - DNA, 502 bp, Homo Sapiens
  misc_feature (420)..(420): n is a, c, g, or t
  misc_feature (425)..(425): n is a, c, g, or t
  misc_feature (461)..(461): n is a, c, g, or t
gtgaacaggagggagtctgaaagttttcagagatgagacatttgcgtttctcagctcccatggcttcttgcctgaaattgtttccctccataggagatttgagtaaccgatcccttgacaaacaacttaagacagctggagctctaatcatcaaggatttttatggtgctgcttttgaagtaaaaatagtgaaaccccttatggcatttcaagtggaaaaataaataagactggctgtccaaccagccggatgtaaggtgatggctggaagtgccgagagtggtgtggttccatgttgtaggtatgcacgtgctcccatggccatgacctttgagacagtgttaggctaagtttgtcaggtcctgtgctgagtatttcacctctggaatctccttctttttaggaaagccatgggtaggnattantggcctgttccaagggcaccaggggttgttcgtganggtttttatttgaagttcaccagttccttgaaaggggttaa

SEQ ID NO: 329055 - DNA, 591 bp, Homo Sapiens
  misc_feature (455)..(455): n is a, c, g, or t
  misc_feature (496)..(496): n is a, c, g, or t
  misc_feature (515)..(515): n is a, c, g, or t
  misc_feature (528)..(528): n is a, c, g, or t
  misc_feature (533)..(533): n is a, c, g, or t
  misc_feature (557)..(557): n is a, c, g, or t
  misc_feature (573)..(573): n is a, c, g, or t
cagattttagtcattccatcttcggaccctttcagataaccaagagcagagttaaaaggatgggcagcatttctgatttctcataatttggttttgtaaatctaggcagtctacattcagaatggaggagtccagagtataagtcaaataacatttttccttattcaggttttctccctaaaaaacaaaaccatttttaattgcacttccattttgtaatggctcataggattgctgtaaggtctcaattactaggggcttccagggcatttctgagaaataaccctgggtccttgtctagacccttatgccagaccccactccaaagagcggtaagaattccttagtgtcatagcccagacctgctgagctgcgaggcttaagtgtccctgatcaccaaatgtcctgtgcttcagggtagcgaggctccctcccagaaggtagtttatacatgnaggggaaggacgctttacaactgggtattctaaactggtgnaggaacactgtttaagccntcactttaggacnggagncctaggtagagttttattgtctcnttctacttgtcatttnggggaagtggctactgat

SEQ ID NO: 329056 - DNA, 751 bp, Homo Sapiens
  misc_feature (442)..(442): n is a, c, g, or t
  misc_feature (444)..(444): n is a, c, g, or t
  misc_feature (646)..(646): n is a, c, g, or t
ggggggggtatttcaaatgcactctattttatgcagtaatggccacgggggatggagttaggctcttacattgttttcactttttaacattcttacttgttaaatgaagggttggtgactctgtgggttccctggctttctgcaaaccctcaaacctgagtactgctggtcacgcatgtccacagcaaagagccagagttcaccgccctttctcctaccttcttctccagtttgtttcaatgccattcagtttgcttggatggagatggaatgggtggccagggtctcctgataaattaaaaactaaaaccctgctattttccatataataaatgctaaaagccatatcagagcattaagttgcagccagagaccagtcatcaggggctgccaaggctgaggtgtcactggggaaaggggacactgggcccaacccttgctntncttcccactgctgtgggggctcagtgaaaggccagacttttgagtcctcttcctccttgctgcagggctggggcctgccagagtggtaacctgctactctctcaggagcagcactgaagcatgtccatgttttagcagaagctcaaccaggaagtcgctgcccttccttgcactgtttctgcagacgtgcctggtaggctgnacttcccctcctgagccccgagaactgtgttgtgtctgttgtcatggaaacgatgcaaagccacagagtcaatgctgccagtcacaggaggccttggggacgcgt

SEQ ID NO: 329057 - DNA, 365 bp, Homo Sapiens
catgtctctgaacactattaaaagctccctttcctaggaatgaccctgttgaaaatgaaaatgccctctttggaatttccttcccccaaacacatcagttcctagccccacatttagattcattcaatcccactgctcccagtttagtaattgcaatggaagcttccttactatacattttctcgtctggactccccctgtcattttttcacctgtctgttttggataaaaatccttgaaatatgtctttctctgccccagagacatcataaatctggtgtatttcttgtttcttagatggaagtttccagtaattctttggactttcataagatccaagaggccagagatatttttaaatatat

SEQ ID NO: 329058 - DNA, 445 bp, Homo Sapiens
  misc_feature (23)..(23): n is a, c, g, or t
  misc_feature (47)..(57): n is a, c, g, or t
cttccccctttggtttttggtcnttttaaaaaaacattatttcctgnnnnnnnnnnntccagaaaaacatggatcgtggaagagaattaattaaacacccaggaattaggaaccccaagaagctaagcccaggagctcagcagtcaaggttggaagtcccaggacaggtccgacccagggtgatggtggccaagcccagaaatggaagattgttcttttcttttcctactggaatgttctttaccagttttctctatattcgatgttagcacacttatttaatgggatcctatgattaactggcacaacagcaaaatgatgctagcaactttggctttgaactgctacaaaatgtactatcttgtagttatatactgtacaaaacacactagaaatcaagtgctcctacaacgaaaaactcatctgactaaatcactgattttgc

SEQ ID NO: 329059 - DNA, 459 bp, Homo Sapiens
  misc_feature (12)..(12): n is a, c, g, or t
  misc_feature (52)..(74): n is a, c, g, or t
  misc_feature (148)..(148): n is a, c, g, or t
  misc_feature (318)..(318): n is a, c, g, or t
cctaactttccnacccccggggtgaacagaagaagaagaccttggtcctccnnnnnnnnnnnnnnnnnnnnnnnctgtaataacagatggggctttttccattgttcctattctttcagtcttttaaaaaaataccttagtctttatntctccttcaatttgcccttaaccactgatggatctttaatgtggagcttctgaagacacctttacccaaaggcccacacctctgagcaaattttgaggacattcttgaattggcaagccaaagattcaggaaaaaatgggctgggagcagggagtcagcctgtatggatngtgcgcctgtttggtgcctctaaaatgtgactgatgacttcctcttgtctgcctttgaaattgcatgtaagataggacactggtgaattgtattatgacatcctccaactccatttctaaattttattgtcctgtcagact

SEQ ID NO: 329060 - DNA, 429 bp, Homo Sapiens
  misc_feature (55)..(84): n is a, c, g, or t
  misc_feature (176)..(176): n is a, c, g, or t
gtgaacaagtacaaatttagcaattttaatcaatattcttgcagacaagtgtggnnnnnnnnnnnnnnnnnnnnnnnnnnnnnncaaaattgagaatttacaaataagatttgatacatttattctagcagtgggtaagtccatagagtaaatttcaagtaggatatatttatttnctttggtggtgtttttaataattcctttctactgcatacaaagggacctgaagcttaaattcagttagttttggagaaatccaaaatgagaaaaacagaaagcatgtaggcattccatgaaggcaagaacagcgtgcatatgctattcctggaaatactgaagtgtccgaatttcatgcctaaaaagtctggaaatcacactgaatcagttgctggtttctgatgtctctgggatgtgctattacaaacaaac

SEQ ID NO: 329061 - DNA, 463 bp, Homo Sapiens
  misc_feature (22)..(22): n is a, c, g, or t
gggggttttttcctaacccctnccataataaaagaactacggaaaaggcaattcaccaactcggaaacctggtggtttgggatctggttcaagacctcctaaacccacaagatttgggccacgcccgcaactcccctttccagcgtgatcaatctccttcaacatccctctggctaattccctcctcaggtatttcttccttttgtgttcccatgaccagcttctttgaggaattttaaacggctagttggaattgttgaaataagctggccccagagtaatgttcccattcctaggaatattgaccatagccactgttctattgaaagttctgaacaactgaaaggttttccaccaaactgcacaattattatctgtaccacaaaagtgcctaaaacaattgtgcagaagatggcattgttaaagattccttcgaatacatttctttcaccatgaattttcc

SEQ ID NO: 329062 - DNA, 419 bp, Homo Sapiens
tcatggaatgccttatctaccatcatactattccacacagcattgcctctgaccaaggcactcactttattgctaaacaatggccgcagtggactcatgctcatagaattcactggtcttaccatgttccccatcatcctgaagcagctggattgatagaacagtagaatggccttttgaagtcatgattacaatgccaactaggcaatagtttgcagggctggggcaaagttctccagaaggccatgtatgctctgaatcagcatgcaatatgtggtactgtttttcccatagccagggattcacaggtccagggattcaaaacacatgggaagttggaagtgggcaccactcaccatttgccccttaatggttcctcccgcaaaatttttgcatactgtttcccttggacattatgt

SEQ ID NO: 329063 - DNA, 641 bp, Homo Sapiens
  misc_feature (618)..(618): n is a, c, g, or t
agaaaatgaattttctcccacaaatagtacttctcagaccgtttcctcaggtgctacaaatggtgctgaatcaaagactctaatttatcaaatggcacctgctgtttctaaaacagaggatgtttgggtgagaattgaggactgtcccattaacaatcctagatctggaagatctcccacaggtaatactcccccggtgattgacagtgtttcagaaaaggcaaatccaaacattaaagattcaaaagataatcagggcaaaacaaaatgtggggtaatggcagtgttcccatgcgtaccgtgggtttggaaaatcgcctgaactcctttattcaggtggatgcccctgaccaaaaaggaactgagataaaaccagggacaaaataatcctgtccctgtatcagagactaatgaaagttctatagtggaacgtaccccattcagttctagcagctcaagcaaacacagttcacctagtgggactgttgctgccagagtgactccttttaattacaacccaagccctagggaaaagcagcgcaggatagcactttcaggttcgtccattttcaggttcccaactccagtgaattaacaacacaaaggaaggcgaggttnccaaaacttgaacaggcacagga

SEQ ID NO: 329064 - DNA, 519 bp, Homo Sapiens
  misc_feature (51)..(51): n is a, c, g, or t
ggacttcaccccactgtcacccaaaaggcctgacccacctcagattatagnccctggggagttagactttgagcctgtggaaagatgaaattgatattacttataatacatttaaaaatatcattggaactagctataagtgacatttcaaagtgtttcatgttattttaaatatagattatgacaaactctgagaaatacagctaggctgccaactatatcaacttacaaggctagaacacaatcaatgtaacattacacacatctattttttaaaaaatatccccattaacgaggctaacagtcggaaggtttgagttcctagttctaaattaagtgtcacttcaggttaataataagattggtactaaaatcagtgctaaagttatcttttatagtagtaaaatttcaaccagaaagaggaaaactgaaaattaaggcttaaatccattcagaaaagaattgctcaattatggaaattctctctggaaatgtgattcacatgttaatttgtatcaa

SEQ ID NO: 329065 - DNA, 469 bp, Homo Sapiens
  misc_feature (416)..(416): n is a, c, g, or t
  misc_feature (432)..(432): n is a, c, g, or t
  misc_feature (452)..(452): n is a, c, g, or t
cacttaaaaaatgcatagggttgagcacccgtattattgagggtggataatttaaatgtatagaagaaatcagttcagagtttaatgattgaataacattctctttagcaactatgagtgtgaaattttggttaatgataccgaaaatattaggttataggaagttacagtattacataaggtgagcaaaataatctaatccaattaatataacgccatctgggggcttgccagacagtcacagtggcaaactgctgaaatatgaaaggctgcatcatatgtgatacatattcccactgctaatacatgggtgccacacaatcagttgtatcctggccatgggtccatctttcatatgtgggaggggaaccttgggctgggattggacagaatggattggtgacctggggccaggntctaaccccttgcagntagacctaagggataaaccngggttaatatgaccaac

SEQ ID NO: 329066 - DNA, 422 bp, Homo Sapiens
  misc_feature (379)..(379): n is a, c, g, or t
  misc_feature (405)..(405): n is a, c, g, or t
ttctaatttattattaaattacataccaaagcttcttctatacagtcagaaaatgcacatttagatgagaacaaaaattaagtacaaatacaataaaattggttccaagaagctattttaaaagcaaaaacttacaaagtgcatttggaaaacaataggttttaaaaatctgtattggcattttttcaagaggaaacatcttccatcacaggaaagtatggttggaattgatttccctcctcccttaagaggctaacagggtggggaatgggatgccaagtaccttgatattaaaggggagctctcagggtatcttttaatttgtttttgcagggacagggtctttggctacattgcccggggtgggtctcaaactccntgaccctcaaacgttcccgcctgccntgggggctccccaaagt

SEQ ID NO: 329067 - DNA, 395 bp, Homo Sapiens
agtacccaggaaaagatttttatcctttagcctaaggcagtctgaattcctcaagccccaaagcacataaatttgttggaattatttcaatttcctagtcactaaaaatgtgacgcacatttacaccagtggttcggttgattacttctcttcagccctagtctcttaagcacaggtatacacacttacagcaatatctctgcatacaatatttttgacagaatgaaaaagttaaaaatattgatgtttatttcagcgattctgaaatggtttataaaaattctatgactataagaaattcatgaggaatgcaatatatcaggaaagaacaatgtcatctttacataaaaaggatgcgtgtcagtaatttgagaggctggaatctagtgacaaat

SEQ ID NO: 329068 - DNA, 636 bp, Homo Sapiens
ccacacatctcagagttatattattgtaacaaatcagtcaaaattccattttacagttaaatagtacagaagacagtttactgtacaagcaagttgtgcgttaaaaacaaacaccaagcaaacgatagtgcaaagcagtttccacccagctccatcctctcgccagctctgggatggttttacatcagatgagtgcagcaggtgtcacacctcagcatgacaatatgtcacaaaagattggtacccactactgacaggctcacagtaacactatatcaaaacgtcttcctttcctcgtgcttcctacatcagtgtgtttgcctaagtacaactttaacgcagccttgtaaataaggacctacttttaccagcccaggctgtctgtacccactttgggccttacagactcagtacggctgccgtcactttttgtcaggggatgggggatggggtaggaagagcaatttatttactatccctgcctctccaggatcaggaagggttagtaatctgggatgagactacaaagtgctgggcactgggaacccaaaggtgcctcccacgctaacctgggaccagctataaccagagaacaggagggaagaaactacaaggacaatggattcatagctgctt

SEQ ID NO: 329069 - DNA, 414 bp, Homo Sapiens
ccaggaagggttaataaatcctgggaatgaaaactacaaaatgctgggccactgggaaccccaaaggtgccctccccacgctgaccctgggaccagctataaccagagaacaggagggaagaaactacaaggacaatggattcatagctgcttcctaagaaggcatggagaggccccttgggtgcagggagtcagcaactattttgaggagatggagactgtttttccagtgaggacaggccaagagaaaccgcagcaggagggaatggaataggatcaccagaaggactgcctaacctgccagtgtgtctctggtgtatggttctggccgttgtgacaggttgggtggggacagtgctctcacagagacaaccaatgaagagcattttgtagggcagatttcctgtgccgaaa

SEQ ID NO: 329070 - DNA, 523 bp, Homo Sapiens
  misc_feature (495)..(495): n is a, c, g, or t
  misc_feature (505)..(505): n is a, c, g, or t
ctatagaagaggacacattttgtacacaatttaaaatattttcttacaccaaaaattcttttgttagacacaagccttcaggaatgtttgatgcactcatagagcctagagcagtaggtttgccagggaactgaaaagaaggaagcagaatgggaggtggggtctgtccccactggccgccttcggcgggtggacaataaggatgcaggggcatctttcctgagggaccataaccagacggctcagagggtgcaagtagtgaccctcccacaaagcatgtgggtggcctaaggtggggctgtgtgcggtggagggaagcggggacctagagaagatggctgggtggatggcccagggaagggtgggagcaactccctctctttccttccacttatttattaataagagagttcaggcttatttaggacaacaaaattttcaggtgtaaatgagtgtctaaggagtacgggaaaagttaagtaaattttaatacanacacatgatnaaatattaggatacgtgt

SEQ ID NO: 329071 - DNA, 456 bp, Homo Sapiens
  misc_feature (378)..(378): n is a, c, g, or t
  misc_feature (410)..(410): n is a, c, g, or t
  misc_feature (416)..(416): n is a, c, g, or t
  misc_feature (425)..(425): n is a, c, g, or t
  misc_feature (443)..(443): n is a, c, g, or t
aatatcaggaaaccaaggcacagaaacacttggggatttgccaaggacacgcagctcaagtctgttctgtagctgggtctgtgctcagggtggctggcttcctgcaatgcctccttctcccttcccctgggagagaaaaaaagggaccaaaagcccaaacactgccagtggctcctgttactcctgacaagctccccagggggatgctgccttggcctcacagctcctctcccccaaagcctgtgctctttttagaatatgactcggtcccaaaggtcccagcacttgctctcagccctgtccttccccagagcccctcatcgttactccagtcatcacatgtcctcctcctgttctgggaccagacccgtttacctntggcaaggagggagccataatgggaattcagncatttnccaaggtgnaatcataccccgaacctnattccccagaatt

SEQ ID NO: 329072 - DNA, 563 bp, Homo Sapiens
  misc_feature (17)..(17): n is a, c, g, or t
  misc_feature (76)..(76): n is a, c, g, or t
  misc_feature (93)..(93): n is a, c, g, or t
ccccctaatccttcccnttttcccgttccccccaaaaccccaatgtccatgggtttcaacaaccccggaaataacntcctcaatgttgttaanttcctggggaattaaggttcggggttatgaattacaacttgggaaaatggcctgaattcccaattatggctccctcccttgcccagaggtaaaacgggtctggtccccagaacaggaggaggacatgtgatgactggaagtaacgatgaggggcctctggggaaggacagggctgagagcaagtgctgggacctttgggaccgagtcatattctaaaaagagcacaggctttgggggagaggagctgtgaggccaaggcagcattcccctggggagcttgtcaggagtaacaggagccactggcagtgtttgggcttttggtccctttttttctctcccaggggaagggagaaggaggcattgcaggaagccagccaccctgagcacagacccagctacagaacagacttgagctgcgtgtccttggcaaatccccaagtgtttctgtgccttggtttcctgatatattt

SEQ ID NO: 329073 - DNA, 438 bp, Homo Sapiens
tcgttccctatctgaaaaccatagaaaaaaacccagtggtaccacagggattattttggccttttagatgtcactgaaaatagaaagagctaatagaaaatagatgtaactagaagaattttaattagctataaggagcatcctgacagttacagtttgtacatcctggaatgagttactgaggcatcatatttgggtccatcacattctgttgctctcctggggattcccggaacatcctggtgtacagccaatctggtatcttcagaggaagcagatggtggaggcgtggggcgggggggctgggaatactgcatggtcatagctgactaacctctgggcacatactctcattctgagaagattctagggcccctaaaactgtctgtagggtagcaagcaaaatctttagggagctggcccctattctgaggcaag

SEQ ID NO: 329074 - DNA, 311 bp, Homo Sapiens
  misc_feature (37)..(37): n is a, c, g, or t
  misc_feature (218)..(218): n is a, c, g, or t
  misc_feature (279)..(279): n is a, c, g, or t
ttatttttttggcaacttcacgacttttatttgtggngcctgtgctttatctcgaaaataccttctccccctgccccagacagtgggcggggagggggcagcaaaaaatagaagacgtccttccctattgcacatggaccctatatacaggcccacctggctgaggctggcgggactcttggcacattcttggatccctgctcaggaggggaggggtnacggggtggcatcacacgtgagatggggacctccaggcggccactctggtcctggctactnatccttgcacttggtcctcagttccttcctgg

SEQ ID NO: 329075 - DNA, 495 bp, Homo Sapiens
  misc_feature (369)..(382): n is a, c, g, or t
  misc_feature (422)..(422): n is a, c, g, or t
  misc_feature (439)..(439): n is a, c, g, or t
  misc_feature (447)..(447): n is a, c, g, or t
  misc_feature (465)..(465): n is a, c, g, or t
aaaatatttgaagagatttattctgagccaaatatgagtggccatggccggtgacacagacctcaggagggcctgggaacatgtgcccaaggtggtcgaggtacagcttggttttatacattttagggaggaatgaggcatcaatcaaatacatttaagaaatacattggttgagttcagaaaggcaggacaactcgaagcagcgggggtgagtgcttccaggctgtaggtaaatttaaacattttctggttgacaattggttgagcttagctgaagacctgggatcaatggaaaggaatgttcaggttaagataaaggattgtggaggccaagttttattgtgcaggggaagctctcagcagacttcnnnnnnnnnnnnnncaggttgtaaactgtttcttatcgacttaaaaggggtccnggctcttagttgatganccccgggnctgggaagaaaggagggnaaccaagggggaaggggctctttataggtt

SEQ ID NO: 329076 - DNA, 422 bp, Homo Sapiens
  misc_feature (291)..(291): n is a, c, g, or t
  misc_feature (386)..(386): n is a, c, g, or t
aaagtaatagcagctttcactctggaaaaaaacatcagagcaattccatcgcagcagtactttggttacttagcatcatgtcatctcagacatgtgtaacacgaaaggtgtgaaggggaaaaggacatcagaaatggctgcagcaacaaggaatctagcaaaaatagtcttctgccattctacatgccagatgtggtaagaagctctttcagccggacttggtaaaatgccttgtttgaatcgaagtctgaattggcggttatttttaaattaataaagtttttctatttnggaaggacttctaataacatagagcagtatcctaagaagcccttggggacttttttaatgaattaggaataatgtgccaattagaccgacagttntaaccgagtgcttcggggggcttgaaagtagttgtt

SEQ ID NO: 329077 - DNA, 449 bp, Homo Sapiens
gaactaagtacagtaaaattctttcacaaaataatctgagatcaagataaccaaaaaaggaaatattttcagtgaaaaaaagttaatttttcccaaggagtgtgtaaaaaataaatgtcttttaggatattgatgagaagaggaacatgccaatatccttgctttattaacagatttaaaatttacagtgagtcctcaattgacctcaatggaccaatggcttggtacagaaggaatcagaggcgaggacatgttcctgctgcagtgggaagtaagacagagcagggactacggcctgccctactgggagggaaattgctcctaggggccttgtctccaggagttgggaaaggggaaagaaaacattgcccagtcttccaagtctctgggcaaaaagtcactgagttggaaagaagtacctcatacagatgggaattcatattttagaa

SEQ ID NO: 329078 - DNA, 589 bp, Homo Sapiens
  misc_feature (37)..(37): n is a, c, g, or t
  misc_feature (409)..(409): n is a, c, g, or t
tatttcccgaagcccaggtttattctaacggagtgcncgggctaaggacccagccagcatgagctgtagcgtcgacacaaatccagggatcagctgtcccaatctcccacattcctctttcacaatgcactcaacaaacaggtcacacatcccctaggtccacgaactcatcttctcgtttggccaaatcgtcttcatctcccaaagctttccagccactggtgggtaagacgggcttagaggaatgtcgctggagcagagcgcaaggaaacaaagacgagaggcggggcagagttcctcagcaggcagggggcctcagcctgggggggcctgctggctgtggtgtctctcgtcgatcttctcttgtaaactctggacttcctccatcatttccaagagtttgctcagnatgccacttggccaccacctaggatttgggcttctggaatccaacgtaggtagcgctgggcccagactttgatttcgggcccctcgatatgcggtaacaacaaaccatggtagtcagtggacttgctatgccagctgtcatagaactctcgaaagttgtcttggagctcatcagaagaat

SEQ ID NO: 329079 - DNA, 858 bp, Homo Sapiens
  misc_feature (635)..(635): n is a, c, g, or t
  misc_feature (672)..(672): n is a, c, g, or t
tttcctattttatttagcaggcattttctttactgaggtttatattgtctgccaaaactaggaggaaaagaaaatattaacaaccctgaaagctctttcattctgaattattccttaatgtttttaatgatttattataaccacacaaatgtgatcttggggccatttggaagttattgagtttccttggagatgggacttggcattttccaaaccagagtttgcttttgtggcctggaagttgcaaggcatatatatttggaagactaaagattattccccaccaagaagttttgtcaacctgaccttctctactcttatgacgctgcacacacagcagtaatctctgcagaggagagcaaataaagtgaaggaaatataggcggtacgtgttatttttacatcctaaagtaaattctccagcattaaggctgactgggaatttccatctcagagttctcatgaatgctgctccactttggtgttgtctcttgaatgctttttattataggtctttgaaggaggtatttcttggtatttattcagccagagagagtagttgatgtggaatttgggaacacaggggtgtgggagcgctctctgggtgacctgtctctccgttgaccttcaggttntttatgtgcctcaccagtcaggtgaggctagtcaccnattagaacaatgtactagtctggtatgatctttgccagtctaatacttggaatggctcttaacctatgtccgggcaagatggggccccccttgaagccttaacctcggtaaagagagtttctctccgtggttgaggttcccaacgcttcaacccgcctcgcagttctgggtttgggttcccccccc

SEQ ID NO: 329080 - DNA, 421 bp, Homo Sapiens
  misc_feature (38)..(38): n is a, c, g, or t
  misc_feature (46)..(46): n is a, c, g, or t
ggcccttaaaaaatggtttaccggtaataaggtctggnttcaaaancccaaaggatcaaacactaggacaaaaacccaggtgcagctatattacacatgtttatatataataagcattagacagacatcccaatttaagtagaaaaatgcataagtcaagaggtaaaaattattctcattgcaagattattctctcccatctccatgaggtcagattttatcaaagggaaaagggaactaacatttattgagtacctctgacaggcacactacaaggtttgtttttattagttattctatagattatctgcaatgtgagtattatgctcattctacagaagaaactgaggtgtggaaaagtactttcacaagatcacaattagtaagaaatcattggcttgacagaagatccaaatctctc

SEQ ID NO: 329081 - DNA, 933 bp, Homo Sapiens
ttttgcgttaatacaatgatgttatttttatttggatagtatttgtatgattggaaatgagtgttaatctttatatgtattttaccagtccttgactaacatgttttcaagacatcttaccaatccatttcattgaattaatgagtaaggagactctctagaaatggttggtttgtaaagcaaggacattatctggaagaatcatccagagtttactgtatgacgagcatttcttgatagcaaggttcattttggtgtcaatcgttacagtcagtccatttcagtgggaacaacgaatttctccacagggtcttatttttctgtttttcacttcaccaaatggggtagatattttttcagaatgcagttattagaaccttgggattttccttctgtctcccattgagtctcttgtttttttccccagatctgaaccatttcactttctgcatctgctctaaggtttctggaagagtcattcccaaactttcagggaaaaaaagggtgaggattccaatcaggacagtcagactacccatgacgatgtagggcagcattctgttgtaaagcaccgaggtaaacaaagttagggggcaatgatgctccccactctggaggccgtggatgtgacccccaccgccatgttcctgaccagggttgggtagagctcagcagtgaagacatacagcatggagaaagcagaggtgatcccaaattttcccagcatgaccagaccaatggataagaagtaataatccacaggtaccagttgaatgaagagaagcacacctcctccccagaacagtactgcagctatgatataacgcctgggcacgttcgcaatagcagccaggctgtaatgtaagctggaatttcaatcaaggcagagaggaaacagttcaggtaggcatctccatgtaaattaggagcatc

SEQ ID NO: 329082 - DNA, 539 bp, Homo Sapiens
tttttttcaatggaggaaatttatttattacagggaaattggttatacaggcattagagggctgaaaagcaaaatacaaaggctgaaaaaccaaaagtcatctagaaataataacttcagaaagcagctaccacctctagggctggaggaacaaaaggaaaaatatgaagtaaccagaacttagaagcccagaattgcaaccacaatctttgtggaaggtagaaccatctggctgctgtggataatctctgagcgggtacagggggaatcactgaggctgattccagtagtgctgaaagaagctgaagtggcactgccactgctggggagaagtgtctctaggtgaagaagcattgctggtcctgtaagcaacattaacaagaacagcaaaaacaggaagcatattctctccttctgcctcccagtctctctctagtgacccctattggcagaactgaacaggaagcaagcttaaaaagaagtctgagaaacagtttgaggacaactagccccatcattacagggaagaagagtacaga

SEQ ID NO: 329083 - DNA, 290 bp, Homo Sapiens
  misc_feature (16)..(16): n is a, c, g, or t
  misc_feature (46)..(46): n is a, c, g, or t
  misc_feature (65)..(65): n is a, c, g, or t
  misc_feature (72)..(72): n is a, c, g, or t
  misc_feature (81)..(81): n is a, c, g, or t
cccaagcctaaaattnaacccctcaccaaaaggggaattaagcttngcgggccggccttaaattnaaaatcnggggattangaatttaatagggtccccataataatattgccataaatccatgaatggaaggttaagccattgactcccattaagtcactcttaaaagtaatattgagaaatcaatcgtgtactagttaaattatgctatgtcccatgtgatgaaaaatacagacatagaaagatttccagaatgtactgctaaagtgaaaaaacaaacaaattaagca

SEQ ID NO: 329084 - DNA, 294 bp, Homo Sapiens
cgccactcaataattgaggaatgttactgtctactctactcttgaagaatggaacacttatttactaagtcatacctgtctttctgtctaatctgcatatgccaaaaaaatcatttaccaggctcctcccactacagaaatgcaatcattcctacatgccaacagaaagatgcgtaaatatgtggttaatgttcagccaatagaccacataacaaaggtaaaacaggccacctttacctttataaggtgccaagtcataaatgatagccatctcatggctgtattgcttccttt

SEQ ID NO: 329085 - DNA, 295 bp, Homo Sapiens
  misc_feature (263)..(263): n is a, c, g, or t
  misc_feature (272)..(272): n is a, c, g, or t
  misc_feature (280)..(280): n is a, c, g, or t
cttttcttcagtttttccaaggactttattggttccataagtcaagtttgattccttaaagaaaagcacaccattccagtcaaagtcttagtaaaacaaccaatttctccaatcgtgtcctgttacaaattagaacagattcttattgcacttatgcaaataactgtatcaccataagttaaggaatacttacaaatagtttctggaattctgggggaaatcagggagggggggaaccaaatatggctcccaattttggtcangggggggtntacccaanttggttaaaagggcg

SEQ ID NO: 329086 - DNA, 357 bp, Homo Sapiens
aattatttacattagtcctgctggtttgtactgtggaaatgcaaagcaactcccagctccgtggcagtagcctgtgacagcaatcatccccataatgacctaaaattaaagcagcaatttaacgcccaagagtgccttcaaaatcttttgaagaatttcagtaataatatgcacagaaggagaggctttccaaggacgggaaagccttacaggtatccatactccttctcgggctcttaccactaaaatagaatgatcaggattatacagggaagaattcacacaagaaaacaatctacattcttgacaaatcacatcaaaaagctcctctttttgagctgaagtatagctcaaaaa

SEQ ID NO: 329087 - DNA, 393 bp, Homo Sapiens
  misc_feature (76)..(88): n is a, c, g, or t
  misc_feature (91)..(91): n is a, c, g, or t
ttaatatgagaatgccttaatttcttactcacttttgaaggacaatttgctgaatgtaggattcttggttggcagnnnnnnnnnnnnngtnttgttctttctgtagccctttgactatgtcagcccattgcattctggactcctacatttctgacaataattctgataatcgtattgatgattccttctacataatgagttgcttctctcatgttgttttcaagattctctctttgtctttcaacagtttgagtatactgtgtcttgtgtcttggggtggatctctttgagttcatcctatttggaattcattggagcttcttggatttttatgtttatgtcttgcatcagatttgggaagcttttgggccattatgtctccaaataatctct

SEQ ID NO: 329088 - DNA, 256 bp, Homo Sapiens
cggcagcacccacccttggcatggtaatcaggctcccattctggcaaagtatttgggcaaaattcaacattccttctcccttctgactttttcccacattgtgccccagagccactaggagccttgtattagattgaactacatgaaatcacccatttgggggagataaaaaatagtcaaaagtcagcgcattttgtgtgtgtgtgattcaacctaaatgattgcccttgcttaggatgtatttaaaaagtttgtc

SEQ ID NO: 329089 - DNA, 503 bp, Homo Sapiens
  misc_feature (454)..(454): n is a, c, g, or t
  misc_feature (472)..(472): n is a, c, g, or t
  misc_feature (477)..(477): n is a, c, g, or t
gtgatttttaaaactgcattctcagaattggggccagtagagagaagctgcagggccacagacagcccattaaaacaaagacaactgttctcccgagaactgtgcagccatgatccaggctgctttgctccttactagtggaagggttcaactgttgggctggccttgggtggatgcctgctttggtgtggagctgaagtgttgagctggccttgagtggatgcctgctttggtgtggagctgaagaggatggcctcatatctctgggattcttctggaacatcatctcatggggaagggctcagcacaccatctaggagccattcagctccaacaacattcaaagaatgtcccattttgccaagactaacttttggaatcttgtggctaaaagtccttctcataacacaggacctaggtaacacttggttttctaaataggagctggaccagnccttcaccttgactgggngcagnacccaaaaaaaggctgcaggtcaacg

SEQ ID NO: 329090 - DNA, 495 bp, Homo Sapiens
ctttacttaaaattatttttccttttagaaagttcaccaggaaaccagctcccctcccaccacgccgggcaggcacagccatctttttaaaatccgcgctgattttccctcacacccccaaacaggaactcctcaggatggcctcagaaggctggagtctctccctgtctggcgggacaccctggtggcggtgaaggcccctctgccacaacggaggtttctgattgtgggacacagtctggtttttgttttcttcctgtcttctaattaaaaaagacattcctgggtgacaggcacagtgcaggagtgtgagctatcgaaacaacctgggtgaagtctcgcaaggcccagcaaacttgtttacattcctcagcactagtgacttgcttgtggaagtctgtaagttgtttgtgtgtcactgtgacagctcccacggttgtttcctttggcaaaccttttaagggattttctaaccatcggcaaaaagtcggtctg

SEQ ID NO: 329091 - DNA, 202 bp, Homo Sapiens
  misc_feature (30)..(30): n is a, c, g, or t
  misc_feature (36)..(36): n is a, c, g, or t
  misc_feature (60)..(60): n is a, c, g, or t
  misc_feature (75)..(75): n is a, c, g, or t
ggaaattttaaaccccttccaaagtttccncttttnctatgctgggaaaaattttgaagntccttggtaaactgnaataatgcctaatcccatgtttccctgccacattagttccctttaatggcagggaaggcccatctggttaacctgtattcacaaactctcaagagtttcctacttatttcaggagcttaagaattta

SEQ ID NO: 329092 - DNA, 562 bp, Homo Sapiens
  misc_feature (279)..(279): n is a, c, g, or t
  misc_feature (495)..(495): n is a, c, g, or t
  misc_feature (518)..(518): n is a, c, g, or t
  misc_feature (528)..(528): n is a, c, g, or t
  misc_feature (533)..(533): n is a, c, g, or t
  misc_feature (539)..(539): n is a, c, g, or t
attttctttaagtcggttttcaccttcctctggtatctccttgagtagcttaaataatcaaccttttgaattctttttctggcaattcagagatttattcttggtttggatccattgctggagagctagtgtgatctcctggggatgctattaaagaatcttgttttgtcgtattaccagagttacttttctgatttcttctcatttgggtagattgtttcagtggaaagatctgggactcaatggctgctgttcagggttctgtcccatggggtgaancccttgatgtggttctctcccccttcctctagggaatggggcttcctgagagccagactgcagtgattgttactgcccttctggggtctagccacccttcagggctaaccagactccagggttggcaatggggaatgtctggcaaagagtactgtgatgtgatccaccttcagggctcccagccatggataccagcacctgctccattggagggtngcaggggagtaaagtggactctntgggaatccntggtngtaatntagggcactgggttttcttgaat

SEQ ID NO: 329093 - DNA, 496 bp, Homo Sapiens
  misc_feature (448)..(448): n is a, c, g, or t
ccttttgtacaaatacagaatcatcaacatgctattggtcaagagccatttcacccattgtcatctcgaacagtatcttcttcttcgctccctagcttagaagagtatgagcccagaggacctggtcggcccttgtaccaaagaagaatctcatctagctcagttcaaccttgttctgaagaagtaagcactcctcaagacagtctggctcagtgtaaagagcttcaggaccacagtaaccaatcttctttcaacttttcatccccggagtcctggggtaaacaccacctcatctactccttatcagaacattccgtgcaatgggatccagcagggacagcttcagcccagaggagttgataggcgccacccaaggattgttcaaaccccttgagggttcaattgaagttcgggagaacctcggagggtgttccagtttcctttcaanttacagtgttgctggcaggctttttggggccagtttttcccacccttt

SEQ ID NO: 329094 - DNA, 815 bp, Homo Sapiens
  misc_feature (520)..(520): n is a, c, g, or t
  misc_feature (591)..(591): n is a, c, g, or t
  misc_feature (668)..(729): n is a, c, g, or t
  misc_feature (738)..(738): n is a, c, g, or t
  misc_feature (752)..(752): n is a, c, g, or t
  misc_feature (758)..(758): n is a, c, g, or t
  misc_feature (774)..(774): n is a, c, g, or t
  misc_feature (779)..(779): n is a, c, g, or t
  misc_feature (805)..(805): n is a, c, g, or t
aagattaaatcttatagtttgtttacaaaattttgaaaatcaaatgtgattggcttcaggctgtttttattagggcttcttgtttagaaagttaagtcacctctctcaaagaatgaaggtttttgctttttttgaaatccttgaattatcacttggattaaataaatgactttacgatgacctgtaattttattttgtaatgtcaagtgttttaaaccttttgtatttgacaagctttccaaaatcaaattataaattatgtatttttctaacctaattaatcctttaaggatcttaggtttccctaaagtcctaaaatgacataatttgggcttatttgggtataaaaattatataggaagcattgtcaaatgtgaaatggtgtttggttttctttgggctgtatttgtataaatatgttattggtgtatgttccaaaattatgtgaaactcctataattctaatataacttaggtgtacattatcagtaataatccataattgttattattaaaattnattgtgtgccacagaggtaaaaaatttccttgtcagttttgtcttttgactatggctgccttaaaactttnttcttccatgcacaattgttgttttggtcctcttttttaaatatatttgtattatttttgagatggggactcactcnnnnnnnnnnnnnnnnnnnnnnnnnnnnnnnnnnnnnnnnnnnnnnnnnnnnnnnnnnnnnngtttcaagncggttctcccgccntagccncccgagtaggctgggnatttncagggcatacaccaccatggcccagntgaatttttt

SEQ ID NO: 329095 - DNA, 612 bp, Homo Sapiens
ttttgaaaattaaatgttattttaatattttaaaaagaattatgggatcacagcttaagtgacacacaggtcaacagcatgaaattgatcacagcagaagtgaaataaggtgccaaagactttgaccattcaccagcatgcttctatttctgtgtttctggcaggccagtcaatatttcccacagttcccctcacccagaaacatgatggtgtagacaagatacatccagtcaagtggcagtgggcgtagggcatccagcaaggggaagcggcacacatccagcccatcaaggtatttccggtccagagagctgagcccccgctcctggggaatgtctagcaccatcaagaacccaaaaagaaaacgaaagacagctaagcttgcagggtccgttggtcgattcagcagggtcaccagcctccgccaactggacaaatctgtccactcaaaacccaagagtttccctattcggctgtcctgcctgggccctgagatcagttcagccttgtctttctgtactttatctgagctgggcgagtccgcgcggacccggcagacaaccgccaattctctgcggaggaggcaggtgggtcaacactgccgcgtctgaa

SEQ ID NO: 329096 - DNA, 569 bp, Homo Sapiens
  misc_feature (13)..(13): n is a, c, g, or t
  misc_feature (53)..(53): n is a, c, g, or t
  misc_feature (80)..(80): n is a, c, g, or t
  misc_feature (169)..(219): n is a, c, g, or t
ggcacgaggacgnttggtctggtctggaaagatctaagatggcttctcttaancggtctagtgacctggccaggagatgncagaggctggacttagctgggactgtgactagaacacctacatgtagcctctctagcatagcccatatcagggtaactggacttctcannnnnnnnnnnnnnnnnnnnnnnnnnnnnnnnnnnnnnnnnnnnnnnnnnnaggcttatgtctttgttgcctggtctcagaattcacgtagcattattactaccatactctgttggtcaaagcagtcatgaatctgcccagatttaaggggagaggaatagactctaccatttgataagggagtggcatggtaactttggcaaagaacatatgggatagaagatattgttggaaaatacgatctggatttggaaaatacaatctgccagtttataagctatattaaagtttcccagggaatatttttcctgaattctgtgggatcagtaggaaaaacatagaattccaagagcgttcattgcaatttgcccaagtatggctaactaccatgagggttagtg

SEQ ID NO: 329097 - DNA, 486 bp, Homo Sapiens
acggatggtctggtctggaagatctaagatggcttctcttaacaggtctagtgacttggcaggagatggccagagctgcgacttagctgggactgttgactagaacacctacatgtagcctctctagcatagccatatcagggtaactggacttctcacatggtaactatattcccccagagtgaacattccaagagaaccaggcagaggcttatgtctttgttgcctggtctcagaattcacgtagcattattactaccatactctgttggtcaaagcagtcatgaatctgcccagatttaaaggggagagggatagactctaccatttgataagggagtggcatggtaactttggcaaagaacatatgggatagaagatattgttggaaaatacgatctggatttggaaaatacaatctgccagtttataagctatattaaagtttcccagggaatatttttcctgaattctgtgggatcagta

SEQ ID NO: 329098 - DNA, 434 bp, Homo Sapiens
  misc_feature (31)..(31): n is a, c, g, or t
  misc_feature (67)..(67): n is a, c, g, or t
ttaataagtaacctggcatggaaaaatgganggtttttacggaacctaaagtaagatggggaatttnaaaaattcaaagcccctgacatgaagtgcccctcaaactgggtgaaatcattccaaaagcattctttttaacgcatctagcaaaaactcagaaggacggctggacaccctggccctgaagctcccctaatggtgtgttccctggtctgcacacttccccttgcagcactgcagactctcctgacactcgtgaagcctccgttccgccgctgtcaaggaatcgcagacacgctctaactccttcagatgagactccatctggcctctcatctgagttgtggcagtagggaaataagtgcaagatcacacattcagcattaatatttttattatcttaaatactagatatgcttataacgtaagtattt

SEQ ID NO: 329099 - DNA, 475 bp, Homo Sapiens
  misc_feature (40)..(40): n is a, c, g, or t
  misc_feature (48)..(48): n is a, c, g, or t
  misc_feature (55)..(55): n is a, c, g, or t
  misc_feature (159)..(159): n is a, c, g, or t
gcctatccatgaaaacatgtaaacctgtggcccttaacangataaaancccaacnccgggccaaaaagaaccttaaactcacatggggctctccctaaaattttgtgaacccccagaataactttgccttctgtttcccttaaacagtggagtttatcnagaatgaaaatcctagaacaccccagttaaatttgagtttcagcctagaaaacaaatagatttttttctgctaaatctggcaaccctgctcagcagtgaagggaaggagggctctctgccccaggtgcctgcaaggtcaccacgagggtttccctgggataacagaagggaaagctcttgggaaggacagtgagctctgcacatgtaagatatgtttcatatctgcttccagtggggacttttgctagcccagtgaatttgcaggagaggtgagctagtgggaggtgcccagattgacagtgacactctttgaacc

SEQ ID NO: 329100 - DNA, 339 bp, Homo Sapiens
  misc_feature (30)..(30): n is a, c, g, or t
  misc_feature (131)..(131): n is a, c, g, or t
  misc_feature (175)..(175): n is a, c, g, or t
  misc_feature (203)..(203): n is a, c, g, or t
  misc_feature (253)..(253): n is a, c, g, or t
tccaaaccggaagtaaccataaatgccccnaaaggtgattttaaagccactgttccttcaatagccaaggaactgggagaaatataaacgcctaaacagttagctggctaaacaaatactacttccatagnacaatgtaatttagctattaaatgagatttataatcacatgganagttttatagtaaatgtgcagaaagacnctatataaaatgacatgtacagtctgattctatccttctaaatcttgccnaaaggtattcaatgggtgataaaaattttggatggtatctgcatgtgcttatcaatggtttttcaactatgataagcatgtactac

SEQ ID NO: 329101 - DNA, 424 bp, Homo Sapiens
  misc_feature (352)..(352): n is a, c, g, or t
  misc_feature (359)..(359): n is a, c, g, or t
aagaaaggaagatgtttattgctttccataccttgtggaaggactagatatctcgctgtctttttgacctcctgtttcctttatagaacgcaaggcatttatgcattttggacaattcatttaaatgcacatattcaagataagaacagtatgtctccctttctttgcatatttatgacacattttatttgcacaaataatactgcatcagtttcattgaggaaaagttgggaattttgttatcaaaatcattgggatgggggaaactggcattttcaggaaccccacttcttttgcctctttcactaacgggtattcccttaccaacttggtaaacattcatggagggacntctatcnattgtggatcccattttttaaacccatggcaccccacttgggggggttaataattttccccccat

SEQ ID NO: 329102 - DNA, 1252 bp, Homo Sapiens
  misc_feature (20)..(20): n is a, c, g, or t
  misc_feature (1040)..(1040): n is a, c, g, or t
  misc_feature (1151)..(1151): n is a, c, g, or t
  misc_feature (1162)..(1162): n is a, c, g, or t
  misc_feature (1179)..(1179): n is a, c, g, or t
  misc_feature (1194)..(1194): n is a, c, g, or t
  misc_feature (1218)..(1218): n is a, c, g, or t
cgctgtctttttgacctccngtttcctttatagaacgcaaggcatttatgcaattttggacaattcatttaaatgcacatattcaagataagaacagtatgtctccctttctttgcatatttatgacacattttatttgcacaaataatactgcatcagtttcattgagaaaagttggaattttgttatcaaaatcattggatgggaaactgcattttcagaacccacttcttttcctctttcactaacggtattccttacaacttgtaaacattcatgaagaactctatcattgtgatccatttttaaaccaatgcacccacttggagttataatttccccataaaaactttccatgctgatcactttttttcctttaatacgctttgagcatcagggcacactgctccatccatcgcaggcgctgcgggtggagtttctatctcagtgcacagcatgaaagcttgggtccatctgtgccacacaaaaccaagcctctcttgaagtgatttgtttacagtgtcatttgatggagtggaatgttctgcaactcattcgaactgttacagaagctttgctaaaaggtcaccactgctctctagaatttccaaatctgggcacctctgggagcttgttaaagataaggttctccatgggctttttccatacaaactagatcagattaacaagaggctacttttccatagaggtttgtgttcatgttgagaaggagagcaagaaagagagaacacaagtaaattacagttagttacctcaaagtgtgcaagcccactttctcccaattcagagggcatgtaacaagtgatagtacaatttaataggcctaaacaagtgtgttggtcttgaaaaagtcagaatttgcttttaaatgtccttcttgaatcaatgcattcttcaaatatagtcttgggagtcgattctaaaggacactgaatttcaccatttactcaaaattcaataggaaaatgacaactaattccttaaggtaatagaggctgtgcagggtaagcattcaaccngcactgcaccaacaaggttcaaattgttgtaactaccattttagtctagacctaaaagtgtcttgtgcttgctttctgccccttttcttatgaaacaaacatcttgaattntccaaacctcnaaagctcagctgtaaanctgtaggagaccagnaagaggaaaaggaaaatttccttnaaagacgtctctagtcgcagttgatcagttctgc

SEQ ID NO: 329103 - DNA, 460 bp, Homo Sapiens
  misc_feature (70)..(70): n is a, c, g, or t
  misc_feature (122)..(122): n is a, c, g, or t
  misc_feature (398)..(398): n is a, c, g, or t
  misc_feature (403)..(403): n is a, c, g, or t
cactccagcctgggtgacagagagagacccctgtctcaaaaaaacgaaaaagaaagatagttcaattatnattcagttgttgtttactccttattccttaagtttaagcaaccaaatgtacntaataaaacctaagaatacagtatgcattcccaacaattacttccttattttacaccaattagcgtacaaaataagaatgaaattcggtacagtccaactttagcaaaaacattcatcaactgaagtaccagagtgcctattttatggccaatagtagggtagccaacacaccaaaaagccaagttattgcttagttgacattatgaaaagctatactgtttcaaaaacaaaagagttgaaattttacttccagtggcatcttctttttaactatnctccncgttgcaggaagtcagggaatgctactgtgcttcagtaatcttccaattcaattccc

SEQ ID NO: 329104 - DNA, 426 bp, Homo Sapiens
cacctttaaaccaactttgtgatttttattgatgggcgacaactttatactcctagatatcactaaactgtgtacaattagggacgcagcattagagaagagcagacagcagaattaaacagagcagactgaaggagagatcttcattatttgcccatttttcattatgtgtacacagaagcatgaatgcaatttgaaatcttttaatggcaataaagttacaatcacccatctatgtagactaacattttaactccaaatatttgatctggcaatgtgtacgtaagcaggtttctctcaggtacaattattaaaatttttcctgttaggaaccagcaacttattttttatgtttatttttcttttgaagtaagaactagttcttctttgataactgggctcatttttatcatttatcaaaaacta

SEQ ID NO: 329105 - DNA, 469 bp, Homo Sapiens
  misc_feature (398)..(398): n is a, c, g, or t
  misc_feature (407)..(407): n is a, c, g, or t
  misc_feature (416)..(416): n is a, c, g, or t
  misc_feature (430)..(430): n is a, c, g, or t
  misc_feature (449)..(449): n is a, c, g, or t
agagctagcaccatgagcttcaataccctgtagactatcttatcgaaacccgtcatttacaaacgcagaaaaatgaggcccagagaagaagtggtccaaggacacacagctcacctggagcagagtcaggaccgtccccctctcacaaatcccagggaatctttccactactacactaagctgcttcaacctttgtgtgagtgccacagtcacctgagatgatgggcaggaatgaatcagtgttgggaaaccctatacaaagtgaatggagagcaacagaagagtcggcaacagaagggtccccagggcagtgtgctggtgcctgaaaaatcttaccactcaggaaagcagaagaatttttttcagcagaaggttcacctggagaattcttcactggntaatgactncttcaaagntcagttggggttcntacattttgggggaattcntcaacttcaggggaaactgg

SEQ ID NO: 329106 - DNA, 170 bp, Homo Sapiens
atttatattttttaaagcagtattactcattcaattgaaaaaattaattctacagctcaggcttttttgaagtcatatttcatactacaagttctatacagaagcactgtttaagctcttaaatattggttacatttcagaatttcagtcctcagacccagaagacattt

SEQ ID NO: 329107 - DNA, 478 bp, Homo Sapiens
  misc_feature (382)..(382): n is a, c, g, or t
  misc_feature (413)..(413): n is a, c, g, or t
  misc_feature (436)..(436): n is a, c, g, or t
  misc_feature (443)..(443): n is a, c, g, or t
  misc_feature (468)..(468): n is a, c, g, or t
ggattgccagctataataaaccataaagtgctattttctgcctccattcaacactatctagcacagcctgggcacaagagctccctttttgcctccctgaagcactatgacaaataccaatcaagctgtctgcaagtgttttccttagccacctttgtcacccaccataagaaccagaattttctgtcttgcccttattaaagtgacttctccaaactctgctccaacagcagaggaaaactacagaattctacctatcagcccacagcccagatgggggcctctggctgaaggaaggcaacagggtaaggggctacctgcagggtcactttctaggggtcagtgacttcagtgcttcactgcactgtgtgagctatgagtnggccaacaggggtctgtagggctcatgggtnagcagggcccacctttggagggnaatggtntattgggagggtacaggaaggaggnttccccaagg

SEQ ID NO: 329108 - DNA, 302 bp, Homo Sapiens
ggctttaaatccaggatatttatttttaaaccagcagctggggaaatgtgacagggtaaatttttggtaggttacaagtagattcattctgtagcaaaggagggaagtataagacagtgtataaatctgtttctcaaaaggttgatgtaaatagtggaaccatgagtaccaagagcaaaacactggaaacaacttatatgtctgtaagcatctcctgctttccagactatggcccctctgtataatgcttgccacgttcttcatgagaagaatgagttccatctcagcctgctgaggatttc

SEQ ID NO: 329109 - DNA, 442 bp, Homo Sapiens
  misc_feature (394)..(394): n is a, c, g, or t
  misc_feature (411)..(411): n is a, c, g, or t
  misc_feature (431)..(431): n is a, c, g, or t
ttaaacaaaactggttttatttcataagatgtttagagacaggcaatggctggtgttgggtcagcagctcaacaatgtggcaactggcatcttcgtggttctcttggcccttccgtcgtggttcaaataactcctccagctccagtcatcactttggtgtttatggcagtaagggggggaggaggtggcctagctgcatatgtatctttaatcaggaagtaaaagttttcccagaattcccaaggccaaagctgtgtcctgaggccactgagagttgttagttgcaacagaggctgaaagggggagcaattagcttttctggggttctttaggtgaagggcaggtaaggggagaaggggggttggggaatgggctgggcaaattgggagcaccnacattacccttatgggntaatttcctttttccaaaangggcagccgtt

SEQ ID NO: 329110 - DNA, 361 bp, Homo Sapiens
  misc_feature (351)..(351): n is a, c, g, or t
tatctcattgggtatcaaaagtgtgattttaaaaacaggagggatactgtttctgtagaggccttgcatttcaaaagacataatgtttttgcatttgtaagtgtttttagttctatatagcatgtaaaaactcatttttataacacttttataataaaatacatgatcactgtagaaaatatctaaaataaaaacaaccataaaggaaaaaactcacccacaatcctacctctcagaaataagagtttccctttgtattttcttcatgtcttcatacaaggcaaatccacatggcacactcacatacatactcacttatccacacctacacggtttttttgctctataggnataatcggaa

SEQ ID NO: 329111 - DNA, 528 bp, Homo Sapiens
  misc_feature (487)..(487): n is a, c, g, or t
  misc_feature (498)..(498): n is a, c, g, or t
  misc_feature (510)..(510): n is a, c, g, or t
tggaatatagcctttttattgactactttaagtagaacaaactaaatacatatttaacagttttggttcatttatacagtacattaaataagttatgcacagagttaggtaacaaaaattcctatcagagtaaaatgacaaagcacagaaaaaccagattctaatgcattctgtgggtggtgtcacattcatcatccccctttaaaaaccacgcgtggaggcttcgttttctatttatttacattattggctttcttttgtgagcggaccttttgtagcctcgtcagggaagttgggaaagccacgttaaggggactgaaggcctcttggcgcagaggcccttttcaatcattcgcctaatgcttattgctgcttctctgccgactccaaggtaggggatgggggctgtccccaacagacaccagcgcacatgccctctttgggtataaggcatcactgagtgtacactgggcagccttggggaccngatggggtctntgagggagctcncctcaggggtttggaggg

SEQ ID NO: 329112 - DNA, 420 bp, Homo Sapiens
  misc_feature (167)..(167): n is a, c, g, or t
ttgatggtttccatttttttcctttaatttggatgtacaatgtttgcagcagttaaaaaattaaatatacatctctcgtcagtccttccctttgctctcagaagcattcaggtctgggtggggctccgggactcgcccatcacagccctgctggctccaggggagtncaagctcagctgacagtccctccgaccacggtgcaaagcagttgagacctgggacaaggaggccccacttgggtcagagcccaccctccgtaggcaggtccacgttgggccacgatcctccaaggctgggcatttaccacccagattgcagcgggagactctgctcttagaaacaactgaggggaaggcgttcctttgactgcaccagagcgtgacaggcacatgggggaagagcggccctgaaccttccagg

SEQ ID NO: 329113 - DNA, 113 bp, Homo Sapiens
actgctgctacaacttctgagaatactgtagttttcagaaacgacaatggaactgtttaaataaaataattttatttcataaaaagaaataaactagaaagaacaatgccctt

SEQ ID NO: 329114 - DNA, 507 bp, Homo Sapiens
  misc_feature (16)..(16): n is a, c, g, or t
  misc_feature (64)..(64): n is a, c, g, or t
  misc_feature (99)..(99): n is a, c, g, or t
  misc_feature (116)..(116): n is a, c, g, or t
  misc_feature (158)..(158): n is a, c, g, or t
  misc_feature (169)..(169): n is a, c, g, or t
  misc_feature (240)..(240): n is a, c, g, or t
ggttgccagccccttnaatccccccgaagtaactgggttcctgaataaaaatccccaacagaantccaagcatcaactgggcctcaagacggccatccnactgtaagtaaaactanttgtaaaatggggaccatatccttccccagcacccagtaggnacacatttganccttcccgaaggcccggccccatggggttaaggtgagccttggacatgcctctgagatgacctgcattatntcgcagcctgccttaaggacaaattcctaccttcttctgggttgtaagagaagccaaaagggcattgtggttcctacagaacaatttagcattgtcataattctccttggcagtagtaattttcaaacatgagtttccaaccaaatgccagccaatgccacagatattttcgggcagggcaatgcactcctgattccggggctcccactggcagttctggtccagggcacagctcctgcagctggtcttcttgttacagtagtacat

SEQ ID NO: 329115 - DNA, 295 bp, Homo Sapiens
gataagtttaagagctgatcccttaattttggacatgggagcacaagagaaactcactcaagactgggattaattgtaggaaatatttcacagtttccccaagtcagaagagctaatcccaaccctctgtatctggaacatacactgctgccattttctgcccatgaagggaaatacccaaggtactctggcagaacagatttttgaaaacttgagtccctgatgatgtaagtcagccacaatgttaatcaaccccagaggccaccttatttctaggacttattatggcaaggat

SEQ ID NO: 329116 - DNA, 373 bp, Homo Sapiens
  misc_feature (93)..(93): n is a, c, g, or t
acctgaaaattaagcctggttccgggatgccctttgccttgccctttggaccctaatccttttaagggtatggaatgccactcttggtgatantttttaaattaatattttaaattgcttgaatgtttgtatacatgttaagagaatgctttgaaagccttatttgatagataatgtttagagcatttcttttgaaaaatttcaaacctacacagaaatagagatgctatagtgaactcccatctattattacacaaatttaatggttagcaacgttttattttctctgttccctttcttaggaatgttataaaagcaaatcccaagcatcatatcatttcacccaagtattttaaagtatgtgtctctaaag

SEQ ID NO: 329117 - DNA, 398 bp, Homo Sapiens
ttaagagcttaaatgtttatttaaaacagaaatgccaaaccactccactctcaacctttcaagcaacctggctaacaataaactagttcttctgcaacaatgttagagcagaggagtaactcaggttatactgtaactcaaaagcaatactactagaaaacttaaaacacctagcactgcataaagaaaaaaagcaggacaaaatttaaagagaattagctacaggaaaccattcaaaggcatttctactgcctcatcttttactccatccccctttgaactgggtttctgtttgcatacttgtttggggggggaaaaaaatcatatgggctgtcccgggggacaatatggggggaaggtgcaaactgtctctaagggcacaggactttgggttctca

SEQ ID NO: 329118 - DNA, 773 bp, Homo Sapiens
  misc_feature (20)..(20): n is a, c, g, or t
  misc_feature (62)..(95): n is a, c, g, or t
  misc_feature (677)..(677): n is a, c, g, or t
  misc_feature (713)..(713): n is a, c, g, or t
  misc_feature (737)..(737): n is a, c, g, or t
  misc_feature (762)..(762): n is a, c, g, or t
tgatttggggtgtccctgtnttgcccagactggtcttgaactcctggactcaagggatcctnnnnnnnnnnnnnnnnnnnnnnnnnnnnnnnnnngcgtgagtgaccatgcctagctcacttccaggtttaacagacaaaataaacttactctagtttccatctctatcattttataataaccgtagcccacattgtagtagtttttcagctctttactaagtcccaccaattcatgttttcacccttaaaatctttctcactgatactctctctggacagaaaaaaggtgaaataagcctactataaggaatatatgacatgctaaattttatttttaaacggttcttcaagtcagattaaagtaataatagcaaattatgtgattatccatgtcccagcctctctccaaaaaaatagtaaacaagatgtcttcttcttttcccaaagatacacatacacacatgtacaaatttttttatcagataataatagctaatatttaatgagtacttaccttagtttgtcccctttacaacagctttacatctgtgtggattgatacagttcatattcccattttataactgaggaaaactgggtgcacagagtgggataaggcatcttgcccaaagggtcacacagtttaataagtggggaaatggcgggggggtatgnaaccgggggtaggtcttgcccccccttggcttttgnccccccggagctggttactggttnttcccctgggggggtacttcttccngggggggcggc

SEQ ID NO: 329119 - DNA, 441 bp, Homo Sapiens
  misc_feature (392)..(392): n is a, c, g, or t
  misc_feature (419)..(419): n is a, c, g, or t
catgttttcacccttaaaatctttctcactgatactctctctggacagaaaaaaggtgaaataagcctactataaggaatatatgacatgctaaattttatttttaaacggttcttcaagtcagattaaagtaataatagcaaattatgtgattatccatgtcccagcctctctccaaaaaaatagtaaacaagatgtcttcttcttttcccaaaggatacacatacacacatgtacaaatttttttatcaggtaataataggcttaatattttaatgaggtacttaccttaggtttgtccccttttacaacagcttttacatctgtgtggattggatacagttccatatttccccttttattaactgggggaaaacggggtggcacggggnggggttagggcaacttggcccaagggntcacacggtttattaggggggg

SEQ ID NO: 329120 - DNA, 473 bp, Homo Sapiens
ttgggagaggattgcctggcagtgtcccaattctaagtgacaaggagaaccctgaccctgtaagttctttaacaaaatggagataatttttatttttgatttgaagatactatgaaatagggagcaccgcaaaaacaaagttgcttaacattcttgaatctaaactgacatgacgggacgtttattaacggccgatctcagaggtggatttttgcctttgtagtggcattcatgcttcttgctattaaatggtcacagaactatcttagaagatttatgtagactcccaaagcaaactgactgtctcctaactgtagtgggaaatttagtatgtccaatcatcaactttctgtaagaaaaaagggaaatgtcttggatctgttggacagtggggttctgaactgcatgagaaccctggtgaaacgttttgctggtcccagctgcaggccaaacactgctctctcactgtagct

SEQ ID NO: 329121 - DNA, 388 bp, Homo Sapiens
  misc_feature (43)..(43): n is a, c, g, or t
  misc_feature (57)..(57): n is a, c, g, or t
  misc_feature (60)..(218): n is a, c, g, or t
gtggaaccctcccccaccctaagccctccccaagtggctgggnacctacgggtgtgnacnnnnnnnnnnnnnnnnnnnnnnnnnnnnnnnnnnnnnnnnnnnnnnnnnnnnnnnnnnnnnnnnnnnnnnnnnnnnnnnnnnnnnnnnnnnnnnnnnnnnnnnnnnnnnnnnnnnnnnnnnnnnnnnnnnnnnnnnnnnnnnnnnnnnnnnnnnnnnnncattccttttttaaaatccctacagggaatccaaagcaggtagtttgagcatttaaagagttttaacttatttcagatcttatttcagctgggaatgcttgcttaacctaatttcgctggatgtcagcatttcagacaagctttacatttccaagggacttcaggacatt

SEQ ID NO: 329122 - DNA, 465 bp, Homo Sapiens
  misc_feature (16)..(16): n is a, c, g, or t
  misc_feature (29)..(29): n is a, c, g, or t
  misc_feature (44)..(44): n is a, c, g, or t
  misc_feature (108)..(108): n is a, c, g, or t
  misc_feature (359)..(359): n is a, c, g, or t
atttaaggtaagattnggaaatagtgccnctgtgtagccccaancccaaaaagcccatatagtatggggggaaatggcctcacaataaggagccctgtgccctttgancattagggtagaagatagttggtgtaaaagcctaagaggcaaggatttggaaatgcggtgaagtcctaagccctaaaccccccagttcccactgtggtaaaccctggatgggttaccttagagtccccaaaacttctgtatgtaaaatagaaacccatcactgacatgtggtggtgtgaggatttagtgagatgatgtgcccaaaacacctaaacagtgccttagcacccagttggcatttaaagaggagnccaggaacttgtccaagaaggtccatttgcttgagatgttatatttgattcctttatcctaacaactacaaaattgttggtttgagaaagagacctcattttacaa

SEQ ID NO: 329123 - DNA, 248 bp, Homo Sapiens
  misc_feature (160)..(160): n is a, c, g, or t
tgaagctacctaggggatgccagctaccagtcaattcgtttgcatacaaaaagatatcactttggagtttctaagtgtatacgaggaaatgaggtcaaagaccaaatatatatatttcactatatcacacttacaaacttttgtttactgtttcttcttnttcctactctattattaaacctttgagggtgggggactgtgagttatttatctttatatttcaagccaagtatggactgtggagtttt

SEQ ID NO: 329124 - DNA, 455 bp, Homo Sapiens
  misc_feature (403)..(403): n is a, c, g, or t
tttcggcacagataatttaaaaaaactgttttccaggtataaaatgtcctttccacaactcagtggcctgctggtgatgcttcgattctgtccctcgttagaatcagagtggacgtccctttgccttccatccaggggttatctttggaatgctcgagtgctcattgctgtgaacttataaaatgcccttgggtgttcatctttcttttgcacttttaaataatatcttaagctcctttacaattaaagaattaggcacagtgaaaccatacacagagaggaaacattgggttattgtcctcagtgtttttcgctggatacttattttggatggaaagtgataccacgttatatagctgtttctctgtccgctcccttttgttactcacagcccatccggggnatctctccagggttagcaggtgggggtttgggagttgtttttgttacaattg

SEQ ID NO: 329125 - DNA, 531 bp, Homo Sapiens
  misc_feature (75)..(75): n is a, c, g, or t
  misc_feature (87)..(87): n is a, c, g, or t
  misc_feature (437)..(437): n is a, c, g, or t
attcaggaatgatctgattgtaaacgtctttttcattggatcaaacagtaatgctgtatttgaatctaaattttntgtataagcagnttatttattagccaagtttggctctaaatatccatggaaattaagaatgacaatcatagggatcaattcattttattttcagtggggcttaaacaaagtttatatgactttaccatctcattttagatttttctaattgtgtaaatataacatagaaatagaatttatttttggttcatgaatacttagtgagatataagttatgtatttcctttttgttctctatccatagatgttggtccaaactggaagttgatgagtcactgtgcctctcggggtagtgagttatcagctacagtgaggagagcagtgtttgggcctgcagctggggacagcaaaacgtttcaccngggggttcttcatggcagtttcaggaaccccacttgttcccacaggttcccggacattttccctttttttctttacaggaaggttggatggatt

SEQ ID NO: 329126 - DNA, 450 bp, Homo Sapiens
  misc_feature (321)..(321): n is a, c, g, or t
  misc_feature (373)..(373): n is a, c, g, or t
agactataaatgggatgagggattttttttaagtagaatatttttaggggcagaaataaagccctaagcccagtatatatggggcaaaataacattaacttttaaccccttcttggatctcaggaactcaaaagttcatttaaaaaattgttttctctctctatgtatatattttaaagaaagcaccttagggtacatcttgtcaacctgtgagtagctcttgaaattactcaagaaacactgccacacctattattaatgccacacctattatttaatagcttcattcttgtaacctgttaatgcctctctctgggagtnccaggggctcattttaaaatgagggcagggcctgggctccccatctggctcntaagccctcccacaaggagacctactagtggccacttcaagactaattcatccagcattagcgcctaactggagacg

SEQ ID NO: 329127 - DNA, 427 bp, Homo Sapiens
ttaaatatgagaggatgtaagatccttaagcatgtacaaattttcgtggcatctatcacagtcctgaatcctgaaagactattttctgttgagttagatctttccttataaatgctttctgggatggcccatgcatctctgacagttctcatgctgagtcataccttgttctgttaaatttatccattattggacaaagactggaagaatggatatgacattgggaagtgtgcaagacttccacagatcacttgtagagagggatgatttcattgtaatcctacctcactggacacctcaaacctgccagtctcatctgtaaagtgaggcatttttatcccctttccttgggctctcttgggctccattctacagggcaacactcagggtgggacttctttaacttgaaggagaggagcgtaatatt

SEQ ID NO: 329128 - DNA, 199 bp, Homo Sapiens
atttaagtgattctcatttcttcatttctacttcttttatttatattccatttcttcccactttgctaacttgcttccctatcctttactgtatattctctacttagttgttctggttccttataacagcttcatatttcctcttcggtcttgtgacctcagttaaatgtttaattatagaaataatgtgcacgtggtt

SEQ ID NO: 329129 - DNA, 412 bp, Homo Sapiens
  misc_feature (393)..(393): n is a, c, g, or t
aaagcattcctcaattttactttcttgacccatttcattaaatttctttccacgtattaaaatgttgtagctgcaaaccactgactatttgccacccaggtcacatgcttccatgcctgcatatttttgtaaaaggtgcattctcttccagggaatgtccttccagggcttctccaccaatcaaaatcctagttagccttgaggcgttagggtcaagtgtcacttcttaaaagagggtgactttgaaggcttcagttgggatattatttggctcctcccaactcctctcaactctgcctcaggattataggctaggtacatgtttatctccactacttggaagggcagggacttcaatttaatttatttacacagcataaacactttttcccncatcctcaagggtattcaa

SEQ ID NO: 329130 - DNA, 463 bp, Homo Sapiens
  misc_feature (393)..(393): n is a, c, g, or t
  misc_feature (402)..(402): n is a, c, g, or t
  misc_feature (420)..(420): n is a, c, g, or t
  misc_feature (432)..(432): n is a, c, g, or t
  misc_feature (438)..(438): n is a, c, g, or t
  misc_feature (446)..(446): n is a, c, g, or t
cctttttcttttacaaagttaaataccaaaataacattgagtcatttttaatacttagtgttgctggctagactacctattatcaccacaattacatttgctatgaggtttggatgtgggaaaccataatgaaacgtgccgctggcatggagggagtggtaggagacacagaacaggggtgggcaagctatcaaatgctcctgggtgtgaggaggcctcaggggcagccagggcacggggctacttcttgggccacgaggcttctgggcaagtctgggggtgggtacgcaagaatttctccctgttcttatctgcctaggagggtcaaagggaagtgaaatcctcttttaaaaactggggtctttttgactggccttccatgggagctccccnttaaaaggncaaaatttacaggccgtnggctcacgcccnttaatncccggcantttggggggggccaggt

SEQ ID NO: 329131 - DNA, 362 bp, Homo Sapiens
  misc_feature (208)..(208): n is a, c, g, or t
actggagaaccaactactctaagcagtgagacacatatacccgaggaaaaaagtttgctaaatcttagcacaaatgcagattcccagagctcttctgattttgaagttcccctcaactcccagaagcctgagttaccctaaacgagagcatttacaatatttatatgagaagctggcaactggtgagagtatagcagtcaaaaaaagnaaatgctcactcttagatacctaagaattcaaagcgtttcaacctagagcaaccactaaaaaacctgcacagagatgacagtcaatattacaatagaggaaatacagtacttaaaaatgttcaaataacctggttgggtgtggtggctcacact

SEQ ID NO: 329132 - DNA, 530 bp, Homo Sapiens
attagaaaacagtctgtttattagaagtgactcttggccccaccatggagcagcaacagactgggtgacagagggttaggtgactaatagaagcatgcttaaggggctgtcatttgtgggagctgagctgagcccagcctggttatccaagctgagggcaggtagtctgggaggactgaactcagccaaggagccagagttgcagcatcagggccagactgagcaggagacccccagtcccatgaagcatctcaccagcattcacctgcatggctgcagcatagaacctcgccacttcctcgtctggggttgccctgggctgaatcatccgacatctggatgcagcggccgttccctcggctgtagttgctgaccttgtatgagtgactccagaggccttcacaaaggggagctggagtggggaaataagactcaaaggtgcggcagagaggcccccgctgggcactttgtttacttctggaggttcaggtccaatcctcttgggccaggtgggttttgcacggtgtggg

SEQ ID NO: 329133 - DNA, 470 bp, Homo Sapiens
aatcattagactttttaaaaaaacatttcctcgatggaaatttccagttccccaaaagaaagtaatcaaacagatgttcctccttaagtcttaaaccacgacattcagatgatctatgtgcaaattaataaggttatgacataattcaattatgtgacaaagccgagggagagttgacaaagaaccagactggcatcattgacttctcaatgaagtggagctcggtaaaaaatctagatgaatcacaggttgtctgaccagaagatccctgacaatgggctgtttactttagagaaaggagctgaaccctgaaaactgaatgtgcgaaattctaattatcaaaaaacccacagcgcatcaggtagacatgatcatctgcatttcttttccacgctgcaaatcaccgcgatcccagattagtccagccggccgggtgcctccctcccgtccgcctgggcagttgaggccaa

SEQ ID NO: 329134 - DNA, 264 bp, Homo Sapiens
attccattgaaggtattatttatttgcagctcatcttaagtgacaaaattccatacagaagactataacagaaatcatatttaatatattaaaattaatacttcaaatatctttcacattaagatgattatctattgtgtaaatctttcctaggtatgtgtgtctgtttcttgatgtgtaaaccaaaactctgaaatattctcttgatctaactttgacttttaaaaactgacattgtattgaatttacataattctcaatcag

SEQ ID NO: 329135 - DNA, 742 bp, Homo Sapiens
  misc_feature (388)..(388): n is a, c, g, or t
  misc_feature (426)..(426): n is a, c, g, or t
  misc_feature (438)..(438): n is a, c, g, or t
tttgaggatgggtagaaaagaattttattgagcaaaagaacagctctcagtggagaggggatgcagggagtggtccccaacccccacagcagggtgatttctctcctcactgcagctgagtctgggtcttttatgggctcagaataggggaatacacgttgactgatttgtaagtatgcaaaggcaccactcaaaaggtgggcacagcagtgtaaaaaccaattaggaaagggcaggtatacgtaaaataggtgaagggttgggatcaatcggagggaaagcccaccaaatggggaagacaaggttctcaattcagtatgaggatttagccgggactgtcttcagctttaaggttgggtttcacccgggtacccacccctatctgccntgggcattttgactgcctcctgccactatcatttaccntgaccgggtttnccacaacccaccatccacagttaggaagggcagggctcctgaaaatgagccagcaaattctccttcaggtggatggagatacaagtcttaccagtacagtctcatgcataatcacacacagaatgtctccactatggtatctagcaatggctgaaaaagccacagcactgtgtgtgtcctctggtgtctgatgaagtatgactcctggctaaaggctgtaccacattccctatacacataaagtttctatcctgagtgtgtcctctgatgtctgataaggttggacttccgactaaagccccgt

SEQ ID NO: 329136 - DNA, 491 bp, Homo Sapiens
  misc_feature (13)..(13): n is a, c, g, or t
  misc_feature (32)..(32): n is a, c, g, or t
  misc_feature (56)..(56): n is a, c, g, or t
  misc_feature (64)..(64): n is a, c, g, or t
  misc_feature (90)..(90): n is a, c, g, or t
gagttattttttngttggttttttcccttttnggatcttgattgataactgcccangatatttngctttgatgtgtttctacatgtagtngcacacggttcagtaaaaataatgctgcctatcgagtatgcgaaatattgaagtatgatggtttgacctgtatggcagtgttgtagcagccctcttgtttttttccccattgccctctttttttaaaaaacttataaagtcactttttatttttcctcagtcttcaatgacgagagcaatattaagaagacattgctatctaatttttaatctttttaaatgaaaaattcctatgttcagtagcgtggttgatgctattgtttagccttcccctccaaattgtatacattggcttggaatgttcacaacttgcgtgcgtggcagcggaagacgattcccatattctacattgctactgttttgtataaaataaattggtaaagattgacggttaaaaaaaa

SEQ ID NO: 329137 - DNA, 413 bp, Homo Sapiens
  misc_feature (28)..(28): n is a, c, g, or t
  misc_feature (46)..(46): n is a, c, g, or t
  misc_feature (58)..(58): n is a, c, g, or t
  misc_feature (67)..(67): n is a, c, g, or t
  misc_feature (93)..(93): n is a, c, g, or t
  misc_feature (103)..(103): n is a, c, g, or t
  misc_feature (118)..(118): n is a, c, g, or t
  misc_feature (158)..(158): n is a, c, g, or t
  misc_feature (169)..(169): n is a, c, g, or t
  misc_feature (196)..(196): n is a, c, g, or t
gaaccccaccaagggggccaagcccccngtggtaaccaggaaaatnccccacccaaanaccggcccncccccccttaaaaaaggaaataaccngacctcaaantcagccttccgcagnaaatatatctggttagtccttccagttacgttatattgantcctgttgtanttcgttttatggttacctatgtgtaantggtctccctgagtttcatttatgactgtaattaaaacatttttaaataaatgtaattaaaactaatgaatctgtttaaaaatgttaggcatgtgatattgcaggtagggcatggacatggcgaaaaaattttgaaaatcatttgagaatgatggaacttggtggggatattccctagcagtgacagcatctactgcagtccttcctatattccacg

SEQ ID NO: 329138 - DNA, 397 bp, Homo Sapiens
gaaataattatgttttttcattagtgaagaaattgtatagtacattaagatatgtattgctaaacaaagccggaaataaaatataaaccttaaaaattgttatccatttcttctcctcccacttcactttaaaagaaggaggattttttaaagatgaacttccgaagagactccaaattactgactttatagtaatttctttaaaaatgagtataaatacaaagcaaattttggtgatggtggtgaaagtgtgaggttagagagaagagagtccaagcaattttaaagaaatataaggaaataaaacactcagatcctaaaattacaatctattcctcctttgataggtgcttaaaactgttctctttaccgcttgagggtataatattgatgtttt

SEQ ID NO: 329139 - DNA, 621 bp, Homo Sapiens
  misc_feature (300)..(301): n is a, c, g, or t
  misc_feature (488)..(500): n is a, c, g, or t
aagattatataaaagaaagaggtttaattcgatttacagttccacatagctgaggaggcctcacaatcgcggcggaaggcaaggaggagcaggtcacatcttaagcggatggcggtaggcaaacagagaatgagtttgtgcagggagacacccctttttaaaaccatcagatctcgtgagacttattcaccatcacgagaacagcgcaggaaagacatgcccccacaaatcagtcacctcccaccgggtccctcccacaacatgtggaaattcaagatgagatctgagtcaaaccatatnncaccatacaattcagcaattgtgctcctgggcatatatcccagagaaattaaaactgattttcatgcaggaacacttgtacaaatatttatagtactttatttgtaataactaaatccggaaactgcacatttctttcagtgactgaatggttaaacatcagtaccatggaaccctactcagcaatnnnnnnnnnnnnnctattgataaatgcaacaacttagatgaacatcaaggaaattatactgagtgaaagaagccaatccccaaaagatacatatggcataattcaatttattgaattattattattaatttcat

SEQ ID NO: 329140 - DNA, 676 bp, Homo Sapiens
  misc_feature (427)..(435): n is a, c, g, or t
gcctcccgggaagctcactttatcctctcctcaggaaaaaatccctgatttggtctgaaccaatcttggtaactatctttcttgccagttttgttttaggaatgggcacgcaactcaggttctagccaacgagatatgaggagcagtctactggggagtttctgggaaagtttgtttttcttgtcctaataaacaaacaaataatggggtcactggattggagatcctattgagtcaaaggaatattgaatttgacacagtagaatagtctggaaggaaaggaaatgatattcagtaaatgaaatgctgaaaattgatattatgaaggtggcgcagtagttgttattgattaaatgaaacagttgagattaagaaagtttagccaggacaagttatatagcacaaatcatttcaggtaaggaagttnnnnnnnnnccctgagaggctaggaagtcctggctccaaactcctgctcctgctggacttgagccccactagcttctcatcttccactaatctatgcacccctcctttcccactcctcaaaagccgagctcactcaacaactttaattttattcaaataaattatttacacagacattttgtttttagtagatgttattagtgattaggaaaaatgaaagagattgacatctttcaattgacagagatgc

SEQ ID NO: 329141 - DNA, 412 bp, Homo Sapiens
  misc_feature (12)..(12): n is a, c, g, or t
  misc_feature (51)..(51): n is a, c, g, or t
aatcctcaaccnggttccatttaatcaataaccaacttactgcggccaccnttcataatatcaattttcgggcatttcatttacctgaatatccatttccctttcccttcccagactattcctactgtgtcaaattcaatattcctttgactcaatagggatctccaatcccagtgacccccattatttgtttgtttattaggacaagaaaaacaaactttcccagaaactccccagtagactgctcctcatatctcgttggctagaactgagttgcgtgcccattcctaaaacaaaactggcaagaaagatagttaccaagattggttcagaccaaatcaggattttttcctgaggagaggataaagtgagcttcctgggaggcaaatatttacacattccaaagattcct

SEQ ID NO: 329142 - DNA, 729 bp, Homo Sapiens
ttgcattgtatgtattacagaagttagaaacaaacacctggatcaattgtaaacataatcctgaattacagtattttccataggacaaaacacagcaagacattttctatttagacaggcaactttttgatatagagcttatttatactgaagaatctggaacaaaacacaggacacagtactaatctgtcaaatatactatgaaatgcatagtctccacttaaaatgctgaatgacacacacgttttgcaagcattactgctttccacaaaaactgctgaataggagttccgtccctgccaagatcagtgtttaagagatactttatgatgctgataagtattattggtggtggtggtgttcagaaagtttgtcactcatgcagatgtctgaaatcttgttccgaatccatggaacatagggtggaggccagctcccccttttttagatgatcacatagttctgagcagagatgtggtcctcgaccctgcagttcctgcaggagctgctgctgctgggatggctgctggacagaggcctccatggagcacgctgtgctggtgtcatcagaaagagacgtaaaggaaacccgggatgagagctgctcaacggtcagagttgccaaagctgagctctggccagagttaggagagttcttgagcataaggtcagaagcaggtaagagggggcctagaagttttacaggacagaaagctgatccggttggga

SEQ ID NO: 329143 - DNA, 790 bp, Homo Sapiens
  misc_feature (461)..(675): n is a, c, g, or t
acattttttgatttataaccatttattagtgaaagtgtttttaagcacagtcagggtgtaaacagtgcagcattcctgctcccctccgtgggagcagcgtctccttttcaattcatgtgactacagaaggcacttggtgaactgtgcgtgtctgaggtgtggaaaccaggagagggggaaagaattctcaaaggcctgacgtgagaagttggaaaggtttgcaggttagggaatgaattgggagtgggggccggcggcaccatatttcggtgactttctccccatttcatgtaaacagaattgccagggaccggttaccgtggatatgtttttctaaaaactcagtgtctgcacaatccattgatagaactggaggatgtgtctgtgtttcctgttgggtttttctcatctcttacatcatacaaacttcaatttttaccttgaatacaggggtagtaggnnnnnnnnnnnnnnnnnnnnnnnnnnnnnnnnnnnnnnnnnnnnnnnnnnnnnnnnnnnnnnnnnnnnnnnnnnnnnnnnnnnnnnnnnnnnnnnnnnnnnnnnnnnnnnnnnnnnnnnnnnnnnnnnnnnnnnnnnnnnnnnnnnnnnnnnnnnnnnnnnnnnnnnnnnnnnnnnnnnnnnnnnnnnnnnnnnnnnnnnnnnnnnnnnnnnnnnagggtggtggtttttatattccttgtgtgaggggtgtctgtgatatttggaatttgagaatggatttagacaatgctaagtacagtctgctgggttttgctttgttctgggttgc

SEQ ID NO: 329144 - DNA, 885 bp, Homo Sapiens
ttgtgttagcaacttttattgaagcggccggctgtgcacagcagcagcagaggcgctgtccttgcaaagcagggctgccctacaggctgtgcgcccacagtagcagctcagaggcagttctgcagtggtatttgtatccacttttaattatatgcaaatgaaggggcagtttatgcagacatttccagggtgagggtggtaacttctgggtgctgccagagccatggtgaactgacttgacacaggtcggtgtgtcctatggaaactagcatctgccctggacctattttagctagtgctcagtttggtctgagtgcctgagccccacttccagagttgagtcccacctcctacctcattcccccttcagagattagatactcctccttaatcttaagggggctgcagaagggcggagatctgttttccgtaactacttcctgctgagtttatggacgtaggccctgcctggcactggaggagtaaaaatctctggatacctgatctaaggagcccagaggcaggacgatttcattctccgtgtcagtggacaggattggctggaagccttgtgccagcattgtctctggaactgtggtaatctagaatacacaaactttactaagaggttaaagaagcaaggaccaaacatttgtaacaagacagttgtcaaaggtcctagaagaggtgaaaaacaggtgagacttgggaaggcacttttgatggttgaccagatataggttggggcagtgccctggttatatctatgtaactaggtagcttgctcatagatcttttgaatgttaacctcaacctgtccagagttaatatatgtgcagcaggttttattaataactgcacaagaccaccaccttgttcagcctc

SEQ ID NO: 329145 - DNA, 376 bp, Homo Sapiens
tcaagcaacccacccacggcctggccaaggtcggcctcaccgcccctggcctaagcacctttggaaactgaatacatggagtgttaaccagaaaaatgtctggccccttttgcctcgctgccctctggaaacctcagtgtttcgggctggtaggaagctacaggacagacagtgggcacggtgcctagcagcctgtcgcgcccccgcccgcctctgcattcctccagcggtggtgtacggatccagacattgtttgccacctctaggcctcttgataaaacagcaagtatttttcttgtcttaaagcaatgcatgtatattttagaaaatattaattgcatagaaggaaatacaggactcgtgatcccaccactca

SEQ ID NO: 329146 - DNA, 422 bp, Homo Sapiens
  misc_feature (20)..(20): n is a, c, g, or t
  misc_feature (35)..(35): n is a, c, g, or t
  misc_feature (102)..(104): n is a, c, g, or t
  misc_feature (149)..(149): n is a, c, g, or t
gttaaatggggattaatggnattttaacctgtaanataaataagacttgattcattttccatagaaatgtatgtatttggcccatccttttataataatggnnnaattaataaaaagagcctatcattaaagcaaggcaaacaacaatnacaaaaagagaaatggtgtcccagatccctggtttctaaataccactctccactaaaaggaatttggagaaatggctgattctggggttgtgataggtaagacacagaatgagtatggtatcagaaacctagaaaatgttcaaaaaattaagagtgcccacttcaaaagcacctgtactaaaattggaacaatagagagatgattagcatggatgacacacgaattagtaaagcatttcatattcttgtaaactgtgtatgttttatcacagt

SEQ ID NO: 329147 - DNA, 564 bp, Homo Sapiens
  misc_feature (314)..(326): n is a, c, g, or t
ccccaggaatgaaccaagggccagcttgggaggttagaagccaagatggagtcaattaggtcagatttcttttcactgtcataattttctcaactgctataatttttggccaaaggtagtttcagaagaggacaaccttccccaatagaggaggactgttctttggtcaagggtatacgaagtagtgcgctcccctgctagaacctccaaacaagctctcaaggtccatttgtaggagaatgtagggtagtcaaacttccaagactccagacacatccaaatgaggtgttgcatgcggcagtgtgcctttcttnnnnnnnnnnnnntaataatctcatgaaagctgtgaacacttccaccaatctgtagagacctacacagacagacacatgtaattttgcatgtaaggagttcatagaccctgcaggctcactgatgggcctcttgatccacagggcttgttcctatcagctttcttcctctggcaccccttttcctagcataatcctctaaagccaggcccatatcccctccagcctagtgtagcccctctctgtgccgaat

SEQ ID NO: 329148 - DNA, 841 bp, Homo Sapiens
  misc_feature (113)..(125): n is a, c, g, or t
  misc_feature (362)..(516): n is a, c, g, or t
  misc_feature (677)..(694): n is a, c, g, or t
cccagtcggttttggccccgggaaacaacaggcccctttttcattttccgggtaaaccacaactttagcgaccgcttaaccaaacgggcccgcccggggacccggtgtgcctnnnnnnnnnnnnncccggagcaagcgcttttttcccaatcactttcaaaccttaaacttcatttaggcccttatccagcaggtcgcgtacacggtgctgacccatattatattaaagactattctagtatgaccgaaattccatgtgaggctcaccagatggtgtcttccgtcgtctctcagagtctgagcagtgacacatcacatgtgggggctgacgtgtagctagtctctctataagcccaccagtnnnnnnnnnnnnnnnnnnnnnnnnnnnnnnnnnnnnnnnnnnnnnnnnnnnnnnnnnnnnnnnnnnnnnnnnnnnnnnnnnnnnnnnnnnnnnnnnnnnnnnnnnnnnnnnnnnnnnnnnnnnnnnnnnnnnnnnnnnnnnnnnnnnnnnnnnnntttatactaaaaacttctttttaactagctaccatcctagatattttattacctaacactgcttaaagtcatctcagtaatagctagaaaaaggaaccaaaaaagagaactgtctactctattagtcctcctggaaggatgctaagttctgagagagaggnnnnnnnnnnnnnnnnnncagtatctgcatgcatccatggctgtgtagttttcagtagtaatattaaatcaagagaatattcaaatgtttcatctttcctgacgattttaaagctgaactccatactcttgcataaatattaacattccacaactattagctcta

SEQ ID NO: 329149 - DNA, 445 bp, Homo Sapiens
  misc_feature (410)..(410): n is a, c, g, or t
  misc_feature (426)..(426): n is a, c, g, or t
attcggcacaggcatttgtttacagtttacagttccagaagtgcgtcgaaatggattacataactgctcttttattcctggtgttcacatctgtcccaggctgacacctgctcttggctggcccactttggtatgggctttaatttcactaccccaaacacgatactgtcatctgctttataataatgctcaagatgcctgataaaaatctcattttgcagccagacaagccttgaatccttttggcactaactgcaaaggaagatttttttctctagatatgcattagcagctagtgctccagttagaagcacgaactataaccttgataagtaaacagcagctggtggttaacaagtggatcgttcatgttcagtagttttataacattatgtgaggaagtaacgttnctggatttctttttcnttacacagattgggccaga

SEQ ID NO: 329150 - DNA, 847 bp, Homo Sapiens
  misc_feature (294)..(294): n is a, c, g, or t
  misc_feature (511)..(553): n is a, c, g, or t
  misc_feature (695)..(695): n is a, c, g, or t
  misc_feature (729)..(729): n is a, c, g, or t
  misc_feature (771)..(771): n is a, c, g, or t
  misc_feature (780)..(780): n is a, c, g, or t
  misc_feature (791)..(791): n is a, c, g, or t
  misc_feature (801)..(801): n is a, c, g, or t
  misc_feature (817)..(817): n is a, c, g, or t
  misc_feature (822)..(822): n is a, c, g, or t
  misc_feature (832)..(832): n is a, c, g, or t
ttgcagcacttctgggtcgttgcaattttgcatctaggagttagtttgatcgagttattctcttttttcaagtcacttttgttataggtctccccctaggcctgtctctcccttagcccaaaagatctgaactggaagcagaggttgagattctgcctcccaggagagggatttacctgccccctagtaccagataggtttagggcagtgatctctacagcaatcagttcagtgtcctggttgtccctgctcccatttacagatgtttgggcagcattgatagaacgtatgganggggttcaagacacgacgcccacctgatcaagatcatcagctaccttcaaattattgacctggacagggtccaagtctgatagtaaccttttaacaagaaagaacagggatgggaatggaaagagatagccttgaatccacagtattgtacctgcattttctaccaccctaaaattgtgtgagacttctcccattgttaacagattgcatggacaannnnnnnnnnnnnnnnnnnnnnnnnnnnnnnnnnnnnnnnnnnctgccatcctagcacaggaggatttttggtattgatatagttaaagctgttctggcactcaaagaaggccgtgtttccaacatcctctcatcccagggacatttggggcaagtgagttaggggcccaggggcaattttcctnctggaataacgtgtctgaggcagggatgctaccntcaggcttggttttgggccagcttttttgctttgggaaaatnttaactttntttcacaaggngggcaggttnctattggatgttgggngtacngtttttcctncacaaataggccttt

SEQ ID NO: 329151 - DNA, 342 bp, Homo Sapiens
aagaattcatcctaaaagtgttttattatatttcaaacacacataactataaagactataatgcattcccctataaacctagacccatttcttatcaaatcttaccctttgcccacattttcttcaggttttttcacatacattttaaagatgttttttaatggtcacagtatggctaactcaagaactaagggaagaaaccattggaaattggttccacttttaagttaaaaatctagactataaattattcttagcttacttcctaataattttagttttcgccgatatcattgatagataatgtaaaatttctacctttacttggagacactaaactct

SEQ ID NO: 329152 - DNA, 419 bp, Homo Sapiens
  misc_feature (17)..(17): n is a, c, g, or t
tacacgaacccaccgtnccctcccctacacttgccataaggtgcccagtgaaatccgaaagagggcccgggactccacccattgttttccttttccctaaaccttttgtaataggcctgtttgatgtgtcttatgaaacgaaacaaatctgaatataaattttaaaatagtgggagttattctcgcaattcccagggatttctatgcttggagagttagtaatggtaagtgaagaaagagaggcttcctgagctcatgttgttcctcccaagggcatttgggggttgttcccagagcaaggaaatcttgtgcagaatcaaaggttctggtggaatggttcacttcggaagtcccaagggcagtgcggatgaccgatttggccatggaagacttatcttcatggcacagagaggttgtgc

SEQ ID NO: 329153 - DNA, 377 bp, Homo Sapiens
  misc_feature (47)..(68): n is a, c, g, or t
  misc_feature (332)..(332): n is a, c, g, or t
gctcctgcttccgaagcctgcccaatttcttttttcttggcctctgnnnnnnnnnnnnnnnnnnnnnncccttgtttttgtagaagactcagaggagaatctttcttatggctccctctgttgagattggaattggaagagaacttaattttttgtatttaaaatgcagtgtcatgcctataagcatttctcctatataggactgctttgctagtgtgccctcttgctgtgtcttacttcataaggagttgtatcttcccacctccatttcaatactgccggttagggacctaagtagaagagcagtaaaggctgatttgacacacaggggngatggagttggtccttgtccattctctcacccgtgctgtgcatgg

SEQ ID NO: 329154 - DNA, 415 bp, Homo Sapiens
  misc_feature (18)..(18): n is a, c, g, or t
  misc_feature (30)..(30): n is a, c, g, or t
  misc_feature (45)..(45): n is a, c, g, or t
  misc_feature (255)..(275): n is a, c, g, or t
aattttcctttatgagtnctttaaacaagngggctcaattatccnggagacaagtactagagccctacccaatgactctagagcatctgatcaccatgccactgatcaattctatcaactttcgtctagtactgttccttaatctgttgcatgtatatggagttgggatgaggaatagggatgcagattacaaatgtagatttgtatgggatcctgatgaaagcaactgacctcagaaaattcccatgtgtgcannnnnnnnnnnnnnnnnnnnntagagtggtaggaggtttcatgaggttcacagattcctgaggtttatccaagcaccctaaattcaaagcctatgtagatgcaccctcttgtcaaccagttaccttctagctatcagctatttcttgtgagcctactatgc

SEQ ID NO: 329155 - DNA, 535 bp, Homo Sapiens
  misc_feature (40)..(40): n is a, c, g, or t
  misc_feature (50)..(50): n is a, c, g, or t
  misc_feature (70)..(70): n is a, c, g, or t
  misc_feature (94)..(94): n is a, c, g, or t
  misc_feature (99)..(99): n is a, c, g, or t
  misc_feature (109)..(109): n is a, c, g, or t
  misc_feature (137)..(137): n is a, c, g, or t
  misc_feature (292)..(292): n is a, c, g, or t
cctgccgtaagggttaatttccacgagtcagacaattggnaaagccccgnccaaagggttaatttccatnaggaagtgtggaacagctgatcancaagncaatagcctncatctaactattttaatgggtggatganccaggaatatttttgcaccaacctttttcctcacacagtgttggacgcagacttagaacaccactttgaaatggaaaaggtcctacctggggcatcagccgttgccaggcagtctcagcaatgcctctgccctccctgcagcagtcccaaaatgnagaagcacaccttggagggtgtggcttttctgtttcatgggtgcaaacctagcggctccacaccccagggactggcccccaaaaagcaaaaacactgctcatggcttggcaggtcctctagtatgtatttttatgtgatatcactattcagaactgtggtgtatactattctataaatttccacaataggttggccggacatcctttaatggtgggtattaattcctcttattctttacgttt

SEQ ID NO: 329156 - DNA, 516 bp, Homo Sapiens
  misc_feature (450)..(450): n is a, c, g, or t
  misc_feature (477)..(477): n is a, c, g, or t
tttgactggcactttctgcgtgatttatttcatctcggcatgaactgacaaacatacgaggctctgcactatttatgcccaggattttaaaagtcaagcattaataaatacattaactacacagatcacaacagctgccctgaacttggccttcaacaggtgtagtttacctttaataaatggtaacatttgagaatcgcttagagcttgaacaggctttggaggagctttgttctcacatgagaacccgtctcctgtttcatatgcgttcaatccaaatccatccacttgggcgtgtctgaagctcctgccagcacagtgtctgtgccgggtgcccgaaggctggcacagtccaggggttcctcccggatgtgggaaaacgtgggaaatgatgtgggccacttgaaaggaattttcaagggcaactggaaacaacttgcaggttttccnttttcagctcgtgttttcctatggaancataacctttgcggaggggggatttccggaagttgattg

SEQ ID NO: 329157 - DNA, 393 bp, Homo Sapiens
  misc_feature (28)..(28): n is a, c, g, or t
  misc_feature (47)..(47): n is a, c, g, or t
caaactcacagaaaagcaaagtcaaaantgtggttgcccatggttcngggtgaaaaaaaagggagttagtgtttaatgggtaaagaggttccagtttcgcaagccaaaggatttctggaatattttgttgcccaccagtatgggtataattaatgctacagacctgttagaaaggagtctcttccagatttagatactagaaaatgtatgagtaaaatacgatgtctgaaatttgctttcaaataatctgaaggctggttggggaagttgttggagtcatacatgaaataaaactggtattagttgacaatccttaaaactgagtgggtttattataccattctctctctacttttgtgtatgtttgaaattttccatcataaaggagttttt

SEQ ID NO: 329158 - DNA, 447 bp, Homo Sapiens
  misc_feature (15)..(15): n is a, c, g, or t
  misc_feature (24)..(24): n is a, c, g, or t
ccccaaaaacccctncctatttcnaaaaattggtcccctgaaaaaccttttcccctaagtatgggaatttggaaaataatgccaacctttcctttaatttcacttgccctcagagacataactgagaacttcagctcctctttgtacaatactgtagacagtataagaaatggactgagtctatcagacccatagttatcccccaggaaactgatttctaaagaaatccctttagtagtttacttgctctttatcctaaaagatgagtgcaacaaaaacatggtgctagttggtttccaagtaataccagttttgaagaactactttaaagaaatacattgcagcaaaagcaggcatgtgaagcagtacgtgcactgacaggagtaccctgctggagaagcagctctaaccaacacagcgtcctgattcctaactgcttcattctaa

SEQ ID NO: 329159 - DNA, 356 bp, Homo Sapiens
  misc_feature (303)..(303): n is a, c, g, or t
tttgttgttccaactccagaatccagaacagggctggcacctaataagtaggaggtcaatacctttttttaatgaataaattattgaatgattacccagatatgtatggataaatatacttgtttgtgtatgtaaacatggcttgagaaatttaagaaacgggagagaagacagctcacatatattaagtactaactatgtaccaatccctattttagtgtttcatttatatcttttaactctcacaataactcacaacaaaagctcacaggggaataaggtaaccagaacaaaaaggtcccnggggttattggataataaatggtggggaaatggggttttgaggctccccgggg

SEQ ID NO: 329160 - DNA, 326 bp, Homo Sapiens
  misc_feature (13)..(13): n is a, c, g, or t
  misc_feature (47)..(47): n is a, c, g, or t
  misc_feature (306)..(306): n is a, c, g, or t
aatagaaagcctnagaaatatcaaccgtcagagggacccgagacagnaaataccagtcatgtgttaccttaatgatggggatatgttcccaagaaatgtgtcattaggtggtttagttgttgtgcaaacgtcatggagtatacttctacaaacctagatggtatagcctaccggacacctggtctatatagtgtagcctattgctcctaggctacaaacctgtatagcaggttactgtactgaatactgtaggcaattgtaacacaatggtaagaatttgtatatccaaacatatctaaacatagnaaaggtacagtaaaaataca

SEQ ID NO: 329161 - DNA, 568 bp, Homo Sapiens
gaatttcaaatgcagtttattgcagcaaaacaaggaaatggggagtttaagacctctccacaaaagaaaaacaacttgcttacaccttatgtacaaaaccaaaacagcacagagataagatgctaaggagctgtccacaccctgggtctaactggtcctactctggctggcttaaggaggtgctttgaaatgtcatgtgggtggtggtcactgctgaactgtttctcagggaaagaacaaagcagggtcatagccaggggactgagattgccactgatctgaaaacttcattgggaaacagcagaaaagaaagagctgggggaataggatgagctagtgtaactaaccatagctcttttctccggtaaggctgggacaaatcgacctcggtcttgccaagcatatttgttagtgatgctggggggagactagagctaatgaaacagagggcatctctttatctggttactcgggaataagtggtagaaacaacttcacgctgggactgctaccagagacttgacaccccagagctgatcccggcctctatggggatacagagtcccgc

SEQ ID NO: 329162 - DNA, 415 bp, Homo Sapiens
  misc_feature (34)..(34): n is a, c, g, or t
  misc_feature (40)..(40): n is a, c, g, or t
  misc_feature (58)..(58): n is a, c, g, or t
  misc_feature (69)..(69): n is a, c, g, or t
  misc_feature (214)..(214): n is a, c, g, or t
gacggacccacccctgaaaattctgggaaaaggnggaccngaaggccggagggaggangccaggagccnaaaaattctgaaaccagccaggtaagttagtgttttccaaggaaaagctggagcttttatcctgaaaatcagattcctgaagcctaagaacccaatttgaaaatacaatacaatatcacttcgacctaggaaattatggcataancccaggagtctccaaaagctttttgtgtttacttaaaaattcatacaaaatttgcattctaggtcataatatactaatttaattggaggaaacaaaggcactggtatgatatcatcatgcctactttattcatccgtgtatccccagaatctagcacagttcccgattggtatttatagtagcatattggttgaataagca

SEQ ID NO: 329163 - DNA, 566 bp, Homo Sapiens
gagactgcatagggctcggcgtggaagcgagggcgggtgatgtgtcggaggaacgggggcgggaaagatccgccgagccgccgacacggccggacccgccgccgggttgaatcctccgggcggactgcgcggaccccacccgtttacctcttaacggtttcacgccctcttgaactctctcttcaaagttcttttcaacttgtccttacggtacttgttgactatcggtctcgtgccggtatttagccttagatggagtttaccacccgctttgggctgcattcccaagcaacccgactccgggaagacccgaggccggcgcgccggggccgctaccggcctcacaccgtccacgggctgggcctcgatcagaaggacttgggccccccacgagcggcgccggggagcgggtcttccgtacgccacatgttccagtcgactgcgcggggcggggattcggcgctgggctcttccctgttcactcgccgttactgagggaatcctggttagtttcttctcctccgctgactaatatgcttaaattcagcgggtcgccacgtctgatc

SEQ ID NO: 329164 - DNA, 478 bp, Homo Sapiens
  misc_feature (438)..(438): n is a, c, g, or t
  misc_feature (445)..(445): n is a, c, g, or t
tctgcaacatccttttggttaaggtcagccctctccagtgtgagagcatactgcccaagggtttgaataccaggaagcaaagatgattggggtcattttggaggctgactactgttctctgcgctgtccctaagtcatgtcctcccacatgcacagtacactcctcccctcccaaagcccccaaaagttacatcccattagcacatcggtccaaaatcttatcctccaaaagcagcatgggatttatactcctcaagtgggtatttctcggcactgtcacccaggggtgggagtggcagtgggcagtattcacgggcttcactgttaggcctcggaccttcctgggggctttagggcaatttcttcccccacttcagttttcttcaagttagggtggcatggccacaggatggccaggattaatttttttaaggaagncggagtntggttatttttgttccagggttggtcttcggaa

SEQ ID NO: 329165 - DNA, 845 bp, Homo Sapiens
  misc_feature (133)..(133): n is a, c, g, or t
  misc_feature (138)..(138): n is a, c, g, or t
ttttgtattccctcaaatatttaagggtttgttctgaaatatacttcattaacttggaaatagtttaatctcttcaaaatttgcttttaaactttggtaggctgatctagaacagctgttagtctagattttnctttncttttctttttgcctctggttccagttcttgtgatagaattaatttgatcccattactgtggactctattcaatgcctgtcatgttaagaggtatttccatacagactggtgagaacatgaatgttctctgtgtgagctctggaaactgttctgtctgctgctttccagtgattttttccctgacttccagtagtctcctcacacaaaagggctgatcaacgctcagctgctgactcatgagcaagtctatgcagctccccagagagttctctctgtgcagatctttcctctccagtactctgacctgcaaaattatcgccatctcagcctccttgaaagatgaactttgtttcttcaactcaacaacatctccagcctctgtgtgcagcctggaaattccatccaggcagtaaggtggagtgctcttagggcccatctcatttgtttcctttctttcagggatcattatcagcaaggcttgctgtccaacgtctgaaaaccactgttttatatattttgtctgctttttttgacaggagggtaaatctagtccctgttacagctttttggctggaggcagaaatcttgtttgtgatttttaagaattactctcttaaatttaattttgttttataattatgtaaaatacaaagctctgaagttaaaacaaggtacagtaatattctatataacattttggtcagtg

SEQ ID NO: 329166 - DNA, 163 bp, Homo Sapiens
tttctctctcgttttatctgctgaaaatagggccaaaatattttgacatcttctttttactaatatttttatgtatgaaagagaaagaacccattgtcctacatagtgaaaaaaatcacataaagtgtattattacattaaggagctacagcatggcctgttc

SEQ ID NO: 329167 - DNA, 305 bp, Homo Sapiens
aagaaatagtgatatagaagaagagtaaatcacagtattagtattttagagtggaaagagtaaaaatgatgcaaggaatccattttcaccatttataagctacatggacctgtgctcttgttgcttaatctttgaaccttggttatgagttattgtaaggattacatgaagaccttgctttcaggacagatcctgcctgtgggcaggagctagcctcccaatccacctggttcccattcatcctcattgtgtaccttcactgagggcttgtacccggaggcttgtcctgtcccgtgtaacatggg

SEQ ID NO: 329168 - DNA, 704 bp, Homo Sapiens
aaaggtattaactttattaacctgtaacattcatcattttaaaggagtatataaaaactgtcaaaatgggtcagaaacaaagtttgcgatgctcataatcatcttcagcagtggcaacatttaactttttgagtcagtcgcaacagactgggcaatataactaacacaatacataacgataagtgttgttcttgataaaaaaccaaattatttttctatttacaatttttaggaaaagggtttaatgtaaaaatatttttcttctttatatatttccctgccatgataatgttaaaacatatcaagatcctcctcaaacttcaagggtgaaaagcataccattccattttagttgaaatattccttcacatagccaacacattttttcaaggcactctagctactacaggaaaaatgttcctcttgcctactgattattttccctcaaacttatctaaattaaacactgttataactgtttttttaaatttagttttccatggtacagtcctcaagttatttttcttttatgtggagccactccttcagtttcaacttgctgagcaggcaagcaactcgcttttggtttccatgggaaactgggattcctgtgggctgcgtgtagggcattcctcgttccaccaatcttttggttggtgttgtggtatccagtgattttcggttggaaaagtacaagggtaatc

SEQ ID NO: 329169 - DNA, 397 bp, Homo Sapiens
  misc_feature (266)..(280): n is a, c, g, or t
  misc_feature (292)..(292): n is a, c, g, or t
  misc_feature (306)..(306): n is a, c, g, or t
  misc_feature (330)..(330): n is a, c, g, or t
  misc_feature (351)..(351): n is a, c, g, or t
  misc_feature (366)..(366): n is a, c, g, or t
  misc_feature (377)..(377): n is a, c, g, or t
tgaaagcaaaaagtttattcatgtttgaaactacatataactaccacgaggaagactttttcaatccagggtgtaatccagttagaaaggaacacgaaacgtttttaatacattagaatcaccgccacaaattattttcatgactcaatcagtttcagaatcgcatacaatacaaaaagagagaaaggagagggggccccattacacagggtgaaatatacagtactgaatactgaaatctgaatgcatcacaattagtcgctgcnnnnnnnnnnnnnnngcatgggttagnaataaggtgaaggnccattccaaaatgtttctcaggtntttaccaaccgttttacccgntccccgtggttgganttaaggccccnatgtttcccccactcggggt

SEQ ID NO: 329170 - DNA, 128 bp, Homo Sapiens
actgcatctattttttttctgtataattatgttgtttatcatgtctgttgcttaatgtctgtctccatctgctaagttacaaccttggggacaagaatcttggtgcataaatgaactgctaggtaaat

SEQ ID NO: 329171 - DNA, 422 bp, Homo Sapiens
ctttttaagaatgcctctggacctagagatggtttttaaatcctgtggacctactgtaaaggatttgacctaaatagccagtaccaaatgtaggtggaagggtacagtcaatactatgtgccctaaaagttaacactcagaggcatttgaggcttcataacccaaatgatcttgaaagcacataatgatcttgaaagcacataacccagagttgattatagtctgttctgttgcagtgttggtttctttaatgtgaattggcccatacacacttggtaaatagagaaataatgtcaatataacgtggaagtagtgttggttcataagcagtttttcccacagtgctaatgtataaactgaaaatggggaaagacctttcaattaaagaggaaggtttggtaatatttgaagacattacacca

SEQ ID NO: 329172 - DNA, 524 bp, Homo Sapiens
cttgcagcccaacactgccctccaccaagggtttctggaaaggctgaagctggagccgtaaaccacaacaccgtcccgggtcactcccggtcacccccgctaaagacattccaacacccagccaaaaggcttaaagtttagttttgaaggggttccaaaggccaaatacactgaaacccaacgtgtaaaccttgcctggttttcaaactggaagagaaacactttggtgtcttcaattaacccaggcctgcactggatgaagcgaatgaaggcaaggtcacggctgctaaagcacagaggggttaaaaagtgtgaaaccagaagcaactctcgagtgagacacgaagcagtcagctgacgcaccagacaccgctcccaccagacacctctcccgccagctgcagggccctgggcagcgttctcagcccagccattctgtgacagttgttgaaagaatcagctgttgcctttttttctcaagcggcaacaatcacatcaatattacatggtcttatgaatacatc

SEQ ID NO: 329173 - DNA, 528 bp, Homo Sapiens
ttttggtcactggtttcatttttttccttgctctaaaccacctcttctctgaggttgttcatcctcagggctgggtggggtgcaagcccttgagtcccaagtgtgtcgaggctcctggtcctgggtgtgctggtggatgagtgggcacatgccccacctggggtggtggagccgcttcagtagatgtagggcatgatgcggtaaggcacacgccggcagtactcctgccaggccaggccgtacttctgcaggcactgcggctcatcccgggcctcacggtgcaccagcagcgcgttgaagtagaggaggtagaagtagggcagcaggtgtgacaccccgcaggcaaaggaccaagccagagccatgatgaggtctccaagatagttgggatggcggaccataccccaccacccagacaccagcagtttccgccctgtggctgtagagatggtctaagcccagcactctagggtcagaaggattctttcggaaaggtgttttctgggaattcgcccacggaagatgtag

SEQ ID NO: 329174 - DNA, 417 bp, Homo Sapiens
  misc_feature (18)..(18): n is a, c, g, or t
  misc_feature (32)..(32): n is a, c, g, or t
  misc_feature (37)..(37): n is a, c, g, or t
  misc_feature (311)..(311): n is a, c, g, or t
  misc_feature (378)..(378): n is a, c, g, or t
gtagccttttggaaaagngggactcccggctnaaacnatttatcacttcctcacccactctgtcaaatagagtctgcctcacaatatgctgccttatggggagaagaaatcaaggcctcaggtaaagattaagtgcctattgtcatatttagatgtttggttcctgcactgtctatccataatattagggtttttttaagaagctgtctatattgaaagatataaaatagacttttcagctccaataatctccaaaaatcctggccaaattctcgttttcttttctctatacagattatgaaaaataaggnaaaagtttatgtcataaaacatgagatttgcttttaatcaatcttttccatatagttgaccactagnaaatattttttcagtgttcatattagcatatgttacaaa

SEQ ID NO: 329175 - DNA, 456 bp, Homo Sapiens
  misc_feature (259)..(259): n is a, c, g, or t
  misc_feature (397)..(397): n is a, c, g, or t
  misc_feature (424)..(424): n is a, c, g, or t
aagcatgcatgtcagtttattcaccatacttcccccaggaaccctctcactggtcagggaatgaaagaattgaagggatgggggatgtacaggtagaagtaaaaggcacaccttgaacgtgctatgatgggttgaaaagaggttggtctgaaattgacgagcctcccatttcagaggctcaggaagtttgtgcccaggaaatatgcacgccttcagccaaatcccctgcacctgatggagcagaagcaggcactgcctnaccctgggcctgggctgtctgctggctctcacgccgggcattttctgggcctgggctgttcacagctagtggggatcactaacgctgcatgtccatgggcatcttgggcctaaacaaacaggtgaggcctggggtctntttacacagcagcaacaaaggtgactnatcagcaggagatcttttagtgcacaaattat

SEQ ID NO: 329176 - DNA, 459 bp, Homo Sapiens
  misc_feature (11)..(11): n is a, c, g, or t
  misc_feature (211)..(211): n is a, c, g, or t
ttttttaagcnatctccagaaaagtttcttgtaaagccacggctgttaaagccaggccagcaacctttcatatgcaaatgtaggccattagaaactgggtccacccaaacatggagattcccacagccttcttgcccttgcccctacatgtctcctggaatcccgacgagcgtagaacatcatggcgcccatgtatttgcatattaaaagncccagggtggaagagccagctttttcatgagctatgtgaatgatgcgcctagtcaacccaatccccggagccctatgcaaatcgaacaccaccttctccagcctctgcatatatacctggctggtgtccaccgcacttggggatcccttctcttggctttggagcctccctccctctgtctctgtacgggggagcttcttccttctgccttctcccttctgtctggcctattaaactctccgctcctt

SEQ ID NO: 329177 - DNA, 470 bp, Homo Sapiens
  misc_feature (365)..(365): n is a, c, g, or t
  misc_feature (433)..(433): n is a, c, g, or t
  misc_feature (442)..(442): n is a, c, g, or t
tcccagacggcccaggctaaacctgggtagctggcaaccctaaatgcgtcctttgttagaaatcatgtagggctcgactccatctttagaaagtgagttcactgaaggtgagttaaggacaaggctctgaagagcggcctgacttgctttctttccttgtgtttgtggaggggtgtagacaaagacactaagtgaagatgcagcccccaaggctgtgttgcctaaaaaccgtttctggcttcttcacaggaatattcctcgtgggtctagaaggagctatgtgcttctctgggagattgtttccacagaatgggtgaggactgttagaaccaccttctcctttctctcctgtctcagggagggangctgtaagtgctaaaaaatgcccctgaccaggggggttagggggttgcagcacctccagagaagtggnacttaatgntggctgcccacctgaccccttttttata

SEQ ID NO: 329178 - DNA, 345 bp, Homo Sapiens
  misc_feature (31)..(31): n is a, c, g, or t
  misc_feature (40)..(40): n is a, c, g, or t
  misc_feature (46)..(46): n is a, c, g, or t
  misc_feature (69)..(69): n is a, c, g, or t
  misc_feature (79)..(79): n is a, c, g, or t
  misc_feature (131)..(131): n is a, c, g, or t
taatgtcctgaaaaaggggataaatttggtnaaaattttnacaaancccaaatgttaaggacccctcgncccttccttnccccctactcggctcctcagaaagcccagccagcccagaaaataccctcccnggaatgaaaatgagaaagaggcagttttctccctgagcaatgtttttcaaactttttgacccaaaagcccacagtaaggaatacatttgatttccataactaaaaccccacaaataaatataaatacataacagaaacaaaatttcaggaaaaaaaccactcatcactactatgggcaaggcattttgatatctactgctctgtttcacttaaa

SEQ ID NO: 329179 - DNA, 661 bp, Homo Sapiens
gcctgcataaaatactgtttattttgtcctttaggaagactaaagtagtccagctcccctacagcccagtcttgcccccaccctgcactctgtcgccttagttcctggggaccaagcatctggcatttctcaagcagaccctctccttgttgctccttttcagtccctggagtctggcttcccaaagccaaagctggaggagagctcattgctgaggaagcagggttggagcctgaggagatgcagagggcctggacccctcgctggatcccagaggcccaggggcagagatgctgggacagggctctaggggaccactgggtgactcttgaggggctagaagcagggctgggtgacttttgctacggtgggctgcaacactgtctggcttctcaaagcgcttgccgcagaattcacaggggaagcgcaaggcagccaccgtctctgcatgcttgcgctggtgccagttcagggaagccttctggcggcaggtaaacccgcatatctcacactgcaggggtttttctccagtgtggatacgtctgtggatgacaaggttgctgctagtgcggaaagaccgggcgcagaactcacagatgtagtcccgggtgtcactgtgcagcttcatgtgctccttcaggtgtttcttaaagttgaaaga

SEQ ID NO: 329180 - DNA, 550 bp, Homo Sapiens
  misc_feature (203)..(215): n is a, c, g, or t
  misc_feature (474)..(482): n is a, c, g, or t
tttttctttttccttttaaatataaggcaacttgccaacacataacttaaaactggtcttcagtcacattgcttcagatcactagagaatttctggctaacgaacagtagtggatagtgaacaaaatgcaaaaccttaaataagaaccatcagctgacattccccagagacaagaggaaaggtaagggcttatttcatctgtnnnnnnnnnnnnngcccaattctgcatctttaacagaatggtgcaaaaatttgtaacaaaacagtctaagtttaaaattacagaaaagtgtttctagccaactaattgtcgcttgggatgagacgtgctgagcatggagtggatgaaggtatgctctaagaatggacagagggcaggaggggcttgtttccaatgtaggcccagctccaggtgttagaaccatgctcatttggtaaaggaagtactcaaagagcttaaggctttgtgtttgnnnnnnnnnccttcattaaactgaggggctgcactagagggtgaatgtacctgtggggccactcacacacaatgcta

SEQ ID NO: 329181 - DNA, 452 bp, Homo Sapiens
  misc_feature (248)..(257): n is a, c, g, or t
  misc_feature (416)..(416): n is a, c, g, or t
  misc_feature (423)..(423): n is a, c, g, or t
  misc_feature (432)..(432): n is a, c, g, or t
ttatatctgatttcagttataagcagcaaaaattcaatttgttaagagaagagaatgaaggttatgccaagctgattgctgaattggggcaagatttatctggaagtattactagtgatttaatcttagaaaatatcaaatctttaataggtaagacatttatctgtatagtatgtgttgttaagataacaagttattttagctattggagaatatccataaagacaaaatgagtgcattccatctannnnnnnnnncagttaaggaatgggagaggtgtttaggcttttacttttaatgggtttatcaataattataaaatttaggcatgatatttgtgaggaaatcttattgtcactataccttgtatgttaatattagggtcctgctctgtctaggtcttccttttttgtggnagggganccgagtggnaaggccaccactttcaaagg

SEQ ID NO: 329182 - DNA, 460 bp, Homo Sapiens
  misc_feature (33)..(33): n is a, c, g, or t
  misc_feature (295)..(295): n is a, c, g, or t
gagcactctgaggacgatgtgcagagcaagcantggctcacccatttccttgaccaattaccaacattaagaaacagccctggtcttgaaagaaaaattgaaggttcctggcggtttgggtttacaaggaggcccaggagaaggtgggagggacgaggaagatttgcacccagaaccctaacaaaagtactgcatgactacttgatggggcccttgcctcaaagccgggtttgctctgctgtatttggtactcaatccaattttcttaaccctgaacagatgctagaaatcgtgnaatccctgggtaacattgcagtcgataacgcaaatcctgtgtccaccagatgggccagctcagtacagacactgatcttcacatttaattttggggtttggtttctaatactttgaaattctacttttagttaaagtcttcactggtttttcttttttattccca

SEQ ID NO: 329183 - DNA, 322 bp, Homo Sapiens
  misc_feature (294)..(294): n is a, c, g, or t
atcaaagatttattgagtgcttactgtgtgccaggcctgtttctaaagacacagcagcaaacaaaactgttatagaacaggataaggcaggtcatctcccagatacgacactttgataggaacacaaaatacaaataggagagtagaaagagatgaaatacaaaggggaaagagctgatattggggcttatattaatattgaaaggccttacatgctagatattctaaatggggagaaacatgctgggaaagatacttgggcatgaatgaacttatgtcccctatgttcaggancagactgctttcccttctctgttggggt

SEQ ID NO: 329184 - DNA, 641 bp, Homo Sapiens
  misc_feature (500)..(563): n is a, c, g, or t
tttgaagctatatcaatatttattaaaagtttatatattacttttgatcccctggagagaaatacaaaattcaaataattattctatttttatatcccaatttgtaattatgaaactctagcattttaatttttctctttcaagtttacctgaagcttcacaaaattctgtgaggaatctattataacaggtatttggcttatttccacacaaacagagggaaatgtgtattttctatgccctgaagaatttactcttttctgtaaatgacatatgggtagttaattccttttgggtaataaaatattcctgtttttagggccgaacagccttttctttaaattcggggcaacatatcaaggctttgccgtaataatacagagtaatcgactaaagtaatatagaatttaaataacaaagagtttaaacaatttaatatgtcttctattaatttcaaactgaaattttacagaaattatttggaatatgctgccagagtnnnnnnnnnnnnnnnnnnnnnnnnnnnnnnnnnnnnnnnnnnnnnnnnnnnnnnnnnnnnnnnnccagctaaaggaaattaccacagctataatgatttcattaaatatctgaaatttaaagtttcttttggattttccagc

SEQ ID NO: 329185 - DNA, 432 bp, Homo Sapiens
  misc_feature (85)..(93): n is a, c, g, or t
tttttatttgtcaaatatttattgatgttaaatccacattacaccagcacaacaatccaaagtagtatgattgattgatagtacnnnnnnnnnataaatacaatataaaggtggcaaaataatgctagttaatcccaaacccagcaaatcagcaaaaaaaggtcacattcagaaaaatttgccaagtaagacataagtcataattctacaatagagataggtccatgagagactgtgtatggtatcttaaattccatattaggcaatgcatataagtgcgggtcaaagaaacttgaaccacactgcatagaacatctgccacccggtgctcaagcctattaatcacttaaaccttggttggttggtgttcttacaaagaagtagaaagctgtacatgtgaaacagtaatatgaaatatatggggtggtacac

SEQ ID NO: 329186 - DNA, 390 bp, Homo Sapiens
  misc_feature (170)..(170): n is a, c, g, or t
  misc_feature (190)..(190): n is a, c, g, or t
  misc_feature (312)..(312): n is a, c, g, or t
  misc_feature (350)..(350): n is a, c, g, or t
  misc_feature (366)..(366): n is a, c, g, or t
ttattttatttattattgttattgttatttttacaaacaatagatttgctgcaacatgctctggctcatattactgaattaaaaaatttaacacatttcaaaaatatcaaaaatacactataatgagtcttaagactacaatacgacaatgattgcacaaaaccgtaagnatatgagcccactgtctggnatgacatccattgggcaacagtgagagaaaaccctataggcatctggggagaagtgcatgaaatttaggaatacaagggaacttatgtgtgactgactgatcaccaaatgagggcaaacagngccggggttgactgtggctgctttttctcatctggggnggtgcttaccccactntggggggcaaaggtcactactggg

SEQ ID NO: 329187 - DNA, 408 bp, Homo Sapiens
  misc_feature (67)..(67): n is a, c, g, or t
  misc_feature (81)..(81): n is a, c, g, or t
  misc_feature (91)..(91): n is a, c, g, or t
  misc_feature (120)..(120): n is a, c, g, or t
  misc_feature (229)..(229): n is a, c, g, or t
aaagggaggggcctaacaactgcccttgggaaatttaaccaggcccaaaaatgtcaaagctgttatngtaccagagaattnccttatgccngagatccataaaaatttttggtttccccncccattcctaatgtaaagcttgttacctaattgatccttcatttgcccgggttcccaacatacacatgcctactttccctcttaagattgtcaagttataaataggagnacttttatttagaagaatgcctaatatgaatcttttggaaatactagtaattagctttcttctgctgtctccaccaattttatctgatttagaaaattatatttcctttattgagatgcttaaatcggagggcttagtttgcttcagaaagtttataaactatattattagactaattt

SEQ ID NO: 329188 - DNA, 480 bp, Homo Sapiens
  misc_feature (20)..(20): n is a, c, g, or t
  misc_feature (108)..(108): n is a, c, g, or t
  misc_feature (117)..(117): n is a, c, g, or t
  misc_feature (135)..(135): n is a, c, g, or t
  misc_feature (142)..(142): n is a, c, g, or t
aaagtgtgcccggccctctnaaaatggtcacatggtttcagtctatggaccagtgaatggccctgtgtgcaaccactggccgtgggagcactgcaccagggggtcacnaataactcngagccaacaagtgtaatnccaattngcacagggctgctgtcctgacctcatctctctatcctgcagttggccatggggttatttttcagtgcctcaggggtcatattaaaaagcatgtggccgctgagtgagcactggcaacagtggccagaccacgccctgtgtgtgacaagcagcccagtcacacctgtgactgatgggcctcagcctggcctggcctcaacactcctgggctcccaatgtctcactgctctttagctggagaggacctgctaaactgcagcagggcacttgggaagatcctgggctttggtgtcccacaaatctgagttggaatcatgccattgttcaatgctacttgat

SEQ ID NO: 329189 - DNA, 701 bp, Homo Sapiens
  misc_feature (470)..(506): n is a, c, g, or t
  misc_feature (586)..(594): n is a, c, g, or t
cgcttgtgtgtatttttatttcagggaaagaaatgagggatatgataagaaaaagtctattaaaattgtaaggcttactccagacaccattgcttaaatcactcccctcgcacacagagagaaaacccctggcaagtgcacaaaaacactactcataaaagcacggtgaccagtgaactattatgcaaggcacccccacgtgtcctttcctaaccaggaagcccgtcctctaaggagggggcatgggtcccatccctgccccagcctaggcgtgcttctgtgtccagctttaaggcctctgcgtgaggaaggccacagactcccagctgtcagcacgctgtcatgatgagacttggagcaggggagacgcaccttctcaatctacaaaatgagccatggcgcccattaaaatgtcaaatgtcaactctaaatagtctattgggtgctgtcttgcacggaaatctcagccnnnnnnnnnnnnnnnnnnnnnnnnnnnnnnnnnnnnngcaattctctcccaccacttcacttttcttggagactgtctatccctcgaattctctttgcctatgtagaaaataacggnnnnnnnnntcaagcaaataactaccaggtcctaagacaagagacaaccaaaaccccaacaaaataagttagtatttatcaaaatatgttacaacaccaatctccataaatgtcaa

SEQ ID NO: 329190 - DNA, 493 bp, Homo Sapiens
  misc_feature (186)..(186): n is a, c, g, or t
tttacaaaaaccttaatcttttaatggctgatacctcaaaagagttttgaaaacaaagctgttatacttgttttcgtaatatttaaaatattcagaagtaaactaaattatcatgattgcctctaactttattttaaagactcagtgggttccaaccagttcaccctgacctgcggcctacgcggnagggagggagggtgctcttaaagaggaaggtgtccttgttacaaatcctgcaaaatggtctggggtttgtcggtgtggtgtctccttccctcttcccccagctggagaacgctgagtagtctctagaaggaagatctgggctggagaacccagtccggcagttcgctcagaaggtgtaaaggtgctcttggctttcctgaagtcaatcagaagccatttcttgaggccgtcagtttttgtttggagagtgtttctggtggaggagttgtgaggagaaccccggcattattgctgcaacgggaactag

SEQ ID NO: 329191 - DNA, 506 bp, Homo Sapiens
  misc_feature (375)..(375): n is a, c, g, or t
  misc_feature (395)..(395): n is a, c, g, or t
  misc_feature (427)..(427): n is a, c, g, or t
  misc_feature (438)..(438): n is a, c, g, or t
  misc_feature (451)..(451): n is a, c, g, or t
  misc_feature (462)..(462): n is a, c, g, or t
  misc_feature (479)..(479): n is a, c, g, or t
  misc_feature (495)..(495): n is a, c, g, or t
ggcacgaggatatgaaatcaaattagaagtattcaaacaccaatgctgctaacttaaaaagaagtgaaagtactgaaaagttgccttcagcactgtttgtgtctatctcttcaaccttttctagttaaaacaattttgtattgacatcaatgtgtgcacgttatttggatcccaactcaaacaaactatagagagaggaatgggggcagagattggaagtttgaacactgactgaatgttggatgaattatttttaaaaataagattactataattacccattttaggataatccttaaagtgatcttgtcatgctgtcttgtttactcatgttttaggaattcgtgtattcatcgttaagtatgaactttagcncaatttggatctatcagtcnttctatttaaacaccatatttggactgaaaantttcctatccnatttagttccaangtgacttaacngtttttagtaatgcccnagttgaggggccaatnaccttaggcct

SEQ ID NO: 329192 - DNA, 421 bp, Homo Sapiens
  misc_feature (39)..(39): n is a, c, g, or t
  misc_feature (58)..(58): n is a, c, g, or t
ggccccccgggcaactcgggtccctcaaccaagaagtcnaaggccttctgtcttttcntccttcttgaagaatccctttcccaacccagacaaagccctggaggtgagatgccaacaggaaaggtacatgaggagtgctgatcaaattcagggctggaggaagactggggaggggcccaggtatcagacccagacaaagccctcccctttctaacagagcccatgaactaagactggaaggatttggaacagaggttgaaaactggcaacctacaaacatgttttgtttgctcacccaccaccttgtgttagccaacaatgtctttttaaaccgttatgacataaaaatctagatttccaacttctctttaaaaattggaggatctagcagcctgggccttcaaacctcacttgagtcaag

SEQ ID NO: 329193 - DNA, 329 bp, Homo Sapiens
atatatttgtttcttccattataaataatcctgcgataaacatctcatctgtttctcaacatatgtttgattcaacattatttatacttatcaattcgatcattgacaaacatcctgctttataagctgtggtagagatacaatgtgggtcctcagaaagctcacagaaaataggctttctcttgctcccttatttcatgccgcctccttggtatacccgctgacttcctgatttctaattactttccctgaccatgattcttacctaatccttgcctatctactgcttttaacatgtgctttttccccatagctgaactaagcttatg

SEQ ID NO: 329194 - DNA, 733 bp, Homo Sapiens
  misc_feature (11)..(11): n is a, c, g, or t
  misc_feature (72)..(72): n is a, c, g, or t
  misc_feature (144)..(235): n is a, c, g, or t
  misc_feature (449)..(509): n is a, c, g, or t
  misc_feature (525)..(546): n is a, c, g, or t
tcccttcttgncccagtcgttgttgcttcattgcccttattaattcccaaccaacttttgggagggcaaagntggaaggattgcttgatccccaaggaattcaagaccagccttgggaaacaaagggtagacccgtggtataannnnnnnnnnnnnnnnnnnnnnnnnnnnnnnnnnnnnnnnnnnnnnnnnnnnnnnnnnnnnnnnnnnnnnnnnnnnnnnnnnnnnnnnnnnntgcagtacgtcacgcacacacccctaccaggaattatcagtctttgtttggatttccacagctcgaaagatttcccaactgtttttcagtgtccacagtgcctagatctagacctcaaatgaagatttaacaaatgccagctgggcatggtggcatacccctgtagtctcagctactctggtggctgacacaggaggattgcttgaagcccaannnnnnnnnnnnnnnnnnnnnnnnnnnnnnnnnnnnnnnnnnnnnnnnnnnnnnnnnnnnnagacttccgtctattnnnnnnnnnnnnnnnnnnnnnncaaataccatttgcccagtgaatagtaatctaaggcccaaggaaagatatactgtaaaatatattttacataattcaagcagtatgaattcttaagcagttagtttatgggtttgtgtctaaaaaaatagcagaagtatcaaagcaattggccaatgcagtcagcacattgatccttgcttggttca

SEQ ID NO: 329195 - DNA, 447 bp, Homo Sapiens
  misc_feature (12)..(12): n is a, c, g, or t
  misc_feature (36)..(36): n is a, c, g, or t
aaagtcaaaccntacgtcccataaacccaataaaantccaggatgtgtgggctcccagagggatgccactcccgcactaagagttaaaagccatagttcccaatcgacagtttgggttcatacattttaaattttgtatttaaaaacataaaaattcagttacattttggtctgggcttttctgcttatataagtgaataagatataaaatatatttgaggggcagtaagtatcaaagaagggttgctatgaaaatagacactgaggatttgagagttcagccccctgactatgtgctttgggatggcaggcttggcgttatgaacaggtctttcccaaacagaacaagcctcatctctcctgctggcaatgtccgtttgaaacactactcttcatagactttgcagaatcaggacaggcgctgaggctcgagcccttgtcatccaa

SEQ ID NO: 329196 - DNA, 437 bp, Homo Sapiens
  misc_feature (45)..(45): n is a, c, g, or t
  misc_feature (355)..(355): n is a, c, g, or t
  misc_feature (396)..(396): n is a, c, g, or t
  misc_feature (419)..(419): n is a, c, g, or t
agatttatttttaattccatggtattttacctatccctaaggagnacccccaggaagagtttgccctggttaatagtgaaattataaccctttcaagttatttaacctttccaggaacatcctcaaatagcacttcatgtttgttgaacctcttctaaaataagggatttcccattgattttccaaggagatgtaatgggatgactttagtttgagagtgaacattctgaagattagatacaagatatatcactaaagaaatatagatttaaaaggaactttcaagatccatctagtccaaactcctatctaggcaaaggaaggaaatctaaggagtttcaaaaggttcaaattngcacagggttcatttattggggaaaccctatgtatgggccnggggtggaggagggttttcatcngggttaatttaggcggcc

SEQ ID NO: 329197 - DNA, 352 bp, Homo Sapiens
  misc_feature (299)..(299): n is a, c, g, or t
  misc_feature (317)..(317): n is a, c, g, or t
tgtggaaatttcttttattttccccaaataaactcttctcccttatggcatcatatatgaatgatgagaaatcctaaatttagtttattccataaagtttaagaaataggtcaggtttggcatctgtttatctccaccaatccctttgttaatcaacacgttgtggatgtgcaaatgccagcaactgttttatttaggaaaacaggcatggcaaagcaatagtcttttccctggggtcacaaactgagcatgtgacagagctgaaaacagcgaaaaaggtttactgtctgggagtcccnttggggattctacttccncaacagagcctcagggcatctgatttattataaag

SEQ ID NO: 329198 - DNA, 424 bp, Homo Sapiens
tcatatttgcccactttatctcatatcttaaaaggtatgtctttagctttactttccaaaatacttattaactctagctatcctaatgtttggcctttctgtttaacaaaagtcaacaatcatactttcaatttgcacaaactctgtggtcctctgaatgactcaatttttatatcaaactgatttggcttcaagaatgaagtacatcctgagctataatatttttacatcttctagttgctttcttttcttcagttttctctgttgctgttggtgttctaggtcatatttataaataaaaattaggttgatttgggtgtgggacttactcctgtacagttgtataggtccaacaaatggcaagtggtttattatgttgacaaactctggatattgtggtttataataatatatattttgggtc

SEQ ID NO: 329199 - DNA, 557 bp, Homo Sapiens
  misc_feature (36)..(36): n is a, c, g, or t
  misc_feature (50)..(50): n is a, c, g, or t
  misc_feature (73)..(73): n is a, c, g, or t
  misc_feature (100)..(100): n is a, c, g, or t
cctccggcaagtgaagcctctgtggctgcctagggnactctggcagagangtccccaactgggcaagaagggncctcactagatgcagccccttgaaccntgggacttccttatactcccataactgtaaggaaataaattccttttcataataaattacccagtttcaggtattcagttataaccaagagaaaacagactaagacacttccagatacttttcttctaggttttcttcaaggctttcaaaatctttaccagatttacttctcaaacaccctcccctatgcctgagttttctgtatcttccaggttgtgctctggtattataggacaatgattacttcgggtaattcaatcatagtccacttactcaacaatctcattgatttcccatagcttgacaagattcacgtgtataactctcaccacccttcctatgggtctatacttctatttccaattgcccactggatgtcataacctgaatgtcccctatgaaactcaaatcaacatataatcacaacctgaatccatggtccttcttacccttggtc

SEQ ID NO: 329200 - DNA, 495 bp, Homo Sapiens
  misc_feature (370)..(370): n is a, c, g, or t
aggcacaactaataagttttcagttccattatgtggtgtctaaagagtggagtgaaaagatatcactgacctgttcttcttgacatgagggtgtgtaaaatgctctaaccagagtgacccacacaaagcttgtgcctaaagccatcggtgatgagtgtgaaatacaacctattggaggattgtggatgaagataggcgggaagcttctggaaggaggaaagaacaagggacctcccagcaaggtacccagctttcatgccgcacaccactggtgattcatgagccatacgttcccacagcagtgatgggatgaacttgggtcctaggcacaagccctgccccccaaactatttgggtctttccatctccntggggtcctcttggaagttaactggtggccacaagagctgtcagagtcacccaggctctcagtaagacccatcaggcccacgtgcagcctcccagctcagctgcagagaccacgtccaccagcac

SEQ ID NO: 329201 - DNA, 530 bp, Homo Sapiens
  misc_feature (338)..(338): n is a, c, g, or t
  misc_feature (385)..(385): n is a, c, g, or t
  misc_feature (395)..(395): n is a, c, g, or t
  misc_feature (417)..(417): n is a, c, g, or t
  misc_feature (435)..(435): n is a, c, g, or t
  misc_feature (506)..(506): n is a, c, g, or t
tctttttttacttatttaaaaaggccttggtggcaggaatatagtgtaaaaatcattggaaaaactaaaaggcatcgatacatatccgaatatacattttgtacataaattacatttcctttagtctttctgagtgaggtcctgattcagtactgaggtctagtaattaagaggtcccgggagctgcacgttcaggccggcatagtccaccatgtacattggccattgcacgagtgagatctgggttggcccgatgccacttgaatccgggttagagggcgagggaagagggaagacgagggagggaggagggagacgggaatttcctttcccgaggncccgcttttctctttgcgcttgggggaatgctgctgtctttgggctnggcacccttngggcatcattgcaggatttctncaaaggggttgggagctngggttaatgatgacccatgcgggacatgctctcggggccttcagggatctttcttccagcccgtggggatntcctaccgtttttggggttccccc

SEQ ID NO: 329202 - DNA, 898 bp, Homo Sapiens
aaatacattttttattaaaatggcacttgtctgccaacctctctggacctggaaatgctgtaaacacacggggcccaccttctgccactgctccttagttcaggccgggtgaagggcggtgctggcagaacacggcacctgcggacgcctctgcatggccaccgccttcagtcgaggaacttgggtgagccacgccaggggacacgagcatcgcctggaaatcaactttagtgacaacatcagaatgttcaaggctttaaaaccacacttgtgttttgtgttgctttcactctcagaagattcacagctagtttgagcccatcaatttcatagagaatcatgtattaaaaacaagtaaattgaatgaccaaataaattaaaaatgttttaaagccctgagttcatagactggttttaggagatttttaggacacacgggactctgttttaataagcagcttatagattttagcaaaccatatttcctatgacattgggttctcatacaggtctgcagttcaaaatccaagtttgaaatctgggacggaaggcattctggaaaacggagaatctaataaaatcaatgacgtctcatgttcgatgctggctgtcacggaagggctggccatctgttggtctgagtgtagctggtctcgtgaatcccactcggtacacaatcgctaaacactaaaacatgtcaagcaaagtacatggtgcgcagagtgtcttggtgaacctggaccgccttggccagtgcttggtggtctcgcccgttactctgcccagaggtatggcttccttcagcactgtcatgttccttatccaccaggtggtacctggcccggaaggccacccaggtgagcgtagtatgctggcccctgggatggacacggagcgt

SEQ ID NO: 329203 - DNA, 465 bp, Homo Sapiens
  misc_feature (54)..(54): n is a, c, g, or t
  misc_feature (102)..(102): n is a, c, g, or t
caaatgtgggccgcttttgggaaatacgtgggtgagttgcccaattggcatccngcctagctgttgcagttcttggataattattagtcatctttgttcccngcaaaatcctcatcattctcaatagattagaggctaaatttcaaatcccactttagtaaaaatctttacaattggactgttagaaaccttgcattatttgaacaaaagtgacgtatttgaagatcagtgggaaagttggaaaataaaccaattcctgctcactaattatttttttaaatgccatgaatgtaggcttggtttcactgaatatgcctttaaagatttttaaatgttttatatccagtcaagttgagatttttaagaacatttttaatatgtaataaaattttataatgacttttttcaaaaaagttaacaaactgcaagcacttgttaataaatgtcttaatttaaaaaactttt

SEQ ID NO: 329204 - DNA, 390 bp, Homo Sapiens
  misc_feature (334)..(334): n is a, c, g, or t
gaagaataaatatttaataataatgtaattataattataatctgtatatctaaacagtgcctttgtaaaaaccctttccatcatcttcaaattcagtctaaaaataattgtacgctatacttttcaagtggggtttaaactattgtttcatatttaacataaaatattttcctatttaaattaacatacttttatgttcacggtaaacaaactgcataggttttcactttcattttcttctgacatcttctgcaaaagaatgggtctgcccattttttgggataaaaaggctaggaataatgtgaccggagctggggtgagggtgggctcatgnccggtaatcccaggcactttggggagggccagggcagggcaaatcacttgagggcc

SEQ ID NO: 329205 - DNA, 493 bp, Homo Sapiens
  misc_feature (66)..(66): n is a, c, g, or t
ggaaacaaaggaaccctttaaatggaaattggacagcaagaaaagcgagctgttttggtctggggncatttaatccgttttaaccttacccagtagcccacattacggtttcctcattcaaattcaaattacaagccccaatactcacctgaaaaggggatccagtgttaccaagctaaaatgctcccaagttgcacagctgaagccaaacccagtgttgccccctgcaaggcggcttccagcgtacttggttcttgttttacaggtcgctttccgttaccaacgctaaattcagatagtaagtcaatactacaaacgtcttgccaaaagctgttaatttcatccaaataggattttaatcagtctaatttcttttttcccagtctaataataggaacaaggacattctgatagaaaatattcaggaaacctatgtactgcaaaaaaacttccctgggcttcagtgtcttcaactgtatagtgagccagatta

SEQ ID NO: 329206 - DNA, 484 bp, Homo Sapiens
  misc_feature (20)..(20): n is a, c, g, or t
  misc_feature (39)..(39): n is a, c, g, or t
  misc_feature (47)..(47): n is a, c, g, or t
  misc_feature (61)..(61): n is a, c, g, or t
ttgaaccttaattaatctgncccctgggatggaacacgnaacctttncaaccgccacgtangtgttgaacacagctggtaaggttaggatctgcagctccatcaagaggagaaaacgattgttcgtcccagaggacgtgatagtgcgaaggcctgcttgtcccctggatgccagcgtgactacacaggtagaagtcgaactcggtggggtgggtgaattttccgtgtcccacagtcgtgcctgctggaatgtttcccacttttcccaacccgctcgttcttgtcagtgcagaagagccgggtgtggtgcctcttctgcaccacgatgaaggtgatcccgggctggtagtctttttctagcttgatacaggctcacggatggccagcaactcgtggtggagaacctgctggaactggccttcagagacaccgtcgcggtagaagatgatgcgggtgggcttgaagcgcgtggacttgtagaactg

SEQ ID NO: 329207 - DNA, 514 bp, Homo Sapiens
  misc_feature (25)..(25): n is a, c, g, or t
  misc_feature (70)..(70): n is a, c, g, or t
  misc_feature (106)..(106): n is a, c, g, or t
  misc_feature (125)..(125): n is a, c, g, or t
  misc_feature (145)..(145): n is a, c, g, or t
  misc_feature (485)..(485): n is a, c, g, or t
ttgccattcacttctagcctggganaccagagcaagcctccatctcaaaaaaaatgaaaccataaaaatnggaacaatgtgacctgggagagacttaaagtgaggnaaaaatgaatgcctgaaangaactaagtaaactggctgnaagatggaacaactccccaagtctccagagaggcagataagggactgtaaaccagcaaatgccacctgcctgttatctagctcagaaaggtgcacacctctggaagcagctgaatttaagtccagtgtggcactttctgaaaatggcatcaaaggttggaccataaatctttcttattctccagtcactggacatttaagagccaagatattgatgggctctttccctccttttctttctccttgtagcagatgtatgattcatggattgtcctttcgtggtctccattttcatcttattactttttctttgcttctgctttctgacagctttgttaaantctcttagatgtagcaatgttaggacaag

SEQ ID NO: 329208 - DNA, 540 bp, Homo Sapiens
cttgaacttattcctcttttgtctgaaattttgtatgctttggccaacatctccccaatccccctgcctttcagctcttgagcatcatttaactctttttatgagtttgactttttcagattccacatataattaagatcatgaggtattcttctgtgcgtgatttacttcacttaatgttttctaggttcatccatgttgttgcaaatgacaggatgtccgtcttttaagactgaatagtatttcattgtgtatatatcacattttctttatccattcatccatggacacttaggctgattgtgtatagtggctattgtgaatagtgctgcgatgaatacaagtgcaggtatttcttcaacatactgatttcatttcctgtgggatatatacccagtggtgggaatgccagataagttctatatttaagtttttgagaaaccaccatattgttttccataatggttgtactaattcacaatcccaccggtagtgtacaagggttcccttttctccacatccttgccaacacttgaaatc

SEQ ID NO: 329209 - DNA, 650 bp, Homo Sapiens
  misc_feature (410)..(410): n is a, c, g, or t
  misc_feature (459)..(459): n is a, c, g, or t
  misc_feature (488)..(488): n is a, c, g, or t
  misc_feature (520)..(520): n is a, c, g, or t
  misc_feature (560)..(560): n is a, c, g, or t
  misc_feature (575)..(575): n is a, c, g, or t
  misc_feature (584)..(584): n is a, c, g, or t
  misc_feature (605)..(605): n is a, c, g, or t
  misc_feature (639)..(639): n is a, c, g, or t
ttactacaagccatttgactttactgccttattttttccaggctttaaagtgagggcactttaatatttgttaatattcctaaagatccttgcaggaaagatataattctttaaatgctattctcctccttgtgtttagtattgctgtcaaaatgttacaatacatatatataatttaaaagtcatcttgacatatctaaataaggccccgtttaagaatgttactcatttttctttaaagggccctttagatataattacctgaaatatgcatttttctttagtactaaggttgggtttgctttgtgttttttaatgttatttctattgcatcactaaaagacttctatcgagtacaagtaattcattaactgatgataacctctttaaaccagggtattccctagttncttcctcatggtaagtaattaacatggagtacaccagttttgcctgctnccgacagcagcccccagggaaatacgggnatgggtttcagggaccaagttctggtaatacnttcgtcatcaagtcacagccaaaggcctctaatggctggntgttaaaattgggcnggaaggcanagtaaggtgtttgcagttggnaggccagcgcagttaggctcggaggtcagtccanggccagtttcc

SEQ ID NO: 329210 - DNA, 495 bp, Homo Sapiens
  misc_feature (113)..(113): n is a, c, g, or t
  misc_feature (149)..(149): n is a, c, g, or t
aacttgtgctgtacggaggtgaactgaaagagactgcttccattggcctagtcccagatgagtgtatatattcccatcagaacccaaccactggtccatctttaaggcatccnacaaaatgtcccctccacaaattcacttaatctctnagataggcatgtggtctgaggcagcctctttgttttctgtcctcacacaggcaactgcattccatcaaggttctgttcaattccacgaactagctatttcaaagctgcctattcttctggggcttggttataaatccatgtggatttggaataacaatccatttgttttataaatatatccacattccaaatatcaaaggggcacttcctaaggaatctgaaagtgcccaggcaatgcgtagtctctctctcaagagatcacgtttctaaattatgagacaaatgatagcatcacctcaggtttcctgggcaacttgatttatatgagcaaaccctgtgccgaaat

SEQ ID NO: 329211 - DNA, 541 bp, Homo Sapiens
  misc_feature (469)..(469): n is a, c, g, or t
  misc_feature (476)..(476): n is a, c, g, or t
taacaaatggatgactttattaagagagaaggacaagactgatgtttaccttggtcaaaccatccaggaaaacaaagcacacaaacttatagaatactttggtttaaaaattattcataatatcaatattaaacctgatgtttaaagaacctaatgagaaatatagtgtaaaaaacaaaccatgaaaacacaagtttgcatagatgaattaatgtagatgtacaattggcatttaaaaaaggaggtttgcgttttgggagtgccttaacgatgttgaacacctcaacctcccaagacacatgaaagtcaccagcaccacaattctcattttcctcaatgaggtcatgagcaggaacaacttgtgctgtacggaggtgaactgaaagagactgcttccattggcctagtccagatggagtgtatatatttccatcagaacccaccactggtcatctttaaggcattccanaaatgtncctcacaatttcacttaatctctaaagggaattggtggtctgaggcagcttctttgttttttctg

SEQ ID NO: 329212 - DNA, 269 bp, Homo Sapiens
  misc_feature (22)..(22): n is a, c, g, or t
  misc_feature (28)..(28): n is a, c, g, or t
ttttttagtaaatccctagtgncccggnctccaataaatttttttaaataaatgcatgagaaattgaccaaattgtaacaagtcccagaagaacaatagcaggttactgaactgcccacatcaaataaggaacccttgaagaaagtaaggatgtttaatctgggagaagaaaagattgctggggcacggtgggtttcacagcctgttaatcccagcactttggggatgctgaggtaggtgggtccatgagggtcaagaggttcgagacc

SEQ ID NO: 329213 - DNA, 314 bp, Homo Sapiens
  misc_feature (268)..(268): n is a, c, g, or t
  misc_feature (286)..(286): n is a, c, g, or t
  misc_feature (295)..(295): n is a, c, g, or t
cttactgcatgggccatcccatggggactttgttttcactttttacttggtcactccactgactggaccctgtttaatgaaaaccaagactttcagttttaatatcttcattcaatagttttcatcaacatctaaaggtaaaggtaacagcacactggagctgtgttaacactgcctttgcagttctgaaattctttatggattaaactttgtgctaattaattgtcatgcttttttcaaccaggttattaaaagtggatcctaaatnaaggctggtcccaagggnaacggggtnaaccctgttgggctgaggg

SEQ ID NO: 329214 - DNA, 500 bp, Homo Sapiens
  misc_feature (16)..(16): n is a, c, g, or t
  misc_feature (36)..(36): n is a, c, g, or t
tccctgcaatccaagnccccaaaccgggcacccccntcccgtgtcccctcaggtaagcctcacacatcctatctgtgcccatgtggagactagcacccccgggggacccctcaagaggaaaggcatgtgtaatgtggggcttccaggattctgcttttattggttttacaaactggagttttgattaagagttcatttcctaaaagcttcctatgctttggaactttgaaaaacactgttcctttctagccctaatattctgggaagcatgtcttgcatatagtactaattttttaacctggtttcacaagatttggcatatattttttctctattatacaattatttttaaaaagctagcatggaggcttatagatatatctgacaagtccctccctggacatcacaagctataagcactacagtgttccttaatgtgaggaacatctgaatcacctttataaattagatccttataaaggtgattcagatgttccttt

SEQ ID NO: 329215 - DNA, 447 bp, Homo Sapiens
  misc_feature (349)..(349): n is a, c, g, or t
  misc_feature (364)..(364): n is a, c, g, or t
  misc_feature (387)..(387): n is a, c, g, or t
  misc_feature (404)..(404): n is a, c, g, or t
  misc_feature (434)..(434): n is a, c, g, or t
tccgcacagagctggcccgcatgaagcaggaacccgtgcgcacggatgacggccgcgcatggccgtgcgcatccaagcctacgactacctcgagtgctctgccaagaccaaggaaggcgtgcgcgaggtcttcgagacggccacgcgcgccgctggcagaagcgctaacggctcccagaacggctgcatcaactgctgcaaggtgctatgagggccgcgccttcgcgcctggcccctgccggcacgttctccccttcctggaccagtcccccgcgagcccggagaaggggagacccgtggtcccacaaggaccccaccggcctgcctggcatctgtctgctgacgcctntggtttgcgccaggnacttggcttggggcaccgggcgnccccattcccagttgtnttgtgttgcgttccagttgttgtttgtcanaggcttggggttc

SEQ ID NO: 329216 - DNA, 384 bp, Homo Sapiens
  misc_feature (325)..(325): n is a, c, g, or t
  misc_feature (334)..(334): n is a, c, g, or t
aaaatttaaaaatagaaaacagcaacctttttttgttttatagcctacttctcaaaattgttatttgtgtgattagtgacaacgggggaatctacaatgctcacatcacagtaaactaccactgacttactaggatcttaatagtcttacaatcccaaacaaaaaccctactcatctcactgatgcagtaccagcacttttggagaagggtgtggttctcttatgaggtaaattggtacaaacatcggaacaaatttctaaaaaatgttttctaggaaataggaaacttgactttaccctcttcaaaaggcaactgggagggccnggcgtgggngggctcacgcctggcaatcccaggcactttaggggaggccccgggtgggg

SEQ ID NO: 329217 - DNA, 451 bp, Homo Sapiens
  misc_feature (390)..(390): n is a, c, g, or t
  misc_feature (425)..(425): n is a, c, g, or t
aatttttcatacagtaagggagaagagattggaaaatgcttatttactggtgatttaagatcctaagaatgtatacatttatgtaggtgttatcttttattatttttaaaaagatgagacaaaagtttcctgagatattcacaggctcttcctgagatagtcaattcagagttcttagggaagatactcattctggaatattcatgggtaaatacatttgtttgttttagggaatggaatttccttaagttgtaaatgaactttgcagttgttaatctgacccatataaaaatcatgtggggctctttttcccgaaggaatccttaggacctttgtatctgggttatttcacctttttgttgggaatatactatacatcagggaagtatnatacacatactttatgtaggatagcttgccagggntttccgcaagttggatcacacgggta

SEQ ID NO: 329218 - DNA, 493 bp, Homo Sapiens
  misc_feature (146)..(146): n is a, c, g, or t
  misc_feature (468)..(468): n is a, c, g, or t
taaatgtttatggcccattgaatgtgcctttgtgaatctgaacccctttgtaatgcttcccagttatgcaagtaaatgaaagggtggttctgtcagatcttaacccaaacccaaggtgaaaccctggtttcctgcataggcgaagnaaggccccagggcccagaatccctcctcaccccttctgcctcccatcccaggggcccactctggggcaggcagtgctggctgcattcagctcagtggggggcagtttgactatgtcgcatccagcttcccatgccgtccatccctaggagtctgtctcaccatacaagggcgcagacaggccatcttgagggtgttcatcaacgcagcattgtttgaagagcagaagttacaatctattcattcgggggcctgactgcataaatacactgtggttgccgtccagcagagcatcatgcagccattaactgcactcacatgggnaaatgcccacaatggcttgttgttt

SEQ ID NO: 329219 - DNA, 405 bp, Homo Sapiens
ctaccactactatgtcctttttcctcttttaataccaccctttgggggccatgaatcaggtctcaaagcactttaaatacctctcacaaaagacttttaggacattactaaatgtcatacaacaattaatacaaaggtaaccttttctgagaaacaatcagagcattttaaactttaaaactgtagctgataattttcttacatattttgtaatcaataaaatttctctgtaatatctttaacaggtaacatttgcatttgattcaggtaaaaaatcaaacctcacttgcattttgaaaaacatcataatttttttgtttcataattgaatattatttataataaaacacatctttagggtagaatttgactgaattactgcaaataaaagtaattttaacctac

SEQ ID NO: 329220 - DNA, 251 bp, Homo Sapiens
  misc_feature (225)..(225): n is a, c, g, or t
agacacggtcttactctgtttgcccaggctgggggtacagtggtgcaatcagagctcccagtagcctccaactcctggggctcagatgatcctcccacctcagcctcctggggtagctggggactgtaggtacgtgacacagtgcctaggtgggagaaaaatttaaaaggtaggaaagatcctaatacataactggaatggatggatagggcaaggagggggggnatccccgaggtaaaggggggcatccg

SEQ ID NO: 329221 - DNA, 385 bp, Homo Sapiens
gatttcaataatgaaatggttcccttttaaaaaataaaaatactttgtagattaaaaataaatcagaatttcaaatttaaaattgtccacacactaggaaatagaactgtgttaatatataagaaatttggggataattaagaatgaaggacttttctatcatttccattttataaattgcccacctgtgaaaatggtttttgcacattatttgtatttttctttgtatatgaaataattttttgtactttgtaaaatatggagcccattgtaccttcagctatttgagactatacacagtgcttcttttgtaactggattactttaactttcgtgaaggcattacattgcctcacattcactaaccaccttgaattaaatttat

SEQ ID NO: 329222 - DNA, 641 bp, Homo Sapiens
  misc_feature (56)..(56): n is a, c, g, or t
  misc_feature (152)..(152): n is a, c, g, or t
  misc_feature (155)..(155): n is a, c, g, or t
  misc_feature (611)..(611): n is a, c, g, or t
  misc_feature (618)..(618): n is a, c, g, or t
gacatactgggcttgataatcctgaacaaaaatcatctcagagaacaggcaaaaanttactgaagactttaacagcatctgaaatgctacctttattggatcattggaatactcaaactaaaaaagtatcactcagagaaataatgtcaganganattgccttacaggaaaaacataatttgaaaagggagacccttatgtttgaaaaagattgtgccactaaactaaaggagaagcagctctttaagatatttccagccattaaccaaaattttctggtggacattttcaaggaccacaactattcattagaacacacagtgcaatttcttaactgtgttcttgaaggggaccctgtaaaaacagttgtagcccaagagtttgttcaccaaaatgagaatgtcacatctcatactggccagaagtctaaagagaaaaagccaaagaaattaaaagagacttaagaaacaccaagtgaactgtctttccaggactttgagtacccagactatgatgactacagagcagaggctttccttcaccaacagaagaggatggagtgctacagcaaggccaaagaagcttatcggatagggaaaaaaatgtcgccnccttttntggcccagcagggtaacttcttc

SEQ ID NO: 329223 - DNA, 419 bp, Homo Sapiens
  misc_feature (155)..(155): n is a, c, g, or t
  misc_feature (259)..(259): n is a, c, g, or t
  misc_feature (375)..(375): n is a, c, g, or t
agcccccaagtcccctgggggcctgagggttcagtagaggagtctgaggctgaagctcaggttgaggaggaggaaggggatgggaccccacgccgacgtcctggcccccgccggcttgttgggaccaccaaccaaggggaccagcgcatcctgcnagcaccgcccctccctccctggctggccctgctgttagtcacagaggccgcaacaaaggacgtgagtgggcttgccctccacctaggctttccaccgtggccanttcctccatgaccagggctgactctgttaaccactacttgaagtcttgaaggggaaagccttcagggagacataggggctttttccttctttccaccaaagtagggggtaggcaantggttgtcatggaaatggggatcatcacagtcccctttcccttt

SEQ ID NO: 329224 - DNA, 459 bp, Homo Sapiens
  misc_feature (78)..(78): n is a, c, g, or t
ataattctttaaaatatgcttctatttatatgaggtaccccagaatagtcaaaatcccagaggccaaaaagtaaaatnagtagttacccaggggttggggactgaggggaccagaggagttattgtttaatgactatagtttcagctggggatgatgaaaaagttctgaagacagatggtggtgatggttgcacagtgatgtgaatgtactggatgccaccaaactgtatatttaaaaacagagagtaaattttacgttccggatatcttgccacacacaggcacaaaacttcgatgattccttattatctgactaacaaaagtacaaattactcatcttagcatcaaaaatcctccagagtaagccaaactctttctagacttacctctcattaattccacttttgtggtaaattgaatattagtttaatcatgttaagttatggggaaggctgaatt

SEQ ID NO: 329225 - DNA, 440 bp, Homo Sapiens
  misc_feature (426)..(426): n is a, c, g, or t
ttcacttgtagagcctgtttattgcataactagcaggcacaaattccaaaacgattttacaacacttaaagggcacaataattacaggaatagaatgtacaataaaaagtacagaataatgagtgacagggatcaaacacgttggaataaaaggcatctcagttttcctatgcagcattttcttttctaggaacacgttaccttcaaccaggacaaggaaagaaagaaaactatactattggaaagctcatgggtgccattgaggacaaaaacaggcgagttttgctcttggttctgcaactgaatcactttgagaagccgtgcacagctcccgagttgtgcgtttagaattctgattacatgaaatgctgtgtttgatctttggggcccaattcactggttctttgggcaaataagggccctttngccttcccaggcag

SEQ ID NO: 329226 - DNA, 385 bp, Homo Sapiens
  misc_feature (12)..(12): n is a, c, g, or t
  misc_feature (64)..(64): n is a, c, g, or t
  misc_feature (103)..(103): n is a, c, g, or t
  misc_feature (139)..(139): n is a, c, g, or t
gggaaacccccnggggttttagaatctcccctccccaagaatcagggacaaaactagtataagnctgtattatacatcaggtgtactgcatttttctgcacantcatgtgttgctttttaatttaagcacttaattggnaaggaattttaaatcttaactgaaagttagcccttctcaatcctctatccctcttatacacgatgtacattcattccatcaaaatatctcttcacattatttaataaaactgatattaatccactactttctaaaacttccatcattctaattcagatagccttcaactgtcacctagaccatgacaggtgccactaaactggtcttttttcttccatacttgcccctctactgactatgcctcaa

SEQ ID NO: 329227 - DNA, 997 bp, Homo Sapiens
catatcactttttttgttttatggatactatattttctcagatttttctaaggatattgatgtgaggttttcagaagttccttttgttccctaaattatacgtttcttctgaagttagttattctgtttgttccctttggtccttctcttccatgctgctcattttccttagtttcaagtgttcctaggttatctgttcatatttgtgaatgacagagtgcatcgattagcttggacagctggtactcagagcttctctgaaattgtgtgggcccatttcactgatgggctgctcccttgtaggttctgtgtaagtggctcttctgctgcttgtctgtgggaggagcatcccactcccagacacagctgccactctaggagcagttactccgggggtgaagcattttaatgtatcttctttttggtagagcttccattcctgtttgttatacctctttgtctgcagtagaggccctaatgcttatcctagcatcctcccttgaggtttctttacagattggatcacagctttatcttatagtcaaaaatggtatcccaaacagaccatgatgtctaaactgaggttccttggtggatacctgatcactggttgccccatgatctatgcctcctctttgtctttatcgacttaacttgaagctactgcagggctccctatgggaaaagcacacttatcttggttccttttctcttagattttccaaccctatcttctttctgccttctaggaattctcaaaaatttctatttgctgatgacaccactattgcttttcacagtttttgtggtttgtccttttaaaaatatgtgacatttcattgcttgacttccttaaagctagatcctaagccccattcttccagtccactcccaagacttcatataacatgatggttaattttatatgtcattgtggctgcattaaaggatgggaagatagcaagtaaaactttattttggggtgtgtctgtgaggg

SEQ ID NO: 329228 - DNA, 649 bp, Homo Sapiens
  misc_feature (542)..(542): n is a, c, g, or t
  misc_feature (571)..(571): n is a, c, g, or t
agagtggaaatgaatatagttttattttcattgagacaaaaatcaaatactttcttaacaatgctgtaggggctctgactgatctgggagtcaaaaattactttaaaagcaaaaggaacattttgtatgtgtgtgtgactgaacataactgtaggctgaaaatattttctgaaccatttcttccttgataaattggatggggtggatattgactaggagagtttaaaacactgtttacaaaggactgctgttaaccagtcaggttacagggcacacacagattaggaaaaaaggtgggctcctaactagctgaatcttccaatcttccaattgtagagaaattattttaggaaggaacttttttccttctaaaacatctgcaaatgttgtgaaagcattatcaatttcaaaccctagtttcatatttactacctgaattccacactactcataatgctactgtcattcgcacctgtagaatgcacatgtggtggcagaaactgtagtagctgaatagatgactcaaggcagagacacttgtngtgtgacaagcgtaacgcgatggtttggngcagctgactaggaggaacatatactctttgagtaaaaagctgttgaagtgaagtaaaggagaaactatctacattag

SEQ ID NO: 329229 - DNA, 260 bp, Homo Sapiens
cacattcttggccttctctatccaactgtgaaagtgaggggaggctcctgtccccctctcttaaggtcccccaaacctgggagtgcataggtactaaatcaagcagtgcaacttgtaattaagcagctgcagtgtttacatgtttcttaatgtgtcatcttttcaatggctgtattaaaagaagaacgtttgttttaatggtctttctgattaaagaaagcccctgtggctttggaggcattgtgcccacggtccacaaa

SEQ ID NO: 329230 - DNA, 390 bp, Homo Sapiens
  misc_feature (346)..(346): n is a, c, g, or t
agaatgatattagagttttattttgaataaaagaatatgttttagaaatacatagtgaaatatggatagatgatgtgacatttgggatttgcttcaaaattacctagatcagggtgcggcggataggttgggggttacagatcgggagttagcaaattttttctataaagcgctacacaaagtaattattttaggttttgcaagccatagagtctgctgcaattactcaactctgccaatgaagtacaaaaacagccaaaaacaataaggtcaacaaatatgtgtgggctgtgttccaataaaaccttatttacaaaaacagtcagaggggccgggattttgtccnccgggcccatcctaggtgtgcccgacttggtttgtaccgggtgg

SEQ ID NO: 329231 - DNA, 441 bp, Homo Sapiens
  misc_feature (306)..(306): n is a, c, g, or t
  misc_feature (384)..(384): n is a, c, g, or t
gtaaagggtatgttaatgagcccaagtaacaaacataggcaggacaactacttggaagttgcacaattagctgtgacagaaaagctcaggggtatgtgtaaagcttctcaggaaattaaactacactaacaagaaggagagagcaaatgcatcactgtctatttagagctgttatttggtatctctgtttgatgcggaattttcacctgtatttccacagtaagtatgttcttcaagaagacaaggccctagatgagacaagagttaacctggggttctaggatctgggctgtggcagcaccttgnatgtgtgacctcaggagagagtcagacatcctgggctccggttttctcattcataaactgctagggagatagcaaagnggtgttgagattaagtgcgtgggcctgggagtttgactgtacagctttaaatcctgt

SEQ ID NO: 329232 - DNA, 474 bp, Homo Sapiens
  misc_feature (422)..(422): n is a, c, g, or t
  misc_feature (464)..(464): n is a, c, g, or t
tttttttatcggaatttatcatacatttattaggttggtgcaaaaataggttggtgcaaaagtaaaaacctggactaatatatagcaaaagattgggaataatatataacttgtgcacctaatagaaaagtgcacagatcataaatgtacagttttcacaaatgagcttgtattaccagcctggggattacaaaatgaaacattactatatcctagaagcccctctcatgcccctgtttttctccaactttccccaaaggtagccttactccacaattacttttgctaagcatctgttggaggggctttatacacatcctcccactggagggccaggggcagtgggttaacgctgtgttacagataaggaaggattgagggctcagaaaaggggaactgttcacttgaggtctcacacaccngggtttcaaaccctagcttcaggggccccgttctttataccngctgggtgtt

SEQ ID NO: 329233 - DNA, 443 bp, Homo Sapiens
ttttttgcttttgacactttatccgtttttatttaaaaacatgctaaaaacatggtgttccataaagccaggaccaggatgaaggaacgcacagatacggcaatgcaagcagaaagtgcatctgaaaccaacaagcgtgctcaccctgctctccctcccgtgctgcccgggggaggcaggtgggcaaggagggggcaggaagccccaagggcctcacctcctgagtccccaatcagggcagggaggccagggcccaccctgggactattgactcactgcagtgggggaggaggaaagtttgggggcacggggaacacaagggctggccggattctgagaagctgagggacaaagattggaccccaagcacctcacgcccagctcccatcctatgccacgtccctgctagttagcacctccaccagtgggtgggcaggggctgg

SEQ ID NO: 329234 - DNA, 384 bp, Homo Sapiens
  misc_feature (28)..(29): n is a, c, g, or t
aaaggaaagcggcagacagtgataacannttaacacagtttgaggagacaagtagatgctttaggggaattggtcaccagcacctctgcagattcagcgtcatcacccagtctgtctcagctggagtcttccctcacagaggactctcaacttggacaaaatcaggaaaagaatgcctcagccagatgaggaatactgtcttgtgtaaatatattcaaggaaaacacctccactacctcactgacttcataattgggaatgtcacatggtttttttaatcaagatgcagtgaactgagattctgaaactccactgtagtttactttgcctgtaccattaatgcccatgtttttataaatcacttgtacatagtacatatggggg

SEQ ID NO: 329235 - DNA, 558 bp, Homo Sapiens
  misc_feature (447)..(447): n is a, c, g, or t
  misc_feature (494)..(494): n is a, c, g, or t
tacactcggtatttaaatttctaaaaaatactatattcttttttggccaccttgaggaacatatactaaatgcagtatttccttgggaattaagtgtcatcaacataatcagtagtttgggatataagcacagctgagactctgggtaggagatattggatcaactaacttagcttgcaccactatatacaatgaacaagtgcctcctggtcttaacatctatgtagggtgtaccaagagcatggcataatgggcatccttaagggctaaaaaggtacatatcatttctttaagagtttaggctcttgtatagagaggactgtttcttgcctcataccagtttcaggaatgtgtgatgatgtccagttctgccaggatcctcatcactatcactaaatcacctctggcttatcctcctcaccactttcctctaattcaacccagacnaatctcttccactttggctgtcagagcctgctggctcatcggctccnaatcggtggcttttaaatcaatctaccacagatgcatccaccacttctggccctttggccacgg

SEQ ID NO: 329236 - DNA, 381 bp, Homo Sapiens
  misc_feature (285)..(285): n is a, c, g, or t
  misc_feature (303)..(303): n is a, c, g, or t
  misc_feature (311)..(311): n is a, c, g, or t
  misc_feature (349)..(349): n is a, c, g, or t
  misc_feature (364)..(364): n is a, c, g, or t
tagaggactggaagcatgcagccaactaagcatggctacttcagtgtaaaattaacactgagttacaaactgaagtggtaatgttaaaatccatggttctgtggttaggggaacaagtacaaagcttacagttgcaacagcaattgcactgtcattttaatcacactcatatttgtgtaaccaacttagaatataaccaaagagtatccatgggaccttgtaaaagcccatttgcagggagcttccacatccaacatcacctttgacataggtgaattacaaaanaaaagttctttgattttnaattaagncgaacttcaaggagtttttcaggcctttctttttgganggcctgggggctttnattttccccgtcaaggg

SEQ ID NO: 329237 - DNA, 529 bp, Homo Sapiens
ttttttttcagatttctagaatcctttaattgtctgcacccatagctgaagtaaaatacaatatcttattaaaaggcccgtactgaaagaagaatcagtaaactcttcttaagaagagtcagctgctcctgcgagtcagcgcatcttcttaaatgcgtgctctgcttctggtatccttgagtcattgctttagccaggctgcttccttgaacttggctgtgaggtgggggaatgtggttctcccttgagaaatgggttccagagagctcgaagatgagcagagtttgcctggggttagggtgaggtccagggtcatgctgtgccaacctctggggaacatgtaggcagtggccaaagtgcaaccctctggaccagacatgggcagaggcagactctgacattgggtcttgtatatatatgtgaggcaggccctggtggacttgagtggaagctcagactgcagagtggggcacatgatggggtcccaggctgtgcctggaggagcagactgacctggcccttcagttta

SEQ ID NO: 329238 - DNA, 511 bp, Homo Sapiens
ttttctgtgcttcattattatcaactgcagaggtggaaacaagtaaggttttctgtgcagccttcaaagcagctggattatacactgtttttgttaggccagtagatgtagacaacacctgaggaaggtctgaagaggcactctgggcttctgcaggttcaatagtacttgaaggtactggacccagccgctctttgactgactgcttcacaacaggcaaaatgggctgctggactaaaggctttggagaagtagtttgtaactgttgggtgcttccttctctgtgccaataaaccttaataaagcgattgtttaatactgcttccgtacttgatattgctttctttgcttcttcgtatgttgcaaattgggattaggggcaccttcaggatccaccattataagcaacctgtaagttaaccaaggttccaaatcgactaaaatgttcattaagtttgctgatattatttaattctggaggaacttttctaagttcaaagcttgtattttc

SEQ ID NO: 329239 - DNA, 363 bp, Homo Sapiens
  misc_feature (346)..(346): n is a, c, g, or t
taatgaaggaacaaatcaaaatggctcagaaaaatcagatggagtggatacacaaataaaatacatgttaatgcttaacacattgaatacaaattttctttatactaaagactttaaaatgtccatgtgttaatttcttttggaggtggaaaaatagtttgtccaaaaagacacttttcacagttgaaggaacttgaaagttctgtcccagtgagtcctaatggttttatttcaggcagcagattcattgtcaaatatcttactttttaagggtctgtagggttatgctggaataaaattctctgcaccatggaacttcaggggaatctggaaggtcacttctccngacaggacccggttttt

SEQ ID NO: 329240 - DNA, 557 bp, Homo Sapiens
  misc_feature (57)..(57): n is a, c, g, or t
  misc_feature (66)..(66): n is a, c, g, or t
  misc_feature (78)..(78): n is a, c, g, or t
  misc_feature (535)..(535): n is a, c, g, or t
  misc_feature (547)..(547): n is a, c, g, or t
aactttatttctttaggcctccaaacatgctctatgtatcttcttacagttcttccngttcttccngactccttcccngggcagtgggaatcttttgggcaaggatgatggatttagggatgggcaaatgacagttgtgaagatggacaggagcaggagaggccaatgtaccacaggcagaagagggcaggagaggagctccagaggtttgaatggaggcatcaggcatagagaccccctactgaggctataggtagattgtgattagctggtgaggagaaggaataggaaatccctaggtgctgcggcacaaggaagagagggcgttttctggtggtagtggtggtgagccatgactcaattcagttaaagggacctgaggacctacttctacctcggcaccatggaggctgccgggactatggcaaggaaggaggtgagactcccaaggcacattgaagggaattctggaaagctggcttggagagagcatggtcttctcactatatgaatcccttctgtatccctcccttcntttttttctctnctgtagtcca

SEQ ID NO: 329241 - DNA, 377 bp, Homo Sapiens
tccagttagaagtcgaggttgatagtgtcacttcagactaggtcctgtaaaacttctggcatttagaatggtagtgtaaagccacttcctctgtttaactaatagacatcagtttctttgtcagcaccttacatggtactgcgtgcagtttgttcatacggaattaaaaaacatgtaactcttctccttttgcaaggttttctatgagtttccctgttttgttatttaatttctttaaaaaattaggtctgtatctctggggctctcctagggtgggaagggaaaggtaaagctgggaatgaggggaggaacccttacccctaaagggaaaattaggggtgacattagggggtcccctttaggtccacttctatggt

SEQ ID NO: 329242 - DNA, 378 bp, Homo Sapiens
  misc_feature (99)..(263): n is a, c, g, or t
aactcctatcgcccccggttggaacctacagtggccccgaaccctcaagcctcacctgcaaccctcctgccctcccccggttaaaagccgaattcctcnnnnnnnnnnnnnnnnnnnnnnnnnnnnnnnnnnnnnnnnnnnnnnnnnnnnnnnnnnnnnnnnnnnnnnnnnnnnnnnnnnnnnnnnnnnnnnnnnnnnnnnnnnnnnnnnnnnnnnnnnnnnnnnnnnnnnnnnnnnnnnnnnnnnnnnnnnnnnnnnnnnnnttttgctccactaaattgatttcaaggcctactcattggttattatttgtggcttgaaatacatatatgagactatagtacattgaaggcaggaatgtctttcaaccacaaattg

SEQ ID NO: 329243 - DNA, 338 bp, Homo Sapiens
  misc_feature (267)..(267): n is a, c, g, or t
  misc_feature (304)..(304): n is a, c, g, or t
  misc_feature (320)..(320): n is a, c, g, or t
ctaggttgtaattttaaatggggttgcccgagacctcattaagagggagatactttaccacagactgaagcaggtgggagaggtagccaggaggacgtgaccagaggagcgttccaggcagacagaagagctagtgcgaagagttaagggaaaagccagggagactaatgtgattgtgttttccgtttttactctgagggaacttaaggctccattgggacaggcttgagcaaggggagagctctgggcgcttacctaaggcatttntgcagggtcctgctgggctgatccatttgagggcaantttgaccattcccttnttctttcgtcccttcctt

SEQ ID NO: 329244 - DNA, 467 bp, Homo Sapiens
  misc_feature (410)..(410): n is a, c, g, or t
  misc_feature (429)..(429): n is a, c, g, or t
agagagctggcaccacgagaaagatcacaagcgaaatcatagcatgggacacatttctagcaagagcagtgacaaactgaatctagttaccaaaaccaaaacggaccctgctaaaactctgggaacgcccctgtgtcctcgaatggaagatgttcccttgttagagccgctgatatgtaaaaagatagcacatgagagactgactgtactaatatttcttgaagactgtatagtcactgcttgtcaggagggatttatttgcacatggggaaggcctgggtaaagtggtaagttttaatccttaatgctgcaccagatctaggaacttgaataggtagtgacttttttctttttcgtgggaggggtggggtgtacaatggaattgtgaatgacacttcttattctttaangttaaatctccaatggcancagagccataattttggatactgcatgccatgtaattc

SEQ ID NO: 329245 - DNA, 292 bp, Homo Sapiens
cccccatattccacagagtacattaactttttggctacagttaatttttttaactcgactttttaaaatcaaaaaagtattgtaaaagaaaattttgtatcactaccttaaaccatggctgtacatatataaatacagattgcaaaaacatcctattacaaaaaaatcctcatccacgtaccgcctagagtcaagtcacatgccactagcggaaagtgtaccaattttgggacacaatgattccagcccaactttctcattttctgtattagaacactggaacccagaaagc

SEQ ID NO: 329246 - DNA, 472 bp, Homo Sapiens
  misc_feature (24)..(24): n is a, c, g, or t
  misc_feature (53)..(53): n is a, c, g, or t
  misc_feature (91)..(91): n is a, c, g, or t
ccaaattgtcacccttgaaaaaanctgttcacgaaaaactcctagctttgagncagactccgaaattttggaaaaggtctgccagataacnaaggaagaggttaaaacacctagcccgaagcaaacggagtagacactgcttaggggatccttaaggagcacagaaggaagactctccttctggggatagggagaaagaaagcagcaaatggcctctttccccagccagcagtgcccttgcccccatttggttccttgtgttaatttatcaagagtcttctgaccaacaggccagtgagggtgatccgggagtgctaataacacccctccctgcttctacctcctccgggttctttaccaactgagaacagatgtaaggagccagagaaagatcaaaggtaaggcatctgcttgatgaagaggctaaagtacagcagcaccctcaagagcagggcttctgtgtacttagtta

SEQ ID NO: 329247 - DNA, 446 bp, Homo Sapiens
  misc_feature (19)..(19): n is a, c, g, or t
  misc_feature (118)..(118): n is a, c, g, or t
cccctaagcagtgtcctancccgttgctcggggctaggtgttttacccctctccctcggttatcttgcagacctttccccaaacttcctgagtctgctcaaagcctagagttttcgtngacagctctttcaagggtgccacttggagccttgggtggtacgaaatggatgtcttcacggtgagccttgtgtctgctccaagtgcgaaccctccatgcactgcagagaacaccagaaggagaggagcactacctgagctttctcttccgggtctaaaggtggaaacttctttgcagcacccagcatttcactgtactgattcctttttttggatcaccacctcctgcgtttagcagccatatgctgggctcactcagctatacactgcttgttcataactactgtgggttcacagggctgaaacactgcctcatttttcttaatatt

SEQ ID NO: 329248 - DNA, 515 bp, Homo Sapiens
ttccctattcaaaggtcaaaaagccacataagttttgatgatgatcattttgaacggaggctcgagatggactgagaggactgagacacagaagtggggggaccatggtttttactggctggaccacagggggaccctgtccacccgcctgggttgaggaaggtttctggggtgctcaggtgggtttgttctcagcaatgcaggcatagtcagctcttggatcctccttggtgcctctcttgtctctgcccctgaggtcaggtccctcactgctgggcactggcagcctctgcagagatgcatagtggagttccctgctctgaggagcccctgggcccagctcctctccagcctctttacatcattccgcgataacattaggtcagggatcagggactggcctggaggtcaggaactctagtccttgctcttttaggcgaaatgatcaggggctggtgacttgcctcaagttcctcatcattcctcactgctaatccccagaacatagggtatca

SEQ ID NO: 329249 - DNA, 405 bp, Homo Sapiens
aatacacagtatttacatttattattattaaatcttcagtacctgaaagtattaaatatgggtcaatggaagaaaataggaactgaaactattacaggtgcagatgaagaggctcacttttttctggtctttaatctctctgaagggaatatcggggacggtagttctgatatgaaacggagatggggatatatttctttcctgggagaaattcctatggaggggagacaattatcagagtcttaatggacacaggaaggaatgcttataaggcattgaggatttgagattctcatatcaagtgacatccctgttgggaaacggcatggacaaggcagatggggtctttactgatggattgggaagggactagtatgaactggaaccaaccaaaaagaattccct

SEQ ID NO: 329250 - DNA, 644 bp, Homo Sapiens
  misc_feature (547)..(547): n is a, c, g, or t
tgacaccgccccagcctcctgtttacatttgttacaggctagacccactcggatctagcggaggaagcgggtgtgccagtctcggatgcgaacccctggttgtccgcaggtcttactcgggccaaacttcagaatcattgagaatcagtgcatgagcttgctcaaaaatggccgattcctggacccatttcacaaggagcatgactcggtgagattcgggtaggagccaggaagcgtgttgttgctgccattccctctcaggggactgtggtgcggggctataggactttgaagaaaccctacagaggagagcaatgggctcaggaaccatgcagggcccacctgcgggagggagggtggcccacagaggctagtacagttgctggtcagccaggccagtttcccgagtgccaggccagtgccccgtatgctcccagggacactcggcctttgccccagcccaggcctctctgtctcaggtgacactagaatcgcctctcacttccctgggctgggactccagggaccccactgtgtcctgacggtnccaacatcagccagggaaattcactcgccccaccccctggctgggttcacaatttcagacattccttcagctgagaccccttgagccaaattaggca

SEQ ID NO: 329251 - DNA, 409 bp, Homo Sapiens
  misc_feature (297)..(297): n is a, c, g, or t
  misc_feature (378)..(378): n is a, c, g, or t
ccctgaaagtttatgacgtatcaaatatttctaattaaaatagaaaattaatcttcatgatgaaagaatcctaacagcgctttttatatgaatacaaatatttagttgggatataggttatagaatgtctttaaggccctgaagtcctttggatttactgtttttcattctagttcttcctttaatagctcggagcaaataaaagtgatttcctttagaatgtgcacatgctcctaaggatatctgaataaaagatacgtatctgataatttgccatctcagcatcatcccttgggncagcaggttgggaggcaatagttttaatctgaatgtgaaactaatgcttatgcgcaaagacatgtatggtctcttccgggntttgaagggaaccgaggagttagagccgttt

SEQ ID NO: 329252 - DNA, 428 bp, Homo Sapiens
aaaagaaattatatttagtttggccactccctagattcttggtttaccagcttataaagagtacacctaagaggcagtataatatacgcactaaaaaccatttccccctttatcatctttggctagaagcctcatgaaaggaaactgaggacggcagaggcaggcaggctccgtgcgcttctgcctcacacgtcactgaccggaaggctcgcatcgtccaagtctactaggtcacaatctttttcctgagggccatttttactttgagggtcttaacagagcttgttcagtcactttgggaagctgggttctcttgggagaggacagtctgggaccttgaagttccctgggcttgaccttgggcaaggagactcgtaaaatcctcgcttctccatgggtaaaggttgagaccaaagagttgctgcgag

SEQ ID NO: 329253 - DNA, 693 bp, Homo Sapiens
  misc_feature (26)..(26): n is a, c, g, or t
  misc_feature (77)..(77): n is a, c, g, or t
  misc_feature (312)..(365): n is a, c, g, or t
  misc_feature (661)..(661): n is a, c, g, or t
ctccggaatgtctgatccctgaaagnggacaaactacattgcctttcagacctgtgactcaagaaggaagatgatgncccaaaggtgatttgtaacttaacatgccttgtcctgatgttgaaggatttgtgaagggaaaaaaaattctggactctttgatataataaaatgagactggaggcattctgaaatgaaagaaactcctttatatatccaaccacaatcaaacatataaataagcctggaaaaccaactacaaccagcaatttaagattactattactttaagaaaatcaatttcatagtattggnnnnnnnnnnnnnnnnnnnnnnnnnnnnnnnnnnnnnnnnnnnnnnnnnnnnnnagaagtaaaattttgtacatatatacatgtacatatctgtttagtttgggttcatttctataacattttgtaagaaaataaaagtttgagcacctgattatatttagttttgcttttccagatattacattctatagttaccaaaaatggttgaagggagggatttctcattgcagagggtggggtgcaagggaataagacacttgtacgggaacactggaaggctttgcccaacttctacacatgccttttttgcagtcctttaactgtccaccctaccaggagcttattaaccngtatccggaacggggtaatggacgccgttttt

SEQ ID NO: 329254 - DNA, 533 bp, Homo Sapiens
  misc_feature (514)..(514): n is a, c, g, or t
tatgatatcggcaaaaatatttattaaaatgattttttttaagtttgaactttattggaaggagtccctctaattcacactttcatcctagataaatgggtaagaaccacatatggaatataaagcattgattttttaaaaaccacatagtagcacagtgaaagaaatgcaattctccagggtcttagagaattcaaagtggcatcttaggtggtctaagaaaccaattacagtctcatggttttccttttggttcaagattagaagagtcaggttaccactacctgtttttagaggtagaatatgaactttctactagtccacagtttactgggtcaggtggccccaacagtcttttatctcagcccatctgcctctaggggtggccagatgatctctatgtcccaggcagcaaggcttcctgctgatctctacttcagatccatgaacctgatatccatgatgagaaggaagttcttaggcagtgggcgaggggctggagacagaacagtanacacctgatgctccaggtc

SEQ ID NO: 329255 - DNA, 476 bp, Homo Sapiens
  misc_feature (460)..(460): n is a, c, g, or t
ttttctttatatggcagtttttactgggtgtctaatactctctttactgtctcaagtggaagtccaaacaaatttcatttttgtagtaaaaaatctttatttccaaaatgatttgttagccaaaagaactataaaccacctaacaagactttggtaagaaagagacttgatgcttcttataaattccccattgcaaacaaaaaataacaatccaacaagagtcatgttacccattcttagccattaacctggttttaagtctccaaaatcaggattttaaaatgtacccaactgggaccaaatacaaacatgagacactagggtggcttgtccttgattaggaatcaccagcttaagggaactttatcatggggctgagagttagatagatagcttaggaccaacattgcaaaagtggggtgcttctacatgagggcttttttccccccaagtaggaaantaattaattcttgtgt

SEQ ID NO: 329256 - DNA, 455 bp, Homo Sapiens
  misc_feature (313)..(321): n is a, c, g, or t
agtctctggaaaatggagtcccaagcttcaggttgtttgattttgaaaaggctcccctggtgattctgatgcgaagtctacacaggctctggccttttcctcctcctctgaacttatcacccacaactctatcccttctccgtttctgttccagccacaacaatttccttactcttccttaaacatggcaagcatccacataagatgttcctgagagaaacactgctgaaacaaggaaaagcagtgacagcaagatgattcttgccatcatactgatgcgttttagttgaattttaaaacatatacaatgttnnnnnnnnntcagctttgaaatgtatgcctttttgtcttgatttaaaagcagtatgctatttttcctagttttatatgtgacagtctatgcttagtcattgtttaacaaaagatccaggtactagactttcttcgaatatgtt

SEQ ID NO: 329257 - DNA, 458 bp, Homo Sapiens
  misc_feature (52)..(52): n is a, c, g, or t
caaggtggtagtccctgtcaacaaccttcccctttggtaacatttcaattcnacctttaataaattcaaattaaacaccctcccctgtcttggctccccagtttttccccagccctctgaatatcccaactgccctgctgaatacatcctcaacacatacccacatcctaaaataaaatcccacccatttttcccctaaagctgttcttccctggttcagttagcccaaaaatctcagtcatttggtccgcagtctgtacaaagctgatcacatggtagttgctcaatatacactgctggtttattgaccaaattgaatatctgcctgcagttacaatttgtaagagtcagcctagatcattcagagatagttgttctggttgtagatttcccatatccttatttcttttcaaaattattcttataatacagcttcaagacattggacagaggcagga

SEQ ID NO: 329258 - DNA, 277 bp, Homo Sapiens
  misc_feature (166)..(167): n is a, c, g, or t
  misc_feature (175)..(175): n is a, c, g, or t
  misc_feature (192)..(192): n is a, c, g, or t
  misc_feature (195)..(195): n is a, c, g, or t
  misc_feature (207)..(207): n is a, c, g, or t
  misc_feature (223)..(223): n is a, c, g, or t
  misc_feature (236)..(236): n is a, c, g, or t
  misc_feature (242)..(242): n is a, c, g, or t
aattttagacttcaaagacattttacttaggaaaagttcagtaatagagaaataattctgcagatagaaaatgtaaacagttaacatacacttgtcaggagcagcaccattcttaacactactcgacatccacattgcgtgttatgttgaaaatcagggataaaannataaaagncttagactaaataaccnccntttatgcctgcnctgctcaatgtgaagnaacagtccttagnaaatgntatcccatatatgggctgtgtgctactattttcag

SEQ ID NO: 329259 - DNA, 403 bp, Homo Sapiens
  misc_feature (354)..(354): n is a, c, g, or t
aatgcatttcataatgcattttaattgcattagcagtgatttaatttttttagatgctaaaccttatgggtgaaagtggattaaatgtagccaaatgcaacatcaaaatcttcaggcacaaaaacccattaactttttcatactctcagaaggtgaacctaatttcaaatgaaagctgcctccagaatatattgttaagcgtattctagatataattcattttgggcaaacattctgtaggaaattcacataacattttactgtactaaaagtaaattgcccatgtaacaaaaactatcttttcataggcttgaaatgaattttaaagggtgactgaccgtccttggaagaganacagtaaacaaataaggtttatagccatgatgtatgagttaggaaattg

SEQ ID NO: 329260 - DNA, 414 bp, Homo Sapiens
ccctccctatcccaccccccatgaccccaagcaatgaaggatttagggcagatttaccttcagtaaacaccctttgggacaccttgcggggaaagtgggagtctgtttgccaaaaggaggcttttgttaaagtgaggtacggggataatgctttaccccaggcagctgtgatattaaccctacccagcaatgcgggaacactctttaactctttgagtgccctggccccttgcgctcagcagataaaatcctggctctccaaagacactcagaattctggctctagcagtttattattcagacaagtcttataggcatgaaaactgttcaagcttttaaaacaatgtggtttaattagatgaggtggacttacattgctcataagccctccaaatggtggtttataattggcaa

SEQ ID NO: 329261 - DNA, 366 bp, Homo Sapiens
  misc_feature (210)..(230): n is a, c, g, or t
ttttctgttttctttttttgtcacattagctaggacttccagtacaatgctgaaaaggagtagtgaggagacatccttgccttatccctgatcttagtaggaatgcttcaagtttttcaccattaggtatgatattagtggcaggttttttgtagatgttctttctgaagttgaggaagttcccctctattcctagtttgctggaaggcnnnnnnnnnnnnnnnnnnnnnaaatcatgaatggggtattaaatgcttttttggcctctattgaaggggatcatgtgatttctcttctttagcctactgatgtggggtgaattgcattaatgggatttaattgattttcaaatgtagggaattgacc

SEQ ID NO: 329262 - DNA, 491 bp, Homo Sapiens
  misc_feature (407)..(407): n is a, c, g, or t
ctttttacttcttttattgaactccataaatattttcataaggctttgtgtcattacaacattttttttgttaaacattttttaacacacaactttgacacttgtttgacagagtcagttcagataaaagaaacaaaagaataaactggcaaatgcagagcagcaagggtaatcaaagtcactgttgcccatccatccaccccagcccaccccatccccaaagcactaaaagatcactatttggcttcacactagaattgttagaactctcttgttgctgttcttatagatccattagaaatatacacatagagagggggggaaaaagagagaataattaggatgtctgtcttagggctccccacaggcagggtccccattggaacacactaggcaaagcccttttngggagagcaaatcccggggctcactgagttgagggaaagggagctcaggggcctgcgggaattacaacattacaggttactgga

SEQ ID NO: 329263 - DNA, 489 bp, Homo Sapiens
  misc_feature (13)..(13): n is a, c, g, or t
  misc_feature (32)..(32): n is a, c, g, or t
  misc_feature (41)..(41): n is a, c, g, or t
  misc_feature (46)..(46): n is a, c, g, or t
  misc_feature (60)..(60): n is a, c, g, or t
  misc_feature (77)..(77): n is a, c, g, or t
  misc_feature (173)..(173): n is a, c, g, or t
  misc_feature (203)..(260): n is a, c, g, or t
gcctccacacttntaatccccaaccactttgnaagcccaangcggnctgatcacctgagntcgggaattcgaaaccnagcctgacccaacatggagaaaccccgtctcctactaaaaatacaaaatttagccggccgtggtggtgcatgccctgtaatccccagctacttggnaggatgaggcgggagaatagcttgaaagcnnnnnnnnnnnnnnnnnnnnnnnnnnnnnnnnnnnnnnnnnnnnnnnnnnnnnnnnnnagaccaaaactccatctcaagaaaaaagaaatttttttaattatccaaaatttcactctctgggagggtaactatgattaatattccaagggcaatgggttcccaaactgtgtgctcagggtgccttgggggtatcacatcaaatttcacaagggtgcttgcaaaatattttaaatttttcaaggtaaatacggtgacatctgtcggatactatgcaaactacaagttc

SEQ ID NO: 329264 - DNA, 458 bp, Homo Sapiens
  misc_feature (14)..(14): n is a, c, g, or t
  misc_feature (37)..(37): n is a, c, g, or t
  misc_feature (55)..(55): n is a, c, g, or t
  misc_feature (86)..(86): n is a, c, g, or t
gtggactttcccgnaactaattaacctaaaaatattnaatgtcctaaccatatgnggtccactaaagtctctgctgttcattgtgnatcagctaatgactgggcagagacttccttaaatgcttaaaaccagtataagactcagtgtgtattgacagcctaactacatgtgttagggcatacctttcacattccagccaagcagtttacaacccttccttagcctttacttcttgcttgcacaaagtctagagattaatcagaactgacagcttaggaccttcttagttctttcctaagcatgcagcacacaaccctacacatgcacatagccttctagattcccagaaatataccagagcttcttaaatttccttatgaacatctcatttcccagcttttccttttaagcttcttggttagcctattattcgatctaactattcactgctgtgccga

SEQ ID NO: 329265 - DNA, 990 bp, Homo Sapiens
tttcggtactaaagcctttactgtaataaaccaaatatatttacaatttatacaaatgtttaaccttcaacaaaaatacaaaaaaacatttcacaagatgcaaaacccgggaacaagttcattggggacaccactgctctacaaaggacggaaagtgaggtgaactgcaagggaccgaaaggtaatctcacacttgggcaaggcgtgatccccagatcaccccgaaagaaagaatgggctgtcatgtgagtcggcagattccgttcctcaatcctacaacccatggcccctctgtccgcttggccttggtgctccatttggtctatgtagacaggtgactttctgctgatggacttgtcgcctcctctttgtagactcaaagtagttttctgtcaaggtttggaaacaggtgtttgtaattttttttctcttttaaagttacaacttttctatttctataaattcgaaacattttggcccaattcaactataaacgttaaaccacataatgttttcagtagatgacttcatagactgtagccttcttgtcccccgagccagtgactatgtacttatcatccacagagatgtcacagctaagcactgacgaggactctttggactggaatatgctggctccatagggggtccgccaagcattgaggaggttatcttttccagtactcacaaaccatttaccacagtaagcaaatttcagggacagcacgcagctctcatgcaggtgcagctggtacttgtcaggcttgttcacgtgcaggcacctccacattgctgctctccatgcccactgccagccactccccggtgggccagtaccccagggagaagatctggggaggtgaagtcgtgctgctgcagctgccgcccctcgcgcaggtcccaggaacctgactgtgtgccaaaccacccgtccagagcttgtgccatcattagaatgtcatacagctggcccgtctggtgccctggaat

SEQ ID NO: 329266 - DNA, 224 bp, Homo Sapiens
  misc_feature (25)..(25): n is a, c, g, or t
gccaccggtgcccaagcccttattntccttgacctcatagggaataaatatgtctagtaggcccctcgataaatacttactgaattaagattacagcaagttagagaaacttgatgtcttatttgttaaagggccaagtagaataaagactttaaaataagaaacttacataccatttttccccctacccttcccctcacataaatttggtcaacatacttctt

SEQ ID NO: 329267 - DNA, 124 bp, Homo Sapiens
gatacttttccacaggcatctctgcatgaatttcttccacagtaaaaatacgttttttgtaaaggcaattgtacataatactcatcacttaattcaccacactctcacttcctttattagttat

SEQ ID NO: 329268 - DNA, 488 bp, Homo Sapiens
tttggagactttaacagttttatttcttagctatgaaactcatatgctagtaatatatgacatatgtgtgtatgtgtgtgggtatatacatttacatacgtttgtgtggcagacattggaaaatttcatttttaaaatgcaaagccaccaaagagtccacttcagaaatgctgcttagattcattacagtcttaaacgctgttttgcacatttttcaagcattccatggaccactggaattatcagcctcttataattcagttttgcccattcatagtccctggtgctagttattctggattaatcaaagcaatctgaacatctacctatacaaaagtcaagccccaaggtgaggcagagcctgatctcatttctgtgaggtgcctggtggtgccagcacttgttttcactgctgctctgatctacactctttgcccagtagtcagaagagccttctgagctctgggcccagtgtgccacctgtgccg

SEQ ID NO: 329269 - DNA, 469 bp, Homo Sapiens
ttctgtgaaatgcagcaggttcttaaacgttatttcagtggcatgggctggaagcttatcacaaaaagccatgtgtgtggccttatcagaacagaaagagacagggctggtgcccaaggctgctgcctgctccaccttttgccagctctggacatctgaggacgtcccggcagatctggaatggggccctcaactgaccatttgcttctcagaatttcagtttgagacatgagaggtataatcagttacttttctccccccagagaaacccttttgtgaggggagaggagctatggtatgtggttcagctgaaacacatacaactgcatccttttggagtcctttgccaacaaaaacagaccaacagaccagatggtgtccatgttcaatatcatgtcttgatggacgcagctgatgacctcaaatacttgagtggtctcatggctgttagatggattatttgaattaa

SEQ ID NO: 329270 - DNA, 666 bp, Homo Sapiens
  misc_feature (594)..(594): n is a, c, g, or t
  misc_feature (631)..(631): n is a, c, g, or t
  misc_feature (636)..(636): n is a, c, g, or t
  misc_feature (656)..(656): n is a, c, g, or t
cagctcttccccatgcctcaagatgcctgtaccccgtgatgcctcctttcccctgcctagggtcacaatatgtggagctgaccaaggttccccctattatcagtgacaatggtggaatgtggaggtgaagttaaacaccttcgtggctacagagtttcccttagcagagctgtggagtgtgacaatggtgtttgtgtctaaactatcaaacgccattatcacactaaatagctactgctaggcaatccttccctcgataaatgtcttggcatcgtttgctttgagcaagaaggttcatctgatatcagtcttctcaatcttgtgtacttactgaataaagtctggttcttttgcactcataaccaatatggttagctgaaccctgcctctcacatgctgttgttacataccttagctggtgattaattttcttgttttcccaagtcaataaaaagattgcagaccagggcacggtgggctcacgcctggaaatcccaggcactttgggcaggccaagggcagggcgggatgcactttgaggctcagggagtttcaagttccagcctggggcaggcatgggtggaaaccgtgttntcttacaaaaaactaacaaaaatttaggccaggggantggtngggcatgttggcctgttaantcttcaggct

SEQ ID NO: 329271 - DNA, 375 bp, Homo Sapiens
  misc_feature (86)..(95): n is a, c, g, or t
  misc_feature (267)..(267): n is a, c, g, or t
  misc_feature (289)..(289): n is a, c, g, or t
  misc_feature (347)..(347): n is a, c, g, or t
gaaaataaaagattgttatgtgatatatggcttaacctagtaatgcctgttttctttaaagcacatcagtgtctcctgttcaaaannnnnnnnnncctagaaacttgacaaattcattttaaagttagcatagaccaatacaggtccagaattaggctgagtcagttttgacagaaagaggaaggaaggaacactaggacctacaaggtaaatgagagttactgtaaaattatactaataaaaacaacataatgctaggcaaaaganaggcaaatagattgggtataanctagtaatctcaggaaagattcatgtatatttgacaacttgggtatatgatgtgggcncaacttgggtagtgaggttgcttaaagg

SEQ ID NO: 329272 - DNA, 452 bp, Homo Sapiens
  misc_feature (408)..(408): n is a, c, g, or t
cttaataaacaacagcaacaacaaacccaagtgctagctcatttctggtgccatgagacataatagcaccacttgtttttctattttagtggttaaaatgtatgcaattttagcacccatctacaaaagttagatgttaataaaaatatggtattacttggcttactaggaagtaacagtcttaatatccccttaagagaagaaatctgtttcatttgctgcatcctgggtcatggaaaagaatagtatgaaagggggaaacaaagaacagccttttaggtaaggcttttcagtacctgaatcactgaaagtattgaagtcatgttccttggaagagtagaattataccacacatagggaggttccaagggagttatgttgttatacactgtatgtcagggtaggccncctttaaaatgctggaacatgggcttaggcggcctaaatttaaa

SEQ ID NO: 329273 - DNA, 294 bp, Homo Sapiens
tcttataagaagcattggaaaaaaacatacatagtaacaaacagtgaatttagacataggttcgcataaattgttttactttccagaaaacccagaacctctgggaaattactaaaattatgaagaagttaaattttataagctctttccctcgaactttggctaaatgtaaccatattaaaatactgacatagtttttcattatgaaatagaaatgtaaaatggtagctttattttaatctttactcaagagtgatattgaaacaaaggtcttactacaacaaccaggttaaa

SEQ ID NO: 329274 - DNA, 428 bp, Homo Sapiens
ccttccttaaaaaatattttttctgtccctaacttgaagcataagggttatttgagcaaagtaaccattaacctcagtggaaggccattgtccctgtgaaatattctttaggcagatctgccccacatctttattgaacttgaaatctaatatttctagtatttgaacaaagcagaaggttaagtcagggaagagcagtgctgtccatgatgtaatggaagctacccaggggaggcagtgtctggatgatgctgtgctacctacccctgcacgaaccatgctggctcagtctgagctgtgggccacatcagctagtggctcttctcatgcatcagttaggtgggtctgggtgagagttatagtgagggaatggtcactaaagtatcctgacaagttcctaggaaaaaaggaataaagtttttttcctt

SEQ ID NO: 329275 - DNA, 364 bp, Homo Sapiens
gttcacgccattctcctgcctcaggtgcccgccaccatgccaggccaattttttgtattttttagtagagacaggatttcactgcgctaaccaggatgggtctcgatctcctgacctcgtgattgaaattctgaccctgaagagcgtacttctgtaagtagaaagacgtttgctcttaacatatagtctgcacaattcaatatgaacgttttatttccaacaagtatgtaggttcactgttccatgacttgtgcataacaatatgaattatctactatgaaaatatagtttattaggaatatttttaaggtggggacagctccatcttaccaatgatataaccaatgtctaataatcacaagtt

SEQ ID NO: 329276 - DNA, 686 bp, Homo Sapiens
  misc_feature (287)..(287): n is a, c, g, or t
catttgttcaaaagctacctcaaaagtcctcctaccaaacatgatttggcaatctttttgcatgattagtatgatggcagtaggagctttgtttaataagcaaacatgatgaaaattccaaaaggtgctatgcaaaagatcagaaggaagatgtttttcctgagaccctctgccaactgttacttctgatgcctttcctgcttcttgaacaaggcttaagacagcttctctgttccatttctgaccactatgtggcaccagaactttgaagtaggaaatagaaaaanaatctgcttaactagtgatttgctgtgaatctttaatcaatgcctcttaaaaataattcatttatggccgggcgcagtggggaaaagcaggttaaaaaacatgcagatcactcttgcccactactgtggtcccctggttggctatagatttagcagcttttctttgtgccacagcagcctccagcagcatcagggacacatctggacttcatactgtcagactcttctgcaagcttaaatggatctgtgattatatcctttaactccaaagcagaacagcctccagatgttggcaacttctctccaattggtctgatcagaaaatcttgagcaaatcttgaattcttcaagatagctgctgtttcttcatccacttcaacaatttcaccttccttaaat

SEQ ID NO: 329277 - DNA, 440 bp, Homo Sapiens
aatttttccaagttccatggataggaaggccttaatatagtccaagatgccggttcttccccaaattcataaatggattcaatgcactccctcataaaaatccccagtgagttgttttttggatacggaaaaactgattctaaagtttatatggaaagggagacttccctggagtagccaacacagtactgaagggcaagagcaaaggaggagaaatgacgctgcctgccttaaagacttaccataaagctacaggcatcaagataggttggcaaaaggacagacagatggatcagttgacagagcagacagcccagaagcagatccacataaaaatatggcctatgaatcttgacaaagaagtaaaggtaatacggtggaggcaagattatcttttcaacaaatggtactgaaacagctggctctccacatgcacacac

SEQ ID NO: 329278 - DNA, 523 bp, Homo Sapiens
  misc_feature (386)..(386): n is a, c, g, or t
  misc_feature (423)..(423): n is a, c, g, or t
  misc_feature (430)..(430): n is a, c, g, or t
  misc_feature (435)..(435): n is a, c, g, or t
  misc_feature (463)..(463): n is a, c, g, or t
  misc_feature (486)..(486): n is a, c, g, or t
  misc_feature (494)..(494): n is a, c, g, or t
  misc_feature (502)..(502): n is a, c, g, or t
atcttgcagagcttccagttagttcacctctttgtcatgcggttctaaaaactcttcaatgttgggaacaagttcttctccgacgacttgaaatccatggtgggccacctcaaaattatatcgcaagtcataccgccgaagagagtttgtctgcaggtcctgcaattcttcgccacaaagctttactggaacctacaaacactcctttcaaatccaaacaccatctggcactgtctgtgaagaggctttggcagtatttggtgaagcaggaagaaattcaggaaacctttatcaaaaatatattcacaaagaaacggtgtctaaatgagtcattagaggacaacagtgaaaccattcaaaaattctatgatgggaggagccaaacntcattaagatagaaggcaggtttgggatattccgggngttaagncaggnttatttcttaaggatctggtattcttgntgcgtttgccgttattagggcanttggagcngctggcantcgttcccgttctggatgttc

SEQ ID NO: 329279 - DNA, 330 bp, Homo Sapiens
tatttaacagtagcctgggaagaaaactttcctttgaagtgcccaatgacctagaggtaatcaatgttgctgtttgtggcacaagcaattaaggcaaattataacctgactggtgccctgttgaggcatgacaacgcctccaaaaatttgcccaggccttgccaaacagaaatatttctcctgtgcttttgtacagttggggaaacttggcatctggatagagtgaagctttgaacataatgattagaactgagatgaactgcttaaagtgaagtgagctgcaattccaaattatactacagttgaatgactgctaccctcctgtgaatt

SEQ ID NO: 329280 - DNA, 954 bp, Homo Sapiens
ttatagaattaatcatgtatttattattgtgttttaaatcttaaatatattcatcctccaagtaacagaatttagcatctttacacattagctgtatcgtgtgttttgatagtttaggcacatttcaggattttagatttcattttgtggtttcattataaaacagcttgcacaccaaactcaatcaatcttttttatttaaaaatccacctaaaaattcacttctgggttttagtttttgtttaaaaagaagcaaatatttaaaagcatcaaatgttactagtctacaattcatcttgttatgaacatttttagtttgaggattgggaaaataaacctattacattgattaggcacagtactatggccaatgggcagaaaatcagggcacatctgtgtactcaggcaacagttagaggtctgaatggagggggtcatgcctcaactgtgggcactcctttctctatgccccctccaaaaattgttataagtctcaaatcagtacatgagattgtatgtaacttggttaaaaaacaactatacgtgctttctaaattatgttgcaaagccaagacagacgaatataattgtagcctcactacaacttgtggtcttaatatctatgtcacaggaccatgttataggtgagacagaattataccatccctctggtgttttcagaaatctggttggaaggagtccatgactataacatttcacattgtagcaaggctccaatatttcttgaattggggcagtgaatataaatcacagtacaaaatccgtaattctttcagtggaaaagcaacaggtgctacatacgagaatcacttatataacatctatttttttaaaaaaaatgcagatataaaatattaattgcatagggaattaaatataaggccaagaagaatattaagtaaaaaaaatcatagaaagggcactatggtgtca

SEQ ID NO: 329281 - DNA, 805 bp, Homo Sapiens
  misc_feature (41)..(41): n is a, c, g, or t
  misc_feature (53)..(53): n is a, c, g, or t
  misc_feature (59)..(59): n is a, c, g, or t
  misc_feature (101)..(101): n is a, c, g, or t
  misc_feature (107)..(107): n is a, c, g, or t
cggaacaaagacgggaagaaccgcgtcacgaaatagctatnctgactatggcngggaancccttatacccaaaggggctcttcacacacaacgggaacttncccttntgctttccccagagcagtggtgaattgcagataataaaatattttaaaatgaaatttaaaaccagaaatgttcttactgttgctcttctggagagactgcatgaagacacacactggcatgaaccacaggctccatgttcctgagctgagtaatgcccaggataacaattcctctgcctcaatctcagacaaagtaggattctccaaggcagaacttagaatgtgtctagcaatttggacattttccccaataaaacaagtttataaaattttgaaaatagagtgtctaaacttttccattgtcctttgcatattgaagcctatcagaatcccaagaataaatatgtttgtcttcttgggggcactaagcatgacccaagacaatgaatggtatctgaactacattttctttacactagagattagtagacaaaaggttttttttgaatgggtgaactctgctctttccttttcccaataactttgcaaccctcattccacaaacccacagattaatgtgggtacatcaccttattcgtgttttattctctttcaggatattgttcttccctacgtgatagtgtggataatatttctatcattgtggtagtatttcctattcctatttgcacagccattgctctagtgttgatgggaagagtagaaaaactgctcgtgccgctcgtgccgctcgtgcc

SEQ ID NO: 329282 - DNA, 476 bp, Homo Sapiens
  misc_feature (333)..(341): n is a, c, g, or t
  misc_feature (390)..(390): n is a, c, g, or t
  misc_feature (405)..(405): n is a, c, g, or t
  misc_feature (433)..(433): n is a, c, g, or t
  misc_feature (455)..(455): n is a, c, g, or t
caatttgacatatttttatttagattttgcctaagatgccacatgaagcctatataagacattctttccctaaaacttacatatgtatgtacatatatatatataatgttttacatcctaaacagtctacttcacgtcttcaccaaatgtgcagcagcgtgattcacaggttcaccactggaaaatagaccttaaaattccgccaatattgggtcaaagatcttacactataacacatactacactgtggggcacggatcaacagacgagaatactttatacagaaggcttctcgacgggaaggaagggccttgggagtggggaaatctaaannnnnnnnnacacactacatgtcccaggcacaccttgcggacggcccagggaccacantttcccaggaacggnactggttcgtcgcacggagggttttccntgttggccggggtttgtaggtncttctcgatcgtgtccagttt

SEQ ID NO: 329283 - DNA, 220 bp, Homo Sapiens
gaattaatttttgtaaaagatgtaagatctatgtctagattcatttttttgcctgtggaaatctagttgttctggcaccatttgttgaaaagactgttctttctccattgaaatgtctttgttcctttgtcaaagatcaggtgactatatttatgagggtctgtgttcccttgatctatttgttcttttgctaccagtacaccatcttaattattgaaac

SEQ ID NO: 329284 - DNA, 420 bp, Homo Sapiens
tatttcttttcccgggaaaagtgggccatatataagtagggtaaacgctagagcctagatactcctttaatctctattacgtccagatctctggctcccttttaccaacccggcaatcttcaattataggtggctaatagggaagaaaatcatcggcagagcaacagcttcatgtaatttcagagtagaaaaatgaattttaatcttctgaaaggtaatattagaattagctggattgctacacttaggaatcataggttccaaataaatatcagtacatacggaaatcagataatgggacagattatttgaaattagggctgcctagaaatctggaatgtgagatcaccctccttctgaccaaatatgcttgaataaacttaatattccaaattatgtgagggattgcctattgtgcaa

SEQ ID NO: 329285 - DNA, 287 bp, Homo Sapiens
atcggtgtgagccaccgcacccggccaacaggaggttattaaaggccctgttagttttttctggggagtctcccttgcggatatctcaagactgctcaccccagccacggaagggagccttcattctgaaagaagctacaaagccttgggaaagctgggggccccacaaggcagatgcagtcaaggttaagatgaaaggaaactgggagggtcttactggtaatgaagttgttatggttttgaggcactttttacgctttctaaaataagaatgttagatttatgta

SEQ ID NO: 329286 - DNA, 419 bp, Homo Sapiens
  misc_feature (46)..(46): n is a, c, g, or t
  misc_feature (320)..(320): n is a, c, g, or t
  misc_feature (365)..(365): n is a, c, g, or t
  misc_feature (399)..(399): n is a, c, g, or t
  misc_feature (408)..(408): n is a, c, g, or t
ttacattttaaattaagttttagagctatgtggtaaattatttggnccaattcctttatactttggatgaggtaaagtgactaacagaggtccccaccagtaggagcccaagtcagtctgtgagctcagtgctcctgatactaactaagtccagtgccctttcaaccacataacatgggcattgctttacaaaatcaagtcctacaacagacctgagaggtaaactgacttcctcttggggattcaaacactgaggtaggctcaggatgggcagtaaaaagtcgtggggatccttaagggctttcggtcccacctctttntgctctttcagggtcctttgggaggaatgggccccttttcctccnggctttttctcttgtggtcaaattcaaggtaggncccgggggnttcactttcag

SEQ ID NO: 329287 - DNA, 435 bp, Homo Sapiens
  misc_feature (298)..(298): n is a, c, g, or t
  misc_feature (345)..(345): n is a, c, g, or t
  misc_feature (425)..(425): n is a, c, g, or t
aattatagaagtactctgatttttattgttatacaacatatatatataattgtttccccaaaatatgcacaattacatgtgtcaattttaaaaaatgaatgaagactataatgtaaaacctatagctgtaaaattcctagcacaatacagaagggtgaagcttcattacaactggtcgtggcaataatttgggggacgtagcatcaacggatgagacaacaaaagcaagggaatacacatgggtactgaatcagtgtatggaaaaatatcccaaacaggacaaagcaggaacatgggnataggatatatggcacattgtaggtattacttcaccaaaccatgttncctgggggaggccaaatggttcccctttaggggtgaggtaggattcagccaaacaggggcacggtaccatcactgggggnttggccttca

SEQ ID NO: 329288 - DNA, 379 bp, Homo Sapiens
agaagtactgatttttattgttatacaacacatatatataattgtttccccaaaatatgcacaattacatgtgtcaattttaaaaaatgaatgaagactataatgtaaaacctatagctgtaaaattcctagcacaatacagaagggtgaagcttcattacaactggtcgtgggcaataatttgggggacgtagcatcaacggatgagacaacaaaagcaagggaatacacatgggtactgaatcagtgtatgaaaaatatcccaaacaggacaaaggcaggaacatggaataggatatatgcacattgtaggtattactcacaaacatgttacctggaagcaaatgtacccttaaggatgagtagattcagcaaacag

SEQ ID NO: 329289 - DNA, 731 bp, Homo Sapiens
catgatgtggagaacttgagatgttgtcttgtttctctagcaacggtctcaggagcagatggccgcccagcgatttgtctgactgtgttggggctgggcacttgtctccaactcataagggcttgcagccagtttgacccgatgtttcatggaacagtcacagaagagctaaccagtcatgatgaatggagtcactataatgaaaacataagagcaggtcaaaaagattttgtttttgtgaagttcaatggccttcatttaaagtctatggaaaatttgcagtcttgcatctctcttagagtatgcatcttctcaaacaattttattacagatattcatccacttcaaagttgtataaaattaatcaaacttgatctcccatggaaatcagataaagagtctaccaaataccaaattttggaatggattgaagaacctaaaactactctatcttcatgacaatgggtttgcaaagttaaagaatatatgtgtattatctgcctgtccaaccctcattgccctcactatgtttgattgtccagtaagccttaaaaaaggatatagacatgttcttgttaacagtatatggcctctcaaagcgctggatcatcatgtgatttctgatgaagaaataattcagaactggcatcttcctgaaagattcaaagcatgtaaccatcgacttttctttaatttctgcccagctttgagaaaggtaattggcttcttta

SEQ ID NO: 329290 - DNA, 637 bp, Homo Sapiens
  misc_feature (278)..(278): n is a, c, g, or t
  misc_feature (563)..(563): n is a, c, g, or t
tctcaaagcaattcatttttattttttaaaaaacaccccaaaataaaaaaccactgactcatccatgccaaactgcactttccagaggaagcatgtcagcagactcaaacggacaatggacagaatcccatgacaccaaagtcattcaaacctgatgcttcagaggctgacattctgagctgaaatagccacaggtcaccacttggcctgatgtgggactctcctttctttttagtctattcatgtggtggcagaagatgtgagactctaagtctccnagtcagggaggcttctcctgttatagaaaaatattagagtctaaggcttggacttaagccgatgggtgggctatattaagaatcatacctttgcttcttcaaagtctagacgatgcatttgtaagttctgggcttctctcaggggggttggtggatctcaggggaccagagagagcttttaggtcccttttatggatggggttcactggtgactctaaaatcttttctcattgaaattagccagcataatttgacagacactcagaaaaacaccctaatcatatntagctgaaggccaggtctggaagtaaattctttaaaagtttgggcttcaggaaggataggttgaaggtgaaaac

SEQ ID NO: 329291 - DNA, 738 bp, Homo Sapiens
agcccctagaaatgaccaacgtgctttctgtctctatggatttacttattctggatatctcatataaatgcaatcatacatttgagtcactacagcagttaacacagtgcctggccgtagtgaattttaaaaaatataggttgactgtgtgaacgaaaggataggggtggataatgattaaaccaccataaaatcctgagatattgttctaatatccactgcatgctctccacaaatgctccttcgaattttatcttctgtgacgatgacactatgtcaacctatccacagagcccagcagtgttaatgccgcatgttaataaaacacccctctttccccacaggggctgggatttttataaaatgaaggtttagaatctagataaccaggacacagtacactgaatgtctactcctaatatgtttgcacaaagctaaactacacatattgctacctaaaatataaaactaatgtgagtgcctacagaggaaaatgtggaatgctgaatagggtgaaccccctgctattagcctggaaatgatgactctgttgtgaatctgtcctacagggtatctcagggtctgagataatagcataattatatatgctaactcttcctagttataatatcttggaagacaaaagatatagggtaggagggaagaaaagttaagccaaacaaaaagaaaagactaaattatttttactcaacataatgactctttgggaagtctaaa

SEQ ID NO: 329292 - DNA, 424 bp, Homo Sapiens
  misc_feature (26)..(26): n is a, c, g, or t
aaccgtcaccctccccttggagtttntcagtatatatcctcccggaaattggcctttaaaaaagccttccaaggaggaaaaaattttggaagtgtatcctgccttgcctaagccttacccatgacctaatgttaactctttttgtgtggtccccggttgtgagcagacaggctggaacctaaagcacaccattggcagtgcacccaacttgactcctgtcataaaactgataaaaggtgatcctgttcatccttccttaagtactcttagcactattattcatgacatggtacttagacacaaatgtacacaattctaaagcagatcattcaagtatttcatttttcctcatctttcttcttcttccagtacatataattgacatacacatatgttgagagctttcctatatttctttaatatc

SEQ ID NO: 329293 - DNA, 346 bp, Homo Sapiens
  misc_feature (19)..(19): n is a, c, g, or t
  misc_feature (190)..(190): n is a, c, g, or t
aggaaaatggtttaatttntggccccctaatatttaaaaccatggatgggaatttggtaaatccttgggcattggattggtaattcctgcccttttttggaagaatttttttctccccagcatgttagctgagaatattctctattttataaataatatgaagtaggttggtcttctctgcttctctatncccaggccttcttagctcagtatcatctcccttcatgtaagcagcacgttttaactcttaggaagctgaatgttgtgttatcactaatactttgtacaggtcacctgcctactctaattgtccttagtacttggacaggctttatcatcaaagagt

SEQ ID NO: 329294 - DNA, 347 bp, Homo Sapiens
  misc_feature (158)..(158): n is a, c, g, or t
tttatttttgacttttaaaaatgcttagattttcctcagtattttatcaatagtgtgtaagctggaaaacttgagtttgagatcacatatctgtctcactagtctattcacttctgtgggcatttcggcagaagtgggcaactgggaagttgttaagncatgggttttggggcagggagaccagagttcgatgggtcattactgccaattatactctgaggacacaaagagatagggttgagtctgttgggaccccagtggggtttcaggtcttatgtgttcagttgctcatattgtgcttaggtgagtgggtatggggtttttattgtattttaggggagggtaac

SEQ ID NO: 329295 - DNA, 611 bp, Homo Sapiens
  misc_feature (406)..(408): n is a, c, g, or t
  misc_feature (426)..(427): n is a, c, g, or t
  misc_feature (432)..(432): n is a, c, g, or t
  misc_feature (437)..(437): n is a, c, g, or t
  misc_feature (495)..(496): n is a, c, g, or t
  misc_feature (525)..(525): n is a, c, g, or t
  misc_feature (597)..(597): n is a, c, g, or t
cagtggcaaagaatgcgctctatgtggagagtggcccaccatgcctcacaccataggatgtgagcatattttctgttatttctgtgctaagagtagtttcttatttgacgtgtactttacttgtcctaagtgtggcacagaagtacacagtctgcagccactgaaatcaggaatcgagatgtcagaagtaaatgctctttagaaactaaaattgcttcctttgaggaaaaaaatgcaccgtgtttaaattcttaatattagtcatcctaagtataccatttatgtatcctttataaggaatgtgctcctagccactgtcttctcctttccaggcatgactgaaatctaatcactggaaaccatgtgattctaaatatattatgtaaatgttaatgtattatgttcnnnaaatcattgcattcaatnnttaangtcangaataatggacagcttttgtcaggtgactactaacaatgctaccttcattgtactacnncttaaaacaaggttggattctaaagatanaggttttgggagactctggggatgagtgtgcatttattttgcagagttgacataaatgatggataatgtgancaattatggaggac

SEQ ID NO: 329296 - DNA, 466 bp, Homo Sapiens
  misc_feature (23)..(23): n is a, c, g, or t
  misc_feature (40)..(40): n is a, c, g, or t
  misc_feature (274)..(274): n is a, c, g, or t
caaacgaaaacaggccttcaacnaatgtttaaaaaagttntggtgcaacaaaattcaagttaactgaaaaatcaaatcccataactgccctttaaaaagatgaaggtgcccaattttccctctcccatttcaaaaacatctcccttgtaaggcagggtgtttgactctcatccaaggggccaatatctcttggtgggccctggctatctagaaaccacccgccaatggctggagccaagtttggtcaatggggtaaacatttcagaaggtaagngcagggcatgccccttgagccaggaggcctctgccgtcctggctgtgtcctcaggatggccaattctcacagaaaccaccacaaggaaagatctcctgggatgacaggggtgtgaggacttggattttgttttaattctaaaatctatttttacatctcagtcactaccctagcattagcttaagttagtgt

SEQ ID NO: 329297 - DNA, 337 bp, Homo Sapiens
ttttttaacagtggagtaattttattcacatagggttgcgattaaaaggttaactcattcaaacacatttttgctatgctaacattcctttgcctcttattcttacaaataaacccccatcacagagcagaaatgttagaaattatatcacaaatggagcacaataagtatttttaaaaccttttaaaatatggcttataattttacacagcaagttacctattaatatgttacatattaacagatctatttggacaatcagatttccttgagattaaggatggagttggcatttttcctttaagaaggcattttaaggccgggcatggtgcttcat

SEQ ID NO: 329298 - DNA, 601 bp, Homo Sapiens
  misc_feature (58)..(58): n is a, c, g, or t
  misc_feature (262)..(262): n is a, c, g, or t
  misc_feature (490)..(490): n is a, c, g, or t
cagtgtccctacaagatagaatgcccacaacagatgattaatctggtcaaaaacagtnctttgtacaggaataggttaaagcaagagttctttgattattgttttggcagaaaaaggcaaagtgaaaaacaattccagaaaaaaaagttacgaagcaggctttgtgcatttttgtttgctgtatgtgtgaattttacccttttatgtatattttttcatcagccaatttcaaagctagctgagcccaaaggatattaactgnaatgaaaataacaaaagagataatctaattaccaaactcctaaaaaccaaattccagtaggttttaattcatggggttttgactttgccaacatttgtgtgcaccttctgtactaggccctatagttcttctatctacatggaaatcctgcagtgtgccctacaggaaggaatttacacagagcatctttttgttctgttagacagacatacactctctaagtagagntaagacatcatcacttcatcacattacaaaataagattgtctgcttgtaatttatcactacaggggaagctgccttataaatctaagtactttatctcacctattacaaaa

SEQ ID NO: 329299 - DNA, 454 bp, Homo Sapiens
  misc_feature (41)..(41): n is a, c, g, or t
  misc_feature (384)..(384): n is a, c, g, or t
  misc_feature (391)..(391): n is a, c, g, or t
  misc_feature (399)..(399): n is a, c, g, or t
  misc_feature (408)..(408): n is a, c, g, or t
  misc_feature (432)..(432): n is a, c, g, or t
ctcaaactcctggggcccaagcagttctcccgcctcggccntcccaaagtgctggaattacaggcgtgcccccatgcccggcctgtttgtaggccttctaaaggtagatcagttatccatgtaaggaggaggggcagaattacttggtcttagttcataaatgggcaagtctatactattggatattcttcacccctttgctcagccacatgcagtgtgcaaggcattgctcttggggctggacatatttttcccctcttatcttcacagcagccctgcagaagtagccttatcactattttgcagatgagaaaagtgaggactcgcaggcatctcagtgagtgggcccagggcccagccattacaggcctcttgggtcccctntgggggntttctggntcagatctnttcggggtttcccgaacacggganttttttacgggcacggaatgtt

SEQ ID NO: 329300 - DNA, 402 bp, Homo Sapiens
  misc_feature (182)..(182): n is a, c, g, or t
  misc_feature (370)..(370): n is a, c, g, or t
taaattcatgtttttaattggcttaatacaaaggtcccccaggaggccctgggaggagggggacagcctgggagaggcagagattcatggccagcagcccacccccacctgccacccactccccaacaagggtcccagactctttcaataatcctaaaaaaaccgacgagagcgcaggcagnatgaagagccccttcatcttcacacgggtgacaggctgccctgccctgcccaggggcctgggtcctccccagccaagtcaggttgcccagcccagaccctgccctggcaaggtggggcagagcaatctgggtcctccaggggggcaggggcgccatgtaaacatcaacagggcagaccccaattcctncaggccagtgggggccccggaggtccagtggt

SEQ ID NO: 329301 - DNA, 483 bp, Homo Sapiens
  misc_feature (383)..(383): n is a, c, g, or t
  misc_feature (400)..(400): n is a, c, g, or t
  misc_feature (443)..(443): n is a, c, g, or t
  misc_feature (453)..(453): n is a, c, g, or t
  misc_feature (463)..(463): n is a, c, g, or t
  misc_feature (472)..(472): n is a, c, g, or t
ttttttaaattcatgtttttaattggcttaatacaaaggtcccccaggaggccctgggaggagggggacagcctgggagaggcagagattcatggccagcagcccacccccacctgccacccactccccaacaagggtcccagactctttcaataatcctaaaaaaaccgacgagagcgcaggcagatgaagagccccttcatcttcacacgggtgacaggctgccctgccctgcccaggggcctggggtcctccccagccaagtcaggttgcccagcccagacccttgccttggggaaggttgggggcagagcaatcttgggtcctccaggggagggcaagggcgccattgttaaacatttcaacaagggccaagaccccantttttcttccaagccanttgggggccccggagttccagttgttttcaacccaaagctttntttagttaantcaaattcanggggatttngttggtttttt

SEQ ID NO: 329302 - DNA, 539 bp, Homo Sapiens
  misc_feature (282)..(282): n is a, c, g, or t
  misc_feature (370)..(370): n is a, c, g, or t
ggatttattcatttatttaattattttaagttatacaaaactgattaccataagtgcggtcgactgcttttatttttacgttgtgtgtgttggaaaaatgctaaaacatcagtctacaattctatatattgttattaaagattaatccaaccagcaacccaaggacatataagcgatttccactattgcatcagagcactcggcaggaaaggcctagccacggggaacattaggaaggctacagaaggcattgcagagaagagaaggaaggaacaccgaagnggggaaaggataacttgggggctctcaccgtcatggcacttttttttaggccacacaaaattaaaaaccacatctaattacacttttnctctatactttagtggttgacacaagtgactcaaatatcctaagagtacaaggaacagcctaaaaacagctgttttaagggttgtctctaagattatggtactggagggaggggggaagacaatcaatttgcagtaatgagtaagaagagagctgttaccactccagac

SEQ ID NO: 329303 - DNA, 364 bp, Homo Sapiens
acctgaaagggtttttgtaaaatttttgggcccaaaattttttaaaaccataccttacctttggacctaggggtacattccttacaaaataaataaacagtttttaaaattgtttagacacagatatttggaattagctatccttagtgcccaactgctttttatttttttacttcatcaaggtgatgtaagtgactcacctttaaagtttttttagtgttattttttatcactactctgggaaatggtttgtcttcaagatgcaatacttttcttagtaaaggaaaaacagcataaaaagatacctggtctgccttgtacaagaaaaggcaatattagaggaagaaaatttaaagaaaagctc

SEQ ID NO: 329304 - DNA, 423 bp, Homo Sapiens
ttgaaagtacaagagactgtattactcttacatttaccacatacaaccaacatttcaatctctattatatttcacaacttgttattaaatttaaagcacctgtatatggtgatttgactttcactctacagcctatagtattgaattgaacactgtaacttgtcccattgggttaaatcatgcaactgtcacagaatcaggttaagtggtttataaggcatattggaacgagttaaaaatcatttatatccatttaaaagtttattcttttggatgaaggggttcccgaatgcctcagtcatcatgtgtgttgtaaatcagttgaatagtttgttaaagtataatttatttggcttaggatggagccgcagaaattggaaggaattgtggtcatcccagggttgaagggtgtcttctgagctg

SEQ ID NO: 329305 - DNA, 478 bp, Homo Sapiens
  misc_feature (453)..(453): n is a, c, g, or t
  misc_feature (458)..(458): n is a, c, g, or t
agtttcttaagcacaaggacaatgtcttatcccttttcttattattttaggtagcattatagcactgttattaattttgcacttaatgcattgctattaagtgaattcatgaaacttctatctgaacacagggctttttatagctattacaaatggcacagttaaatacgtaagtgcaataaggtaagctagatttgagatggaattaaaaaaatactttcccatactttacacacagaatgtagtttgtatacagtttaggaaaacctactaagaagggaaaatcacaatgttttattaggggtgaaacacaaatcaggaaaggcttaggggaaataaaaccaaggaactagttttgttgggtctatttgttatgataaaggctaaactaatgttaacaagagacaaatatagtggctcaagtaagaaagaagtttatttatcatataacancaggncacacattcaggctgctggg

SEQ ID NO: 329306 - DNA, 705 bp, Homo Sapiens
aacctgccaaaaggttggccccgttcaggcccctggaacacccggaaccttgtctttcaaccctggccctctggtggttggtttcctggccattactggcagcccactttcaccccctcttgtgttttagcaccggcaaagtgggttctgagaagctcccaggtaactggggctggaggtgtgggggatgaagcgtcagcagcggggaggcattgtggtaacctgatctgaagaaaggcagcaactactcggaagagggagacgaagcccagggacagccaatgagctggctctgcagcccagcagagccacctgctgctttctgggcaaacttctggccccagaatatgagggtctgttccaaagttcagagagatcctgtgtcccttcctggtgacccagaagtgacatcggatcatcttttgtcttggaagctgatttttacaagtggaattttgcttccagagggaagtcaacatacagtgaccagcctgaagtgggggagccctttccctccctcagtcccaccccaggagtacaagtggctccaggccccaggtcccaccacaccacgtacgggagccgaactctgttggcttacctgtgtttggtggccaagacacctctaagccccatgtttattctttaaatggcctctggacctcaggaagagagatactgcagctttccaaacagtgtcataca

SEQ ID NO: 329307 - DNA, 476 bp, Homo Sapiens
  misc_feature (15)..(15): n is a, c, g, or t
  misc_feature (30)..(30): n is a, c, g, or t
  misc_feature (70)..(70): n is a, c, g, or t
  misc_feature (75)..(75): n is a, c, g, or t
  misc_feature (378)..(404): n is a, c, g, or t
ccccaaccccccggnagtaacaagtgggcnccccgggcccccgggtccccaccaacacccacgtacgggnagccngaactctgttggccttaccctgtgtttggttggcccaagaacaccctcctaagccccctgtttaattccttttaatggccctctggacctcaggaagagagatactgcagctttcccaaacagtgtcatacacatataagacaaagacaggcatctgatgttaacaaaaataagtaacaaagaaataggattaaaccaaatctcttctcacagcatcctatactacatcctccttcgcttagcagaaaattgtacgtacacaaaaatacaaatacacaattttgtagaacagtctgattttannnnnnnnnnnnnnnnnnnnnnnnnnncgagtggcaggttagttcattatatagagctttttgcacttttggctcatatgcaacaaggcttctcgtgct

SEQ ID NO: 329308 - DNA, 376 bp, Homo Sapiens
  misc_feature (57)..(57): n is a, c, g, or t
  misc_feature (86)..(86): n is a, c, g, or t
aatatacaatcgaataatttcttaaattagaagaagagtagaacctaaattgaacantaagctggcttttctcaaagatgaacaanatttatataccaaaataaagctggaaaaagaaagacaaggaaagtttggataggacttactaatgaataatacaccgtagcagttggtaatacaacagggttactgtagtcaatagtaatgtaattgtatattttaaaataactaaaagaatgtaattggatcataacataaaggataaatgcttgaggtgatggaaacccttttactctgatgtaattattatgatttgcatgcctgtatcaaaatatcttatgtactgcataaatatatatacctactaggtactccc

SEQ ID NO: 329309 - DNA, 351 bp, Homo Sapiens
  misc_feature (32)..(32): n is a, c, g, or t
  misc_feature (35)..(35): n is a, c, g, or t
  misc_feature (83)..(83): n is a, c, g, or t
  misc_feature (112)..(112): n is a, c, g, or t
ttagataattagttccaggaaagtcacctaanagnaacaacaataaaccagtaaccaacagtaaacagtaataacaacaaatnccctggtaggggaagaatcctgatttttncgagttgtcacattaccttatttaaaatgtttagttttcaagagactgttattacaaagcatgcaaaaaaccacttaagtatggtccacacataggagagaaagcagtaaattagaaaatgttccctgaggaagcccaaatgttagactttagtattaggcaaagactttaaatcagccatttaaaatatgttcaaagggcctggtatggtggcttgcacttactgaggagggacaatt

SEQ ID NO: 329310 - DNA, 749 bp, Homo Sapiens
  misc_feature (259)..(299): n is a, c, g, or t
  misc_feature (641)..(641): n is a, c, g, or t
  misc_feature (649)..(649): n is a, c, g, or t
gcataaatgccacgatactttattgctcagtgttcctttgaaaataagttagcatgattccatgttattcttttatcaatcatattattgactaaagcatatcactgattaacataaggtaaaaataatatccactcatattcttgaagagaagtgcttgcagtattttatgaaaacatttgtgcacatttttacttgatttaatggacaatttcatatttttctttaaaatctacaaatgtcttaattcttaccattnnnnnnnnnnnnnnnnnnnnnnnnnnnnnnnnnnnnnnnnntaaaccccaacaaagcacattaattttaatacagaacatatattaagtcactgagtaaagctcttttttatgaacacttttggaaagcttgcattcagttctagcacagctctgttatcaatctgcgaacagaaggacacatcaagtaaagaaagatctttacaagattccaggagttttcttaaggatgccggacttaccattcttgttcctaatatgtccagctgctgtaacctggtacaattacatgccaattcatcaatgtctgtgtcacacacagatctattagctgtaagaaagagtttttgcaagtttgggagctggtgtgccagtctggtgaanacccggtngtgtctgcagagttggcaccagccaaggtcaagctcctccagtagtggacacccagaagccagttctgctattccattctcagtaatattcttacatctc

SEQ ID NO: 329311 - DNA, 333 bp, Homo Sapiens
  misc_feature (242)..(252): n is a, c, g, or t
  misc_feature (303)..(303): n is a, c, g, or t
tagcccttgttagtatttagtataaaataattggtgtctgcctcaaaagtaaggatttaattgtaaagcaattccttctttctgaaagataactttagggaagaaaaccttatcttatgtttggggatatatagtgggacagttgcaatcattgtatatattgggtgtgttagagttgatagcctcgttaagtttctcttatgtgggaaaaattatttgggcattttaattcacttcattgnnnnnnnnnnnctccttttctacaggggctttcattcatatattttaattttccttgtcctncttttgactaggtttattgaggggccatgc

SEQ ID NO: 329312 - DNA, 403 bp, Homo Sapiens
aattttgttcttttttaagattgatttataacgtttaaattagacgtacggtatgtgacactccatttgtactcttgttcctagacccacaaaagttaagcgcaagattgtctgaaaggcttatttctccaaatcatctcaatctaaataaagcatttggataagatcctttaagctaatagtattcactaaactgtaaaccacaagttctatgagtttcaaattaagacaaattaatatacaaggtatctgtaaagtcaagaaggcataaaaaattttaaaggtatggctaggctacatattcatataatatggctcattatggtttttcttctatttcccatataccttttcagggaaagtatctcaaagtttaaacagtaagtccaattggttaatctag

SEQ ID NO: 329313 - DNA, 334 bp, Homo Sapiens
  misc_feature (143)..(208): n is a, c, g, or t
  misc_feature (214)..(214): n is a, c, g, or t
gtgtgagccacagcgcctggcttaacgataactttttaaatacaatttacaagaacaaattgttgcttaactagacaaactgcataaaatctattttaaatgatgacagccattgtttttgtgaggaaagatggaaactcacnnnnnnnnnnnnnnnnnnnnnnnnnnnnnnnnnnnnnnnnnnnnnnnnnnnnnnnnnnnnnnnnnnaattcnaagaagagaggtgtttggggtcatggggaagcccaatcccctaatggaatggctttgggtggccactggtccctttcagtaatgaggttaatcccccccaatgggttccctggattaatt

SEQ ID NO: 329314 - DNA, 515 bp, Homo Sapiens
  misc_feature (71)..(71): n is a, c, g, or t
  misc_feature (76)..(76): n is a, c, g, or t
ctggacccctatggtgaaagctcctagtgaactccaattaggccccagggttccccggaggaagaaggggngaganaaagggggggtagtttcccaaaagataagtaggggaccaaaaaagtcccacggggccctatgagccggtgagactccctgcccctgattgtggcaaagcaccctggagatgatagaacttccctagggaaaaggctgcatggagtcccccagggatgctgggcccctggtcaccaaggctcccctgggaaggtctcttgtaccctggggcacacagaccaacacttctgaatttgcaagcttaagagcatgtatgagcagaacctgtgcagaccaaggcttagagggctcacctcaatgttttgcactgtgtgagaccccggaccttttcgtgattctggagaggggaacaaaccataataacaacaaaccaggtagcaggatagagactcattctcatctattttggttaaaagaaaataaatgtatttcttccaaaa

SEQ ID NO: 329315 - DNA, 422 bp, Homo Sapiens
  misc_feature (174)..(174): n is a, c, g, or t
  misc_feature (177)..(177): n is a, c, g, or t
  misc_feature (394)..(394): n is a, c, g, or t
  misc_feature (408)..(408): n is a, c, g, or t
ttgtcttaataaactgattttattagaaaaaggcactttaatgccaactgctggaaacacgcatagtaaatacatttgcacaaccaaacacagtgccctccagggggcaggggagaagaagagtaggagagggtgatagttgttggcttaacaaagaagagaagagcgagaccnggnccaggggaggtagttaggtcaagtggatggttctgtaccaaggacacagcaaaggtcctcaggcactgattcacattacccaaagtcaccagataatagagttgtttccgtgggctgacatttcttagccttgccctcaaacttggcaggagggaggcaagctcgtttaaagaaggggagaggggaggagttccagggcaattggcctagggggttngctttgagagagantaggttgacccttc

SEQ ID NO: 329316 - DNA, 408 bp, Homo Sapiens
actcaaaccatttactgttcattgtatgcataaaatatttcagaaatcactgtcttagtaacttatcctgcaacaaagacatggaatttccatatttcccttgtatggtggttgtgatgattgggttaagtgactgtcaaggactcagaatactgcctgccatgtgaagagctcaatgaatattggttattaccatcttgttgtactcgttggaaacagcagtggcattttttggtttcctcattacctaccccagttgccttgcatgtggctcaatatttagccattgactacaattcagggttttcacatttacactctgggctttttatccagtctggaatgagttatctgaccaccagaacttccagtcctttgggcctcactttcaggggctcgagtcccgaa

SEQ ID NO: 329317 - DNA, 444 bp, Homo Sapiens
  misc_feature (412)..(412): n is a, c, g, or t
  misc_feature (417)..(417): n is a, c, g, or t
  misc_feature (427)..(427): n is a, c, g, or t
tttttttgccagacaatctttttattgttcactgaaaaatgcaggtctgcaaagagtcaattgcattgtatattgaatgcaaggtctgatattgcaagtatatatgacatggtataacatataaaatattacatattttacacagtgacagtacccgcctcttctaaacactaaaatttaatagaatgaagtaaaaagcctattaaataagaaacaaacactgcaatcataaacaaaatgcactaagcaaaatactttaaaattgttgtgtgtgacatctatcttgtctacctggagttagggaatgggtgggagcccaggaaaaaaactgaggctaacaaaaacaggccaacaccctccggggaactcttcccggggaatcgggccgctgggtgcccgttcacagggtggnccccntctggatggncccggccgggggttcag

SEQ ID NO: 329318 - DNA, 381 bp, Homo Sapiens
gtttgggtcatttccacatgctttattccagcaatcaaaataattaaaaacatctcaaattattatacacatacaaaataggtacagagtcttttgcttcctcccacccctagggggaaaaactgctttgtgctttgggaagttgtctctgaaacccggggacagaggacgcaggacagactaggagggagccgggaggatgggctgcagctgtggaggagggtttcagaggagagaggtcggagagcagaggcctgagaagccagaggcaggtggagagagggtggaaagtgagcagcgggctgggctggagccgcacacgctctcctcccatgttaaatagcacctttagaaaaattcacaagtccccatccacaaaaa

SEQ ID NO: 329319 - DNA, 439 bp, Homo Sapiens
ggaggagtaccagatccagaagtgggcaacattgagtgggcccatgactatgagctgcaggagctggggcccgcaccccgccggcaccctcttcatcccatctctgctccgagagcacccacagtcaagcacaagctcctgaaggagtgaggcctgggcagagcacactcagcaggatagaggcagtgcagccacagctcccccggccttcagggcttccccagcctgtggggctggcttccttggcttttggggactcggcctcagcgtcaccctgagattccccccgagacacagtgcgctagtaacggctgtccggaggtcagcctgatttcaaccccaggtgcccctggcctggccagcagtgaatgtaggagatgaattgtgcaagtgactttctctcgactctgattttattaaatatttctccaccctggaa

SEQ ID NO: 329320 - DNA, 351 bp, Homo Sapiens
  misc_feature (293)..(293): n is a, c, g, or t
  misc_feature (296)..(306): n is a, c, g, or t
  misc_feature (323)..(323): n is a, c, g, or t
  misc_feature (333)..(333): n is a, c, g, or t
atatgtatgtttgtaggtataatatacaaatacagacacaaaccattacagtaattttgaaaacaactagaaagcttatactgtgttgacaaatatcaggttataagaggactaccccctttgttttaagcaaactttttctgctgaccgaatagctagggaaaaaactgggagttaactgaaatatttctaaccaaaatattacaaagttctaagggaacaactctatcttctaggattgagggtcggccaactatacccctggcggggccaaatctggccccggctggccntcnnnnnnnnnnngggggcaggggtctcantctggtccgnttcggggctgggggtgcg

SEQ ID NO: 329321 - DNA, 388 bp, Homo Sapiens
  misc_feature (65)..(73): n is a, c, g, or t
gcagttaagcccgagatcatgctactgcaccctagccctgagcgacagagtgagactctgcctcnnnnnnnnngaggcagctgggcagatttggcctgcagggtatagttggctgacctcaatctagaagatagagttgtttcttagaactttgtaatattttggttagaaatatttcagttaactccagttttttcctagctattcggtcagcagaaaaagtttgcttaaaacaaagggggtagtcctcttataacctgatatttgtcaacacagtataagctttctagttgttttcaaaattactgtaatggtttgtgtctgtatttgtatattatacctacaaacatacatatctttcagctactgaacacatcagaattggtta

SEQ ID NO: 329322 - DNA, 276 bp, Homo Sapiens
  misc_feature (24)..(24): n is a, c, g, or t
  misc_feature (34)..(34): n is a, c, g, or t
tttttaaccaaaatggcatttgtntggctgtcantgtcgagtatatatttattgtgttttacaaacatgagtatatatgtatgtatatgtataaaaccaaacttatatatataagaagtcaaggcatgtatactagatattttaaagagttatttatcaagggaaaaagatgtgtgttataaagtaaacagagtctatattttctatataatgtagatagtcaaacatagcttataaattataggaggttttggttttcttttttattattaaagg

SEQ ID NO: 329323 - DNA, 487 bp, Homo Sapiens
accattgcataaggaatataaagacttttccctgtagttatcttacagactggagagagtgctagtgaatgcttttgtcttcaatgcccatctcttggaaatattgaaggtggagtagcaaccgggcattatattatctcttggaaaaggacctcagcaatggagaatatccccatcatcacaactgtcatcactctgccgcacgtgattgtggagaatatccctctccatgtgaatgcagtgtgtcatctttctctgtagatctgccgtcatttgggcgtgtcagagagtcgttacctgtcaagtatcacctacagaataagaccgacttagttcaaggatgtaggaaatttctgtgggagcccagttgattgccttcatgtttttcaggtcttcaaacaggtttcgatttacgtattcctcctgggcacgggaggcagggaaatggttattataattttctattcctctggatggctgggatacc

SEQ ID NO: 329324 - DNA, 668 bp, Homo Sapiens
  misc_feature (518)..(518): n is a, c, g, or t
  misc_feature (527)..(527): n is a, c, g, or t
tttacagcatccagagtacttttattgccagaatccagatacagcctgctcagagccccatgtgggtcactcaggaacaaggggagacagatgccaggcatgtatgcaacagagaaaatccagctgcacagaaaccctgtgggagagcagctcagtccagcctgaagggttctttgggaaccccacctagaggctgtacccttttctcggcctgtgcgagtcacccacttagagcctactgccatgaaggcagccctgactctccatgcctgctgccacagggagatccatggagcaccctggggcagacagaaagcccctaggggggcctcaggggacccctggctctctcagggtcccattcaagtttctgggctagtcccagcactaagctgggtgctggccagggtggataggagccccatcctcagccctgtgctgacccacttggtactagtgagaccctagggcagggtggcagtgtgatggtggggttagcaagaggtgcagctcagggnaagctgcgnagagccttggctgcttccttggattccctttctccataggttcccagaaggccatggctccaacccctgctctcatccttggaaccacagtcccagggtgaagggaggcagcttcagtcctggggccaatagcacatccga

SEQ ID NO: 329325 - DNA, 456 bp, Homo Sapiens
  misc_feature (410)..(410): n is a, c, g, or t
atttttttacagcatccagagtacttttattgccagaatccagatacagcctgctcagagccccatgtgggccactcaggaacaaggggagacagatgccaggcatgtatgcaacagagaaaatccagctgcacagaaaccctgtgggagagcagctcagtccagcctgaagggttctttgggaaccccacctagaggctgtacccttttctcggcctgtggcagttcacccacttagagcctactgccatgaaggcagccctgactctccatgcctgctgccacagggagatccatggaggcaccctgggggcaggacagaaaagcccctaggggggctttcagggggaacccctgggcttttttcaggggtccccatttcaagttttttgggggttagttcccagcanttaagctggggtgcttggcaagggtggaataggaggccccttctta

SEQ ID NO: 329326 - DNA, 429 bp, Homo Sapiens
  misc_feature (205)..(205): n is a, c, g, or t
  misc_feature (350)..(350): n is a, c, g, or t
  misc_feature (369)..(369): n is a, c, g, or t
agcttcaataccctgtctctaaaagttaaataaataaataagaataaattaaaatccagatttccagcatcttttccaaaaagtgtcaaaagatcctaggacactgggcccacttcctcacatggcaacaagcaagtggagctgagcagcaactgctccctttagtttgggcccgtgctctccagttcatcaaggcccagcctanctcatcctagtacataacaggcatcggacttggagaccactgaggaagatgctcaaacagaacaataataataatttaatggaaggatttgtttacttcttttttgggccagttttttgtgggctctattcacacatttaggctnctgtggacttctttaagtnaacatattttaaaccacttaaggcctctttaaatttttaacacaaggctggaaatatggc

SEQ ID NO: 329327 - DNA, 427 bp, Homo Sapiens
  misc_feature (15)..(15): n is a, c, g, or t
  misc_feature (21)..(21): n is a, c, g, or t
agggaaacaacaggnaggaancaggaaaagggaaacaacggggaaggaacccaacgccccagatctccaccgtggtcgcccagaatgaaccccatatttagtcatttggggttgccagaaagaaggggatgcaagccccattccccaggacggccttccacccggcggggcaatgaagggaaatgactgacgtagggggctccagcgcaggggccgaaggagatgcgacaccagggagaggggccccgggcacaggcagcaaggaaagaggtcagcggagtctgagagagaaacgatgaagaggggagaacgggcgccgggaggggggccgccgcatacagttcccccgacactcgcaccctggaaggcaccagcccctcacgaccaacctgccagacgctgtgaggaatccccgggtcagaatgac

SEQ ID NO: 329328 - DNA, 284 bp, Homo Sapiens
cccctgccagtgagggcaaacagggctggtgaaacctaggagcaagcatgatgagccccagcctgcagagtttggggcaaggaacgaggatggggcggttggcttggcatgattgttgaaccagaaaatgggccctggggagggcagagctggagacactttgaaacgccatgcttggtaggtgtgggaatggggacgcgttctgttcagaggtcatcccggaagcctgccgtgtgcagactggaggcagggaggattgtttgaaggttacgcaagagtcccag

SEQ ID NO: 329329 - DNA, 429 bp, Homo Sapiens
  misc_feature (29)..(29): n is a, c, g, or t
atccttcccttccaaacatacatgccagnaacaggatgaactatcaaaatacctttaatccaagttgaatgaggatactgaagtctcgaacagcccatgttcccagtagaggagtttctcttcatgaaatctgctgcgagtctgctgctgtgccaggctcaattttttcaccgtcttctctagttcagccatcatcacacggaagaaaacaacaaaagtatgcctggtcagtgtagggaatgtggaggaagatgcatctttaggagagttgatcagttctgggacaccaataccagcaatctcctctatggccttcagaatgctctctgtgtgctccaggtagatacagagcagagcatggagctggtcattagagatgttgctcttctctttatccccacttggccacacccgacagaggaattgtct

SEQ ID NO: 329330 - DNA, 448 bp, Homo Sapiens
  misc_feature (35)..(35): n is a, c, g, or t
  misc_feature (40)..(40): n is a, c, g, or t
  misc_feature (57)..(57): n is a, c, g, or t
  misc_feature (104)..(104): n is a, c, g, or t
aagaagcctgtgggggtggcgataagggggaaatnataanagggaaaaagcacagtncacttgttaatgttctgggagtcaaatactttcccatgaatcttccntcccattggtgtttgggtcccatccatttttttcctcaccacccttcagtgctgaatatcacaacttccttctacttctttagaaagtgtgttagtgaagactaaggggcttcaaacacatgtgctggtggagtgagccaagggttaagagtgtttcacgcctgcctattgagaatgagaatttgttgaactctaatactccttggaagccaagcctcagactttttttggccctattaacaaaggcaaactggaactgcactggcatgttcccctagggcactggagagggtgggcccgagtgaccagtgctggtctttcaactctcagatctgtgattctat

SEQ ID NO: 329331 - DNA, 458 bp, Homo Sapiens
  misc_feature (48)..(48): n is a, c, g, or t
  misc_feature (54)..(54): n is a, c, g, or t
  misc_feature (76)..(76): n is a, c, g, or t
  misc_feature (137)..(137): n is a, c, g, or t
gcttactatcaaactcaaaacacaaaatttacttatatatcaaaagtnaacggnaggtcaaaggaaagacaaatantgagttaatgggttatgttaactttggctttctcctaagataataactaagtatttaaatncctgaatgaaaaagagataaagggagaccttggcaatgaacttcacccacccaaatgtcatggtattttatcaatttcattaaacaccccccacccaatgtcttcaaattgatgcttctgtacttttcaaagcactttcatatatagtctcattttacctcaaaaccaaatgagataattggaaaaaacttattccaagtttataggtaaaggagcaacagagagaatgtactaaagatcagagctagttactgatggaactacattaaaatcaggtcttccaattcctaatcactacactatgctatgcttataagcaat

SEQ ID NO: 329332 - DNA, 719 bp, Homo Sapiens
taaaattttaaatcaaacactttatttccacataacaagcgcaaaaaactcccaaacactttaacaatacaattaacgcagttatgaattatatactactcaaagccccaaggtcagaaggtcaatcagcttaacgctccaaacatttccagacatggtttttcaaagctacctttggtttttggaaaaaccagtatggaagtcaatatacattgaacgcactgaataacatttgcttatagtaaggtgtccgacaacattagctcacacctggcaagttggagcatgatctgaagtcatacactgaaatccatacacaggtttcgcccccgagctcctgcagggagaagcgaggggccgtgaagggggaagaaaaggccagtccggggtgtggcgtttctcgctttgtaacagaggtatgagagtttaacactagtacactgtcaagtcattaagcttcatgttccacatggtttcttgctgaggcttgagatgggcacaaatggtggggaagatgaagtcacagaagagttttgagcaacaagatcccaaagatgctcagagagggtgggaaggagcaagctacagtttcccattgttctcacattatttcagggtgaaattgtgatgagttcagataaaatgttcaaatatttgcttagatttttaatcggttgctctatgagaaccctcatacatagcaagtttgaaacttttcc

SEQ ID NO: 329333 - DNA, 578 bp, Homo Sapiens
ttactctaaaattaacttttattgttagagacacatctttagaaaagtttgtaaatatcaacatttaccatcttattttttcctttgagaccaagcatcacagaccaaaagccacaaagtttacaataatttattattgttgcatgacatttgccagtaaaataaattatagaaactatagagtctttataaactattttgtatatcatattcacttcctaatgcttactgcagtaactgtatgaaatttaattagattacgttttagcattagtcagaagatttaaaaaatatgtaaaatgttttcacagtactttggatttataaaagaccccattattttaacttttgtgcaacctgtttgaaatgtataaaaaaccttttacaaaccaaaaggtggcgtaaggttttactgagttgctgaagacatcttactttcttgaatttctacttaacatccatgtggtgcactttttcaggcattgtaataagtgcaaataaataatcaattattgatttctaaaaatctataccaatagacaatactcaggcttggaaatattttgaacactcagata

SEQ ID NO: 329334 - DNA, 422 bp, Homo Sapiens
  misc_feature (406)..(406): n is a, c, g, or t
atatattctggcattcccttgatccccaaataaagaaaataagccaagttagatggacacacatagtaataaatttctgtaagtttaaaaagactagactaaaacatagactgctttatgcatcttttttcaaattagcattttcttctgtaggtcttcattctctgcatggctttgctcaggctgttccctctgccagggaatgcccttgctttcttttcacccgatggcaaactgctgctccaaccgcccaggaatcaggactaaagaccatctcctttatggaaggctttccaaggacctcctaggaggtaggttaatatggtatttccttcctttgtggttcctggctatggatcattccataaactcttacttacaggcctttatttctttgtggttttanccatctgtggactgtt

SEQ ID NO: 329335 - DNA, 487 bp, Homo Sapiens
  misc_feature (14)..(14): n is a, c, g, or t
aagggaacccctanaaggccaccacccccaaactaaccccccacagtaacggtggaagaaaaaaaggccaaggggaccaacccctcagacccggtggaattaccttaaattttaaaagccctgaaaattcccaatttgggggtgggaggtggaaaaggaaccccaattttcttatgaacagatatttttaacttaatggcacaaagtccttagaatattattatgtgccccgtgttccctgttccttcgttgctgcattttcttcacttgcaggcaaacttggctctcaataaacttttaccacaaattgaaataaatatatttttttcaactgccaatcaaggctaggaggctcgaccacctcaacattggagacatcacttgccaatgtacataccttgttatatgcagacatgtatttcttacgtacactgtacttctgtgtgcaattgtaaacagaaattgcaatatggatgtttctttgtat

SEQ ID NO: 329336 - DNA, 416 bp, Homo Sapiens
ataatgcaaaggtttttattcatctaaagaaggtaacataagaaaaatagttgagcaagaaagagataatattagaaggcagcaaatgacaatggacagacttaaacccaatgaggtcaataattacattaaacataatggactcagacactccaattacaagacaaatagtgcaggggggtaaaaataaataactaaataaataatcatgggctgtttacaaaagacataatttcagtagaaggtaaagaaaagttgaaagtaaaaggatagagaataccagacaaacattcatgaaagaccacatggagacgccatttagaaaaattacaggatatgagtctcctgagacatagagtacacgtagacagctcacaaggtctttttcccttttttcagagacagggtctgttgcc

SEQ ID NO: 329337 - DNA, 416 bp, Homo Sapiens
  misc_feature (17)..(17): n is a, c, g, or t
  misc_feature (27)..(27): n is a, c, g, or t
gttacccctttccctanttttttaaanggatggttaatccccaacctattccaggggaaccccatacttcaaaaatattaggaaaatcctgtccttatagtttctcctaataaatatcctgaaatcctcagtacgacatgaaagaatgtcagacccattgttattgttgaaagtcatttgatgaatggtaaattctatgaaaagtaagtgatttgcatgtataatatcaggaaaattaagcatcccaagtgtgactggacaaagagagcagatgcaccagtgcctgtgccataaagttccgaatcccccatgtgtctctttcagagctggccagaccggaaataaatcattctcataaattcagtgtgtactcagaacacatacacaacaacatagggagttgtatgactgatacg

SEQ ID NO: 329338 - DNA, 349 bp, Homo Sapiens
  misc_feature (110)..(110): n is a, c, g, or t
  misc_feature (262)..(262): n is a, c, g, or t
aagttgctgttaggactttattactattctcttttaggatacatcaacatttgaattttaccagcatatgtgacttagttttcttagtttttgtcatttttaagaatccnggcaaataattttaaataatttatttgttactaaaatttgatataaccttaatgatctttcagcacattatcaaattatttagccatcctaaaatacttgatgaataaattaatagaagttaatgtttctagtttgcctcacttttctgggnattattcttattttgcaggattaggtcttgccaactaccgatgccacaggaatttaattaccaattggcaaaggccattttcaaggg

SEQ ID NO: 329339 - DNA, 382 bp, Homo Sapiens
ccccccggcctcatttttggtaatttttaagtaagccgatgggggtttccaccccatgttggccccaggctggtcctcaaactccctgatcctccgcccagccctcggcccttcccaaagtgcctgagattaccaggcatgagcccacggtgccctgaccctaaaagcattttaatgcccacagagaaagccagctaaagggaggaggagcagtagatggattctgtcttctaagtgggatttgagaattgactggattttaaataattaataaaggtgttttacttaatgaacacagtttaagagaactgagttgattttacttcattttacctaaagtacaaaggtaagtgtgtttactcaaataatatgtgagcctttt

SEQ ID NO: 329340 - DNA, 418 bp, Homo Sapiens
  misc_feature (18)..(18): n is a, c, g, or t
  misc_feature (80)..(80): n is a, c, g, or t
  misc_feature (262)..(263): n is a, c, g, or t
tccccatttatttaaaanctttaaaaaagccaatgttaaatcacatatatgcctcattagaagttaaacaatgcggatgntgtataaagtaaaagttgcctaacctcttgctctgcctcacccttataatccccaccccactcaaggtaacacatcagtccctgttctttatttcctcatttaaaccttaacattgtcctcattccggagttttaagagaaaaagacaggataaatcctgtgatttagaaacataacagagnnaaatagaatatggaagttttccattcaattaaagttttctaaacccacaaagagataatgcgatttagctattgacccagaagcttgcggatctcttattttcaaataattgattattctaggttaatgaattaaacctaataatagtcagagtc

SEQ ID NO: 329341 - DNA, 453 bp, Homo Sapiens
  misc_feature (384)..(384): n is a, c, g, or t
  misc_feature (406)..(406): n is a, c, g, or t
  misc_feature (435)..(435): n is a, c, g, or t
tgcttttctttattttacaaactttttgctgcaagaaagaatcatgtttattgccagaagaagtaaaaaaaggtgtcatttatattttagaaagaaaaatgtagctgctgagaagcaaagcttagagcagattataaatactggaggcctcactcttaccattgtcacaatgcactcctcgccagccaacatcacagtcacaggagccatctcccaagggtccttggttgcatctcccatggacacaagaacatgctaagtgggaaaatcacctgcaaatcgtcagattctaacccatgttcaataactcatttgtcatttactagggtttgctttattggcacttaaattctccaacctactttctaagggaatccatgagtnctttaaacaggggggtcttggnatcacaaaaagggggcagggggtgcaggnagacagattctaggcaag

SEQ ID NO: 329342 - DNA, 451 bp, Homo Sapiens
  misc_feature (33)..(33): n is a, c, g, or t
  misc_feature (76)..(76): n is a, c, g, or t
ttatttcgcagttcatttcatttattatttttngcattatttctgctttttttggtctcctttccgaagggttttnatttagaggaacagctcaactccagctccctgggtgcaatgcgagcctgcccgcaccgagcgcgcttgcaaatatgccccccgccctttccctgggttacgaagtgcccctgtaccgcacggggagtgcacgaagacacgcgtgtgcacaggcggggctctgcgtgtgcgtaccctgtgggcactggagggggctgtcaggtcatatctgcccatacacaagatgggcacagccggggctggggcttcctggggtccgaatttccccgcggcgtctgcctaccacggggggcggaacttgaccagtggccctcacggtcaggagagtttgggggggccctgagggcaagggggacaacggggaacaagttttttt

SEQ ID NO: 329343 - DNA, 454 bp, Homo Sapiens
ttttaagtttccacaaatcattggtttattagaaagttcctttccctcattttacagcatatatatctctatcatatgtgataaagttaaatacaatctgttatgcttgtaagtaaggtttatttttatttttacttttaaaatcactattctggaagttaaagaaaatgcccctaggaaggcaaagaggcagccagagtatggctcaatctacaagctaatgggaagcagcacgaaaatgttaatactgtattatttatttacatgggctgaaacaaagaaaaatgagtcccttcacttacacagatgatttcatttttccagtgctagttatccaagaagtgatgcttctgaatcagatgagtactgaacaggtaggagggtgggagggcagtcaagagttgtgtttgcctgccactttcttttcataaactttactcttttgagaatttgc

SEQ ID NO: 329344 - DNA, 496 bp, Homo Sapiens
  misc_feature (16)..(16): n is a, c, g, or t
  misc_feature (36)..(36): n is a, c, g, or t
  misc_feature (60)..(60): n is a, c, g, or t
  misc_feature (83)..(83): n is a, c, g, or t
  misc_feature (117)..(117): n is a, c, g, or t
cggtattacctaaaantgtggccaggttaaccaggngtacctggctaaaaaatcctatgngcctacctaaaccaaatggcccntaatatccatctactcaagttccctaattccccntagtggggtaagtaagtaaaatctggattttttaaatactcaaaataaatatttacctggttttctagaaattgcctgcttccctactcactccatgcctgaaataattaaggattcagaagatagaaatccttaggccgagatggaaggctacaaggttaataacggaagaagttctatcatttctatcgtagaagtattcttttagaaattttccttttaaaaaatagctgtgaaattagtggtagtagggattcatttatcttttttctctctttaggtgactcatttttataacaaagtttgttccttcatcaatctcctgaatgcttacaaagtagcaccaacacatcaatatattgaacagtcttgttgaaac

SEQ ID NO: 329345 - DNA, 479 bp, Homo Sapiens
  misc_feature (44)..(44): n is a, c, g, or t
  misc_feature (74)..(74): n is a, c, g, or t
  misc_feature (86)..(86): n is a, c, g, or t
cccaacagggagattcgctgtgttaagaactcgagctgttgccnattattctaagagactgggtagccagtcanagggttaaaacnagcccttcctacaaggatttgaaaactctggtgctctgctcttcctcagcagacttctcgttgtgagtattggcatttatttctgattatgcacttcccctctttcttgaatgagttgggtgggctagctgagcccatcaaaggtatagctcatttgcttccttttccagggtttgccttcttcctgtgtctgggataattttcagttcatctcctttgtgcagtttctgagaaaggtttgtatgggcttagaggaaaatgatcgtgactaaagctcacagtcaccgctttggctccttttctataaaaggtggtttgatttgatctggcatgaaaaatattatcataattctcaaattcacagaaacgataagttcttgctctttcctgacc

SEQ ID NO: 329346 - DNA, 281 bp, Homo Sapiens
ccaacaaaagtagaactaccttgccatttcctttgcttagtaatttctggtctcattgaaattattattttttactagatgtttaaattaaaaggacaatatataactgggtacatgcatatgggaaaacaaaactatagtacagaaggctatataatagtaaatttgttacatccttcctgaatcaacctccacagctttgtgtatatccttctgtaaattttgtatgcatatatttacatagggattagtatgtgtatatatggcatgtgtgtttcttt

SEQ ID NO: 329347 - DNA, 474 bp, Homo Sapiens
  misc_feature (409)..(409): n is a, c, g, or t
  misc_feature (444)..(444): n is a, c, g, or t
  misc_feature (449)..(449): n is a, c, g, or t
ttaagctattaaaacatctatttattagctcaaatttctacaggtcagaattctggcatggagtggctgcattctttgtttaagctgaaatcaaggtgttgtttggccgtgttctcacctgaagctcagagttcacttccaagctcatttttgtccttagcagaattgagtgtcttgcaattgtagaactgaggtcttggcttgctgtctgtcagcaggggactgctccctgcttctagaggccaccggtttccctcgttatgtggccccttccattttcaggccagcaataatgtgttgaatacttcctatgcttcaaatctctggcttctgctaccagctggagaaaaactctctgcttgtagagggctcatgtgatttacttagtctttgtcttaaggtcaatttnatttgggtacttggggtttttaattgtatccggangtttnccatcaagggcaataaccgtatttt

SEQ ID NO: 329348 - DNA, 505 bp, Homo Sapiens
  misc_feature (76)..(76): n is a, c, g, or t
  misc_feature (98)..(98): n is a, c, g, or t
  misc_feature (115)..(115): n is a, c, g, or t
acctttcctgtgttgtaacctccgatgcttaaaatggcaaaccagccccctctagccacctccatagctctaatcnatggtactgaggtggcccccantggccttcctgtggtanccccactgccactctccatggtactgaagggatgacccatttgttttaacatctctctggggtcccaaaagagtcctgtgaccttagaatcacaaacttttttcgagcaggaagggactaacactataaattagtccaatccccttattttactgatgagtaaactgggaggttaagtgatttagtaaaggttgtagggttatcaatgttcagactaggcctacaatagccttgtacccttcagtcctattctaattcaccttttgtgacactattcagtaagcctggctaggctcttagtcccaggaaaggatccagaggatgagagtgggtgccctaatttgaagctacagaaatacacatattaagtggtagtggaggtcgtctagt

SEQ ID NO: 329349 - DNA, 413 bp, Homo Sapiens
  misc_feature (393)..(393): n is a, c, g, or t
attattattatactttaagttttagggtacatgtttcttattagactttaaggtctgtgttgacgttaatgccagagaggtataatgaggcatgtccaacacccacttccccttatggcctgaatcagtctctcaggttacattttaaaagcgccctggctgagaaagtccattgagatagttggggggttgggggagaggtgcttagaattttatttttggtttacactaccttcaacatgctcagaacatttacattagtctacagttggggcaaaatcatctaacataaagcctattttttaataaagtgttgataatgtgaaataaggtgaggataataattacaatctcatgtaatttttggaatactatactggaaagtaaaaaccnaaatgggttgtatggggtac

SEQ ID NO: 329350 - DNA, 187 bp, Homo Sapiens
  misc_feature (34)..(34): n is a, c, g, or t
aagggttcccctttaaaaaggtttccactttttnccccctaatttatattagaatggcaatgtatgccttaacacttgtatttttataagtttatgagtttttaatgttcctgaaatgttattttttacttcaaatgtgttgaacatttaacttgttaaaacattcccaggctgggcacatgtgtca

SEQ ID NO: 329351 - DNA, 378 bp, Homo Sapiens
  misc_feature (279)..(334): n is a, c, g, or t
cagcctggaatgttttaacaagttaaatgttcaacacatttgaagtaaaaaataacatttcagaacattaaaaactcataaacttataaaaatacaagtgttaagcatacatgcccatcctaatataaatggggaaaaaagtgaaacattttaagggaaaccatataaaaatgaggaaaatttaaataatcaccaaaaaattggagaattctgatttcttcaaaagcataattttgcataaaaattgcattactagtatcacaactgagctgtgagcannnnnnnnnnnnnnnnnnnnnnnnnnnnnnnnnnnnnnnnnnnnnnnnnnnnnnnnggttcacagcaacactgagcagatttcccatattcccccaccct

SEQ ID NO: 329352 - DNA, 555 bp, Homo Sapiens
  misc_feature (150)..(172): n is a, c, g, or t
gatttatcttttactttcctgattattcactgaccctcatgatcaaagcgggaattcttctatagtcaggcaagtctctttctggaaaacggctttaggcagctcaatactgagtaattttgacgggtcaaattttaacataggtttcgnnnnnnnnnnnnnnnnnnnnnnnatcttgaactgatggagagcaataggaattctttgcttagattactttaagtagtggttaaaactaaatatacagtcattaaaaaattaaagtacatcatgggatctaggaattctaaggaaaccgaaggaatctatacctatttaaaggcatacttaggtcccagtttgggcaggacttaaaacctaagcagtgactaattttctgctaacaaaaaggttatatcaaatacctactgatgttccagttgacactacctgtgtgtcaccaaaggagtagcaggacaaatggacttttgttgaatttttaaatatatttttttctcctgtgaaaattagttttttaccttaattagtttagtttcaatctccccatcggaggct

SEQ ID NO: 329353 - DNA, 438 bp, Homo Sapiens
  misc_feature (340)..(340): n is a, c, g, or t
  misc_feature (378)..(378): n is a, c, g, or t
  misc_feature (389)..(389): n is a, c, g, or t
  misc_feature (403)..(403): n is a, c, g, or t
gaaatcattgtcttacttgaaagttttctacttaagattccacaattaaaagaacaatgtttcctttaaggaatagtgctgcgggggcaggggcagaatttcttaaagcattttggggagtggtttaactaaataacctacatatagtagtgcacaagtttccaacttattaatagttgctttccagtgagtttttagctcctacattttttttggaagtaaatgtgatgtaattaaattaaatattctagcaactaacaacaaaaggctttttcaacagataataataaattgaactcggaaactgtaaaaagaatgaaggagaactaataggaaattngatatgggaaaggtgtctaaggacaaagtgaagtaaanatatttgtatnaaaactatgggacnttgggcccgggcttcttgggctcatgcccgttaat

SEQ ID NO: 329354 - DNA, 409 bp, Homo Sapiens
aaacccacagttaacaaaaaaaacaggtgaagtagaaaactggcatggaatctggaaaactgtttggcttggaattaaacatgagtctctagcccaggacatgaagttcgagtaaaacccttacctcactctctagcctcttctgagacctggctccccaggcagtcctcctgccacactaacctcccttctttccacttcctcaaatccattatgctggctcttgaccaagatttacataatgctgttggcctgcaatacctttccataccaatccatccctatccatttctttgtctcctgtacctgctcagagattatctcaaacctcttagccttcccctaactacccagcacagattagaattttctgaagatatattcttggtctgtatttttccttcacatc

SEQ ID NO: 329355 - DNA, 469 bp, Homo Sapiens
  misc_feature (49)..(49): n is a, c, g, or t
  misc_feature (59)..(59): n is a, c, g, or t
acgggataccaaaacagccccggtgcaaccccggtgaagccccctcaangaaaaatttncctaccccagaataatccaaatttttaagaatgtgcctacaggaaaaagcctgtcacattgccattaggttagcactgtgacttccatggaaatggtcaggtaactcaattgccccagcccaataatacacaggcataatttagttcgcttagagttaagaggacaaatcatttaaaaaatgtcctatttgagtttgttgaaggcaagcaaggaactgtggggcaatggacgattcagaggggttataggagctaagctaagaataaaatgggcatcaaaatactctgtaatctttatagaaatacttataattaaattatataatgctctatagtttacaaagcactctcacttatagtcttttttgactctatgggagattctataaagagatactattgtcttaatt

SEQ ID NO: 329356 - DNA, 424 bp, Homo Sapiens
  misc_feature (19)..(19): n is a, c, g, or t
ccttccagtggaattttgnataaagggcctcccagacccctttggccgttgggagacgccctgtttgggatccttcaagtcccccatccatagaaaaattggaaccacagagttgttcctgcctgatagttttggggatacgtcccatctttttaagggattgctttcatctaattctggcaggacctcacccaaaagatccagcctcatacctacatcagacaaaatatcgccgttgttccttctgtactaaagtattgtgttttgctttggaaacacccactcactttgcaatagccgtgcaagatgaatgcagattacactgatcttatgtgttacaaaattggagaaagtatttaataaaacctgttaatttttatactgacaataaaaatgtttctacagatattaatgttaacaagac

SEQ ID NO: 329357 - DNA, 449 bp, Homo Sapiens
  misc_feature (252)..(252): n is a, c, g, or t
  misc_feature (345)..(345): n is a, c, g, or t
  misc_feature (350)..(350): n is a, c, g, or t
  misc_feature (362)..(362): n is a, c, g, or t
  misc_feature (392)..(392): n is a, c, g, or t
  misc_feature (413)..(413): n is a, c, g, or t
atgttgtcataaaagagcagcttgtctatctctctgctatgtggtattagatacgggttagggtaggaaggcagaaacatctagaatgtagtatttttcacgtagcatatctcacccgtgtttgaggaaacattagtttcattaaggtacaattgacctgcacaggtagttaaaagcattaagtaggggttaaactaggatggaaataataataagataaactttgataaatgataaccagtaacaaaaaantttaacttttatatttctacatcaatgttttgggttctcttttgaattgaattttgcctgctctctttttagttaattgagtaaattattgcnttacntggtattgagcnggatgcctttttcccggggtttcagcgccntttgtggggggatttttcccnaaggtatgtggggtgtggcctagccgccgaccgccc

SEQ ID NO: 329358 - DNA, 436 bp, Homo Sapiens
  misc_feature (365)..(365): n is a, c, g, or t
  misc_feature (421)..(421): n is a, c, g, or t
ttttgggaatactagcatccctttgtatgttactaagtttgatttaaaaaagaattctatggtcaaataatcttggaaaacaatgagtaaaataaagttaaatatatatctttacggcagactcctccccatctctacctttctcctatcactatgaaaactgtcacaaattgcaattggtgcaaaagagtaaggttttctcttactcctatccctacttgttctatttagacttataagcaaattcttttgaaagttttctcagagtctttaaaaacatgcattgtggattactaattggaagacctggtattattttattcttatttaaagtaatatttttttgtggagggatcatattcaancacctcaggactggggaaacatgttctacaacgtaagacttacttactgttcaggntcactaattgttccg

SEQ ID NO: 329359 - DNA, 191 bp, Homo Sapiens
ttaaggaagaacatattttaatggttgaaacctgtctttatgaggcgattatgacagcaaaaaatattataatgaataacaatgcatagtctacgctttgtaatatttcatacaataattcctttatcatttacatctcttaatgctagaaaagcattctgaagatgccaagcgtaagttgcaactgaggt

SEQ ID NO: 329360 - DNA, 367 bp, Homo Sapiens
cttaactggcaaaactccgagtttaataaatgacgggaaacgcgccctttcgagaaatgcctcaaacagtagggaagaaggaattggcagcctagtgaaagcagagccaagagcctggaattggcatagtgcgtgtcgccttagcctggatggtcttggcagcatacagttggattggcagaagtaatcccaagggctgctggcttcagttttgatagcctctttggagtcttctcagaagtctccaaaatgatagtgtaatcttaaaatggctagctttctgcttatgaaagaggcaagagagattagcacttttttaggcttaaggtactctttaagaaacaaagggccaggcgcggtggtttat

SEQ ID NO: 329361 - DNA, 342 bp, Homo Sapiens
  misc_feature (292)..(292): n is a, c, g, or t
agtagatgagttttatggatgttgatgtttcttaagtgctcaaaacagttggactttttcctctaattattccaatgcattattttatctttgatttgttaaattaagaaacatttcagtatgttatcaactcctaattagagaggtctctattaagggccttttttgaaagtcataacatccctgtttctaagggaaaagggttgtgagctttgggttctttatgcttaaggctgttgtgaatgcagctgtggaggggagacagatgtctttgaaactcttcatttctctngacccaccccacttttgtattgtggaggggcccacccctcattcttaaaa

SEQ ID NO: 329362 - DNA, 510 bp, Homo Sapiens
  misc_feature (324)..(333): n is a, c, g, or t
atctaacacatttaattttggaacaaaggagcaactcctttaaagtttgagagtcgcataaatatttcatatacagcttaaacctaagctttgtaacgattatttttgagcagcagaaaaggaaggctagagaaatgctagagatgtccttactagtgacacattcttgctgaagaacaagttctctggaagtgaaactcaaataggagagaacaagagatacaggtaggtatcagttctgctagggtcttcagagagaccgagggccccaaaacagtgctactcaaagatgatctgcagacttgtgctggtcagtgaacaacnnnnnnnnnngttcaccagtctgtgacatggtgaattagaaatttgagagtgtttaaaaactttttagcatttcaatgttgctgtgatatccaagtacatgatcaatggacttaacctacagaacagtctgggccagtttggggtgctgtcaaacttgccgggtccggggcacacagtgtgaactcc

SEQ ID NO: 329363 - DNA, 1039 bp, Homo Sapiens
  misc_feature (997)..(997): n is a, c, g, or t
gttattaatgttagtaatatattgttatgttttctaaattatttttctttaagctgacgtggctttttttctgtggctcccagtgggtctacggaccttggctgacatatgttggtaggtactctggtcagctcagctggctgtcctggttcactcagaagataagtctctccaaagcaaattcacatgcattatgagtcgctttgagcttctgacatgtcacttgccccgaggttaaaagttttcaccccttgaagaccttacatgttttatggtattggtgaggaaggaaatgttctcaaggtctcaggctatttgggaaattccaactcctataccttaccagagcatggaagagcccagatctgaatgtaaaacgtctctgttctgccagagatggaaaaaatacaggtatacttgtgatatagtcatggggcttcagtgtcactattttctccttaaagctccagccaaaaactggacaaggatagagaggaggagggaagaacaaaagagcccttctctatgaaccttgtgccttctgtcctaccagttttcttttacagattctcacttctgctagcctagccagggcttactccaggaatctaaatagatgccctagtccactttatctttgttcccaaggcactcatttttattttgattttgattgaatgtgagcaggttgacctcaggtcacactttgttccaaaaacttttggaattattccaggacttgtggtggagttatggtactctagggcagtctttctcaaactatgtatggtaaaggaccaggttttttgttttccagtccttcacttatcaatatgcattcctattggccatgacaggtatggagttcacactgtgtgcttgccgacccggaaggtttgacagcacccaaactggccagactgttctgtagggttaagtccattgatcatggtacttggatatcacagcaacattggaaatgcctaaaaagtttttnaaacactctcaatttctatttcaccatgtcacagactgggtg

SEQ ID NO: 329364 - DNA, 596 bp, Homo Sapiens
  misc_feature (12)..(12): n is a, c, g, or t
  misc_feature (396)..(396): n is a, c, g, or t
  misc_feature (508)..(508): n is a, c, g, or t
  misc_feature (516)..(516): n is a, c, g, or t
  misc_feature (530)..(530): n is a, c, g, or t
  misc_feature (539)..(539): n is a, c, g, or t
  misc_feature (547)..(547): n is a, c, g, or t
  misc_feature (556)..(556): n is a, c, g, or t
  misc_feature (568)..(568): n is a, c, g, or t
attcggcacagnagtcgctgctaccagtgtgtcaaatttcttgtcactcttgctcaaaagtgtcctgcagctaaggagtacttcaaggagaattcccaccactggagctgggctgtgcagtggctacagaagaagatgtcagaacattactggacaccacagagtaatgtctctaatgaaacatcaactggaaaaacctttcagcgaaccatttcagctcaggacacgttagcgtatgccacagctttgttgaatgaaaaagagcaatcaggaagcagtaatgggtcggagagtagtcctgccaatgagaacggagacaggcatctacagcagggttcagaatctcccctggatgattgggtgagtttgagaagtgacctttgatggatgtttgantccctaggagggaaccatgccccagccttgaggagggatttcaaggacaccattattgggtggttccggcacctttctttgggattccggattttcgaaccttttggaaggngccggggngtttggattggggnaagttgctnttgatttngggctgttnctgtattttttnaagggaaggcttttttaagccccttggt

SEQ ID NO: 329365 - DNA, 713 bp, Homo Sapiens
aaaaatacatgtcaaaattttcttggactcccctggcaagcaggtatacttcaagagcacgggagcttttctttcaagagtccacatttccaggaaggctggtgagagcaaacgagggactttcagtaacctggcaaggcagaataaagtgaacaagctggaacgaatccccctgtgccctggcttcatcgggactacctgcaggctgatcagggtggccagccacaaacacctcgaggccttccattcacttcacactgcagcactactcagccctgtaaacacacggttagtgcatatgctgagctgagatcactagagggcagcgctggtaactctttggactcacattccagaggaagcatcttgttttccctcagctgtggaaattctttttggaaagcttaagagcaaggctgccctttgcacacaaggacatgctgaccgttatacctgctgtagatgcctgtctccgttctcattggcaggactactctccgacccattactgcttcctgattgctctttttcattcaacaaagctgtggcatacgctaacgtgtcctgcagaagattcaaacacaagacgacaaagttagggcccattcagtggcagcagcaaccgccagggaagactacctttcatctgaccttcagtgggaccggaggcctgagagtgaggccttcatcacagtcaccagaaccccctcaac

SEQ ID NO: 329366 - DNA, 486 bp, Homo Sapiens
  misc_feature (415)..(415): n is a, c, g, or t
  misc_feature (442)..(442): n is a, c, g, or t
  misc_feature (445)..(445): n is a, c, g, or t
  misc_feature (471)..(471): n is a, c, g, or t
ctcttttcaaatcaaattcttaggtgataaaatataaaatgacctctttgtccatttgagctgggctggagagaaacttgacattctcttgtctgcacagatcctaagctataccatccaggtggcacggcactggaggagagccttgttgcagctaaaacctcacataccagaagatatttacttttgttttataaaatttgcagttggaataattatggctcaggatatgtaataatttcctacctctcattggctggaaggttacttaggccatgataagccttccacatttcagagaaggaagaaactcttaaacactggaaaatatctgatagtcattctgcaagaggtgcattatacaaagcaatgcataatatgtttatatctatgggtattacacaaggttcctttnaatgtatttgaggttttttcaggagtnccngggccttcccttttaggggcagcccnctcaggcttgttccc

SEQ ID NO: 329367 - DNA, 595 bp, Homo Sapiens
  misc_feature (405)..(405): n is a, c, g, or t
gtcttctggaatactattttttctttcacaaatcttagagaatccagggggcagaaattatttctgagttttcctctcaataccagcatctgattggctgaccagcaatgtacctctgagaaatggaagtcgggttgagtgaacacaatcttaatgcctcaaagggttagctttccaaaggaagggtataccaggagattcctctcagccccagggcatccacctgctcccttgagaggctacactccaacctcagattgtcctctgtctcccattcccagatacccagagttccattccagggccagggagctgaaatttacttagagattttaggcatacacagccacagttggatatcttggatttattccccagacagtacttgaaacccgggaccgggangaaaaccgaaaggtggctgaggacacatcaccctgtaaagtttccaaagggaaaccttgacccaaaaacattctgataagatctctgcgcctagggaagataaaaggaaaataggcacagacttttttttacaatacagtgtcaggggattattttttgttttcttctcattggaaatattttcaaacag

SEQ ID NO: 329368 - DNA, 625 bp, Homo Sapiens
ttgtcttttgggatactattttctctttcataattcttggagaatccaggtggcagtaattatttgtttttccctcattaccaccatctgattggctgaccagcaatgtgtcttcgagaaatggaacccgggttgcttgaagacaatcttaacttctctaagggtttgcttttcaaaggaagagtaccccaggagactcctctcagcctcagggcatccacctgctcccttgagaggctacactccaacttcaggctgtcctgtctcccattccccagatatgcgaagtttcattccaggccaggagctgaaatttacttagacattgtagcatacacagccacagtggatatcttgatttatccccagacagtactgaaaccccagaaccagggaaaaaactgaagggtggctgaggacacattaccttataaagtttccaaagggaaaccctgacccaaaaatattctgataaggtttctgtggctagaggcaataaaaggaaaggaggcacagaacattttttacaatacagtgtcaggggattattctttgctttcttctcttgggaaatctttacaaacagaaaacaaatcttttttaaaatgccgagccaatgctttgt

SEQ ID NO: 329369 - DNA, 507 bp, Homo Sapiens
  misc_feature (114)..(127): n is a, c, g, or t
acaaagcatggatggcattttaaaaaagatttgttatctgtttgtaaatatttcccatgagaagaaaccaaagactcatcccctgatgctgtattgtaaaaaatctctgtgccnnnnnnnnnnnnnnaaatcttccctaggtacagagatcttatcagaatatttttgggtcaaggtttccctttggaaactttataaggtaatgtgtccttagtcactcttcagttttttccttggtcctgggtttcagtactttctgaggataaatcaaaatatccactgtggctgtgtatgctagaatctctggtaaatttcagctcctggcctggaatgaactctggttatctgggaatgggagacagaggacaacctgaggttggagtgtagcctctcaagggagcaggtgaatgccctggggctgagaggaatatcctgggtgtactcttcctttgaaaagcaaaccctttgagaagttaagattgtcttcaaccaaccccagctcgtgcc

SEQ ID NO: 329370 - DNA, 504 bp, Homo Sapiens
  misc_feature (104)..(402): n is a, c, g, or t
  misc_feature (415)..(415): n is a, c, g, or t
  misc_feature (442)..(442): n is a, c, g, or t
  misc_feature (452)..(452): n is a, c, g, or t
  misc_feature (469)..(469): n is a, c, g, or t
  misc_feature (478)..(478): n is a, c, g, or t
ctgggagaaaggttaaagaatgatcttgtggcagtcaagaccttctctctaataggcacaatgtaattaattatgattctgttctaggtttcctgtggcataannnnnnnnnnnnnnnnnnnnnnnnnnnnnnnnnnnnnnnnnnnnnnnnnnnnnnnnnnnnnnnnnnnnnnnnnnnnnnnnnnnnnnnnnnnnnnnnnnnnnnnnnnnnnnnnnnnnnnnnnnnnnnnnnnnnnnnnnnnnnnnnnnnnnnnnnnnnnnnnnnnnnnnnnnnnnnnnnnnnnnnnnnnnnnnnnnnnnnnnnnnnnnnnnnnnnnnnnnnnnnnnnnnnnnnnnnnnnnnnnnnnnnnnnnnnnnnnnnnnnnnnnnnnnnnnnnnnnnnnnnnnnnnnnnnnnnnnnnntcgcctcccaccnccacctttgttctgagggccttttagnctctggaatngataccactgggctttnctgcttctntatcctgcagtagggagatcattgga

SEQ ID NO: 329371 - DNA, 644 bp, Homo Sapiens
  misc_feature (273)..(273): n is a, c, g, or t
  misc_feature (434)..(434): n is a, c, g, or t
  misc_feature (580)..(580): n is a, c, g, or t
  misc_feature (593)..(593): n is a, c, g, or t
  misc_feature (619)..(619): n is a, c, g, or t
tggaagttctgacaaaataaaatgagaaaaacaaaaggtgtaaggattagaaagaattagaactaccactatttgcagatgattagattatcttcacagataacaaagattcatagtaaattatcagctttaattagaatctagtaagtagatcttctaagattactatacaaaaatcaagtgtatctctacataccaccaacacgggaaaatgtcacttaaaagatatattacttccaagagttaaaaaaacaatacaaggacacttagganataaacacaccaaagatatgcaagactcttataaagacaattagaaatgttactgaaaagcattaaggagatctaaacaatgaagagagagagagatgaagtttcctggataggaagacatcatcatatagatataagttctcccccaaactgatatattngaatttaatgcaaataaagatatcaacaagattcttttgtgaacttgtcaaaactaatttaaaaacctatgtaagaaagaaagaaaaattaaaacacctcggccgggtgtggtggctcacacctgtaatcccagcactgtgggagnccaggcgggcggntcacgaggtcagcagattgagaccancctggttaacatggtgaaatcccgt

SEQ ID NO: 329372 - DNA, 489 bp, Homo Sapiens
  misc_feature (416)..(416): n is a, c, g, or t
cctttccacagctttattaagtttttatattcacctggatgttgtcaaaagtgacttgatcattcaagagataggggacatttggcttccggtttgtgtgagagcttttctttccccatcagctcaacagtcagtccccagatctagagatggagagcttgggacaaggtcagaatgaaacatcaccagtcaatcctgctcaacaggtaactcttgcagcaatccttaaggaaaggggtgcagggtctcttcatgtttccatggtaaggtctatagctgctgcttcatggaataagcaaacaaagcccatgttgtgtgacgggtgggcaacactttcagacttggatcctgcacattctgatgtgtaaattccacgataggggcaaaagcattgccacttcacactaatggctggncctctcactaaattaaacccttgggaaaaataacgatgttggcttggctttaaaacctcagtggaactattct

SEQ ID NO: 329373 - DNA, 432 bp, Homo Sapiens
  misc_feature (17)..(17): n is a, c, g, or t
  misc_feature (22)..(22): n is a, c, g, or t
  misc_feature (68)..(68): n is a, c, g, or t
catgcttctcccactgnccccntttcaattttagccagctctgcttgatgcctttggaatgtgctttnagtttctgtcaatttgattaagaggaggcaaagagaaagtaacaactagatgcaaaaatgctttgtactctgtgtgacacagataggtatgggaatgttgttgagtagagtatagaggtgaacactgttgcagggaagatgtggtaagatgtggtggtgtttcaggctgaaccacagagtgcctgtgtggcgtcactgtgggtccagggtctagatctcaggtttaaataggagctggattttttaagttcatttagttattgtttcttgagaataggttcatgccaaccacttcaaagagtcatttataatctggagctgcagtgtctaatatcagagccacatagtttgcatgtagcaattt

SEQ ID NO: 329374 - DNA, 449 bp, Homo Sapiens
  misc_feature (419)..(419): n is a, c, g, or t
attatacttcaagttctggaatacatgtggaatcttgggattttcaaaacattttctacactacttctttaccctgactccttcccttcaagtccagtcctggattatttgttactagaatactatagttttctacttttgcgtcttcctaactgatttcttagaaatttagttcaatctacttgcattctaattttagataagtcagccctgctcaaaattctgtgagtggcaccaaatgtagtgcacgttaaattctttcagaggatttagacttgatgtagtctggaggatgaagtccattaacacagactctcactaaccagctccattgcatccatctaacgggatcttccacattcccctgcacaagcctccccatgctccaccataccgggcccgcatgggatgtccttggnttcctgctgcccaccctatctggacatatt

SEQ ID NO: 329375 - DNA, 495 bp, Homo Sapiens
  misc_feature (360)..(360): n is a, c, g, or t
  misc_feature (437)..(437): n is a, c, g, or t
  misc_feature (442)..(442): n is a, c, g, or t
  misc_feature (459)..(459): n is a, c, g, or t
  misc_feature (484)..(484): n is a, c, g, or t
ttattatacttcaagttctggaatacatgtggaatcttgggattttcaaaacattttctacactacttctttaccctgactccttcccttcaagtccagtcctggattatttgttactagaatactatagttttctacttttgcgtcttcctaactgatttcttagaaatttagttcaatctacttgcattctaattttaggataaggtcagccctgctcaaaattctgtgagtgggcaccaaatgtaggtgcacggttaaattctttcagagggatttaggacttgatgtaggtctgggagggatgaaggtcccatttaacacaggactctcacctaaccaggctcccattggcatccnatctacgggggggatctttcccaccattcccctggcacagggccctccccatggctccaccataccgggggcccgcnggggntggtccctggctcctgntgggccaccctatctggacatatcnggggtggcctc

SEQ ID NO: 329376 - DNA, 878 bp, Homo Sapiens
agaacggactcagctaagtttattatattctccccggagagggaaaacacaaaacaaggcacaaaggcagaaggtgcagatgtagcacaacgatgagttaagattccgcacgcaggtaacaaggagggtatggtatatctctgccagaggtactggaaggtttcaaaggcagaaaaaaatgtgttccggacacctgggacgcagaattggaggcatgacaggaacacagggaggcccatctaagttgcctattcacccagggtgacctctctttcatttctttaattgtccttttaacaatatgggggaatttcacccaaggaaagggtcctcttctcgccccagcaggcaaggggtgttcctccagcgcaagttccggccccagctgcccccacgtcccacaggtctcctgccttttggcacgcacactcctgaccacttcgctgttccgcatccctactctgatcctctccccatgcatctctgcctccttagacaactgagaattttattgtctgtttcctttgccagactgtaagttccacgagggcagggcctcgtccatttcatttaccactacatccccagtatagagcaagagcccatgaaaatgtttgttggagaaatgaatgcatgatggtgtcgctggacagctataccctggaaagaaaaagaggcacccccatcaaacaagctgggagctaagaaggccgctgggagacgacaagggcgagcttcttgcgaggtttctgaaatgacaagaccggaagaatggagttggatctctgggacaagcgggagagagaagctgaacagtcaagcaagcctcggggaatgacagtccgcgggggacgcactggtaggcggtagacgtaagc

SEQ ID NO: 329377 - DNA, 478 bp, Homo Sapiens
  misc_feature (388)..(388): n is a, c, g, or t
  misc_feature (394)..(394): n is a, c, g, or t
  misc_feature (414)..(414): n is a, c, g, or t
  misc_feature (439)..(439): n is a, c, g, or t
cattttggcaaaagaacttacggtaatctggaattctattccataatatcacatgcttttgaacctctaacatatatatttaacatatttcccaaaatcaaacttcagcttcaaaaattgtctttcctgacccctagcttttggatgctagaggacccctagagcatccaagagagagggtaaacaggattatttgacatgtttaggttacagaggattgccaaagtgatgtttaatcttccatagggttatattttaatggaataatattaatatggtgttttaaaatcatataggatgtctaccattctaatgtctgagtatatgctatcaatcataattaagggttattatgttattggtaaaccacatgtattaggtctgttcncattcnggctaataaaggtatacccnaggcccggggaattttttaaagggnagggggttaatgggctcacagttccccacgggttgggtt

SEQ ID NO: 329378 - DNA, 657 bp, Homo Sapiens
  misc_feature (295)..(295): n is a, c, g, or t
  misc_feature (440)..(440): n is a, c, g, or t
  misc_feature (526)..(526): n is a, c, g, or t
  misc_feature (542)..(542): n is a, c, g, or t
  misc_feature (630)..(630): n is a, c, g, or t
ttcggcacagagcaaaagcagctgaaatatgctggctggagtgaggaaaaaaatcgtccagggagcattttcctccatcgcagtgttcaaggccatccttccctgtctgccagggccagtcttgacgagtgtgaagcttccttggcttttactgaagcctttcttttggaggtattcaatatcctttgcctcaaggacttcggcagatactgtctctttcatgagtttttcccagctacacctttctcctttgtactttgtgcttgtataggttttaaagacctggacacctttncataaatctttggctttattaaaagaacaatattggactttgtctagaagaactgagagtcttgagtcctgtggataggaggctgagctgggctgaaagaagaatctcaggaactggtttcagttgttactcttttaagaacccntttctctctcctgtttggccatccatttaagaaagccatatgatgccttgggagaaggcagacacacattccattcccaggctggntctgtggggtaggggnattttctacagtagggcaatatgtgctaaagccaaaggagttttataagggaatatatgtgctcatgcagtcaatacagttctcaatnccacccaaggagggatgtcataaatca

SEQ ID NO: 329379 - DNA, 474 bp, Homo Sapiens
cgaaaaggcctctcacatagaattttgaactaaagtcacatattgaacaaaggatatttaaattaactactgaacaaagtaagagctcttcaaaagaaacagagctccctgccaagcccccctaaaaatgcccccaggcctcttattcattcactaccattatttcagtttatatctaaagatgttttatttcttatctcattctcttcccaccacctagtggacacatagttggcacttactgcttgtttattgaattgaatggaatctagccccaagagttaaaagctattctctgaagaagaaaataaaagagaaataattttgtcagtgaataggaataaccagtctgagtttctctcgggcaatgggaataaagttagggaaggggataacacgtacagttgggctctctgtatctgtggggttccacactttctggcatttagccaactgcgggattggaaaatattc

SEQ ID NO: 329380 - DNA, 537 bp, Homo Sapiens
  misc_feature (23)..(23): n is a, c, g, or t
  misc_feature (56)..(56): n is a, c, g, or t
  misc_feature (65)..(65): n is a, c, g, or t
  misc_feature (80)..(80): n is a, c, g, or t
  misc_feature (108)..(108): n is a, c, g, or t
  misc_feature (123)..(123): n is a, c, g, or t
ccaattattttgaaatgcatagngataccatgaaagaaataaaacaatgactgaanttgagaatnaagggtgtttaaggnattttacccggttaacttccctcattgnacacataaaaaaaanctgatgtcccaaagacatgttccaactactagaaaagttggaatcagaatccaatccctaatcctccattttggtgttccttttctatatccattccttatgctttatctaaaatatactggggacagtaggacaatagaacaggagatcaaaaaaagggtgagtcataagaaaactaatatattctcccagtcatcagctaaagaaaatggagaaggacatgtaggtgttacagcgaatccaatggcccatgaatggcccagtgaacccaaagagcccatggccactgggctgtagaatgagaaaggaaacaaaccctcgaaaggaaaaagttagctgtaagaaattatttgaaaattacagaaaaacccataactagctttttatgtttttgcagacatttgggaagtttat

SEQ ID NO: 329381 - DNA, 497 bp, Homo Sapiens
  misc_feature (319)..(414): n is a, c, g, or t
  misc_feature (435)..(435): n is a, c, g, or t
  misc_feature (467)..(467): n is a, c, g, or t
  misc_feature (475)..(475): n is a, c, g, or t
ttcggcacagaaaggttaaaaagattacttcagttttctgttagttcagtccattctgttaactcttgttctacttgatattcatgaacctttcagctcttcatgagtcctgtatgtttctctctattccagtgtcccaatctccaaagatatcagaaacctgcctttaagagcacctgtcaaagtactatatctgattataagccatcttttgaaaaggatcaaagctagacaacaattgtctgtgaatagcaaaatgtccagggtagttacctcaaaaacactatgggacaaagaaatttgtttatttctgtagcannnnnnnnnnnnnnnnnnnnnnnnnnnnnnnnnnnnnnnnnnnnnnnnnnnnnnnnnnnnnnnnnnnnnnnnnnnnnnnnnnnnnnnnnnnnnnnnattcatggggggccaattttnccctattactgtttctcatagtagtaagtctnacgagatnctgatgggttttattaaatttg

SEQ ID NO: 329382 - DNA, 394 bp, Homo Sapiens
gtttgtttgtttgtttatgtttcaattttttgttggctgaatattttagacaatatattatagcagttctgaatatgtgtccccccagggcattgttgttggttggttggctgattatctgtttcgtgacttggctgagctaattctgtaaagtctgtttcccctgtagtgtgcagtgtctcatatcactactcagatctatttttcatcttttcttttagcctgggctacctagggttgcccatgagttgcctaagctgcttattagttacagatgggtgcataaacccccttaggacaattagggtttttaccttttactaccagatttatgtgtgggcttgggaaaatgctatcacagttcagagagtgatggcttttgcatcatgttcag

SEQ ID NO: 329383 - DNA, 446 bp, Homo Sapiens
ccctttcctccgacagtcccacgtttgcttccaggaatcaaagagcatgccagtggcagctatctgtggcagttttgggaaagtgaaaggagatgcctattcccagcactgctctgtcacccttagatgatgggtttaggaagccagaggcagggatttcaggggaaaagaaacaggccctggtttattctctaattctttaaaaatgggataggagcaaaaggttaaaatatgtgggtctcacacaggaaaggccttctgaagaagaaaaatgggtggattcactggagttggcccagctaggggttgggtctcaggtgacagaggccggggattcagactcaaaggggccagtccataaaggtggcagtggggtcttcaaaccactgtttctattccagaagcctactgaaaatcattgtatatttgctttccataagactagg

SEQ ID NO: 329384 - DNA, 481 bp, Homo Sapiens
cataactggtttattatttacaatgctatgtgtgaaaaaaacacttattctttcaattataggtgaccaaacataaaaatagggtcaacaggcctcctttgtccctaggcatggaagggttcaagggcttccataacaagtagaaaactagatctcacattggccgtcagagtgataaacagctactaacgttcacgtgagtagaaaagccaggatcggaagtcctgcacagcgtaaagcactcagtcatcatccgaaagaaattaacaaaaacctccccgtgcgtgtggaatggttcctaaaatgcaagaacggggacttggcagtaagagcagacatctgttttctcttgtacagaataggttcaacaaccagcagatagccagtcactggcatgtgactgcaaactgctcagagcatggtgaagctctggatggagaggggggattatattcctgctcgtgtgactgcctatttattg

SEQ ID NO: 329385 - DNA, 473 bp, Homo Sapiens
  misc_feature (447)..(447): n is a, c, g, or t
aaaaataaagcctctttattggtacctgtaagctcaggtacaaggtgttcccacaagcacacaggctggcaaggcctcctgggcaaggggcaggcccagagcctgcgtttcttggcacagacacagagagaaatggaataaattatagttctgacactcagggacaatgtagaaattatgatgcaaaattaaacattagcaaacaaagggtataaaaaccctcaggagccacccctcgccaactggcctcagggcatgggcaggtgggccacgctgaagtgcagtgcccagaaagccctgagataatagtctggggcatggttcgcgccccgaggtaggccctttgccctctctgggcttcctgtttcctccttccccctcctacatccctgggcctggaataaaggctgtggcctttgggaagggggaagatggaacagagggcangaagtggagggggcagggtggggcag

SEQ ID NO: 329386 - DNA, 330 bp, Homo Sapiens
tattaggtagggtgaaaaacctgtagggaagccttaaaccataacctacccttggtaatatggtcctgtatttttaattaggaaataaacctattcctgtttggaggttccctcaaaaaacctaaaaacagagttacccatatgatcccagcaatccccactgctgggtatataccccaaaagaagagaaaccagtatatcaaagagatatctgcactcccatgtttgttgcagcactgttcacaatagccaagatttggaagcaacctaagtgttcatcaatagatgactgaataaagaaaatgtggggccagacgcggtggctcacac

SEQ ID NO: 329387 - DNA, 235 bp, Homo Sapiens
  misc_feature (16)..(16): n is a, c, g, or t
  misc_feature (21)..(21): n is a, c, g, or t
  misc_feature (77)..(77): n is a, c, g, or t
  misc_feature (152)..(152): n is a, c, g, or t
tttaatattttataangttantaaaaagtatttttgggcccttcatatatccggaaaaatataaccaaatttgaaanctttggatgtcagaaaagtataataaatcctgtagccccccttacagaaaccttatataaaaaataatgatttantcttttgttaaaaattatttagtactggctgggcatgatagctcatgcctgtagtcccagagctttaggaggctgaggcatta

SEQ ID NO: 329388 - DNA, 545 bp, Homo Sapiens
  misc_feature (234)..(234): n is a, c, g, or t
  misc_feature (252)..(252): n is a, c, g, or t
gacctaccctggctctctgactcatcctcctctttatgagagtgtaacttggatcatctgtaaggagagcatcagtgtcagctcagagcagctggcacaattccgcagccttctatcaaatgttgaaggtgataacgctgtccccatgcagcacaacaaccgcccaacccaacctctgaagggcagaacagtgagagcttcattttgatgattctgagaagaaacttgtccttnccctcaagaaccacagcncctgcttctgacataactccagtaaaataataatttttaagaaataaatttatttcaatattagcaagacagcatgcctttcaaatcaatctgtaaaacctaagaaacttaaattttagttcttactgcttaattcaaataataattagtaagctagcaaatagtaatctgtaagcataagcttatgcttaaattcaagtttagtttgaggaattctttaaaattacaactaagtgatttgtatgtctatttttttcagtttatttgaaccaataaaataattttatctctta

SEQ ID NO: 329389 - DNA, 528 bp, Homo Sapiens
  misc_feature (12)..(12): n is a, c, g, or t
  misc_feature (53)..(53): n is a, c, g, or t
  misc_feature (92)..(92): n is a, c, g, or t
  misc_feature (105)..(105): n is a, c, g, or t
  misc_feature (126)..(126): n is a, c, g, or t
tcatccccaaanaaaaagacagaatgaacactgaaaaccccatcatgaagggnaataaaaccctttaaagggaattaaaacccttaaaaganctcccttgtccanatgaagacttttaagaacaanaccccgaacattctgttgacttaagaaagagctgatgtccatcctcagagccccgggtgatacacacattccttggatgtggccacagggtggatgatagtaccctcagctgagatggggaataggggggcagagcagttttgggatgtggggtgggaattggggggttgggagaaagagaagcaaagttcagcggtttggggatgcagccacttaggtgtctgcaggagtggatggagaggcagaacaagcatttgaggacactcaggctctctgggtagcagacatggcctgagtgatttcatttactactgagaggacagtgagtgccccgggctgcctcccagagtggctggcccttacctagggcacctggtggatgctctaaccctcaggattcac

SEQ ID NO: 329390 - DNA, 335 bp, Homo Sapiens
cctgtgcccagcccgcttactgctatttgaattttctaccctgccttctggggtcttgggggtccctgggaaagaacataagctttgaagcagacagactttgagttcctatccggccacatatcaagcacgtgggctttggggcaccccacttaccttccctgaggcctcactttctgatctgtacgatggggaacaatgttatcctaccccaagggctgctgtgggattaagtgaggggtgaagtcgagggcgggactgggcgctcctctgtgggggaatgactaagggccgccctgctcggagcctcctgggaggttctgggggaattagtt

SEQ ID NO: 329391 - DNA, 396 bp, Homo Sapiens
  misc_feature (284)..(284): n is a, c, g, or t
  misc_feature (300)..(300): n is a, c, g, or t
  misc_feature (346)..(346): n is a, c, g, or t
taaaaattaatcatttatcttaatctgtttcatgctgctatgacagaatacccaagactgagtaatttataaagaaaagtaatttatttctacagtgccagggtctgggaaggtgctggtatctggtgagggctttcttgctgcatcattccatggcagaaagtgagagggtgagagagggacaagggaggggaactgaactcattcctttatcagtaacccactcctgcaataactaatccactcccacaataacaacattaatctattcatgagggcagagnctttcatggacctagntcacttcttaaaggttctaccttaactccattgctttggggggttnaaattttcaacctattaaacccttgggaggggcacattccaaaccacagg

SEQ ID NO: 329392 - DNA, 390 bp, Homo Sapiens
  misc_feature (338)..(338): n is a, c, g, or t
  misc_feature (353)..(353): n is a, c, g, or t
taaactggcacactgcctggtatacaccgccagtaggcattcagaaaagtttcttttttttaaatacacaatttataatactgggaagatttcatttcagtgtttcccaaaacattattcctgggaaagggtgtactctcccatgactctggataatagaagttttgttctgattttttaagtcacctcagacagacactgggaacacgttaggatctaaacacttaaggtgctttgaaaggggcaggtaaaaaatccccaagggaatttcaaggaattgtaataattgctgggggagactgtgggtttctgtagcccggggtgggctttcacagttntcagggggtcacagntctatgtccctctccgaccggggacctcccgggggca

SEQ ID NO: 329393 - DNA, 764 bp, Homo Sapiens
  misc_feature (717)..(718): n is a, c, g, or t
  misc_feature (729)..(729): n is a, c, g, or t
tacatttttataatgtgtatttattattcaaatagcttgacagcaaagtgttggaaaacgaagagcaggaattccgcggttcctgcccggcctcgccatccagctgggagaagagcatggtcatttccttcacttagtccacggccactcggcgctcatccccagcacagccctccccaggccgcggcaaagactgttgctgtcctgctgagggatgtgcccccggggattcaatcgagattctgtaagatgtgggggatgtggcggggtggggggtggcttctccacatccccagggctctccttcttccccagtgaggtgggagaagccgcagattggggtctgctgaggatgcgggcctacatgaggcccaggtcgtgacccatggctccggggaccagaaggtaaacagttttcggcacagggtgctcccactaggtcataggtggattcagccttctctgagaaccgagaagattctggagtcttttgaagcaggaaaggagatcagaggaggagatggtggcaaagcggggactgagactcttgaaatgtgtttatcccaggcagagcagccgctcaactgtgaaaagcagtccaaatctgaattttttccggcctgagttaattacactttaaattggcatgtttactgatcggggaatttcaagttaacagagacagcgccccctccccaactgtttgtacagtagaanncagcaggctgncgggctcccccaggccttggcaggtcctgccgctc

SEQ ID NO: 329394 - DNA, 397 bp, Homo Sapiens
caatatttatttaatggtggatcttgacgtggcactataatctggctcccagtcccatgaaactgaagtcccagaagcagtttttcctaaccctgggacctgccaaaaaacacactatatgtgcccctgtaggcatgctggctgactttattcccactgtgaatcttgaagcagtcctaaaacccagctccagtcccaaaacctacctccagtccctgtcaactaaagtctgggagcagtcctgcccacccaggaatctggagggagaaatgccatgaagccagaaacaaacctgaagactttggtctcagctgtgtatcctgaagcagccctatgaatcagttccacacccccattcccccacttccagataaaggtttcagttattattttcaaa

SEQ ID NO: 329395 - DNA, 502 bp, Homo Sapiens
  misc_feature (300)..(300): n is a, c, g, or t
  misc_feature (374)..(374): n is a, c, g, or t
  misc_feature (417)..(417): n is a, c, g, or t
  misc_feature (427)..(427): n is a, c, g, or t
  misc_feature (451)..(451): n is a, c, g, or t
  misc_feature (462)..(462): n is a, c, g, or t
  misc_feature (479)..(479): n is a, c, g, or t
tttcagtttaatccttggatttcgtttggcttatatgttaaaaatcctcaaaagaaaggaaactaagccagaaaccttttaaggaggactccctttcaggacctcctacctattttgtttacattattaataacaagcaatagttcatatcaaagaattgtggatagcacaaatccaaaattgatttccttttccaccaaagaccacattttgctctatatgtgaggcatcatctgttgtttcaggtaggctgggtacatcttatatctaggtataccttatggtattttatggtatttntctaaataaaatttaatgactttggcaggcattttctaggtcagggaatttcccatccatatggtccttcaggnggggcctataaggggtcccaaattttaaatgtggcctttgtcngtgggggggnaaaattccaggggtatggggcccnaaatacccccntaatcccttttaattcnccccaggggatttccggggcctt

SEQ ID NO: 329396 - DNA, 398 bp, Homo Sapiens
gtggtagacactagtgatgcactactcagttgcaccttcaataaaggacttaactgcctcagcccttgggagtgctctcagcagacatccttcagctgtcagtcccatcagagattgcctcagccactttggtgcccatactcaaagaacagtgtggtagattaaaggccaagccatctagacccaacttggaacaactctgaaggggcattttgggttctgagctccccaggggttatgcaagtctgtaatgggacctgcatgtcaccttaatttctctctctgttcaattccttgccctcaattcccctcccttcttcagatggttgattgtaacgacacaccttaatatcctggcatgctaaacgttgtctttaggagtcttttcctagggggac

SEQ ID NO: 329397 - DNA, 484 bp, Homo Sapiens
  misc_feature (56)..(56): n is a, c, g, or t
  misc_feature (67)..(67): n is a, c, g, or t
  misc_feature (78)..(78): n is a, c, g, or t
  misc_feature (104)..(104): n is a, c, g, or t
  misc_feature (133)..(133): n is a, c, g, or t
  misc_feature (183)..(183): n is a, c, g, or t
  misc_feature (409)..(409): n is a, c, g, or t
  misc_feature (455)..(455): n is a, c, g, or t
cctccaggccatgggatgggggagttcgggctgggacatgtctggcattttacatnttggggaaatntcttctatatntagagattggtgctgccttacctagntctactgatagggaaccaaggtgatttanaaaggccatttctaaaatatgagctatcacattcatttgtcatttgtttntttttgtttttactcaccaacactagcaatccattctgttttccacacataaaaataacaattacaaataaaatacatttgcaaatttaaaactccatttataagattgcagtggcagtgcctggcacatattaggtgctcaataaatactggttgaattaatgaatgaatgcatgatattcaacaagttgagaacaacaaagctgtgatgagtgaagctgctcgncagttggctgggctcctttactagccaaatgattggctcccatacnatctccttgcagcacatgccattctaatt

SEQ ID NO: 329398 - DNA, 367 bp, Homo Sapiens
  misc_feature (32)..(32): n is a, c, g, or t
  misc_feature (55)..(55): n is a, c, g, or t
aacccaggccacccctgccctccctggggctncctgtcgctcctgttgagcaganagaacgcatgtggcgtccatggttcccagtgcacagactgccgtgatgccggggtgcgggggcgggtgggcgtgggtagggaggtatccagaggctgagacacgaaagggtgagaagccacaaaactgggagacagtggaggggcctgacagggaagatgtctccttagagggtcctggggagaggggtgctgggagccagggcgagaggtggaagatgagctggggaattgggtgcctgcccagagtgtggggccttgatacccaggaagagcctgtccagggtattgaagctcatggtgctagctctctt

SEQ ID NO: 329399 - DNA, 506 bp, Homo Sapiens
  misc_feature (31)..(31): n is a, c, g, or t
  misc_feature (54)..(54): n is a, c, g, or t
  misc_feature (69)..(69): n is a, c, g, or t
  misc_feature (94)..(94): n is a, c, g, or t
  misc_feature (123)..(123): n is a, c, g, or t
  misc_feature (156)..(156): n is a, c, g, or t
  misc_feature (169)..(169): n is a, c, g, or t
  misc_feature (196)..(196): n is a, c, g, or t
gccctctggggaaattaatactcccctaatncaaaaaatcctactggaaacacngcctgtctggggaanaaaaagattggaacaagttaatccntttgtcccctccttttggtggtccctaantgccttccctacccttcaagatccctcctccanccacattcaaaanccagaatccccacccccccaacatcanccagcaaacacacccccaaaacaccttaaatggccacctcaagatgcaagttgtccttttgttttgaggatacaggcccaagaggtatgtcaagagcactttccctggggccccattctgtgttaacccagaagagcagaagtttagggttcacagcccatgctgtgcagacctgatgcaggaactcaagacacagaggcaaccatgaattcttcagttcagttatttgtgtgtgtttggaatatgcagagccctctaacgtggggttgggaagggaccctcttgctggggactaagggcagcctagctg

SEQ ID NO: 329400 - DNA, 848 bp, Homo Sapiens
tgtaaagtacagaaaaaaatttattggaaatcccttgaatacattttgaagtgtagctcggtatttccaaacaaagtaggttggagaggttggaggaggaggagggactctgacacctggagacaaacagctggtcccagcctgtcccgggggtgctgcaggagtcagtctagggctcattcctttcatggcaggtctgaggggcaagggctggccttaacagttgctttacttctcccaagctcagctcaaagtcatggctgagactcttcacagatggagccctggtgaaaggctgctgccacctgtagatgccaaagattgctgcctcagacaatggctaggcctttccatgcaaggccttggaaagagagcagtagctgaaatatgggggcatcaataacttaccaggggccttcccccttctcaaagctggggccttggggataaacctgagcctgggttcagcaagccacgcatgtgctctgggccaaagtcaggagggccagttggctgctactgcttctgctaacacttcttggtggcagcagcagctacgcagagctctggtccccgccagagcctgctccaatcctcagaagtcagccttgtatgtgggaacagtgtcacatgcagtatactaacaagcagctgagaaccacctgctccactgaagtacagctgctgccagtgaatgccccaggtgggccaggaggaatggagtagacctagatctccttgaccaggactacagcgaggctgggaaaggacagatcataggtgggtgaggctaggcacttgacttattcaagtaacaatacctgaagggttaagtcaatcctcgtgcc

SEQ ID NO: 329401 - DNA, 400 bp, Homo Sapiens
  misc_feature (38)..(38): n is a, c, g, or t
  misc_feature (96)..(96): n is a, c, g, or t
agtgccttaagccctgtgatccccaaagtgcctgggantacaggtgtcagcccaccgcacccggcctcaaatacatttttttaatggccttgtctnttcctggttttaggcccttttcccacaatttctgatggaaatacagaaaccttgccatcattcttactgctggtttgcatctcatttatggtgtatctgggatttcttctcatgaacagaaagattcagtggctgttatatgccttgtcaatttaatgtattgccctatcctctttttgatcaaagatagagactaagactgggaattatgacagaaaaagtcatatttttctttaaatgattttgaaatgttaaaataggccaatatgagtcaaagtgcaaattttttggtgagtaggttgac

SEQ ID NO: 329402 - DNA, 547 bp, Homo Sapiens
attgttgaaataaggtttcattctgttgctgagggtgttgggattatagctcactgtactgtatcctcgaactcctggactcaagcaagcctccctccttagcttcctgagtcctgagtagctgcaattacaggtgcaacctatcatactcagttatttttttaataaaattatattacctttgaatgcatgagcaattttttttcactttaagttccgggatacatgggcagatgtgcagaatgtacaggcttgttacataggtatacgtgtgccatgggagatttgctgcacctgtcaacttatcacctaggttttaagccccgcatgcatgagctactttgatgctctcctttcagcacccaatctcaacccaacaggccctggcctgtgttgttcccctccctgtctccatgtgttctcattgttcaactcccacttatgagtgagaacagaatgcatgaacaattcaaactatgccaacaatattcgtaccaatacttttccttggaaaatcactttaaagatttctagaggctgggaattg

SEQ ID NO: 329403 - DNA, 414 bp, Homo Sapiens
ttgtgctcttaagctaactcctgatcccattgagggacatcaagggcagtagtttgaagaaagcctcatccttggccctgcttttccgggaagccgaccttccctctaccctggtggtgccatcattagggcgtgtggccgaagaggcaaattgttaggtgcaatcaggaagccgtgtctgcatcccatggctgagggacagccaggatgacacttaggctgtctctcactccatcctctttggggagtctgggatgctctcagagagcggggtgaagcccagcaggaggacatgtctctcgtaggccttggtctgcttgaacatggtgtcagtcccatggaggtggtccagcacacccagcaccccatagcactggttgaacctagaagagagaggacggcactgcagtgcca

SEQ ID NO: 329404 - DNA, 393 bp, Homo Sapiens
  misc_feature (300)..(300): n is a, c, g, or t
  misc_feature (319)..(319): n is a, c, g, or t
  misc_feature (342)..(342): n is a, c, g, or t
  misc_feature (362)..(362): n is a, c, g, or t
  misc_feature (367)..(367): n is a, c, g, or t
  misc_feature (381)..(381): n is a, c, g, or t
atccttctctttatttacgaaatgaagacattagattagatgttagaaattagacactggattagattagacatttagtttagacattagaaattactcttgctggttagggattggaaactctgaaaagactataccatgagttgttaaaggagaggtccactgtcctactcatgtttcaataaatgacggatggatggatggatggatgagtggaggaatatacagtattttgacccctgggagttctaggggaagaataagacaaacatatatcattagtcctgcctgaggcggagnggatgggacaagatgaccnattggggtctatttccaaccccnagtattagtatctatagccngaatnttgcaattcagggnacctttttgggc

SEQ ID NO: 329405 - DNA, 409 bp, Homo Sapiens
gaatttgctggctggcaggtttgctttgcttaatacattgactgcaacacgcttattgttgtgttggtagaataagacatacgagaatatatatagaaaggccatatggaggtttccatggaaagattctgatactccataactctgctgttcagaatttcagctgattgcctgtagttggtgcagcgaacggaacgctgggtggcaggtgttgttgctgcagacacagtggtaggtgtagcaccgtgcatcatggggcactgcagggataaatgccggctgtggggagctgcaggttagtcagagcctgttggcagtgggaaaacagtggggattaaagaccggggtgggcaccattggggctttttccagtgctgatctctttgggtatcagttgcagtgtaccagg

SEQ ID NO: 329406 - DNA, 608 bp, Homo Sapiens
  misc_feature (469)..(469): n is a, c, g, or t
ttttttgaaaataaagtgctttattgctgaggagcccagagagcttcagggcggccatctgggggctaggactgaagtcccctaacttttggtggctcttgtgaacagagacagttgagacttcaatatttcaaccccatagaaggcaaggaagtgcagccaggggaattggggaggcagggaagaggcatgaggtgtgccgggagagcgattatgtgcatctcttcccaactctgagttcagtgcattcagtgatgctggcagcatgacatgggacactgctgggagaatttacaccacagaagctgcccaaatgcaataaatcagggcttttttcccctcccagagaactggtttactatagacgtgtgacacaccgtcccgagctagtgctgaacccacccaagcctggctactgtgacaagctgtcacctccccactcggggggagtgccaactcccagccctgnacatccctacaatcagcagaacagagggggctgagcaaaggaaagggaccagaattgggcaacccattccctgcctggagtccacttcgcctcagctgggctgttgcagcccaagactaaagttggtgtccaacctcgt

SEQ ID NO: 329407 - DNA, 457 bp, Homo Sapiens
  misc_feature (11)..(11): n is a, c, g, or t
  misc_feature (36)..(36): n is a, c, g, or t
ccggtagtttngggttgtttttaaagccccttttgnggccttacacattattaactttaaaataatcaggcagctaagaataattacctagaaaaatcatctacccacttcaaacatggtcaactacttcaaaactgcacctagagaatcaggtacctgaagtagaacaagaagcctggaggtggactttgagaggagggaatacccctcactggaccaggctgtaaggagcgggtagatgttgctgtagccttttaaatatatctgtatttaaacataaacataaatatatctaagactgcaggcaccatactttatgaagctagtacaatttggcagttcctatacttttgtttccatgactttcctatatcctttctcatttaattagttccaaggaagagagagattgtgtttggcaataggccaagcttagtgcactgttcatattattttg

SEQ ID NO: 329408 - DNA, 407 bp, Homo Sapiens
tctgagtccgtttgcttcgctgtttcttggtttcacttcctccatctgtttttggcaactggttgcacatccaaaaccaccttgcatttgagcccccaaagtttgctaatgtaattggaaagggtaaaaaataagtgaacaatttgcatatttggtttttagttcatgcagtgccaagctatgacgcgtcatcctaacatggcactaaaaggtattaaataagtagggaagatagagtggtgtcaatgctggttttccaaaaacaccatccttttcttcaaacgttattctcgagtatggaaatcagtaagctgcgaacttgaggaaagagcagaactcattagtaaggccacagccctttctggcaaagcattacccctcatgctgacctcccggggctggggaac

SEQ ID NO: 329409 - DNA, 503 bp, Homo Sapiens
  misc_feature (418)..(418): n is a, c, g, or t
  misc_feature (492)..(492): n is a, c, g, or t
agtatgaccatgcttcccacagttaaaacaagctccaggaaatggagtatttcctttattcacttttagtcctgccattgcttgtgctagcagagtcgctttatgcagattacttctgataccatcacaggccttggtataatcaactaagtgtgctttccctctgataggtcgcagagctgcctggcagtcgggattagcattgttgaaagctgataagtgcagcactatatcctgagcagtcgaatctgtggttacctttttaagagactcctgtaaccgagctatacaatccgtgtatggtttttttggtccctgttttactgcactaaaggaagggtattgttctctacctgaagtgatttttttcccaagctctaatgcacactcctctaagttgttctatgggcatcatccnggcatggaccaattgtggcatcttaaaccagcccagccggccaacccccaaaggttagtcttcagttatattanttgggttggtg

SEQ ID NO: 329410 - DNA, 823 bp, Homo Sapiens
  misc_feature (20)..(20): n is a, c, g, or t
  misc_feature (36)..(36): n is a, c, g, or t
  misc_feature (42)..(42): n is a, c, g, or t
  misc_feature (48)..(48): n is a, c, g, or t
aacggcaacatcctttaaanagtccccattacaaanggagancccggncccatactgattaacagcttgtttaaattctttgagtaatttaaaagggaaaggctcaaatgtagctataatatttccctgttgatctggggggtgtattctaacagggaactgccaagcctctaaatcaccctcttgtctagcttgctgaattcctgcctgaatagaactaagagctgtcacatgaggcgctgctcgaacagtcactggggcaattactttttgcccagtgtcctccaggaaaagaaagatgtggggggtcatcttcatcaaaataataaggagggggtgcagaagggtagggatgaatctctccttcctttgctgctttagctttagctggcaaataaacatgctctgtaacctcttctgttacttcgctatactcttgttcctcctcaattacccagtgtgaaaaagttccaaggtgaaatgaaccagacccccatacctgtcccattgttaccctgacacttccgagctccccgttcttacgcacgacagggattgctttaagagtactcgggtgtcctccagctagtttcccattccaaccattgctctggtgacccttcgacctggatatgagcccccacaaatggacaccacttgccaagaccaggtcagtcagagagactctaacccagtggtgctagaggaattaaagacacacacacagaaatatagaggtgtgaagtgggaaattgggggtctcacagtcttcagagctgagagccccaaacagatatttacccacatatttattaacagctga

SEQ ID NO: 329411 - DNA, 491 bp, Homo Sapiens
ggcactgaatgttctgtttattggggtgttgtcatgggtaggaggctcagcagagcaattctgcctcctgcttcccagtactaccccgtccagcaactgcctctcgtataaataagtatcaagatggtcagtagaaaaggagagcatctcctcagccctggaagacagtgtgggagcttcagcttaaggaagaggtaggtgcctgtccgccagcccagcctcaagggccaggaagacctggctatgggtgctggaggggccgttagccacaccccagggttctacagtctttggtttggatcaggctgcaggccagggtcctggctggcagccccacccaccctgcgcctctgacacacacccagcgcttttccctgcaggggcccgggattggatggggccctcctgagtgcagcagctctgagttgcaaggggaggcccactttcctagcctctgaacctcctttctgccactgcagtttgctgggaga

SEQ ID NO: 329412 - DNA, 785 bp, Homo Sapiens
gagtaatcacaccatttcatacttcaactaattaaagatttaaaaaagtgtctcttgtttctccaactcacagtcaatgagttggagtttacctaaatttaccaacagctgaaggatgccaacaactaaaaatcaaatggcattattccttctcaaagcccaagtcacactggaggcttcccatagacaataatacatcgtccacatggctttagctctcagttgcacttagagagacagtaccaagttgtggttcagagcttgggttctatggtcagagaagactacatctgcatttcagctctgcctcagtttctttctgtgtcaccacaggaatcacagtgacagtgtctacctgaaaggggtgtaaagagggccgaggcagtcgatacatgtacagggcttacttagcacagtgcctgtgacatgggtggtgcttgaggatgtgtagctatcacaatcattatggtcaccttagcaatggctggaggacttcatgggatgactggtcttcccgcttgtggataaatatcgagagcttgccatccacagcctcactctcttctccaggatctttatctcctttcaaggaattcttgggactggtttttgtcaatgtggtgtcaggttcagaagcggttggagaaagaactgtctgacatcctttaagcaaaaaaacaaagctcattcaggaaaactgcagtgttgttttggcgggctctgctaaaatgaaaaataatggtttgggatttggaatctttcttcccccttctctattcctgtcc

SEQ ID NO: 329413 - DNA, 296 bp, Homo Sapiens
  misc_feature (70)..(70): n is a, c, g, or t
  misc_feature (89)..(89): n is a, c, g, or t
  misc_feature (102)..(102): n is a, c, g, or t
  misc_feature (110)..(110): n is a, c, g, or t
  misc_feature (272)..(272): n is a, c, g, or t
gtaataaccactgggcttaaaacacaaaaccacattgtacagctctacaaaaaatattttttctctatanccttattctataagctttnccttttaacattntttatttntttactttttaaacttttttcttaaacatacacattagcctaggcttacagagggtcaggatcatcaatatcactgtcttccacctccacatcttgtcccaatgcagctggcacctcctgtgatcgcaatgccttcttctggaatccctcctgaaggacctnctgaggctcttttacaattaactt

SEQ ID NO: 329414 - DNA, 503 bp, Homo Sapiens
  misc_feature (32)..(32): n is a, c, g, or t
  misc_feature (45)..(45): n is a, c, g, or t
  misc_feature (51)..(51): n is a, c, g, or t
  misc_feature (57)..(57): n is a, c, g, or t
  misc_feature (97)..(97): n is a, c, g, or t
gcccccagaaaatggacacagaatcctccccnggtcctggggggncagggnctttgntccccaggtaagcctcagcaagatgctggctaggactatnggacagaaagaagacaagagaacatcccccggaatcccctttaggcctttcacaaatacctactcccttactcgtcctgtaaatactgtttcttttgtatcctccccctccttgttgctgatcatcccacttgcgtccagatcagtcattccctctcattcatcaaagattttgcttactagtacaatttatccccactttaattcttaaacatcatcctagccaacctcaatactcacacataacatggtttttcaatttgcaggtttagatgcattagctaccatgtaatcaatttaatgtattcagcatattttttaaaaatgaaacagaatagacggtaatatattggagtaggctgtatgtatatgtactactttgagaaatttgtttcagataaatgtgt

SEQ ID NO: 329415 - DNA, 366 bp, Homo Sapiens
  misc_feature (337)..(337): n is a, c, g, or t
tcattatttatatgatttttattctgctcagatgaagctagttccttgctaaaataagagcaaatatggattttcattttaaaataggagaaattagtttgaaaatttgagtaggcaaaaacaagacaaattctgccaacaaatcatgacaagagtttggtatgaccaaataatttttttcagaagttgagggactagtccacttctgccttaactctccccctagggacactgactcacctgaccagtcctactcatggggcctgctcccaggaaaaatgtacacaggaattctgcctgggtttctgggggggttcatgggtctttgatcccgggntaaggcctcagcaaggatgcttgctaggg

SEQ ID NO: 329416 - DNA, 448 bp, Homo Sapiens
  misc_feature (45)..(45): n is a, c, g, or t
  misc_feature (65)..(65): n is a, c, g, or t
  misc_feature (104)..(158): n is a, c, g, or t
aggggcccaccaaaaccccggctcaattttggtaatttttaagtngaagaatgaaggtttcaccnatgttggcccaggatggtcttggatctccctgacctcgnnnnnnnnnnnnnnnnnnnnnnnnnnnnnnnnnnnnnnnnnnnnnnnnnnnnnnntggccatgtatacacatcttaatacaaatattttcagagataaccattgcgtgatagctatttttcttgaaatgataccctccttcacccttttctgtcagaactgaaagctacatagcttcttctatttcttcatgcacttgttagaagcaatatgcattaacctattttccgatgctgttgattctctaatctgttaatccatttgcagacgctattgattttcaaacttaagttatgaatacctgctataattctgtggttaataaccaactttggaaagaaaatgt

SEQ ID NO: 329417 - DNA, 388 bp, Homo Sapiens
  misc_feature (331)..(331): n is a, c, g, or t
  misc_feature (378)..(378): n is a, c, g, or t
ttctaataaaaaagtttttattttcacaaatattttaaaatgcagctacctttgagccacaaaaggaaaaagcagtattccttttatgtatttgatacaaatattaaacataactcagttttagttcattagctcagctcagtgaaaatagctcaggaaaaaaagtcataggtaatgctattggtatatgcaggaaaccagaagcgacgacattgagttcaaaatccatttaggaattgtaggacaggccacaaggggcagggtgaagagaggcaggccacagagtcactaatacattgggactttcaaacaggaaaaactggaaatgtcngttggggtacacacctaaaacaaacttcccactaggaaggataattntggtagggct

SEQ ID NO: 329418 - DNA, 439 bp, Homo Sapiens
  misc_feature (11)..(11): n is a, c, g, or t
  misc_feature (31)..(31): n is a, c, g, or t
  misc_feature (122)..(122): n is a, c, g, or t
agaagcctcangggtgcctttcccccgggcnctgccccatggaggtgaggacagtgaagatagttgggcctcagtgcctgtgtggaccctttccttgtctccctgatgacctggatggaggngcctggaggaagaggggtccttagaggattcactcatgtccctgggggagggggactcactcccaggtctcaggtctgcactgacacatttgtttgtggcttggggctgcctgctataaactattgggggttcgtccattttggagttataacctaaggcagaaactcagatggttcaaatgtcctcttcatgaagcaatgttatcagcgtataatttagattgtcttgcaagagtctcatttgttgtttttctaaatgcctgccaatattgtttgaaaatctacaaatgtgataaatgtatcttcaaagttgataa

SEQ ID NO: 329419 - DNA, 336 bp, Homo Sapiens
ggcacgaggcgcaagaaggatccagccccatgtgctcgcaatgccatggctaagaaaccttaatttaaaccacaccataatgatttcaaaggactgcttgtttgagttccattgtatggctttgtagaaaattaatttttttagtgcaaatgctatacatgctgatgataaaatattccagggcaaaagcaataacaataaaaagttaccacctctagctgggtgtggttgtcacgcctgtaatcccggcactttggaaggatgaagccggtagatcccttgagcccaggagttccagacctacctggcaacatggtgaaaccctgtctctactaa

SEQ ID NO: 329420 - DNA, 378 bp, Homo Sapiens
  misc_feature (150)..(150): n is a, c, g, or t
  misc_feature (366)..(366): n is a, c, g, or t
acatttactaagtttgtctcatttgatcttcacaattctgtgaaaaaggtaggacagatagtgtcactcctacttttaaagataagaagtttgggcttcaaagaaattcagtgacttgccctgagataaatagctagttatgtctgctantcttttgcattagttttcattctcctatatcaaagagtttctatgcagaaagacttctatatgatttacttataatttctaaaatataaaattcaaattgttgaatttccggcttttctgcatttaccagaaaagtatgccatttaaaaaaatagaccattgaaaaaacattggaatgcttcatgaatttgtgtgtcattcttatgcaggggccangttaatcttccc

SEQ ID NO: 329421 - DNA, 457 bp, Homo Sapiens
  misc_feature (88)..(88): n is a, c, g, or t
  misc_feature (391)..(391): n is a, c, g, or t
  misc_feature (405)..(405): n is a, c, g, or t
  misc_feature (434)..(434): n is a, c, g, or t
ttttaatcgtgatcattattaacgtttattgcatttatgtgagcgaatgattattcacaagttgtcttgctctctctgcctggcagtntgaagaaaacatatagtccagagggccagagtcctccattcacactcaatgtcaactttctaagagagcacagccgtgttactcattctgggtgccacaatgcctgctgtcccttgctgacagagggattgaggatgatttgacgtccagcctgtctttaaagcacattgacgttcagaagatgtctacaaatgtgagagagttggaaatgagctaggagaaaaggctatggggaactgggggtgggatttgaacaatgtccttgtgtcttctttattttcccaaggattgggaaggcagttnggaatgcctagggncctgacaccctaattctctgtcttcttcnggcatccttctggggctatggca

SEQ ID NO: 329422 - DNA, 406 bp, Homo Sapiens
  misc_feature (345)..(345): n is a, c, g, or t
  misc_feature (386)..(386): n is a, c, g, or t
aagcatgtttttatttctctgtgatttggttttctactttggtacacatgagctgtggctgcatttcacacagaagctgacacatctcgcaggaatgccccataaaacagagcgcaaacaaatcacccagcaggttcgcttcacctggctgttactgctgaactccctacttctaagagcacagaagagaacatcgctttgaatctacagataagcgagggtggggcgagcagcagccagggctccggggatgggagcggccacagacacaggcccccgggtttctgtcttgagatacaggtggagaagccgcccaagaaattccagcaagatggggagcagctngggggatgcttccgcacagtagcctgcctataggactcctnttggctccctcagtcctggg

SEQ ID NO: 329423 - DNA, 428 bp, Homo Sapiens
ctgagctactcggactctttattagaacaatcaatcattttcctttggacctacaatttttgccctatgctgccagcccactttgtgagtgagaatgaatatgtctgtgtgaacacacaggcatgcgtgtgtatgtgcacgtacatgggccagaatgaatggatgtgtgtgtgtgagggatacctcagatttttcttttcttattttgtgtgaaaatctcttttctacagattttccagggtttaagcattgcttgctgtataaaaaactttactgaattatatacagtttgaatgaaatgttattttaaaaacaaaacaattgttaagtgttccataaaggttatgttgaattttggtcagatgaatatttgtaagtaaaaaatatatgcatttctgaacctcaacttacatagattttctttatat

SEQ ID NO: 329424 - DNA, 726 bp, Homo Sapiens
  misc_feature (97)..(132): n is a, c, g, or t
ttgagccgtgctctactttggataatctgttactatcttactgattttcttgtcttttgcccttctagctgtttctttagtcttggcaatcaccttnnnnnnnnnnnnnnnnnnnnnnnnnnnnnnnnnnnnaatttatttcagtttttaaaggtttggcagtggaggagagagtaaagctaatatattaaatatatttggggttattttggggagctatttactagttttatctctgaattcaggtttaaatacattcaaccataaattaaaaaataattggtggataaatcaggaattggtgcaaaatcatttttaagaagaaaatgtcattatatagcaaagaggtagtatgctgctttaaatccttattttccttggcaagcctaacaaagcagggcagtgccctgctgtatttaatggtagtgcccatataattagctgactcacctaataagacttcacagcgcagcaacaactgccagctttttttgtcctgttacttggatagactcggttgaatatactaatgcacaaagggaaatctgggaataaactatttttacttttcatgtctaagggctgatcctcctcttctagaaataaaatttattatgtatgttaaactatattcaaatttgtttactattttaagctttcatggattagaatcttgaaggtcagccccttgggtagtgactgaataagacattaacgatgtgaagc

SEQ ID NO: 329425 - DNA, 266 bp, Homo Sapiens
ttttaaaatacaagtctaggcagttgtgtaaccttcaaacttttcataaaatatgcaagagcttaaaggcatagtttttgaagtctggtctttcatcccaaattatttgagagcgtcaatcttaatatcttcatttctctctctctaggtactttcctgtaataccctacctcctatagtaccctgtaggattcactctctggagtctacagggagaaagagcaataatttaggattttcctgttcttctcttaggaattaggaca

SEQ ID NO: 329426 - DNA, 717 bp, Homo Sapiens
  misc_feature (72)..(72): n is a, c, g, or t
  misc_feature (80)..(80): n is a, c, g, or t
  misc_feature (138)..(138): n is a, c, g, or t
  misc_feature (172)..(172): n is a, c, g, or t
  misc_feature (321)..(321): n is a, c, g, or t
  misc_feature (661)..(661): n is a, c, g, or t
  misc_feature (672)..(672): n is a, c, g, or t
  misc_feature (688)..(688): n is a, c, g, or t
  misc_feature (707)..(707): n is a, c, g, or t
gaattagaaggtgctacacagtggccacactctacttctgcttctgccacctatggggtcgaggcaggtgtngtgccttngtaagtccacagacttctgagaggcccacgctttcttcttctccagaaataaaccctnaaactcaagcagctttaatcagagggcaggattncacgatagcagcatcagaacagcaagtggcagcgagaattcttgattccaatgatcaggcaacagtaaaccctgtggaatttaatactgaggttgcaacaccaccattttcccttctggagacttctaatgaaacagatttcctgattnggcattaatgaagagttcagtggaaggcacggcaatctatttaccaggacctgatcgctgcaaaatgaacccgtgccttaacggaggcacctgttatcctactgaaacttcctacgtatgcacctgtgtccaggatacagcggaggaccagttgtgaacttgattttgatgaatgtcactctaatccctgtcgtaatggagccacttgtgttgatgggttttaacacattcagggtgcctctgccttccaagttatgttgggtgcactttgtgaagcaagataccgagacatgtgactatggctggcacaaattccaagggcagtgctacaaatactttncccatcgacgnacatgggatgcagctnaaacgggaatgccgtctgnagggtgccca

SEQ ID NO: 329427 - DNA, 353 bp, Homo Sapiens
  misc_feature (105)..(105): n is a, c, g, or t
tttgcagctcccttcccatcctcttgcaaaaatgtaagcctttcgggcatgaacactggtaactcccttctgtgtttttgcagataaaattgcagggtttggganccctggttgcactcgttcagatctacacaggaagtcccagttatatctggagtgtacccagttttacaaatgcaatgatatgatcctctgtcattgacacattccccatttcggcaaacatcgtgaataaccttgcattcatcgatatctgctccattggtcatgaatcctcggccatggggacagagtttcttgaaagccacagtcccctggaaagggcagatctcacagtggggaccccagcctct

SEQ ID NO: 329428 - DNA, 593 bp, Homo Sapiens
  misc_feature (452)..(452): n is a, c, g, or t
  misc_feature (559)..(559): n is a, c, g, or t
agacattgggacttcttagaaatctcctctccactcgtcctcatatagataaaataatgagtactcatggaaagcaaattatgcaagccgtcactcttattctagaaggggaacataacattgaggtcaaagagcagacactgtgcatcttagccaacatagcggatgggacaacagcaaaagatcttattatgaccaatgatgatatcctacagaaaatcaagtattacatgggccattcacatgttaaactgcagcttgcagccatgttttgtatatcaaacctcatatggaatgaagaggaaggttcacaagaacgccaggataaattacgagacatgggcatcgtagatattctacacaaactgagtcagtcaccagattcaaacctttgtgacaaggcaaagatggcactgcagcagtacctgggcatgatgggagtgcccctgggnctgacgagcatcccacctccttgtttaaggaagtacaggaaccagcctcatttgattccttctatttgcacaagtcacctttgactgcagggagctgtttttgcaanagcagtttagtaggcttagattcttcaaattcat

SEQ ID NO: 329429 - DNA, 649 bp, Homo Sapiens
  misc_feature (48)..(48): n is a, c, g, or t
  misc_feature (69)..(70): n is a, c, g, or t
  misc_feature (156)..(156): n is a, c, g, or t
  misc_feature (163)..(163): n is a, c, g, or t
  misc_feature (486)..(528): n is a, c, g, or t
cagagtccccagcctatccatcctgatcttccgttccttctgcactgncctcctccacaccctccccanncctcttctccccaccccctggagaactggacaagtgtcaggcttgggcagctgcaagcctgcatgttccctgccagctctgctgtnccccagncagggtcatagcgacagtcctctttcgtctatacttcctttctacagctgtggaagtaaagcactgatagctgcctttaagggtttgtttgggtgggaggagggggttatgaaatgaaggtatttgtgaaccgtcctataaactttataaactctctggtatttggtagaggctcaataaatgtcatggtccccacccttcaccctccagcctttccacctatataaatgcaggatctcatttaatcctggttcttaaagtgtcctgtgaagcttagtgtgccagccggctattgctctggcctgacattctgcccccaaatnnnnnnnnnnnnnnnnnnnnnnnnnnnnnnnnnnnnnnnnnnnttagatcttttacaagggggaaagtgttcattatgtttaatataaaatacagaagctttgcagcagtggcagtatcgtagccaatgaggtctatccgaggcgcgattattgctaattgaaa

SEQ ID NO: 329430 - DNA, 391 bp, Homo Sapiens
  misc_feature (62)..(62): n is a, c, g, or t
  misc_feature (79)..(79): n is a, c, g, or t
gaacctgaactgtgtttgtcccaaaaacaacccgtcccaaaaacttggtgcccatcaattanaaaatgtcaaaatacanctggctcccgtctgtgtggcccctggaaattgccctcaactagtgtctggttgtgcaagatccccacacagcgatgttgccgtcgctgcagcatgagaagcagaccttggaatcggggctgatggccagggcgtagcaggcgggggccgaggacgttcagtccgccttgatgcgcggggttggagccgccaggtcccaaatggacaaagtactggcttcccctcccactatgagagtgcagccatcgggtagcaatttacaggaacggatataattgtctctgttcagacagtcgagctgggagacagggct

SEQ ID NO: 329431 - DNA, 400 bp, Homo Sapiens
  misc_feature (31)..(31): n is a, c, g, or t
  misc_feature (88)..(88): n is a, c, g, or t
  misc_feature (177)..(177): n is a, c, g, or t
  misc_feature (185)..(185): n is a, c, g, or t
  misc_feature (209)..(209): n is a, c, g, or t
cgacgtctcactatgttgcttcatttaacanataaggggaggaagggcgggggcagaatggaggacacagactagagttcagcttttnacaagtggcgaaaggacaaatttggattcggcctcccacagcttcatttgtaatgctttcaagacatcttccatctattgaattttaanaaataggnaaataaagagacacacatataatntggcaattatacatggttaaatataattaagatatacacttaatgcaattttggatatgtcatacattacaaggtagatattcagtgtttaacaaaactatttagaggcataaattttttaaaaataaagcataattctatctaacagtagttctcaacctataatctacatctcttttatacaatcatca

SEQ ID NO: 329432 - DNA, 346 bp, Homo Sapiens
  misc_feature (264)..(264): n is a, c, g, or t
tcatggttttacaaagggttaatagagagggtagtttcttccacatacttttgagagctggtatatgctgatttctgctgctgcctatttaataatgatgatgtaaaagatttagagatgtctggctgattttgacattggcctgtagtcctagaagagacactaccctgagtgtctttgagcagtcagagagtgcacctctgccctgggcctgtttacctgttagagttagccacacaagaaggaattcaacgtgggcagagntctttgccagaggggagctggaccatctttcaaatgtttaaaaaaggtaggacaggaaggaggagcccttaggccccaaccc

SEQ ID NO: 329433 - DNA, 457 bp, Homo Sapiens
aaccccaatttaaataagcctaaagtaaagttttgtccacctgcccttaaaaaagttcccaccctaagatgaattaaacattttttaaaaggaaaaaaaatgttaatcccttaaccttatcctaacagttccctgtttgccccagtaatgtcagataatcatgaattttgaaacaaagtgatgaaaatgagtagtttaagttccaactgagtggacctaatagccaagcaaacaagtttagcttggggcttgggtggtcaaggaagccttcacagatcaaaagtaactggataagcgcttaaaggaagacacaatcagactcacttttatgaatgtaaataggacaaagacagcttcaggaagcccagtatctgacagaacccaaggcaggcctgtaggtgggttcccgaaaggaagaagatccgggtgccatactggagaaatatccagacttggt

SEQ ID NO: 329434 - DNA, 571 bp, Homo Sapiens
  misc_feature (421)..(421): n is a, c, g, or t
  misc_feature (468)..(468): n is a, c, g, or t
  misc_feature (557)..(557): n is a, c, g, or t
aggaatttattcacttgtcccttcttttgaacctcactgtgctctggcttgccgggaggtgcaagtgtcgtccccgctttgtacttggcgctccaggcctgggtcacttcacttgagttatcagaggcaaccgtctagtttgacaaactaccggaggctcctgatagagaagggcatgggcgccaatctaggagacaaagcctgagccgctgcgggtgagccaacccaaacccatccgcgggtcttctttccagagacattttcggagccgaggggcctctgcgagaggctgcgaaacaggttccgacgcgccggagatcgcgcgacgaatctgcgcctcgaaccctcgctttccagcagtcgccggattgcttgctccacagggagccaacggggttgaggaccagcccagccggggttnttttggatcagtaggctgtgcaggctgcgagctcgttgacgcatctnagcccactcccttgtcctcccgcctggggaagatgtccgccaagcctgaagtcagttagtgcgcgaggcttcttggtagatcgtggccngtggttttggcagg

SEQ ID NO: 329435 - DNA, 596 bp, Homo Sapiens
  misc_feature (290)..(290): n is a, c, g, or t
cttttcagtactagatggttggtgccttaagccaggttagcactggttttagtaaatgatcagagtgccacccatcctgaatgggagaggtcccaaagaggatatcccagtagtgtgggaaggccagccaggggtttttacccgggggacctgtgagatgaaactcttactgtgtggtgctgctaaacagccactttgatttggcgtctcctttggccaagatatagagcagagtttccagagataaggatggtatttctacctcaccactttgtctctggctttcctcnagggcatattctcccttctgggtactctcaaacacttcttgtgcattgaggcagggaaagatttctcaccagaaaactcaagattgtgggagaagctggttgttcacctcagtctcactttttccactgtaggaactgtgaggttggggggaaattttccacacacttggtgtcaggcacactggggaaaaggatatcatgaatatggaagtttgattctcttactgtcttcttggtgattttttacttctctgtggccccacgaactgtcttatcataatatttgagttctgggatattgttggt

SEQ ID NO: 329436 - DNA, 497 bp, Homo Sapiens
  misc_feature (118)..(118): n is a, c, g, or t
  misc_feature (356)..(356): n is a, c, g, or t
  misc_feature (429)..(429): n is a, c, g, or t
  misc_feature (461)..(461): n is a, c, g, or t
tttccaagccaacatttattgttgcacaagcctgttgcagtcctgaggggatcttctggcagaggtctgggtaggaagctgagtggccactggggtgaagggcagacagaggaggctntgaccagcaggctcctatccagatgatacatgagatggaggcctcctcagccacactccagggagggtggggtggcaagggggattcagggataatggcattaataatacaagtggtaaacaaataaccaagaggatctggctggttacgatacacaaaagttagcagtaagagtccgtgctttcacattcctatcaggacagatctgagttcaaatcctggtatgtgtagcagggtngaggtatctgctttctttcagagcccatgggtgcacatctctgagcctagttacaacagttggcacataggtnggtgacaaggagggcagctctttgattcctgnttgcttccacagcacagagagttaagtatggctggt

SEQ ID NO: 329437 - DNA, 596 bp, Homo Sapiens
tcttctaaaattttttcttctctgtgccccagacctcaagaaattttgtggccctagtgagaaatggcagataattaaagtcatcaggccaggcaaacttcctttccaaccagagagtctgaggtccccagaggttggggaaaccttcatgctttttctctctggcttctcgctgcttagctctgacgtggttcagtcaagtgcaccagagagtagggtaaatcaagcctcaaccacccaagctggctggagggctgaaaaggtagagcccagggacccagacactactgggcaggttacaatgaggaagggcttcgggagagcaacccctgaaagttgctcatgaactcttgggcttacccttgagctctacatgtatggatccgaccctacacggaccacacagactttgagtgctgaaatgtgggatagattaccaccagagtcccaggctggcactaggtggcgcttgtgcgagacagatccacatctcacagactcacagcaaccacaatccacacaagtcttgcaggaacttggaatttgtggtctgaacccatttggggtgattatcttctaaaataaagttaataatg

SEQ ID NO: 329438 - DNA, 420 bp, Homo Sapiens
  misc_feature (35)..(35): n is a, c, g, or t
  misc_feature (385)..(385): n is a, c, g, or t
aaacaacactggtgtgacctcgagggcagaaaggntctgccctgtgaaggtcaccagcaccaacaccacggtagtccctgaaatttcaccattgctgtcaagttcctttgggttaagcattaccactcaggcatttgactgaagatgcagctcactaccctattctctctttacgcttagttatcagctttttaaagtgggttattctggagtttttgtttggagagcacacctatcttagtggttccccaccgaagtggactggcccctgggtcagtctggtgggaggacggtgcaacccaaggactgagggactctgaagcctctgggaaatgagaaggcagccaccagcgaatgttaggtctcggactaagcctacctgctnctccaagtctcagtggcttcatctgttcaagtggg

SEQ ID NO: 329439 - DNA, 861 bp, Homo Sapiens
  misc_feature (419)..(419): n is a, c, g, or t
gatattgttgatttctttaggtgtaatagtggcatttacaacgttgagagaaacatactgaaatactaagaagttaactgatcttatggccaggatgtgcttcacacagttcagacaggtagagagaggaggaggaatcaaggagctataagataaatctctgacagctgaagacattggtcatgggttggtgatggatagatgagagtccattttactgtttgctctacttttgtatagttggaattctccatgataaactgttttaataaaactccccccacccaaatgaggcttctgcagaacttgctgccatacggaacaaagccacttctgatgtgttaagtgagcaaactccaaacatgaagcagagatctgacggataagcactctggcttcggggttcatctccccatcangcctcagggatgcctgcctgtcttccaaacccaaggcagggcccccaggacacgtctttctgcgccctgcaggttcgttccttcatcgcacttgcccacagtccatcattgtaccgatttgaatttcgttccacatccaacacccctcagagaccacggctcaaaagctgaagactttgctgcctgaggtgtattgaagtggcttgagcagagaagagcaatgctcagaaagttttaggaaaacatccccctgcaagaactggaggtgattcttccaaggacacacatgaccctcacttcactgcatgattggtggggaggaacttgccatatgactttataagctcttgtatcatttgactgttttttgtcacatctagcctataccacttttatatttcaaaaactgacttacgggccgggcatagggctcacgcctgta

SEQ ID NO: 329440 - DNA, 505 bp, Homo Sapiens
  misc_feature (286)..(286): n is a, c, g, or t
  misc_feature (294)..(294): n is a, c, g, or t
  misc_feature (354)..(354): n is a, c, g, or t
  misc_feature (378)..(378): n is a, c, g, or t
  misc_feature (386)..(386): n is a, c, g, or t
  misc_feature (433)..(433): n is a, c, g, or t
agaaaagaacacttctttatttgagggactttcccaacaccaggtgcttggggatttcttagagatcaccaaccgactccctcactgtgaaattaaaccaagtactggaaacgtaactaaacagcgaaccatgtagcttcacctgactcagtgctgggggcctctaccatctactgtgcttgtgtcatgatgctttttctctgaagtggtgtgggaagtaccagggggactggcagaagcccagggccttctctacttttaccagcaactgatcagtgtctttcangaatccantgtacatataggctgttctagccacagtggtagatttatggattcacatccgaaagtgtnccttagttatcaatttaacatttnctctagtnattcatatgcccttttgtttaccatatacctcagtgtattccttccngtgtcaagccttataaaatcatgtaatttagtggccactcatggtaaatcagtaaaatcacaaaggtcttat

SEQ ID NO: 329441 - DNA, 703 bp, Homo Sapiens
  misc_feature (63)..(63): n is a, c, g, or t
  misc_feature (230)..(230): n is a, c, g, or t
  misc_feature (642)..(643): n is a, c, g, or t
  misc_feature (678)..(678): n is a, c, g, or t
aattttgagtgggatgcagcctaacagcacagccctccgtggtagaccgaatccttcagcaancagaggcccccgaacactggaagagcaaaccgcaaccttccagattcttcagcgagtgccaggagtgcaggatctgcatcagactgccaaagagacgggcagctttccttgcaagttttccactgcctacaaaggccatttttccctataaaaagatgcccaggtcnaaaaaaaagtacaagggagaaaaagagttctctactgcagtaagaatcttgcagtcgcaggctgatctgaggcaagtcccacggacgcagggctggtgttggatccacccacgcgaagcaggcgctacttgggctcctcaatcacacccttgctgaggtctgtcattttgggatattttactttcttctggtccagctcgttctgagcccaaagtagtagtttcaagtaattttgccagtttgggtgttgactcgcgattttcataatctagcacagcttggttaacttcactccacaccttctgcctctgcatggtgtggaggaggtctccgaagggcgactcctcgggactgtcaaaggccagcagtgccagggtacgctccatctctgtgaggcactctcggctctccnngccctgccgccagctgagtctgtgcaaactccagngccgcctctgtctccgctggcggat

SEQ ID NO: 329442 - DNA, 407 bp, Homo Sapiens
  misc_feature (198)..(230): n is a, c, g, or t
tcatccccttcttcagtaagtcattccacatgacccccaccatccttcccaagagagtcctttccgtgactttcctgctggttttcagaaaagaagctctatttgccttggggttgttaagcaagctgttctttgaccccctgacccagccaagaattaagcagaggaaagacaagcaagctgagagatagggacagnnnnnnnnnnnnnnnnnnnnnnnnnnnnnnnnnctgggaacattgtttgaatccttggatccagaaatccaggaatactcccagacatatgaatccataaattatcttttttgtatatactaattatatttgagttgctatcagttgctgtcaaagggtttctaagcactatagttgggattttgtaatgttcttcttcttgcatttaat

SEQ ID NO: 329443 - DNA, 522 bp, Homo Sapiens
  misc_feature (120)..(120): n is a, c, g, or t
  misc_feature (123)..(123): n is a, c, g, or t
  misc_feature (396)..(396): n is a, c, g, or t
  misc_feature (402)..(402): n is a, c, g, or t
  misc_feature (408)..(408): n is a, c, g, or t
  misc_feature (422)..(422): n is a, c, g, or t
  misc_feature (434)..(434): n is a, c, g, or t
  misc_feature (491)..(491): n is a, c, g, or t
ctaaaaatagtcatccagtgttcaaagcttctttcagacaccagtgttattcagttctacccaagcaaatttgtccttatcaccgacatacttgatacatttggaaagctcgtgtacgangcnattcttttccatgtgtgtggatagccgcagcgttcttaccagatcacttttctccagagaatgcaaatgacacggccaaggaaacatgcctaaattggtttttcaagattgcctccatcagggaactcattccaaggttttacgtgggaggcatccatcctgaaatgtaacaaattcctctccaaaacggggattttcagggtgcctgccccggtttgacatggcatggttcagagggatcggagacccactagtgttcggtgtatgcccgtngcctanccgtgnccgggtaggcatgncgagttcattgnccttgacggcaaggttggccacccgtttccttgaatgttcaaaaagggccttctttnccaaccacccgaagttttgagggaggttttt

SEQ ID NO: 329444 - DNA, 532 bp, Homo Sapiens
agctgggactgccacattggcaatgtcagagaaggtgcggacccggctggaggagctggatgactttgaggagggttcccaaaaggagctgttgaacttgactcagcaggattacgtgaaccgcatagaggagctcaaccaatcgctgaaggatgcctgggcctcagaccagaaagtgaaggctcctaaaaatgttcatccaggaagagctcgtgtacgagcgcatcttttccatgtgtgtggatagccgcagcgtcttaccagatcacttttctccagagaatgcaaatgacacggccaaggaaacatgcctaaattggtttttcaagattgcctccatcagggaactcattccaagattttacgtggaggcatccatcctgaaatgtaacaaattcctctcccaaacgggaatttcagagtgcctgccccggttgacatgcatgatcagagggatcggagacccactagtgtcggtgtatgcccgtgcctgacctgtgcccgggtgggaatggaagtggccccacatctc

SEQ ID NO: 329445 - DNA, 389 bp, Homo Sapiens
  misc_feature (219)..(343): n is a, c, g, or t
gtccccaagagtaccttttttaaaaaaattgccccttccatgtgatgaaaaatgaagagaagaaaaacgtgttgaagtagacagaaaatgaacacatagaaaacaaaaattaggaataaacaaatgcatttctagatgatggtggataatcatcgaaatcctctaggattaggtattggcttaggatctggttagttagcatattcataaatcagggtnnnnnnnnnnnnnnnnnnnnnnnnnnnnnnnnnnnnnnnnnnnnnnnnnnnnnnnnnnnnnnnnnnnnnnnnnnnnnnnnnnnnnnnnnnnnnnnnnnnnnnnnnnnnnnnnnnnnnnnnnnnnncagcagttctaaatgcttgtgccgccggtgttcccagaccactctc

SEQ ID NO: 329446 - DNA, 322 bp, Homo Sapiens
  misc_feature (18)..(18): n is a, c, g, or t
  misc_feature (90)..(90): n is a, c, g, or t
gcaaccctagggaaatantttatccagtatttaaaattattttcctcccttttgggcattaagtaataccctctacccctgatttcccantcatctgctctttaactcattgttttttatagttgcttgtaaacatagattgacttttgggaccgctgtcatagatggggtattatcttttaactgtgtaataataattaccttgaatataatctgagcgcttattctgtgtttgaatttcttttctaacatcctgacaggtgtttaatagtattcatcttataagttggctagagttgtcataaatattgtttcttctaga

SEQ ID NO: 329447 - DNA, 352 bp, Homo Sapiens
  misc_feature (13)..(13): n is a, c, g, or t
  misc_feature (28)..(28): n is a, c, g, or t
  misc_feature (304)..(304): n is a, c, g, or t
cccccaatttttnaaaatttggtttgtnagtggaagaaacatttcccctgaagatgtatctatggtgatggttggagaggacacttggctttggttctggaatgccaagcagtagcatagtctctatcatttcttttggcccatagagtcattggtatctggtttcgttggtagattagagtgtggtttttagtgcagactggttaagttttgccagaaattgaaataccaggtgggccagtcttcaggccccagtggtggcagcagtggtctgagcctgtgtgtcctttggccccaatggcanatacgctggcactggtgttaatggatccaggcaggtagattcttgggc

SEQ ID NO: 329448 - DNA, 296 bp, Homo Sapiens
  misc_feature (54)..(54): n is a, c, g, or t
  misc_feature (66)..(66): n is a, c, g, or t
  misc_feature (102)..(102): n is a, c, g, or t
  misc_feature (150)..(150): n is a, c, g, or t
  misc_feature (161)..(161): n is a, c, g, or t
  misc_feature (250)..(250): n is a, c, g, or t
tcccccattcaaaagggaattcctcaaaacccccggaaaaatggtcccaacatncctgatacctanggaagcctcagtgagagaaaagagaattctgaaagncaatacaaagaaacaggaaaataattgaggaaatgaatgaggaatctnccaaagagatnggtatcataaaatagagctaaattctggaactacagaattcatttaatgaaatacaaaatacctttgaaagcttcaacaatagactagntcaagcagaagaatcccagaacttgaagatgttttgaagatctttt

SEQ ID NO: 329449 - DNA, 444 bp, Homo Sapiens
ttttataaagaaaacagatttattttggcttatgagtccaaaggctgaggagtccaagatcagggagcccatctgatgagggcctcatgctgcttcaactcatggtggaaagcagatggtgaactgaggagggcaaagagaacagaacacaagaagcatcctcacttcataacaacccactcttgtgagaattcatccattcctgcaagagcgaatccattccagaactaactgagcctcatgagaaagcctttaatccatctcaatgacctaatcacctcttaaaggcaccacctaccaacacaatcaaactggggactcaggcctcagcatgagttttggtgaggacaaaccatatccaaaccatagcaggaagtttaaaaaagcgagtggcggaagcctcagtggaaacgaaaacttctagaccatttaccattaatgcag

SEQ ID NO: 329450 - DNA, 686 bp, Homo Sapiens
  misc_feature (490)..(490): n is a, c, g, or t
  misc_feature (661)..(661): n is a, c, g, or t
ttttttctgcaaatataagaagtaattttattgcaatatactgtggctagagtggtctggggagaacgggacacattttgaagttcagtacaaattataacaactttgaagggaccacagaggaagaaaatgacaggagaaaaggacaaattggatgggatgagaaatgaaaacagaatcacatgacctagacgcagtccacgggggtcgcgggacagtcctcggctatggcttttcttttgaagagatgaaggtgacagtcattggcacatgctggcatcctgggctccagagactctccaagccagacttttctttggcaagagcgagacttactttccagggaaatttggaaaatccacgctggcggtgttttgttcctcctgggtggcttgtttgtggcttcctaagctggaactgcattctggtggtggtgggggtcggggacagcaccagagcctcgcaggctcaccccaagggcccagcctgnatttcccatggtagaaggaaaaggcgctgcacccgggcaacttttcacagtgaagagatcgcctttcctggctgcccctcgggtcctcctgcccacagacggcagccccccgacctcgatggccaggaaagggtttccaaaggggacctcacccgccccgagctctggaangctgacgctcgcatccaggacattt

SEQ ID NO: 329451 - DNA, 332 bp, Homo Sapiens
  misc_feature (17)..(17): n is a, c, g, or t
  misc_feature (35)..(35): n is a, c, g, or t
ttgagaaagcctgaagnccctgagctagagacacnctgtttaggaaagatgacccctggaaacactagtgagggagaaaagtaagcagaaatgaagcgccggagactccaccaagggagtctgaaaagtcagggcactgtgggtgaacttgaacctgaatgtagaatggctcttacggtatctataatttgcaaacttcttatatactatttacataatagttctccacttagagatctttaacacaccttcttgttttttggaatgtgacaagttttatagctagtatggacaggagagaggataactttaaaatgtggtgaatagggctg

SEQ ID NO: 329452 - DNA, 461 bp, Homo Sapiens
  misc_feature (30)..(30): n is a, c, g, or t
  misc_feature (47)..(47): n is a, c, g, or t
  misc_feature (206)..(206): n is a, c, g, or t
gttagatacggcaaccttgggaccaggacncctttccatggtccctnctgggccttccaagccctcaaatacatgaagaaaataactaattttcaaggccactacacttggatttctcttacataacaagcgaacaccccaacctggactggtataccccagatttaaactggcctcccactggtcctgagattaaggcaggaggnatttatcatacatttattattttgtttttgattcccagaattccctggctcacaaaatggattgtgagaggttatctttctgcattacagttagggaaactaagaagataattgaattaaatcctctgagttcattataaggaatgacttattttatcataaagtgtaaatattacttttattagattattaccttgttaactatcatcccatagaattataaatttatttcttttaaaccatgacaactactac

SEQ ID NO: 329453 - DNA, 533 bp, Homo Sapiens
attatatttgtaggcacaatttattttaaaatccacacaagaaacccagaaatgcagcattatcttcagacatcacattctagctctgtttaaataccacatatgctaaaaaccgacgccaggacattctctaaatgagttacaaatcagtttctggaaaggaagtgctccatgaaaagcttatagcaagataactcaggctttcaggtggcgtatggcacgtgaattagccttacagtaattgtgtacatagtatgtttagtcattattgaatcaaaagtttcagggaggtaccttttttaatgcatacgctgagaggaaccgtcaatatgcctttggttcctgctgaggggatctgccattctggagggtacaaatactggcagataggaatatcaccgcagaactacgtcaagttcagagtgttcaggatcatttctatataaaactacaattagctgaactatggcaaaggtccttgaacataaagcctttcttcatttcattgcatcttaataagtagaatgccacta

SEQ ID NO: 329454 - DNA, 502 bp, Homo Sapiens
  misc_feature (53)..(53): n is a, c, g, or t
  misc_feature (154)..(154): n is a, c, g, or t
ataagccaaataacatcttttttataaattataattacccagtcgcagatatntatagaaagaacagcctaatacaggtgctaaatacatatctgacaataaatggtagttatctcttagaactgttatgggggattaaacgagttaccagtgntccatcttaaaaagataattcctgaaaaaaatcctcataggttcactttgcccttgtcaagaatatgattaccattaacttctgtagataggaaaaaaatgtgctgagctccaaaactgacagacattttgctaaaacaatatcaaatctcattaaaatgatgacagttatttcaatagttgacagtagctatcccaatacaacctaacaaggcattttctcttcagaatcactcgatcatatggccatttccctaagcttttatagctattgcccagtgtacactgaagacaacagctaacgaacaacatacgtgtgataatttatgtagttgaacctctaaggcaa

SEQ ID NO: 329455 - DNA, 382 bp, Homo Sapiens
attatatccataaaatcagtttattaaattacatagcaatatacatcccaaaccttttctcaaaattgtcattagctttttaaattcgttaaatattttcatctcattaaaaatggtttcttcctttaaaatttcccagaaagtgtggcctctgttttctgctactcagtttaaacacatcatcaaggatagataattaatgtcaggtgagcataaaaggagattataaaccagaaatgtgttttctgggaaccaagtttcaagtgactcaggataagttttattaatttcatggggtgaagcccctggggttaaaggcggtgcctaaatcagggcttgtttacccttgggcattatggtcaccaaacactggtttcagggg

SEQ ID NO: 329456 - DNA, 648 bp, Homo Sapiens
gtgagggaaaaaaactcatatttcaatgattcccaagatctttaagatataactacaatttactaatgcccaactgctcacagttttctaaacaactacaaaataaataaattgtagcaggtattttatgagaactgatacccatcaaaattgtgtatggagtccatgatggcctatcctccccagaagtcagagctcacagtgcccaacaccctcattatccagaggagaatctgaggacccatcatgccagtggagaaggctggagcccagcactgggcgccactttcctgaggatgcccacactgattcttgtcccttctccctctctgaactctacttccagccagtttgggtcataacacaaaacatttaattgtattctctacatgaaaactttagttcaggaaaataaacatattaagaggttatttccctcaaataactgagacaataaacttcacaacaggataggaaaaaaaatgaccaaggacactctcttgtagtctagggaaaatgcaagaacagtgcttttaaaatgattctaatgagactacagcataaaagtttttccaattagtttcagatttctccaactggcctactgggattaaacttttaataatttctctaacataattctatttc

SEQ ID NO: 329457 - DNA, 796 bp, Homo Sapiens
  misc_feature (206)..(206): n is a, c, g, or t
taaatggacctcctatccctaaaccactaatttccattttttaatatttccccttggacttttgggggagaaatagtcctttgtcctcaaaagtgggccttcagtgaccctatgggtttgataaagcaaccagagataatgagacaaggatatttaatggcaacatgccagcaattattattagttaattgaaagcgtttatgatntttgcctggggccaatgctttccccttctgctggactaacatgtgggtaagggagaggaaaagctttgtttccactttttaaataaaagtattacgtaactttgaaatttgtaataaaattaaaagatagtaaaaacaactattctaacagaattcaaaacctgttatgccttcagtggagagattattcaagataagtccgtgggaaattgggagtacattttctactggcaaagttagtgataactatgccacttctgacaaaatgtgaaatgaggggtatgggcgtgccatatcatcatggtgcagatacgtggatgtgtgcttccaaacaatggcaacctaactgactgctggaaccatacaaaatacctgaaactactcagaaagaaggtgaaaattgcatgcaaaaattatttgaaaaatattgagctaacacatgaattttgaattataagtgaggtattgtaactcacctacagatgtgttttttgtaatcaatattcatggactcagactacacagtaaaagcttacatagaaatcattctatctaaactttctggatacgaaagtaacctagtatgcgtt

SEQ ID NO: 329458 - DNA, 423 bp, Homo Sapiens
cataattagggagtagggtaaaagaacagaaggtttaaaaacatgagtagccagtaaaggaacttttgggtggggattcggtctttctactacacattacacatacctctaagcagagaaaggggttggaggggagtttgataatgtgactaataatccctcccttccctgggggggatcttgataaaggatagccacccacatggaggcctaatataaactggattgcagaatgcacttgagctgggcacccaagcgggccaggcttcttgattcctattttatcccctttaacctaggatagctaggtctatagtgcagactcagacctaacttacactttcatttgcagctgaagtttcggaacaaagacaaagatagccagatcatattaattacacggataggcaagctgtgccgaat

SEQ ID NO: 329459 - DNA, 363 bp, Homo Sapiens
  misc_feature (248)..(248): n is a, c, g, or t
  misc_feature (264)..(264): n is a, c, g, or t
  misc_feature (299)..(299): n is a, c, g, or t
  misc_feature (309)..(309): n is a, c, g, or t
  misc_feature (318)..(318): n is a, c, g, or t
  misc_feature (342)..(342): n is a, c, g, or t
gaaattagtatccgcaccctcactaggttggtgcatcaaagggccctctgtctgggaaggtgacatgaaggagggaaagatccctcctgatgggaaggacctgattgtagtaccctttcctgttggcttacccttgattgggacatagtgcagccacatgcagcagggtgttgtcatgtggacgatttcataaaaacacaacccatcttctagttctcacttcacctgagctcaggtgatccaccttncttgggcctttccaangttactggggatttacaggtcatgtaggcttactntggccccggntcccaaganacattgttaggtttttgttctttnggttaaggtagttcatgggtt

SEQ ID NO: 329460 - DNA, 385 bp, Homo Sapiens
  misc_feature (26)..(26): n is a, c, g, or t
  misc_feature (53)..(53): n is a, c, g, or t
caccctaaagggacctggaatgtggnaagagaatatccctgaacctaaaaagngggaaattagaagtcattttccatggaggtgatgattaaagctttgttaataggtgagattgccaaaaaagtcctagacgaataatagagttgtcaaagaaaccttcaataacaaacaaggaggaaacagagaaatagttgaagatgtaaaagaaaaccaatttaggaggctgatgcagccggattacttgagctcaggagttcaagaactgccctgggcaacataatgagatcctgtctctacaaaaaatagaaaaattagatgggtacggtggcatatgcctgtgtcccaaatactcgtgatgctgaaatgggaggattgcttgagccca

SEQ ID NO: 329461 - DNA, 650 bp, Homo Sapiens
  misc_feature (33)..(33): n is a, c, g, or t
  misc_feature (44)..(44): n is a, c, g, or t
  misc_feature (98)..(98): n is a, c, g, or t
  misc_feature (578)..(578): n is a, c, g, or t
  misc_feature (589)..(589): n is a, c, g, or t
tttggagaaagctgctttctggagcagtttcanttttatttttntatttaaggctgaaggacagtttcaataaacatgcttcttcccatagggatttncaaagatagatcgtttttgcatgtcatataggggagaatgaggacatgagacaccaagaagatgaagttttcaggagcagaggagaaactttacaccaacatgtctgaccttcattgactcactacctgggagccattttttagctgttgagttaagaaacagaaaaaggagcctggggcttctgactctttcaccaggcttaggggagtgagaggagggtttagacacgggtagggcctcttggccttgggtgcagccccgctgagccatctcctcctttggctgggtgactcctttctgctgccttgacaactcctggaggagaaacagatggggcctctgggctcctcccagccctgtagggtggggctcctgcctccttcttgaagtttacctgttgctgccacaagttctgctcccttcgtctttcctttgaatcctggggttgtgcaggaactagccttgtttcagttgaattnggggagaactnggaaggggaaattcgctgtgtttttctgtttaagccagcaattgaaccccaacaaattccc

SEQ ID NO: 329462 - DNA, 491 bp, Homo Sapiens
  misc_feature (50)..(50): n is a, c, g, or t
  misc_feature (350)..(350): n is a, c, g, or t
gttcctgggcaaccccacgcgccccccaaccccatggccccagcactggntcccgtggggcaactggctggtccctgctgtggcagctggactgtggcgacggaggcactgaggttggctgggctgctcagctggaatgaggagaatgtcgttcagtttgttctccgcgtcgtaagttgttcagaaacacctgagccaccgaagaagtgctgctgggtgggctccctcgtccgcacgttgtggggtccgagcaccacgttcacccaggcgctggggtatgtcccgcaggcagtgcgcggccgtcagcacgaagctggggtggatcaaggtgcctccgcagaagtggctgncccgggttcccccgcatctgcagggaggccatgtagggccgggagctgtgtgcgcctcgtgcccgcccacgatctccgcagctcgggcagcaccgctcagcagcaaggccagcagcacggacgccagggcagggctggggg

SEQ ID NO: 329463 - DNA, 468 bp, Homo Sapiens
  misc_feature (409)..(409): n is a, c, g, or t
  misc_feature (421)..(421): n is a, c, g, or t
aagagatttttaattcagtccttgatttatgcaggacttacagcttggctttcaggctctaaactgtctttgatttgaaggtcatgtttcactggggacccacccctatctacctaggcatttgactggctcatttgactgccttctgcagctatcacaataaactctctaaaaatctttggtcatctctgtctatcccccaaatttcactcacaatagttactaaaaatcagccattctttccaaccttctctccagtgtcttcagaaccatgctgttctctgcttggctcctccttgccagcctgacccatcagcccctttcattgcccttttctaacagcctgtcccagaggatgtggaaacttcccaccactcttgggaaaaaatgggaattttttcaaggaggngcaggttcccancaaaattgtaggcaaattaaatcctttcattcattttcaaattattt

SEQ ID NO: 329464 - DNA, 441 bp, Homo Sapiens
  misc_feature (58)..(73): n is a, c, g, or t
  misc_feature (76)..(76): n is a, c, g, or t
  misc_feature (96)..(207): n is a, c, g, or t
  misc_feature (229)..(242): n is a, c, g, or t
taccttcggcccgccttaattaatttaatttatttaattgcgacagagtctcctaatnnnnnnnnnnnnnnnnctnagcccggtgtggtggcacgnnnnnnnnnnnnnnnnnnnnnnnnnnnnnnnnnnnnnnnnnnnnnnnnnnnnnnnnnnnnnnnnnnnnnnnnnnnnnnnnnnnnnnnnnnnnnnnnnnnnnnnnnnnnnnnnagaagagtgaaactccgtctcnnnnnnnnnnnnnngtttactatcttaatatccaagtggtgatatcaggaagaaagaagattgaggatgatgccacgtagagatgaagccacacacatgctgcagatatccaattcaggttagccctgttgtatagagtaactctacattctaaaccataagacttaaggactatttcttagggattggattggacccacgtgcagaaccata

SEQ ID NO: 329465 - DNA, 339 bp, Homo Sapiens
  misc_feature (49)..(49): n is a, c, g, or t
  misc_feature (133)..(133): n is a, c, g, or t
  misc_feature (147)..(178): n is a, c, g, or t
gtattttttggtagagctgtgggggcgggggtcttttttttgcccaggntggtctctaactcctgagctcaagcaatccacccacctcagcttcccaaagtgctgagatgacaggtgtgagccatcacaccangcctaatgtagccnnnnnnnnnnnnnnnnnnnnnnnnnnnnnnnnggagaacttctttaaataggcatcaaccatcaaccttgcaccttggagcagcttcccagggcttaaaacaacacctgaccaacccagccaaagccaaagccaaagtccagttcaccgccccgaaaccactatcaccattcttaggtggtcaaccgaggacc

SEQ ID NO: 329466 - DNA, 331 bp, Homo Sapiens
  misc_feature (24)..(24): n is a, c, g, or t
  misc_feature (56)..(56): n is a, c, g, or t
  misc_feature (75)..(77): n is a, c, g, or t
  misc_feature (86)..(86): n is a, c, g, or t
  misc_feature (96)..(96): n is a, c, g, or t
  misc_feature (109)..(201): n is a, c, g, or t
cagtctcaaacatctcaaatgacncctataaagaagggtaggagtggggtggaccnatgtaacgaatgccttttnnnttttggtcntagttcaggncgctatagcagannnnnnnnnnnnnnnnnnnnnnnnnnnnnnnnnnnnnnnnnnnnnnnnnnnnnnnnnnnnnnnnnnnnnnnnnnnnnnnnnnnnnnnnnnnnntgaatatttgaagagaaaacgaagaggttattaaatgtgtttgggaatatcataattataataggtaagcaatattcatgttgttactattgtgtcttttcctttgtaattattaggaaagctagtggaa

SEQ ID NO: 329467 - DNA, 342 bp, Homo Sapiens
  misc_feature (180)..(180): n is a, c, g, or t
  misc_feature (288)..(288): n is a, c, g, or t
agtaaaggcctgggcagagttgatggtgaaaaaaagctgtatttttataccaaatggaactttagcaacacgttggactactttgtcgggcagagtggtcttcagacaggtgatgctgttggcttaagagatgaacacgtcttctctctgaatttgtttttattggttggtttcacttgnaacagaaacgtttgaatggtgtgaagattctttagaaaagtgattggatccatctcaattgtggcacttgcaacagcagtgatgtaaatgtgtttatttgtagttttncatttttaactgtgtcagccttaccacacctattttgaaagctggatcttttag

SEQ ID NO: 329468 - DNA, 542 bp, Homo Sapiens
  misc_feature (355)..(355): n is a, c, g, or t
catgaaaacagatttgggggagggtgggagagagaacaaggggaggagccagctgcttcgattttctgaagtcggaatgagggcagctgcttcaagacacagatctgggtccccacagtgacatgatgattgtgactggaccggaagcgggttagtgaagcaccattttctcctaagtcttattccaagctaagcaggcttaaggttacagtggaaagtgagagcacacagaggagcggacatgcagcaaggcgacgcagggcaagcagcgaggggtgggtgacccaggggagtggctcagttcacgaaaagcgagccgggtgaactccacgtagtcgaacgcggtggggagctncgcggcccttgccttccacgtagggcttcatttgggagacgcagtagtcggcttgttcccgggtcaggttctggtagagctcctccttggtcacgtaaggctttccctctgagctgagggcccggaaggcgctctcaatctcctcgctggacttgacgttctcagtttcgcggctgatcatgaaagc

SEQ ID NO: 329469 - DNA, 466 bp, Homo Sapiens
  misc_feature (429)..(429): n is a, c, g, or t
tataataagaataaagctgatacaccgtcttccagcctcattttctttatatggattccatttacttcattctcctgcttctaggtttctgatgtgtttttacaggacaaaatgttacaatccctagaaatttattctttcatttttatcactcccattacagactgtttctctgtccttgtgaaactgggagtccacagggaggtgccaatcctgggataaaagctcagaatcactgtaggggaatcttgattctgacctctaactgtatatacacaccaccaactcaccaaccggggttcccgtggggcacttggcactgaggtcctcaggaaaacttcaagggtaggcttcgggcctgtcggcaaggcctcggggagtctccccataggatggcgggaaagtgcaggtctttttcacccaactcangggcggtcaccccggggactttttcggggccgctggg

SEQ ID NO: 329470 - DNA, 406 bp, Homo Sapiens
  misc_feature (154)..(154): n is a, c, g, or t
ttttaaacgcagcctatgtgtaggttttagaaagttcaatttcggtatttgatcactcccttcccaaatgccccgtaggaaaaggcaaccccatcacccacaaaaggttgatgaagagaagaatacagtaggagcctttgtttatataggtgcnaattataagaattaaaataagttcaagagcacaggatcttccacttccatgaagttggtcctaaacatatgttctttggacttaattttggttcaagtccaatctgtgcagggacctatataagcacacatggaatctatcttacactcttaattctggttttgccaagaaaaagataaagaattttaagagctggaagcgaaggggttatctgtgtccccaccaaagcagctgaaatgctgcaaagcatac

SEQ ID NO: 329471 - DNA, 435 bp, Homo Sapiens
  misc_feature (30)..(30): n is a, c, g, or t
aacatcaagcattgtcccttgccctgaaangggatcattcaaagcctgcaagaagttttggttttattgtctccttcaatacatgtctgtaagtggatactctgggtataaccccaactctcatttccaagggaaagacttgggtgtccccagttgctgggagtgctgacagtagacagctttcagatgtcagcacttcagggaattgtctcagcttcagaaagccactttccgcgaggttatgtccttcctgggatggctcacgtgcagtctagacaactctggatggccattctaactcaagaactgcccaggctgacactgatattgggactgcaggtagcttcacttcctactctgcccaatcctgctttcttcccttcccttccacaagtgttagtggatgctcaactgtgtgctcaactgttttcaaat

SEQ ID NO: 329472 - DNA, 455 bp, Homo Sapiens
  misc_feature (204)..(204): n is a, c, g, or t
  misc_feature (270)..(270): n is a, c, g, or t
  misc_feature (293)..(293): n is a, c, g, or t
  misc_feature (376)..(392): n is a, c, g, or t
tttacatctcagaaaatgactataattccttaatatcaaattatttagtcaatgtcccaaatttacagggaaaaaccactttttttaaacagttggtttgttcaaatcaatagacccacatatactgcatttggctaacacatgtcttgaagtatcttttaatctatggggtttctctcactttttcttccaatttacttaggnggaaaaaactaggtaaactgtattgtaggttacacacattctggtattttgctaatcgtatggggncctctggtcccttggcatttccnggaaaattagggaatcggaaatctaggaggggcttgctcagggattcagggatttttattttagggcaagggaaaacttcaannnnnnnnnnnnnnnnnatactttccctacccaccacccaccatcagggggccacaccaaaacatctagggatccccttt

SEQ ID NO: 329473 - DNA, 468 bp, Homo Sapiens
  misc_feature (379)..(379): n is a, c, g, or t
  misc_feature (458)..(458): n is a, c, g, or t
tttaggaaatttgtgtgtttatttataaatttatctatctgttatgggaattggctcacacaattttggagtgaagaagtcccatgatctgccgactgcaggatagagaagcaggaaagccagtggtatcattcagaggctaaaggcctcagaacaaaggtgggggtgggaggcgatggtgttagtccctgatcaagtctgaaggccagagaaccaggagtgtggaggtcccaggataggcagagatggatgtcccagtcagagaggtcaaattcacccttcctgtctttttcttctctctgggccctgacagtttggtggatgcctccttcattgctgaaggaaatctttgctgtcttctgattcaaagggcaaatcntctttctgggaaacacccttcacaagcacaatggattttacccgccttttgagcatcctttagcccagtcaagttgatngcagaaattt

SEQ ID NO: 329474 - DNA, 606 bp, Homo Sapiens
  misc_feature (39)..(39): n is a, c, g, or t
tcaatcagtttggtttgtgtactttgaggtttgctagancacatttacgatcattgcatttttgttggattgatccttttatcattatataatgttccttttgtctaataattttctttgctctggagtctactgtatttgatattaatagtgtcactctgttttgattaatgtttgtacagtttatctttttatatactttatcaacctacgttgttcattatgttatgagtttcctaagaaaacatttttaggatgggtggagcaagatggtggaatagagaacaccaccgatcataccccactccccccgcaggaagactaagattggcaactatccacacaaaagcagcagtttcacaggaactaaaagtcaggtgagcacttacagagcatggttttcacttcatatggctgaaagagaacagtttggaagttcctgaaaaaactaaaaatagagctatcatatgatccaggaatcccactgctaggtatatgcccaaaagaaaagaaatcagtacatcaatgagatatctctgctcccatgtttactgcagcactgttcacaagagctaagatttggaatcaacctaagtgtccattcac

SEQ ID NO: 329475 - DNA, 552 bp, Homo Sapiens
  misc_feature (508)..(508): n is a, c, g, or t
aatctctgttcgtcactgtccactgaccaaggaaaaattcacccctgaatggttttacatccaattttttaaaagtcccattgctggtccaattcaaatgcctcattcagaaaattaaatcttttaaaatactaaacttattaagaaatgtaagcctgaatgtttcagcaagtaataaaatgcactgacacatctgctacccctcaagaggcaaaattaaagagagggcagaagacaccagaaaaattttagtcacatccgatgaagaaaatgacatgagaacctcagaaggaaaggaaaaataaccaatcagggatatagctgcacgcaagatggacttaatgaatgaacacgtgttccccatgtataccttttgtacaaatatcaatggagacgactgacttgttgaggtgatgacgcgctatgataccagggagtgtaggtttcatggtgcagtgtaaaggtgcagtggattccagggcaaaccagtcaaatgtgctaacatttncgactcacagtaaagtattctcccatagtcctttcctgctaaat

SEQ ID NO: 329476 - DNA, 646 bp, Homo Sapiens
  misc_feature (17)..(17): n is a, c, g, or t
  misc_feature (26)..(26): n is a, c, g, or t
  misc_feature (45)..(45): n is a, c, g, or t
  misc_feature (66)..(66): n is a, c, g, or t
  misc_feature (95)..(95): n is a, c, g, or t
  misc_feature (111)..(111): n is a, c, g, or t
  misc_feature (164)..(164): n is a, c, g, or t
agtaaaattggtaaacncctaggggnggaaagggaaaaagtcctnaagtcatttcaaagctccttncccttagggggaaaaattaaaagggaagncccctgcaaaagtggnagctccctccccccaagaagaggccaataccccctgaagatttggccatggantcctggggcccctgaactgggttgccatttccctccctgtgcctcaaaagttccctccttcccaccctgctcctgctcagcgcctcagaagcccaataatcgcactcaattgtttcctgtgcatttttaacaacccctgaggcggccttcaccacatgataagttgcctgcctaggctatccaagttacctctagaaggactattcatgtttttgttagtgctttagttacacagatgtacaatttttgagaagtttatccctaatcttatttttactgtaaactctttaatgaacattatggcagaatgcattgtctttgaggaacaggtatcttgtgttattgtagaagtattgtacacttagtggatgcttactaaatgctgacacgttatttattattaattgtcacaggaattttaaaaagtaattccatggaatgactgtattaacaagaacctaattacaagaattgagcaagac

SEQ ID NO: 329477 - DNA, 393 bp, Homo Sapiens
  misc_feature (254)..(254): n is a, c, g, or t
  misc_feature (269)..(269): n is a, c, g, or t
  misc_feature (351)..(351): n is a, c, g, or t
aacaaagtgaatttattaagtaacaattcagctttcatttatcaacaatatgtaagtgctagattaaaatacctgatcaatatgagatgacaatggtgttctagtgaagacacagaaatccagtgatgaagccttatcatgagtaaatggatggtttccattagattttgtcaaatattgaatacagatatccattaatatctctggggctcgagggtccccaaataaaaaacactcggtaaagacagtcaagngggaaaagggaaccntgaggatataggaggaatctggggggtaagggccaagttctttgcccatgcggcatcccccctctttcttgctttccatccngccaaatttatcctggcatgttttttccggagggttatggtt

SEQ ID NO: 329478 - DNA, 439 bp, Homo Sapiens
  misc_feature (425)..(425): n is a, c, g, or t
attcggcacagaagaattgttttagaaagacaatatttaaaacaccgcactgccaatatattgatcctttatagttatttcctaaaatgctgttttcgaaacattcctttttcaccctgttgtgtggcttagacccatctcgtaatctgttaattggaaagaggctacagacaccagcagtgtgcgttctgcaggtacacgctgccgaagtaattcctgctcatccatgccctgtctctgtctcttttagagtcataccttatttgagtataggttgcttaattttgctagacttcctgaaaacactaaggtgggagtatcagaagtgattttagtcacagttctgcggggagagcttaggaataacatcctcctttggggaggtgggtctcgggtgcgtgggatgttgggtatacagtctttantgtaagtctgatac

SEQ ID NO: 329479 - DNA, 528 bp, Homo Sapiens
  misc_feature (36)..(36): n is a, c, g, or t
  misc_feature (50)..(50): n is a, c, g, or t
  misc_feature (63)..(63): n is a, c, g, or t
  misc_feature (400)..(400): n is a, c, g, or t
  misc_feature (404)..(404): n is a, c, g, or t
  misc_feature (435)..(435): n is a, c, g, or t
  misc_feature (447)..(447): n is a, c, g, or t
  misc_feature (463)..(463): n is a, c, g, or t
  misc_feature (502)..(502): n is a, c, g, or t
  misc_feature (517)..(517): n is a, c, g, or t
aatggatggaacctgaaactcccgccttcgccgatnatccagccaacggnctggggatgaagnacgccagctctgcgtgtgctggcctcccgagcggtggtcagatccagagacagagtgtctgaagtaagctacccttttaatactatctgtacctttctaactacagatagaaaaggggtcatgtttataagttacggcggtgctagtttttatttcacttgagtccatacaaaaagcaaaaagcgcctgttgtataaaaacagcagaaatgatgctaaactgttaacaccagagaaaggtaacgggaagaacgtgggcctggggtcccaccatccttgccacgcaaacatccaccagtgcctcatccacctcacactgttctgaggcacacggaggnctgncattaaccaccgtgaggatctctgggaggtngggtaacgatgnctaaactgtcctgttnctttaggtggcacgttaagacttcacgtttcccacacanggtattcctttttcncgcacattttt

SEQ ID NO: 329480 - DNA, 402 bp, Homo Sapiens
ttttaaaaattattttgcagtcattattttctgcttagaaaaagcactattaggaagctgttatttttaggggaagttcattacgtattacttgcctgataaaaatcacttacttgcaatgaaatatttaaaatagttggcatgaatgaatatgtaacttcttggtacttagaaaaataatttaggccattctaaaagtacagctaacctctattagaggagaagggctgacttagagtgaacaggattcccaccctctacggacagattcgatttcacttgctggttttcttttcaggatagcgtcaaataatgtgcaggaaaaggaataccgtgtgtgggagcgtgagtcttacgtgcactaagaacaggacagttagcatcgttcccacctccagagat

SEQ ID NO: 329481 - DNA, 287 bp, Homo Sapiens
  misc_feature (37)..(37): n is a, c, g, or t
  misc_feature (42)..(42): n is a, c, g, or t
  misc_feature (48)..(48): n is a, c, g, or t
  misc_feature (65)..(65): n is a, c, g, or t
ccctccttacttttcacaaagatgatttcaaatgtcncctantagaantttcactgtatagagantctcttccctgtgttttaccttgctcctctgccaggctgtttaagaatccacatgatttccatatggtctattggattaagagaaaaaaattttaaataagatctagtaattagtcccatttgctaaacagttttctcgttcacttttctccaaactgcattctctgtccatgttatatttgacatgctttgtgacattgccaggattccttccatttctca

SEQ ID NO: 329482 - DNA, 524 bp, Homo Sapiens
  misc_feature (375)..(375): n is a, c, g, or t
  misc_feature (452)..(452): n is a, c, g, or t
  misc_feature (469)..(469): n is a, c, g, or t
  misc_feature (485)..(485): n is a, c, g, or t
  misc_feature (494)..(494): n is a, c, g, or t
ttgaattgtttggtgaagagtgtctcaagccaaggagcagacacacttgtgtgccccgctcccactcttccctcctttgttcttttctttgagctgggtccattggaggagcattgtatggtgcccctgctgggtctacaaggcccctttttggttcaattaatgagccataaataacccaatgaaggtgtcaacaaagagggtaatttatcataccttgtcaagacggcaagctttgtgaggcaagcgctcattcacagtctggtgcaacatgttaagatttattcctgggccagggtccctcctcctccagccctccctccccctatcaaaatttatctttcacagggaatcctcacaggtgtgctgctttgnacaaataaggtatgaagtctgggattcatcactgggtggtctttgttgagaggaaggcagcggggaataaatttatnttagaggggaggtactngttgattcaaacacantcaaggggngcaacgaggtttttccctcccccgggtttt

SEQ ID NO: 329483 - DNA, 493 bp, Homo Sapiens
  misc_feature (51)..(51): n is a, c, g, or t
  misc_feature (71)..(71): n is a, c, g, or t
  misc_feature (79)..(79): n is a, c, g, or t
  misc_feature (84)..(84): n is a, c, g, or t
  misc_feature (113)..(113): n is a, c, g, or t
aaatgcatctaataaaggctaaggccaatacgagcaatttctggtgcaggncgttgaccattttcgccggnaggcccanatacnaccatgtaaaccatccccaatcgtctccnaccttgtagaacatcaaagttgtcaaattatggcatcaaagcaggtaataacaggtcaattaagaagtgtcactacctgccatgggggtgctctctgctgacaatgctgtgaagccaacaatgtcactgaaagtagatggtaacactgtcaaaggcctcagcctgtacagtctctccccgttttaactgctctgccactgaatggggtaggatttggtagagcagagcttcagccttgcgtttttcctccagataggcctgtgtgcgttcctccaccagcttctccaagttattggcatactgttccatgcgcagcaggaggttgtccaatatgctggtgccaccctccttgttaaagcgccgaatgaagcccttaatct

SEQ ID NO: 329484 - DNA, 355 bp, Homo Sapiens
  misc_feature (92)..(92): n is a, c, g, or t
attacgaaaaagaaaactagggaaaactcttttggacactggtactaggccaaagactttgtgactaaaacctcaaaagcacaggcaacaanaaacaaaaaatagacagacgggacttagttgaactaaaaagcttctacacaaaagaaataatcaacagagtaaacagacaacctacagagtgggagaaaatatttgcaaactatacatccaatggggactaatatccagaatctacaaggaattcagacaacttcacacacacaaaaataaaataatcatcccattaaaacatgggcaaaggacatgaacagacatttttcaaaagaagtttgacaaaagaacggcaagatct

SEQ ID NO: 329485 - DNA, 110 bp, Homo Sapiens
tttcgcagtgcatataaagttatgtttacaatatactgtagtctactaagtgtgcaatggcattatggctaaaaactgtatatactttaatttaaaaattatttattgct

SEQ ID NO: 329486 - DNA, 408 bp, Homo Sapiens
  misc_feature (17)..(17): n is a, c, g, or t
  misc_feature (35)..(35): n is a, c, g, or t
tgccaaccgttacaaancccctttgtgggatgtgnaaaataatccttttggggaaatgtgtgccttagacccttgatgtgatgccataggggacaaatttcctaattcctatttgccttccctaagaaaatgaaatgttacctaaataaaccagccgtcagggcaaggagcccccggtccctaaagaaaaaccttgcacagcatggtgaataaaattaataatggtgtattgcagattttaaaattgctaaaagagtaaatttcaaatgctctcatcataaaaaatattagtatttgagggaatgggtatgttactagcttaattgaattattccacattgcattcatatattataacatcactttgtaccccataaatttacataattagaaattgtcaatttacaa

SEQ ID NO: 329487 - DNA, 173 bp, Homo Sapiens
ttatggtacagtgcatcttgtattaactccacggccatgagacaatgcaaagaacacaaaacttttcaacaatataaacaccatatatcttcaaaatattgtgagaaaagtaaattttgatgggctaaaaaaacaaatatatacataaaggcacatgtaaccagaattctacc

SEQ ID NO: 329488 - DNA, 403 bp, Homo Sapiens
  misc_feature (196)..(250): n is a, c, g, or t
tgtctctgatgctagaactagtttggtaactgttaacatggtcatttttcttgcttcacagttcaattttcaattcgtacttatttatggacaaaattcagtgttggaagctttttcccaaggttttatttcagatttctttttcgtttggtttggttttggcacctccaagtggtgtcatttgagcattgtaggnnnnnnnnnnnnnnnnnnnnnnnnnnnnnnnnnnnnnnnnnnnnnnnnnnnnnnnccttgcagatactgtacagtaatggtcaactttgccacttgcactgagttttgggtcaaacctattttcttaaatgaagttgtaacttcggtataactcaagtatactgtatattctttgcttttagttaaaaaagtaaaacattttagctaa

SEQ ID NO: 329489 - DNA, 326 bp, Homo Sapiens
  misc_feature (16)..(16): n is a, c, g, or t
  misc_feature (68)..(68): n is a, c, g, or t
  misc_feature (90)..(90): n is a, c, g, or t
  misc_feature (125)..(125): n is a, c, g, or t
  misc_feature (137)..(137): n is a, c, g, or t
  misc_feature (168)..(168): n is a, c, g, or t
aatttccccccgaggnccttagccaatgggaaatttgattgcccccatgtataagaaccaaattgatncccctatcccacctgattatgntcctctggttagtttagcccattttgaacttaagntcatatgacccntagtgcttttggcctaaacatacagaatacnacttgtatgcagaagagaattagttgattacatgtttcaaccttttagggtgataaatacatgtataattgtttacatacttaaaaggaaaaagttgagtaaatttcttgtcatatagtggctctacgtaatgtagcctgtattaatgtgaaatattt

SEQ ID NO: 329490 - DNA, 456 bp, Homo Sapiens
  misc_feature (371)..(371): n is a, c, g, or t
  misc_feature (395)..(395): n is a, c, g, or t
  misc_feature (412)..(412): n is a, c, g, or t
catttatttttaaaataaaaattagaggaaagcccatgaactcattttccatgaacataatataatagtactcacctatctcctctacccaacttgtgttttagatgagtccttttggatctttttccccataatggcctctctccttttgctttacagtgcaatcagggcagaataacagatatgttgagtagctaatttatatttctgaggatctccataggaactcttaagttctaaggtcttcataggtctttgcaccttgccaagtttgctttcctttgggggaattctgtcataaccacaagggttattccccaggacatggcagtttgggggggaaattaacccgggcagtagggtaaacaggnctggggttagggaaagggtggggnggtcgtaataaggggtntttccaataaccggggggaaggttacggaggggtttttgaggta

SEQ ID NO: 329491 - DNA, 419 bp, Homo Sapiens
aaatagagaactcctacagttttggttaaatgttcaagaacacttagttcaaagcatcttaatggacgagaaatctgtttccaaaaaatctaaacaaattcagtgtggaaaaggtaaatcaagtaagagtagtaaaaactgtaaactattctttacatgggaaaaataaataataatcatatttacttaaagtggcaacactattaactgctgacagaattacggggggctggaggcttacagattctagaatccttttattttttgtgttaaaggaaatatgttcgaatatttactgagctcataggatgggccactgtgaaccaaacaaaggccctattctagtaggaggagataaaccaaacacaaacaaacaagtactggtggggaatatttgatggtaatacgtgctattagga

SEQ ID NO: 329492 - DNA, 332 bp, Homo Sapiens
  misc_feature (235)..(235): n is a, c, g, or t
gaggtacaaataaatacattttatcaagggctgacaaagactgtctgaattccccattcctctgaaatgacatctttcaatgatatgacctctagtggctacattcatgacatttacagtcaaagttgaaccagcgagggtggaagggcactcgggagtggccgctgccaacagcaacagactgcccagaaggaggctgtctgcagtcagagtcatggaaaaggcaaattctganaacccaaaacacgcactgaccaaagtcccgtgcggaactgcagaaatgcaccacgttgctcagactggccatttctcagtaacaacttcgaatgctg

SEQ ID NO: 329493 - DNA, 567 bp, Homo Sapiens
  misc_feature (58)..(58): n is a, c, g, or t
acagtcaatggcatctgacaattagtagcatggtttcctttcttagtagtaccatatngaccctgtaaatcctagattccaattaaatatagtatattaaagtggctttaattttctttttacttttctgtaactttgcagattttctatcatgaaaacatactgcctttggacctagaaaaaagttatttgaatgtataaagtactggatgtggcacctgactttcaaggctgacttttgttcttacttgatgacagggacttctccacggcattctttaacagcattcaccgtctcgggcctctggcgggcaccatgctctcttctcatagcagtccacagctactgccactggactccagtacccctaaactcttcggcgcctcgaagccttgcacagagcctgtggtggctgccagtgccagacctgcaggcgattctgtcaataaagacaggttagtgggtgccaaggcttgttcctgtccctggggaaagttcaggtttgcacatagttttgaggacagagaattttattctgtttgcactttgtggccccttcaaataag

SEQ ID NO: 329494 - DNA, 162 bp, Homo Sapiens
ggtagctcaacatctttatttttcctctttagcccgagggtaatcctgacaaacagcttcagccaggaggaggcagagaggactgggctgggcaaaggctccaccaggacctggcctcctcctcctctccgccctcggccggggtatatggggtgggggcca

SEQ ID NO: 329495 - DNA, 486 bp, Homo Sapiens
  misc_feature (93)..(93): n is a, c, g, or t
  misc_feature (370)..(422): n is a, c, g, or t
gaagggggttgacggggagcaggaaacatggtcgttagagggccaaattaaaaattatctttaaaaaatttaaggtctaggggccgattgttnccttggatattaagttaaaattaaatatgcttaccttggtttgttaatttgttgcccagtgtgacccctatacacagataaaatttaagatttaccatgctgtcttaccaataggttatctgtcaaattaatcactgacaaaacttgattttcattgtagatcaaagaccaagctcaccaattcgacatcagggaaggaatgacgagcttgagcgtgatgaaagaagagaggaacgaagagtagacagagtggatgataggagagatgaaagggctnnnnnnnnnnnnnnnnnnnnnnnnnnnnnnnnnnnnnnnnnnnnnnnnnnnnnacgtgaacgggatcgggaaagagaaaaagagagagaactagaaagagagcgtgctagggaacgg

SEQ ID NO: 329496 - DNA, 545 bp, Homo Sapiens
  misc_feature (397)..(397): n is a, c, g, or t
  misc_feature (405)..(405): n is a, c, g, or t
  misc_feature (424)..(424): n is a, c, g, or t
  misc_feature (442)..(442): n is a, c, g, or t
  misc_feature (450)..(450): n is a, c, g, or t
  misc_feature (501)..(501): n is a, c, g, or t
  misc_feature (529)..(529): n is a, c, g, or t
ttgcttttgagaatagggatttttttctcatactttctaaatatatttttgtgggtttccaagaaagccatgggtctttggcatatttatcttatgattagctatgtttctggactcattatttctaatgtttttcagttgactcaactgaggtttttaaaccaaaaatcattgcttataggataatgatcatttaattttttctttttaaactacctatttgggttgtgtatttcatcacacttttgactttttaggaatattgtagagtaaaacctttggttttagtcacatacacttgtgcttcaagcactcacagtccagcttccgatgactctgcagatgtgggtttcagcagccaaggtgtattgcacctgctcatagaccttgggagtgnaactttcnctggtttacaagatgtgcncactgcctaatgatatcncagatgcnggtgcattttattccagaatcccagtaattcctggatgtgtgagaatgtantagaaattaaatattttgaaataagatngaataagtggggaaaa

SEQ ID NO: 329497 - DNA, 387 bp, Homo Sapiens
  misc_feature (17)..(17): n is a, c, g, or t
  misc_feature (67)..(67): n is a, c, g, or t
  misc_feature (74)..(74): n is a, c, g, or t
  misc_feature (78)..(296): n is a, c, g, or t
actttttaaaacagganaaccagggtttttattattactcaaaatcaacctcccctgaaaaatttgnaggctanggtnnnnnnnnnnnnnnnnnnnnnnnnnnnnnnnnnnnnnnnnnnnnnnnnnnnnnnnnnnnnnnnnnnnnnnnnnnnnnnnnnnnnnnnnnnnnnnnnnnnnnnnnnnnnnnnnnnnnnnnnnnnnnnnnnnnnnnnnnnnnnnnnnnnnnnnnnnnnnnnnnnnnnnnnnnnnnnnnnnnnnnnnnnnnnnnnnnnnnnnnnnnnnnnnnnnnnnnnnnnttttacaataataatattatctacaggagcaattggggaggttcatgatctcgaagcctttggctgcatgactcctgagccgtcatttcta

SEQ ID NO: 329498 - DNA, 471 bp, Homo Sapiens
ttttaaacaggagacaggggttttattattactcaaatcagcctccctgaaaatttggaggctagggttttttaaaggtagtttggcgggcagggggctcgggaagcgggaatgctgattggttgggtcggggatgaaatcataaggagttgaagctatcctcttgcactgagttggttcctgggtgggggccagaagaccagatgagccagtttactggtctgggtggtgccagctgatccatcagaaggcagggtctgaaaaatacctcaaacacccatgttaggttttacaataataatattatctacaggagcaattggggaggttcatgatctcgaggcctttgctggcatgactcctgagccgtcatttctaatcttgtggccaatgtgtttagttttacaaaggctttctgggtccccaggcaaggagttgggttggtctcaaggaaggggctgtttatcatcc

SEQ ID NO: 329499 - DNA, 293 bp, Homo Sapiens
gttgatggtgttggaaaacaccctaccaatataacacttaagttcatttttagcataatatctgactgggttttcagatgttttaatattagagaagaaatggtggtgtaagagacaaagaaataacaattatgcataaaagaattttatttagtggccagatcccaatgaataatgtcagtcattgcttggttctgctaaaatgtggtattagatatattcttaagaaagtgtacaattgcatcaccaaaagctgtttaatttggattgtgtagaataaaagaaaactacat

SEQ ID NO: 329500 - DNA, 834 bp, Homo Sapiens
  misc_feature (179)..(179): n is a, c, g, or t
  misc_feature (189)..(189): n is a, c, g, or t
  misc_feature (289)..(289): n is a, c, g, or t
cgctccggtggacacagactccgcacctttcgagaccgctctttgccgcaagagaacccgcgctgatctcgccacccccacggacggcgcgctcgcgccggagagcggcggccttactccagggtcggcccactgattgtgtgacccatgccatcccgttgtacgccgcatgcagtaantacccactancgatacgtcggccgtaataagcctttttcttctgttttacatgtgttatccacttattggaatagtcacaaccaactggtccatgtccatcacaggtgancggtaccaactggtgcatcaaccaatggatactacttggaataaaacgaatacatattaatgcatgcaacatgatgactcgcaatccttatgctcagctaagcaagaagccagacaaaacacaagtacatactgtgtgattctatttacatacattctagaaagtgcagattaacctgtagtgacagaaagcagcacagttgttacttggggatgggaggcaagaagcaggagggtgggcttaccaagggcatgggaaactttccagagtgaaggggatggtgattatcttgattgtggaaatagcttcacgggtgtacacgtatgtcaaaagtcatccacgtacacatttttatatgcagcttattgtatgccaattatgcctcaataaaactgtctttcaacaatacacactagaaggcagcaactgcaaagtggcaattccagagttctgtgcaggacgctgcagtgattccgccccacttgttttcaccatctagggaaacgtcctcttcgtttttggtcttgtctttcaagcgagttcta

SEQ ID NO: 329501 - DNA, 375 bp, Homo Sapiens
  misc_feature (333)..(333): n is a, c, g, or t
taattcttgtcttttcaatcagtgattaggaagggaaatccagaatactgtattgaacccttcctagaaacatcctaaaattattctgcttaatgagttgatgttagatgttccacttaccaacctgttggcctgattataatatgatctttatcaaaaaccagtagatatatagtatgtaaatggaaacatcacagtatccctagatcagacccgcagtagttgctttcaaaaatggctgtctctttgaaaaagttcatggcatcctcttaaaacgtttttttatcccagactaattttctgctcaactgggtatttgggcagcatgcattncatttactctgtgtttatggtgattttgtgtgtacatgggaa

SEQ ID NO: 329502 - DNA, 234 bp, Homo Sapiens
  misc_feature (198)..(198): n is a, c, g, or t
  misc_feature (211)..(211): n is a, c, g, or t
  misc_feature (217)..(217): n is a, c, g, or t
atgcaccaccgtgttcggcttctttagtgatatcttctgagcacacaaagcaccagctaacattaacatgctcatgattttggcaaccccgcctagggtagaagtgtgatgaagcatttataagttaaatcacctctgtcataaattggtctcacagaatagtcctttctttttttacagtccattttttcccacttnatttgctattctnaatttncaaaaatatttgaattt

SEQ ID NO: 329503 - DNA, 339 bp, Homo Sapiens
  misc_feature (106)..(106): n is a, c, g, or t
agaaaatttaccaattaacctatatgggccacatttgtgacctccattggtatttctattgggcaatgctgtgctagactcaccagaacgtatacatatttttatnttttagactgatgtatacagtgcccttgtatacatgtgtatttcctacggcagttaactgaatactcttttaagagggagaagatcctcaaaaatctggattttaggcttgacacattaaagcctgaaacagctactaaatttgatggcatactaataatgaaaagcaattatttattaagttctggcaattttagaaggtgttaatcacaatgctaaaattaaaaatcactg

SEQ ID NO: 329504 - DNA, 361 bp, Homo Sapiens
  misc_feature (329)..(329): n is a, c, g, or t
atatataccaatgggatgggaagcatttatcacctagctgggttcttacttgagctctgaaaaaaatgatttggccacacaacctttctcaaggctctgatttaatggacttctctgctgcaaagccactgaaattctttgccttttaatatttgacatctcttcctctttattaccatctcacacagcccttataggccagccaggaacgagcccattagtctctgacaaataacttgtgtcgtttggtgaaaaatatgcagaagtttgggctgcaactttcattctccagccttgggttctggtttgtgggctttcactctcctctngggcaaagcatccagccccaggcagagctctt

SEQ ID NO: 329505 - DNA, 541 bp, Homo Sapiens
  misc_feature (35)..(35): n is a, c, g, or t
ccttgctgccctgtccccggggccccctctccccngtgtcgcaatcctcctcggccccctgcgctggagcccccctacgtcaagtcatttccccttcaattgccccgccgggtggaaggccgtccctgggaatgggcttgcatccccctccttctgcaacccccaaatgactaatatgggtccattctggcgacccacgctgagatctgggcgttggtcctcccgtgttccctttcctgctcctcctgtgttcccttctctagggtgctcctcgggctttacaaggtcactgtctgaacagagccctagtgattgggatatcatttcagaaagaaagatggtgatctggaatggcccagatcccttgtaagtattctgctgtgtcagaaggggtggtacttggctaaatatttcttatcctgttaatatttgcattgtaagtacgcttcgtttcttcatttatgcgggcactcatagatatatgagtccctactttgtgtaaggcactctgctagatgctaggaggaatgcaacaagttaa

SEQ ID NO: 329506 - DNA, 281 bp, Homo Sapiens
  misc_feature (188)..(188): n is a, c, g, or t
  misc_feature (210)..(210): n is a, c, g, or t
  misc_feature (232)..(232): n is a, c, g, or t
  misc_feature (244)..(244): n is a, c, g, or t
  misc_feature (265)..(265): n is a, c, g, or t
aaaggtgtgagccactgcacccagccacagattgcttaaagcattcatttaacaaatacttgttgaggatttgctacttgtaagactttaagcctgggcatctcagaggaggccagaggagggctgtataggccctgcctccagggtttttaaaggtcaatgggggcaaatgcctagggatttgggancttcaggggaaacgtgcttccncaagggtaacttcaggggaaancctcggggcttntcagggggacaaaagggtcantttggggaaccggaga

SEQ ID NO: 329507 - DNA, 267 bp, Homo Sapiens
  misc_feature (17)..(17): n is a, c, g, or t
  misc_feature (106)..(106): n is a, c, g, or t
tcctacaaggaatgtanccttagtaagaaccttttaacccaatgcctattttttgcctgatgtaaatttttttaacgaatagaaaatcatttccttttttcagtanctgcccaggtcggcatagttctctttcccttatatcttaaagtgcatacacaccatgcatgcctgcacacatatatctttttttctcatggctgagtttaaggaagtaaatgaatgcattctacttaactcttcacaatgtagttgggggtggtggctcat

SEQ ID NO: 329508 - DNA, 440 bp, Homo Sapiens
  misc_feature (51)..(83): n is a, c, g, or t
  misc_feature (103)..(103): n is a, c, g, or t
  misc_feature (418)..(418): n is a, c, g, or t
cttgttatgttgtgcagctttgccttgagctcccggactcaagcaatcctnnnnnnnnnnnnnnnnnnnnnnnnnnnnnnnnnagcatgagccactgcgccancatgtctacatttttatttagctttctttaaattgtcgaaagcatctgtaccacaaaaaagcgtaagaacttctatttttatttcagttctctaaggtggcagcttctgactctgtgctttggctttcaccaaatgctttcacatttctatttttgtatgtttcaaatgtgtttaaatgggtttaactcattcttctcaacactcaggaaaatacttcggatgacttctcccttctaaaatgggtttcagatatggaattcatggaaaatgagaggctataatgcagaaaattgtcaactctataacaaatgccncaactcgaggatactcaggggt

SEQ ID NO: 329509 - DNA, 470 bp, Homo Sapiens
  misc_feature (18)..(18): n is a, c, g, or t
  misc_feature (44)..(44): n is a, c, g, or t
  misc_feature (101)..(101): n is a, c, g, or t
  misc_feature (122)..(122): n is a, c, g, or t
gtccagggaaaagggacnccccaagcaagacacccccaggtgantggggggggcctatccccctcaggggagcccgtcctggcacctggctggtggtcccnactggcccaacagtttttttnccccagttccgatagtaagttggatgggcagggaagtcctagtcccagtattccattacctctgtcatggctggaactcagacatgaaatttaaacaggctttggtctcaatcctagtattctatagcctacactatgacttgtctcctataaccatgtgtgtgatgaatgaatccttgtgccctcagaaatctatgaatattcatatttcaggttaactcgtaggctagaagacagtcttactgatacacaactagcaaacatccgtgaactgtgatcccttttatgtggcttttatctttttagatacatcttggatagaactaatggataaattagtctgtttaa

SEQ ID NO: 329510 - DNA, 418 bp, Homo Sapiens
  misc_feature (11)..(11): n is a, c, g, or t
taggccggganggatccccttgaagccccaacaaagacccctgtcctcctttgaaaaaaagagaaaaagagtcgggagttagggaggaagttagacagagtcctaagtcccaactcccagacttaatgcaccaaactttgggcagtgagaataggtcatctatattttaacaagcaatcccaggtgagttacatactcattgaaatttgatcactattataggatctacagataggtttcaagaggtatatgcaaattgaaattgtatgcaaaaatttgtgtacaatgtatttctctgggaaaagaatcatagcttttatcagatattcaaaggggtttgcagctccaaaataattataaacaattgtccagtggctatcaaaaatgaagcagttcttttggagcacccaggttttaa

SEQ ID NO: 329511 - DNA, 399 bp, Homo Sapiens
  misc_feature (39)..(39): n is a, c, g, or t
  misc_feature (108)..(108): n is a, c, g, or t
gtgaagcccacggccgttttaaccaagcacctccaagcnccttcaaatgatttagatgcaggatattttaatacccacactttacaaagatacccgaggtttaagaanttggttattcctacttctgttttagatcagctattacagagtatgtgttctaaatgttctaaagtaggtctttattaccaagtgactgtacaatattgcaattgccattaagaatgatattgacattaatgtatagttttattgctaataattcttttattttcaaattttctgtttagaataatatcatttgaaaaaatacagtttacttaaatatttcccgattatttgcagagggtctaaagagagtacttaccggtaatcagtggctctttattgcctttattttgg

SEQ ID NO: 329512 - DNA, 583 bp, Homo Sapiens
caaacatattttttaaagtgagaataaggttggtttttaccaaatatttgttcctccttgacaaaagtagctctgtgtggataatatgattttattactacagttccagtcacttggttatatttatcttagcatgagcctttcacaccaagatttctatattttgtaacataggtgaaatatttaaaacatcaaaaactgtaaatctagatttttaaaaaatccaactgcaatgtcttttcctttgattgagatgatttgtgtaaactcaccagtcttgctttggagtgagcagaagagaatgactattttacgtggagcatcattgtgtgactgttgacctggacagtcccaagggctatgcagatggactccattggcacagggaggtttgacctcttccctgctattatccctcctcccaactgtacagatttgtttgttgtagtttatgtacttcttgatactgtcaaaaaattatctggaaatggttttattttgtgaagtgaacaatactttgtaatttatgatagtgtaaatggaaggcaaagcatcacatgtattaaattcttctgtctattaa

SEQ ID NO: 329513 - DNA, 504 bp, Homo Sapiens
  misc_feature (31)..(31): n is a, c, g, or t
  misc_feature (157)..(157): n is a, c, g, or t
  misc_feature (309)..(309): n is a, c, g, or t
  misc_feature (348)..(348): n is a, c, g, or t
tttatttagtcaaattattttacaacatggncttctttgacagttgtcagcttaacacttaatatagttaaaaaagtcaacaattacctgcaaaattatatatattttaatgtctaaaaatatgttgcttatatagagccaggaaaatccctcctcntccacaagggaaagtttcgttgtttttccccagagctgtgattattgcagtactgttacacgcatttcccaaagcattaaagatctaaattggattatcttttccctgcttgtgtatgcctgttaaataactgtaccagtctttgctttccncataaggccagtgacctaaacagcccctgttgcctcctnatcagctataggcatattatgctttttaaaaaccagctataaaaacatacagacagcccaaatgtacagattgaaaaaagatgtacaaattacattaaaaaaaataacagcgattgattcgatagtaaaactgcttttgtgaccgaggtcaactcg

SEQ ID NO: 329514 - DNA, 348 bp, Homo Sapiens
gattctataacttttactccagtactttagccatgagataaatacaaatttgccagcttgcaagaaaaacccaaaaaactattagacccaaacagtggttttatctcagtggaaaaataacagcagacttaaagcatggcagaaaggaaaatagagaaaaacggactaggaactctagaatttgcaggttgaccttagggctctttttcctcaatgtaaatttgcacaaagactgtattacttccattttactctggcaaatagggggtgccataaaaccaataagggtgctctaaggggggtcattctccttgttttctcctcattctcagattggttcctgcttcc

SEQ ID NO: 329515 - DNA, 489 bp, Homo Sapiens
tgtttggaagcaggtttatttattatatacttgcaattgaatataagatacagacatatatatgtgttatgtatttctagaaatgcacataacatatatttgcctattgtttaatgttttttccagatatttattatagaagggcatggagggatacctacttattcttcattatgagaacaattaaaggcatttattagataggaaattaacagatcatctgcttctataactttattagctacattaaataggcagtgagcaataatttaaaaactcaccattatataaaataataaataacaaagtaaaagttaatgttataaaaataaactgatagtaaggaaaatctaaatgggcatgatcccattttagaagaccaaatgattaatagggttgtcatgttataatagacaattgtctaattatttctgtgtttttatttagtgggtagcagaagttgttcagaagagcagaaatatgtagaaa

SEQ ID NO: 329516 - DNA, 648 bp, Homo Sapiens
  misc_feature (532)..(532): n is a, c, g, or t
  misc_feature (594)..(594): n is a, c, g, or t
gagatgaagtctcactctattgcccaggctggaatgcaaagttagaaatgtggcttgcaaatttttctattgcatagctcaagcttagaaccttcctgttgttacaagttctaagtttggtttttatctcgcaagcagcactactgtgtgggaagttgtggggggtatggagatgaaagaagaggggcgctacctcctgggaagtgacaacctagcgggggaaatagatgtatcttcccagtgggggtgagaagtgtcattctcacctatttcaagcagccttggtggtatgaaaaggcatcccaaccagcacagaagcaggatgcctcccaagactgccttggttggcacctgcagcctgaagggggagaaaaaggctttgctagctcccctaccatcaaggatgaagacccccactgtacacagtgtataaggtttctttccatgtgaatcccagtgactctccttaactgggtggaggtggaaggtgtcatcagccttgtcccagatcgagcccctcaggcccacaagnacccagtggggcctggctattactgacactcatgtcacactgagatgtaagacggcagcccnggccgagcttccccgggccccctcagattctcgggccctcccactcccctcagg

SEQ ID NO: 329517 - DNA, 294 bp, Homo Sapiens
  misc_feature (238)..(238): n is a, c, g, or t
  misc_feature (249)..(249): n is a, c, g, or t
  misc_feature (270)..(270): n is a, c, g, or t
  misc_feature (284)..(284): n is a, c, g, or t
gagggcggggcagagggagcatgacggggagagtgaggaggaaagaggaaaggaaggccagggtgggaggaaggatcagctaaatctgagggaagaagaaggaaaggagagggactattgcatagcagatgcaaatgaagggacttggggctagtcaggaagaaagggaaagggaaggaaggcaagagagaggggtgaagggaacctcaggaaggggttttaaggacaaccggaaaantcatctagtantaaaactacaaacagaccaantatatataatattntatgtgtata

SEQ ID NO: 329518 - DNA, 465 bp, Homo Sapiens
  misc_feature (345)..(345): n is a, c, g, or t
tgtttaggtggtttttatttccacatctccaacagggagtcttggaaacaaacttgacaatactcgtgaaatcaacacccagatgaggtagaccagcactccaggatgcccctccccagtatccctcccctgttaactgttcccctggcttctaacaccatggatcagttttgcttatttctgtactttttgtaggaagagaatcatacaatgaattctctcttgatgatgaggactctgacctcttttgcttgacctcatgtctgtgaaatttatccatgttgctgtgcatagcgatattttcatttcatattcgttgctgttcaggtaggtattcgaccctgntgacttcaactgtaggcttcaaactgtgggatgggccatttggggttggtgggatgggacatttggggttttttcaggtttgggggccacagtcaggcgtttgggtaggaaacatttttt

SEQ ID NO: 329519 - DNA, 457 bp, Homo Sapiens
  misc_feature (378)..(378): n is a, c, g, or t
  misc_feature (396)..(396): n is a, c, g, or t
gtgctttttaaatttatttttaactgtttctcatatgtagcaacccctcctcccctcctgggcatgtttacacaggctctgctctgggggctggcctggctgtgaggtttctggggaggcagagaggcagggactttggggccttagtcaccatccatggtatcacctcatctcacttcctgtgagggacagggcctggctgatgtgatcccagctccccccagttcaggactgtctttcagctcctttgcccctggaggtgggggctgctggctgaggaggggtcaaggtgagttcaagaaagctacctgtggaaaatggaccaggttgggggggtgattgcaaagtctccccaaagcctggctcctcatgctcagntccaggggcggaacactnggggagccaggtatagagagccttcctttcataacttgccattccttttcctccaaggcct

SEQ ID NO: 329520 - DNA, 468 bp, Homo Sapiens
  misc_feature (37)..(37): n is a, c, g, or t
  misc_feature (41)..(41): n is a, c, g, or t
  misc_feature (57)..(57): n is a, c, g, or t
  misc_feature (66)..(66): n is a, c, g, or t
  misc_feature (82)..(82): n is a, c, g, or t
ctcgcaaacttctcaccaaacagcttattaacacttnccantaaataatcccctgtngatgcattnattgcagagctgaganagcgaaaggatgaatggattttatctgcagcttgtgcctgcaaaatcgcatcaggataactacccttctggatctgctgcatgaacccacagctggtaaagttctctggagtcatgggggtaactgcattggctcccacttcattaaactgaagcaccttggccatctggtcttcggtgctgcccctggagcccatgtagaccatggccatggtggacgagatgctccatggggagaggaagaggttctgggtggggcttgcttttgccagatgcttgaataaattgagggcaaagagtgtgtttgccacacaaagatcctccattgtttcaatctggttgttctctggttattctctgagttgctgtctgacgggcaatgctcct

SEQ ID NO: 329521 - DNA, 483 bp, Homo Sapiens
  misc_feature (392)..(392): n is a, c, g, or t
ttttccaaagagtaaatattttaattttttcttcaagagtattcttattttcatattatttaaatagtcacattaacaaggtacatttccacaaaaatatttgtacagcatcagtattcttattcacatccataattcgccataattaggaaaaattaggaaacttagcaaagacagtcaatacacatgttcttttacttgtggtgagataaattcaatgtctaaaataagtcaggatggatcaacataaaagctgaactagacacccctaccaaatttctcaatgaaaaagcaaatagccctgggtgaccagcaagttatacaaacaatggcaagacaaatccaactagaaatccggaagctgccatttcgtatacacaaaataccaagtngaaacagcgaagtaaacatatttttagagggaggtgctgctacccgggacattagagatataactgagccagctgagatgacatttacaat

SEQ ID NO: 329522 - DNA, 357 bp, Homo Sapiens
caagagtattcttattttcatattatttaaatagtcacattaacaaggtacatttccacaaaaatatttgtacagcatcagtattcttattcacatccataattgccataattaggaaaaattaggaaacttagcaaagacagtcttggttacaaagtcctaaacacaatactgccaacggggcccatccatctgagaaatcacaatttagaggaggtgttcctctgcactgtgttacaggagacacggcaaccacaaggttaaaatcagaagcaaacagggggccagtgtttctccacatgagcacctcaggattctctctcttctggaggtaaggaacgttgggcttggacattc

SEQ ID NO: 329523 - DNA, 481 bp, Homo Sapiens
  misc_feature (149)..(149): n is a, c, g, or t
caaaagttcctcttctccgctcggcctttttggatagctccccggacagatggagagaagcacctcatgactgccaggtgagagtgaaaatccaagcttcccacattttgtccactgacaccaaagggagtaggactttattacttacntggtggagatgaaggttcccagcttcctactggccttttctagaatctctgtgtcagggatgttgaagtgcctcattacaaccccatagaagtggaaatgtcttcccactcattctttgctagcatgggtagaatagaactatagtcttttttgtggtgtttggatgtagagcagtaattgtctgaaagtttctgtcttgctagtctgcccctctcctggtcttttggctaccaaaagcaggtctttattggaattttattttggtcattgttggtatttctaggttgctacttcttcaatttcaagtctggaatatatgaggaaaaaagaa

SEQ ID NO: 329524 - DNA, 604 bp, Homo Sapiens
  misc_feature (504)..(504): n is a, c, g, or t
  misc_feature (546)..(546): n is a, c, g, or t
gtgaagggatttttgctcaagatcacatagctggtaaactaaggtaaggttagggcttgaacttgggccttctgactccttgtccagtcagtgttctttcatctcaccacagctgcctcctttgaaacagaggtattaagatctgtccttctggttcaccctctcatacctctttactgcctctcccacatcccccacatgcctcccaaaatgaaagacaaacaggattgtttctgagaccaagatcagtctgtctgtgatcagcctgtgtgtggttcacccagtcatgcaattaagggcagatctgggccagtggaataggatagctgattggtgtttgttactgtgaaccctaaaccgtaccccgtagaatggttctcttgctttgtaacacatcgggccttcagtgtgctgtattcctcagaagtgagggcatctcggtccattctgcccatggccacagggtgcagagaggcagcagggcccatggcaaggttgccaccnggggattttgctggggctgggagtttcaacaggatgtaaagnactttcagtgtaaggcattaaacacaaaattctggggagaaggtacccagaatttttt

SEQ ID NO: 329525 - DNA, 627 bp, Homo Sapiens
ctgtgtttttaaaattttctacctaaacatacggctgtaatcacaaaatctattgctatcatcaaaaaataaactttccttaaaaacctttaacttttaaaaatctcatcttaaatgtaaccatcatttcactgtttcctatatattagtggcctaggaaaacaattccttcttctatttcacatagcactagacttcaccaacttttaaactaaaattactctttaaaccttagcaaccgccttcagcaacaaacccccgtaagctgatcatctaacacatcgcctcaaaaagaaaagacattacaaacctttcggtgaaggaaaagtgttctccgttcctttgccaacaggggtagctggcaaagaaagtgatgcttggacggcggagtccatcttttcacagtctagagttggagagctaggagccgactttctagttacttcctgttgtctttcccgaactgctagttcttgccttaaatctgtaaaatattgcaaacaagggcaggaatactcactagagggagcaaatatatcaagcaaagtgacatctaaaatgtcataaaggtcttcttcctaaattactatttctcaaaaatgaatttcctatttaagtataactttc

SEQ ID NO: 329526 - DNA, 475 bp, Homo Sapiens
  misc_feature (400)..(400): n is a, c, g, or t
  misc_feature (423)..(423): n is a, c, g, or t
  misc_feature (428)..(428): n is a, c, g, or t
  misc_feature (435)..(435): n is a, c, g, or t
  misc_feature (456)..(456): n is a, c, g, or t
agtgagaaaaggtatagttgtttctaggcatgttaacgaagcaggtgtttcctttgtgtcctatctttgcattaattttaaataaccttcaccacagctacagttttttttctgggctctatcagctttaatgcaacggcagaagcttaagcaactggtcatgagaggtcaagtggtttacttctgtatcccttccatgtacaagagacatccatttgattctcaagagagccaaataggtcagcctcttcagcgattctaaaagatttcaagagcagaggcaggaagtaggactgggaatttagttcaattcattatctgaggttgccctaaggtagggcaagtttaaatttaactttgtttctatggaaaaccattgggaactgataaactagtattntacttgttatagttttattaggntaggnggttcanatgcgaatgccttaaactagngttataaagttgaatcggt

SEQ ID NO: 329527 - DNA, 596 bp, Homo Sapiens
  misc_feature (25)..(25): n is a, c, g, or t
  misc_feature (30)..(30): n is a, c, g, or t
  misc_feature (70)..(70): n is a, c, g, or t
  misc_feature (90)..(99): n is a, c, g, or t
  misc_feature (121)..(121): n is a, c, g, or t
  misc_feature (174)..(174): n is a, c, g, or t
  misc_feature (181)..(181): n is a, c, g, or t
  misc_feature (534)..(534): n is a, c, g, or t
  misc_feature (552)..(552): n is a, c, g, or t
gaccccaaaacccccttcgaaaccntacanaggggacacccccaaggttaatacttaagcacttactttnaaaaaaacacaacaaaactnnnnnnnnnnaaaaacagaaaaaggacacccntatcctaaatacttaatggtaaggcctataaaaaggcttgaaacagttccaancaaagcnaacacccagtgggtgaaagctgggatcgagtgccttgggagaagtgaatgaagttaactaccctcaagttgtacacccatgaggctcccatctctcactccagccaagtccgctttcccttcccaaggagagtgctctctgttttcagtctgaaataaaatattccaccagctcagaaggcccggggagtacttgactactccacagtaatcttataacaagattggtagtattttataatcgaaaggcttgtggggtagggatagggggagcgtaaaggaatagggagccacccacattgagtgagctgctttttactagccacactggtttaaatctgacaacattgtcanctttttaaaagtcacagnattgatttgtaaacctgtttgccttccaatcattcttgatcaag

SEQ ID NO: 329528 - DNA, 189 bp, Homo Sapiens
tacctgaagttgtaaagagttcctttaatatattcctggattcctagaccccttatccagatacatggtttgccaaatattttcctccccattctgtgggttgtgttttcactttatcgataatgtcccttagacatataataaatttgtattttaaaagtgacttgatttggctgtgcaaggtgctca

SEQ ID NO: 329529 - DNA, 418 bp, Homo Sapiens
  misc_feature (52)..(52): n is a, c, g, or t
  misc_feature (289)..(289): n is a, c, g, or t
taagtgaacaagtgcctccccacagtctgaaaaggaccagaacagccagccngacaaaggggccaaagaaccccgtggcctaggccttggcctttgtcctatttgataccgtgttttatttgtggtgggggcctgagggagggggtgaggttggtcaagggatacatttcccattacatagaaagaattgagagatctattgtacaacatggtgactacagttagtaacaatgtattgtattcttgaaaattgtgaagagagtagattttaagtgtcctcaccaacaanaaaaaagttatgtgacttcacataagtaattcacatatgtattacttaatacatatgttaattagctcaatgtagccattccacagtatttacatatttcaaagcaacatgttgtacataaatatatac

SEQ ID NO: 329530 - DNA, 406 bp, Homo Sapiens
  misc_feature (341)..(341): n is a, c, g, or t
ggcttgctcaaagacacagtaaagaaagagccaactctggtgtcttcagacaagtgtcatgcctgctacaactcccacatttcatggctacaatgttcccttctgtgacctatatccttggatgctctgacttaattctaaaatagccagttgacacagcccttcaatctggcaaacctaccattgcttaatagaaattaataggccaattttgattcaagaaatactatgtaaagaccagtattttcagtttaactttgaaagaaagttttactatatttggaaaagtataaggccaagcatatttcccaaagggcaagggttctgggtggggtttgggnaagggggaagggaaaccattttggccaaaattcaccacttcttgggttttatgggaaaagggctg

SEQ ID NO: 329531 - DNA, 231 bp, Homo Sapiens
  misc_feature (40)..(40): n is a, c, g, or t
  misc_feature (42)..(42): n is a, c, g, or t
  misc_feature (44)..(44): n is a, c, g, or t
tctccctctgagaatgtattaagaaaaaccaaccataatntntnttttagttgaggtgaaaaaactgcttcataagttcgtatgttgtaaaagccactgcttgagagggaatacagcgaatgtaattaagagataaaccacgatagagtccttttcgaattccatggtgtccatagacatacttcatagtatcccgcatggtaaggcacttttcaaattccggcagaacct

SEQ ID NO: 329532 - DNA, 401 bp, Homo Sapiens
  misc_feature (368)..(368): n is a, c, g, or t
aggctcctaaagagtaagattagtattttatgtgattagtaatccaggcaattggaatagctccaggacatggtataagctcagcacatttttaaaattcattttaaaaaatgaacacagtgacagatttttaattttctgccctcccacaattacatctctctatagctttccattagccatggcagtggtcttcttatagtttatgttaccatacatttgatatcactcaattttgggtcacccaagattaaacattttctttcagataccagtttcattccagggcctgactgtgaacttcacccaagaggaatgggcagcaactggaccctggctcagaggctcctgtacagggatgttgatgnctgggagaactacagcaacttggtctctgtggg

SEQ ID NO: 329533 - DNA, 359 bp, Homo Sapiens
  misc_feature (305)..(305): n is a, c, g, or t
  misc_feature (313)..(313): n is a, c, g, or t
tatgattaataatagggaataccttttcatctgcttattggccataactatatccttttttgtaaaatgttcatttaagtctattgtccattttaaaattagatttttttggtcattctttatatatcctagatgcaagttcttatcagatatgtgtgttccaaatattttttccagtatgtgctttgacattttattttcttaacaatgacttttgataagcagagttttaatttttataaagttcagtttaacatttttcttgtatatttagtaattttatatgttgtatctaagagtcattntactttanactcactaaaatattgtcttatgtatatttagaggagtgttatagt

SEQ ID NO: 329534 - DNA, 366 bp, Homo Sapiens
gcaaataacccacatccttttcttcagaccactctccacagtcctgcactgtgattccttctcagcaggcacatgtcaattctgcagtgttcattaccagagtgactccttgacacttctctcatggacctggaaacttccataagtggtgactttcagccagtgcggtggtgtgtgtagccccaaccactggtccccaggaaagtggtggtggttgatggcttttcagcgggaaacagaagagacagtgtccttttgcacaagagtctgtgttttcagcctctgtatacaatttgagggcagtctagcccttttggatgaaatcctgcttgagttgactggtgtatgggcctgtgggttgacctg

SEQ ID NO: 329535 - DNA, 616 bp, Homo Sapiens
tttttttctgcaactttttaaaacctgactcttcttaggaagtgctctctttgtacactttgtttcttgagacttcctcctattaattttcttttctttacaaggctgaacttctgtattcaataagttgcaaacactctcttctacaacactgaccaattgatttcttctgttagaagtccttgttattctaccaactttaggagaggatattttctcatggttatttgaagaactaaaggtatcagtgcctgaaagggtctcagagattgatgatttattaggagaactgagaacggcaaatgatacttgaagtggttctatgttttcaagattctcccccttgtcatcaaaatctggttgaggtaatggctcaggaacaggtgactgctcaagcagcagggaactgagaccactgaagtcttttttacaaacaggtgttcctcctttacgcaatggagtatttgctggcaaagattcatcaaacacttccgggcttaagtcctctccaaaagtaactctcttcctcttcctcatatttagaaaggcaggtgcttcaaaattttcttccatcttctgcttctttctctttgcaacagtttgggagatttgagat

SEQ ID NO: 329536 - DNA, 458 bp, Homo Sapiens
gagatttacttacacccaaacagatcctgaaagaaagcttcaagttttctcagatgatggatatgttttcactgtattcaataactgacggatgtaaggtgcacgtttcctgatgtgacgcactgtaattccagctggtgatcaagtctgggaacagccgtaacaggtcaaccttgtggagccatcgcgagttagagggtgaaagatggcagaaaaaaaagtcttgtgtgtgagtgtgttttttgagtttgcatcaatcttaatgtctcttcataatacttttataatacattaagcctcttgtctacatatttggagagaatatgactttactagcagagaaatacaatatatcttgtctactggactgtaaaatatatgtatgaaataaaattagttccatttggtcttctagtatattaaagtgctatctgacgttgttatcctgtttttgcaaa

SEQ ID NO: 329537 - DNA, 386 bp, Homo Sapiens
tgcttttgctgttgtatctaaaatgtaattgccaaaaccaaggtcacatagattttcttttttattgtcttctaggagttttatagttttgtattttatgttttaagtctagaatccattttggatttttatgacaggtataaagaatctgtgtctagattcatttctttacatgtagatatccagttcatttggcctcatttattgaaaagactctcttttctccattaaattgcctttgcccatttgtgagagattagttgaccatatttttattgttctgtttcagggctgtctgtcctgttttgttgatctattttgccgttcttttgccagtgccacactatcttgattattgtgggctttatagttaacagtcttttgac

SEQ ID NO: 329538 - DNA, 512 bp, Homo Sapiens
ggcttaaaacaacaaccattttattatatctcatgtttttgtgggtcagaaatttgggcaggggctcagctggtcaattcttccattctacatggcatcagttcaggttaccaagtcgctcactggcatttagctggtggctggtctggtggatccaaaatttcactcaaatgtctggtatcttggtggatgtcaagaagacagggttcagcaggtgcctctccctctctacgtagtttcagggcctcttcatgtggtctcttcagcaaagtagccagactttgtaacaagacagttctgtcatttcatgagatgaagtaaccctaccagtaaagtctgagtcaagaaaccagcacagcagtacgtctaccatattctactgggcgacgagtcacagagggatgtagattcctgtatacaacagagggatgtagattccacctcttgattgaaagtgtgtcaaactgctgcactcttatatgaccatgtcataaattaaaaaattatagcac

SEQ ID NO: 329539 - DNA, 421 bp, Homo Sapiens
aagtagctgggaactaatgggcaataacccacccatgccccagcctaaatttttgtatttttttatggagtccagggtttcgccatgctgccacagctgtacgcctctttatgagaagttaacatgaatccattcccctcagtgacaggtaaattaaaatgttaatatgttaacatagtcttaaaatgtaaaaaggttgtcaaaaccaaaacagggctcatatttttattaaatacctgggtttttctgtcacggaaagttaataagaccttattccgttatactggacaattcagcatctagaaggttctcactggtatctcgttaagtttattttttgagtacctaaaaagaatatgccaggctagctgtagaagaggacaaagtagtctaaggtgtatctctatggtgtcaataatgt

SEQ ID NO: 329540 - DNA, 701 bp, Homo Sapiens
ttcctaaactttatctcttcaaattactcctttttctcttcaaatatcttttgctctggctaaagcctgctcagttcaaatctggaattgaactgtcttgggttcaaatctccactctaaccacttatgagccttctcgggcaagttattttaatgctgcaggccttagttttcttatgaggaaaaaagttttcttatgaggaggattagatggggataatgtggggtgaggcctcagtcaagggcatggcaacgcagttaacaggttgattactcttcctctcttccacctgttttgggttttgttttctaacttttgtgctatatctctgccctaaaacttccctctctggcacaggataaacctgtccttcaaggctcaactcaaatgtcaccttctcccatgtgggtttacttgaaacccacccactaatttccttcccccaccaaatacctacggcgcatcatgctattcttggacacaacagcaaaagctcccgtgtgcttgccctatgtcctacacttgactgacaacatttgtggacaggccccacgtctgattcatctttgagttctccacacggtcctgcatatagcagaaacttggtaaatatttgctgagtgaaagaacaaatttttggagcaaaggcaagagggagttccaagctttgaagactacggaaccagcactgtagtataac

SEQ ID NO: 329541 - DNA, 564 bp, Homo Sapiens
  misc_feature (19)..(19): n is a, c, g, or t
  misc_feature (23)..(23): n is a, c, g, or t
  misc_feature (50)..(50): n is a, c, g, or t
  misc_feature (73)..(73): n is a, c, g, or t
  misc_feature (77)..(77): n is a, c, g, or t
  misc_feature (93)..(93): n is a, c, g, or t
  misc_feature (121)..(121): n is a, c, g, or t
  misc_feature (141)..(141): n is a, c, g, or t
  misc_feature (530)..(530): n is a, c, g, or t
atagattttgttagatgtncttnccacctggcctatgatgtttagatgtncatacttgactcacatttaccancccntcctgcgtaccagganctgtgttaggcactttatatacattatnctatgtggccctcactgatncccagggaagtatgcattagccttcccattttgcagttgaggaggctgagtagcctcagaagggtttaggcgaccttctgaaactcacagaagtcacgtgatggagagaggattcaaagccagggcctcagaccctcacacacttgtctgtgctatgatgtatgcaggatcccagcattgatacccaatgacaaactatggagaacaagcaaagtattcaggccccctgcagcctcccaggacaggctggcaagggaggagggccggccagcatttggtgggccatcagtctggccatctgtcacgtcacagaagcaaaccgtgccttctggcttctgcgccccatattcccagcatcatagacatccaacagcaccagcaggagagtnggctagcctgctggattgctgtttcgtggcctgt

SEQ ID NO: 329542 - DNA, 394 bp, Homo Sapiens
tcccacccagttgcctgaatcatcccagctcagatgcagccactgtctcttgtcaagtgggacctcatactattctcagaaggctaacttgagaggtttggggccttgttccccagagggtccccagggactctgcagtgtccttggcaaatccccactgtactcaatgccctacattctcttctgtggtctctcccctggcttgcttcatggccactgaaccaatcactttgtatgctatgctcctactgtgatggaaaacaaaatgagtataacttattttatatccatattcagactatatagagaatattctatgcatctatgacgtgcttactactgcagtgcatttgtcattagtcttcatgttaatacagtacatttattctttggt

SEQ ID NO: 329543 - DNA, 282 bp, Homo Sapiens
ggctgttttttcccaaaatgtcatagatcagttacagataacagaagagtaactgtacaggaaaactgtcactttgggctgtctgtgctgcttaaatgggaaggcggctgcatctttgatcccaatttttaaatttcttcttactgtaactatgaggtaaaggagccggcacatcaaacattttcacctgcaacaaataggaatcattttcttatgcaccgaattgagaactttggaatgagtggctctgttttttccttttcttcccccttgtctgtcctc

SEQ ID NO: 329544 - DNA, 151 bp, Homo Sapiens
gcacagggcaattctagaatcaggcaacagactcattgaatcaggaacagattcactccataaaatacagagagtgctgcaatgagctgggtagaagaggttagttttatagacaggaaggggctgtcaaaggcagaaagaaatgaagaac

SEQ ID NO: 329545 - DNA, 982 bp, Homo Sapiens
tggcaaggaatacatttttaaaaattagtaagaaacatacacatttcaagttttcaattaagaataatatttgctgatggcaccatcttcctgtctttcagccttcagcatggtagaggaaaagagaaagagtgtagacaaaaacagttgaagaacatctgtgcttgttccaccttcattttctgttttgtgcgttgcctgaatgaacggtgtcttcaggttggtatttcacaggcggtgctcccaagtagtctggttttcccatttgtggagggcgaggtcatagaggggacagggggaggctgtctggtcagcactgtgtatttccaaagaacaaggactagccaaaactacaagcctttgaaggaccaaaggaaaagagaaaaaaccagcctctaaccaggccatgcgctagaaatgattgagtataaaaaagaaaattggtttctgtgtatgagggtgcatggaaaaggtctttatctctgcacaaaacaaaatattcaagtttcagaatatcccaatggccttgccctggatctcctcttgtgctcttccaatttccaaggatgttccaacttggtggaaggagggtatgtgggaaattcaacagcccctctgtatctctttctacccaacattaacttagcaggatggatttaagaaccggcagcttagcctgaggaattgctgtgttctgtgggagcagggcaggttcataaataagtgcacagaggtcttgaaatacagggattatctgttcttctcggaacatggatgtccttccagggatgtgcatctggccttgctgtctaagttccatcaagggagccttccgttctagagtatctgctttccacggcatcagggacagctttccggacttcactgtacactgtctctgtgtccttctttcctagatctttgtgagactcagctgaggacacttgaacttccgtgtactgcacgtctgagttcagaggct

SEQ ID NO: 329546 - DNA, 359 bp, Homo Sapiens
gggaaagcaagacaagtaatgtgccatgaaaactgaaaaaatgtgaacaccccgagcccggatgccagcacctaataatcaacattgttccttggtttagttaaagaaaatttggccactggcaaaatgcccatttgggagtaatgagacacacccctaatcctaaaatattttcttgtcacttcctcaaagttgtttttgactttttttccttcagggttgacttcatatgtgttcattttattctaataagcaaaagttgtaatttttaagtgaaaaaataatttatgtcattctacttacaaatacaatttttctattctatatactcatatataaagatactgaagttttactgt

SEQ ID NO: 329547 - DNA, 463 bp, Homo Sapiens
cagcccgatgccacccagtacaggaagtgacaccagtactctgtaaagcatcatcatccttggagagactgagcactcagcaccttcaagcccacgatttcaggatcgcttccttgtgagccgctgcctccgaaatctcctttgaagcccagacatctttctccagcttcagacttgtagatataactcgttcatcttcatttactttccactttgccccctgtcctctctgtgttccccaaatcagagaatagcccgccatcccccaggtcacctgtctggattcctccccattcacccaccttgccaggtgcaggtgaggatggtgcaccagacagggtagctgtcccccaaaattgttcctgttggggcagtgccctgtctccacgtttgtttccccagtgtctggcggggagccaggtgacatcataaatacttgctgaatgaatgcagaaatcagggg

SEQ ID NO: 329548 - DNA, 441 bp, Homo Sapiens
ttgcttacatgggcatccttcagcttttaataatctgaaaaactctatttacccattgtcaatgtgtataaattaatctgagtcaattttatacaataaaaggtgaacttttatgcatgaaacaataatttaacaagaaatgtacctgaagaagaatgttcattacaaatataggaaacataaatattaccaaatattggcaagcactaaaatgttcagaaatataagtctattacagttatagctctctcaagcaaaaaaacagcagagaaaaacttagtttaccttaggggctatttatttacttagggatttgttaaaagggtcgaatggggggtcacacagaatactagggaggggctgttcacccggggcctcactagggactcttcttccttcagtagctgtatagtaacatgacaactggctcctacgacccaa

SEQ ID NO: 329549 - DNA, 443 bp, Homo Sapiens
  misc_feature (159)..(159): n is a, c, g, or t
atttgataatacttatatttcacagggcacacttttggcacacctcaggagcacactgctgctattttgggtcgtatcactgtaaaataccataataagtacctacttaactgtgaccatgaagaattggaatccccgagggcaacatttggatttganctaagatccaggcataagatagaatttttgtcatttttcccttgcagttttattgacttagtttatgagcttggataaaataattttttgatgaatcatgtcaataaaaggaaaaataatgtaactacctcataagtctgataaaaggaagttgctagtgttttatagaatttctgaaggtggttaaatcaagtatgatttcaaaatatcaactagttccacttttgtgattgcaggatgcttcttatactaaagttctcataaataataaatcagcttatgcc

SEQ ID NO: 329550 - DNA, 422 bp, Homo Sapiens
  misc_feature (25)..(25): n is a, c, g, or t
  misc_feature (34)..(34): n is a, c, g, or t
  misc_feature (39)..(39): n is a, c, g, or t
  misc_feature (46)..(46): n is a, c, g, or t
  misc_feature (57)..(57): n is a, c, g, or t
  misc_feature (62)..(62): n is a, c, g, or t
  misc_feature (84)..(84): n is a, c, g, or t
ccgcctaaattttggttattttttngttggaggntgggngttttgncccaggttggnccccngcctggtcctggaatcttcccngacccttaagtgatcccgccccaccctggccctccccaaagtgcctgagattaccaggccatgaagcccactgggcatggcccacatttgataaattttaataaacctgattagtaatcagaaagtaaggggtaaggcattagaagtggcctatagtggtttttataattatccttaatatttaatactataatacatttgtttaaaaattctttctagccattattcttttagcacttcatatgcagatacatatgtatacctgttagtacattgtctgcattacatgatgaaattctgcagtagtaacttgatgtagacattgggtatatataata

SEQ ID NO: 329551 - DNA, 185 bp, Homo Sapiens
tccaccagcccagaatattattttggcatggtcataaaaacaaacaaaattaacctactatgctaaatgtttgcttttgtgcaaaattaattacatacaatacaatgctagccatacaacactctaccaatgcaacaaaataaggaaagaagtgagagagagcaaaagcaaaagccaaagaggaa

SEQ ID NO: 329552 - DNA, 271 bp, Homo Sapiens
aattaggaaattattaaaataattttttagaaaagccaacaaaataaccaaaaattagtgactgtaataattggaatgtttgaaatttgtcacagcaataattgacctaaaatgaatgtaaataattattcagttttcagtttgttgtaataaactctaatcagtataaaggattgactatcctaggaaaaagattagtcaaggaataagaagcaaaagtagtatttgaaatctaaaaacattaccatgtttgctttatcatgcaggcaaa

SEQ ID NO: 329553 - DNA, 246 bp, Homo Sapiens
  misc_feature (196)..(196): n is a, c, g, or t
acgtttgtcggatttttcttctttactgccattatgttatcacagtaaaggatagtttaccttaacatgtttgcaactcaccctcaagcaatattgacattcttattttcagatcatttcacttcagtgagcacaatgctttaatttttacaaacgtttttgcattcttttgatttttctcttacgtggtttaaanagtgggctttattatatatgcttcctcaattgtagttcaatactttaata

SEQ ID NO: 329554 - DNA, 352 bp, Homo Sapiens
ggaaaagtcccagttttgttgaagaaaagtaaactgtgctccttcctaacctaattacagaatccttctggacttaaattcctcaaggtaaggtttggaggcaaaattaccagatggccagtggatcccacttgtccactctcaaaatcccatctgtcacacacacacagatatattggtcaagtaatcataattgaatggtaataactttattccacatgtatagttaggcgagtgaacaattgcaagttcaaattagccagtaccaggacttccctttgtatctacagtagtcactgcaactcctggataaacccctacagacagagctgtagatctcatttgggtttta

SEQ ID NO: 329555 - DNA, 362 bp, Homo Sapiens
  misc_feature (272)..(272): n is a, c, g, or t
  misc_feature (278)..(278): n is a, c, g, or t
  misc_feature (283)..(283): n is a, c, g, or t
  misc_feature (306)..(306): n is a, c, g, or t
  misc_feature (311)..(311): n is a, c, g, or t
  misc_feature (335)..(335): n is a, c, g, or t
ttttttgacctaatgaaataccaaatttcttggtaggcttactggagacaattttttttaaactagacttaattcctgttttaattatttaaaattattaaatcaaaccacctgataaggacagaataaatttaaatatattaatgtaaaatttatccaactattgaatattggtctgcaaacacttattcatgaaagtgataaattttcggttatcagatgggcagacagaccacatctaaagccactactggaaatgatactttatctgncaggantctgnggtgaccaggaaaattaaggccnggggncgggtggcctccatgtcctataancccccacccctttggggagggcccagg

SEQ ID NO: 329556 - DNA, 530 bp, Homo Sapiens
  misc_feature (35)..(35): n is a, c, g, or t
  misc_feature (46)..(46): n is a, c, g, or t
  misc_feature (59)..(59): n is a, c, g, or t
  misc_feature (71)..(71): n is a, c, g, or t
  misc_feature (75)..(75): n is a, c, g, or t
  misc_feature (90)..(90): n is a, c, g, or t
  misc_feature (92)..(93): n is a, c, g, or t
  misc_feature (110)..(110): n is a, c, g, or t
  misc_feature (142)..(142): n is a, c, g, or t
  misc_feature (163)..(163): n is a, c, g, or t
  misc_feature (225)..(225): n is a, c, g, or t
  misc_feature (359)..(377): n is a, c, g, or t
  misc_feature (445)..(489): n is a, c, g, or t
tggatgagaaggtatcaaaagaaaatgcattgttnccctgcctagnagcatgctaattnaatatgcacatncatncacgatttgcaattntnnaaaaacgaaagtaaaanttaaaatgccaaaagaggaaggtacttaaaanatgcatttatcagctaaaatngctcaaacataaattcaactgtcaggtctaaaattaacaagcaggaaaaagttgctgcctgnccaatgtaaagtctttagtccctagagatgtcttctgaagttgtatctcatttgtagcacccttcacctacaacacttagacctggcaaacttagaccatccttgccaataaactacaattataaatggcaatnnnnnnnnnnnnnnnnnnnttatagttggtataggtttttattccaaacagaaaatgaaaagttagggtcggacgcgatggttcttnnnnnnnnnnnnnnnnnnnnnnnnnnnnnnnnnnnnnnnnnnnnngagctcaggcgttcgagaccaccctgagcaacatggtgaaa

SEQ ID NO: 329557 - DNA, 377 bp, Homo Sapiens
gtcattttcaagcagctgagagttctcattgattcagttttaagaaaaaagcttgaaaatccaaagatgtcccttgaaaatgacaagattcctgcagatcattacggaattgataaaaacagagaataactgaaactgaaattcatggtcaactgctttaaaaattaagatgaagatacagtcatgaaattatctgaaaatgggtcatcacattaagtatttcattacttaaaatgttggtactagccattaacttaaaggtggtgggaaaaaagcacatactttaaacatgtataattttctagttcctttttaatgatgattattctgaatgtatttgccactacatttacaataaattctttggtattatgcaa

SEQ ID NO: 329558 - DNA, 1180 bp, Homo Sapiens
  misc_feature (281)..(281): n is a, c, g, or t
  misc_feature (862)..(874): n is a, c, g, or t
  misc_feature (1085)..(1085): n is a, c, g, or t
acttgtacacatgagtggcgcacactgtgtttttacacagcgccttctgcgcacacaaagagcgctcttgcatgtttgtggagacagttgctgatgcgcaccctccttccatctacgagacagagacagctcgccaatacaccataagacaaggagcacagtcatgagctctctacacacatcgcaggacaattcctgtggcggggggatctcaaatttctccaaaatatgccccgagatgaacgatcttgttcataaaatggaacctgagtccagttcancatgtagcacatgtagctgcacacaaataactatcctatgtcgaggtatgtgcaccgtgacctcaccaaatgagtttaacatcagctcttttttccatatgaaagcacataccctgctccccattcaagtatgtcttccattgtcaggcatgctgaccaccttcagcatgagtcctccaagagtgcccaactccctttcccacagtacacaacgctgtagttgttgtcctgcaatcctttgtatttacctcattctttcccatctaagtcctcactgagttttaaagttagggctggaaaagctatgccttactgggacagcaaggaaccaatttttttctgagggagaagacattcaccttcactatatgctggcagggccacagtgcacaaaacaaagatcagccttcattcaagttccaggtttttcttcctccctgaatgattactgcaaagggtatatgaagtaagagttccctgttgcacatgtaccatccataagggatactatatcgttttgcattcttccccccattctccacattgtcctatcttaagtccaagcccttttcactctcaannnnnnnnnnnnntatttttttcagcactggtgttcaaaagcaacgtttttatggttaatggtttaccagcaactgttgagatttccagttgagtcttaaaaattgccaatcattatctagcagcaatgacagatgattaggagcagtcaaatcctctgaattctttccctaataggcagccatttgagaactgcactagctgacatcactaaaacattatcantaaagccaaaaccaaataaaggcccagaccaacatcctggctctctaaaacctgtccaaaatcattaagtgaaaggcagtaaatgcaggactgtg

SEQ ID NO: 329559 - DNA, 270 bp, Homo Sapiens
tgacaactactgtatttagtttctccatctctagaatggacagagaagtttacctctgatggttactattaagactaagtgaaataatatgtataaagcaactattaagactaagtgaaatactattaagactaagtgaaataatatgtataaagcaacttatacaaagtttgggcaacttatacaaagttgtgtgtatcatgagccctgtgtattagtccatttttcatgctgctgttaaagacatactgagactgggcaatttataaa

SEQ ID NO: 329560 - DNA, 477 bp, Homo Sapiens
  misc_feature (107)..(188): n is a, c, g, or t
  misc_feature (218)..(231): n is a, c, g, or t
  misc_feature (428)..(428): n is a, c, g, or t
  misc_feature (446)..(446): n is a, c, g, or t
  misc_feature (465)..(465): n is a, c, g, or t
aggtgagctaaatttaattttccaatcaataaatgtcagtcacatcagtcacaattcagaacaaaaccatgtttttgcttatttattgacttatttttacatacagnnnnnnnnnnnnnnnnnnnnnnnnnnnnnnnnnnnnnnnnnnnnnnnnnnnnnnnnnnnnnnnnnnnnnnnnnnnnnnnnnncgcacacaccaccgcacccagctaatttgnnnnnnnnnnnnnnaagagatgggggtcttgtgctttgttgcccagggcggatctcgaattcctaggcttcaagagatcctccggccttcacactcccagagtgctgaggattattaaggcgtgagccacttgccccttggcctattttttgctttaggaatttgtgtatcctggatttaaaaatggaaaacaggcaccaaacctcccccnttctgtggcttttcccanttgtggggagtagggtggntttcaagtaaca

SEQ ID NO: 329561 - DNA, 659 bp, Homo Sapiens
  misc_feature (191)..(191): n is a, c, g, or t
  misc_feature (562)..(562): n is a, c, g, or t
  misc_feature (587)..(587): n is a, c, g, or t
  misc_feature (631)..(631): n is a, c, g, or t
  misc_feature (638)..(638): n is a, c, g, or t
gcctattcgtagagttccctcagaagagccatggtgtatatgaagagaagagtagtgattgctctgccagaagcagctcctctttaaactcctcctctcttgatgaatttcttaaggctgaaggaatgaagagagtgggacatggggtaatctttatcccttttgttaaaacaggaggcagccatgggctnggtagatcatagcccttcctaggcagaatccttgttcactgccaggctatagtaatttattactattttgcaatttgaaatatattctggttgtttttctaaatgtgaagacttaccaaatgaattttagatcattctccagagggatttttttttgctcttctcatcttttccaacagtgttctcctgttttgtggagctaaggtaaagaggggacacttctgtctgtttaacagacagtccatatctgtgaggccagcaaatattttcttaaactcatggggagacagcagattcttggccttgggtgaggtcattgctgtgccatatgtcctaccccccctgtcttacatggcaggggaagttggganatggggggctacatatggcctcttnctcccccgtcttacaaaggagttggtggggttttcccatctggntcccttnccacttttttgttcaaggggg

SEQ ID NO: 329562 - DNA, 826 bp, Homo Sapiens
  misc_feature (59)..(59): n is a, c, g, or t
aaaaacacccatcaaaacatcaaatagctgtttgtggaacaacctgcggaaaaaaaatncaatgttccaaaagggtccataaccttgaaccagaaatctttgaactaaaccctcctccaggggaaaccccactgtggcttttgccctgatttaaaaatgaaaccaagttggttaacttgaaacagttcagatttccttcccacaaccaagtcacagagcttctgtgaaatctctcaggtcaagtcaccatcaactcactcgtgactgaagtcccaggagcggaagtgtcgagagcatcgcggtgtgttctgttcagttgctcagaacaagtcaactcctgatgatggatgcaacgacccaacttccgtgtccttgccaaaaattgtcgccttggatcaaggtgtcctgccaagtccccctgtcaatgacgctgtctgtagttgtgcttcggaactctggccagtctatgtgaaacttttctctcaatatacaaaaaaaattagtcctttcccagtgttgggcctgcctttgcaccatgccacagacttcttcggtcacatcaagattcttaacaccacaaataaataaagctaactgggtggtaatagtttatgagcagcgaaagaaaaggccacaatcaatttgactctttcaagcaactggacttgtaaatcccccgagttatctccaactcactgtgcaacgcaaatgcccgttagacttaaataacggtctcgacagtcatgtgtttctgtgcaggacacgtcactctgctcctttataaacttgccatctgctgtagctctgaatgcccaggtcattcttc

SEQ ID NO: 329563 - DNA, 327 bp, Homo Sapiens
  misc_feature (68)..(68): n is a, c, g, or t
ccttgccggtggattcccccaggaccaagcatacaccatcatacattcaagtagctgtttgtggaacnatcttgcggagaaatattcagtgttcagaacggtcataaccttgaccagaagtctttgactaaccttctcaggggaacccactgtggcttttgcctgatttaaaatgaaccaagttggttaacttgaacagttcagatttcttccacaaccaagtcacagagcttctgtgaaatctctcaggtcaagtcaccatcaactcactcgtgactgaagtccaggagcggaagtgtcgagagcatcgcggtgtgttctgttcag

SEQ ID NO: 329564 - DNA, 509 bp, Homo Sapiens
  misc_feature (138)..(138): n is a, c, g, or t
  misc_feature (146)..(146): n is a, c, g, or t
aggcctggctaatcagagccctgggatgataaggtaagcaggagccacctcgggaaggggtggaacaggcaggagccggtcacagctccaagggcagtgagtgacggtaccacctgccaattttaaggcaacatccanttcagacntgaatgagcatgggcgggggctggctgaggtggcaggcgtgcaactggcggtcccaggccacctctggacacagctgggcatccaagcatgccagcaaagcgtatgccggcactgctcagccatggttcaagccagagggtgtcggggaatgagggtagggtagggctgatggaaagagtggggactactattccttctgttgctgtgggacacctgccaggtggggtaggctttggcacacatgtgggtacctaggattccagggtcccagagaacatgccatgtctcttcttgctctcagaggggaaaaagatgaaacgtgtgtggctccaaggggccagaaagggggactaccaaactgc

SEQ ID NO: 329565 - DNA, 427 bp, Homo Sapiens
  misc_feature (255)..(255): n is a, c, g, or t
  misc_feature (282)..(282): n is a, c, g, or t
  misc_feature (312)..(312): n is a, c, g, or t
  misc_feature (353)..(353): n is a, c, g, or t
  misc_feature (371)..(371): n is a, c, g, or t
tgtttacttaatcttttcatgactaatgaattttctgcctagaaattgtaaaggaaaagacaggcaagattttttttagagatacggataccttgtatgatactgctcacaaatttcctgacagaagtgttttcgcttatgcctttttagcaagaatagcaaaatggatatatatgtatgtatgagacactcctgggaaattacaatagcatcctgttgttatgcacagagtacttatgtcagggaccatatagnaatgagaatttaggccagggcgcagtngctcacaggcctgttaatctcaacactttnggaaggctgaggcggtgcggattcacggaggttcagggagnttcgtggaccatcctggngccattgatggaaaccctgttcttcttacttaaaaacacaaaaattaggctggggc

SEQ ID NO: 329566 - DNA, 331 bp, Homo Sapiens
  misc_feature (138)..(138): n is a, c, g, or t
  misc_feature (204)..(274): n is a, c, g, or t
cctaagtttcctcagttttcatttcaaatgtggtaattatcaatgtaagtaacccttgtaaacaaacattctttggggtccttaatgatttttaagaatgtaaaggagtactgagaccaaaagtttgagtacttctgnccttaggcatccattgtattaatgaattaactttttccatgcagctataatagaatgatactactnnnnnnnnnnnnnnnnnnnnnnnnnnnnnnnnnnnnnnnnnnnnnnnnnnnnnnnnnnnnnnnnnnnnnnnaacaaaccctgacattgtgcacatgtaccctaaaacttaaagtataataaaaaataa

SEQ ID NO: 329567 - DNA, 351 bp, Homo Sapiens
agagtttgccctgttctgctttctaatagattttccaagcttatgtttcagggaaaaagccaggactacctgtaaagtatcataaaatgctatggctgttaaccttcagttgtataaaaacatcaaaatagcctctcctctcaaaagaacttcatggagatgtatcaaaaacacaagtatttcccaaaaaagagtaaaaatagattatttcctgaactacatttaataaataatattttgtaatacagtgttttctgggtttttataaaaatatttacttaaataaacttttaaaataaatctaaatagggccggataaggtaatggaatatggatttaatttatggggcc

SEQ ID NO: 329568 - DNA, 334 bp, Homo Sapiens
agtcagactctgaatctgcaccttttttctcacatgtcccaccagcagaaaaaaagctactaagttttattttataaacatttttatttgggagacccatttgcccttcctttttggaaatacccactccccatttcagtggttcagtggttcctactctgccctgacttctgtgtaacaggaaagaatcccagtatcaattatttataatttagtttgaattaaatgttaagtacatggccattactttcctttgggactgctccattgaagttgttgttgttatttgtcttatgtaattaaggactctgctcttttaagagatttaggatgt

SEQ ID NO: 329569 - DNA, 391 bp, Homo Sapiens
  misc_feature (190)..(190): n is a, c, g, or t
  misc_feature (193)..(193): n is a, c, g, or t
  misc_feature (336)..(336): n is a, c, g, or t
  misc_feature (349)..(349): n is a, c, g, or t
cataaataggtaaatctggggtaaagggtatatatatgccatttttaaaagtttgaaattatatttagctaaaaggttcacctaaaaatgcctacatagcaaaatcactttgagctaaggcaacagcaaagggttagcccagaatttctcccattaaattttctgtttatttgtgttttgcccccaaggnatnagtacatataaactttaatatttttcaactcttctaacatttaaatttcttatttcattttcttatctaattgctttagctatgcttcccaaataatgctaaataataatggtgatacctgatattcttgctgatgaatttantgaggaatggctncaccaataagggtggacttgtattttgaggatacagttcagt

SEQ ID NO: 329570 - DNA, 452 bp, Homo Sapiens
ttgagttttgagttttaaagctcctgaagaagacagaagtagtcaatcattggttgtgaagtatctgtagcaatacaactgaaatttcaaaagagcaatgctgtgacttcgtaatgggtggctttatatgaaagtagatgctttctctttatctcagttttactttgttgttcttcatacaaacatacgtttaccatgaaaaaagactgtatttatcatgaaaggagactatatacaaatattgaaggaaaccagggtgctggaaataggatcctaaattaacctcaggattaatggaattaatttattcattcgttaattggtgtttattagggtagtaaatcaagataggaacagatatttcattaattttatttcaggattgggtctagaattttagattcagatacattcatgaacgaactttcaattatctgccttatgcactggca

SEQ ID NO: 329571 - DNA, 960 bp, Homo Sapiens
  misc_feature (853)..(853): n is a, c, g, or t
  misc_feature (873)..(873): n is a, c, g, or t
cgcttaaagttatacacatccaattttattaacattcacttataaattatctgcccttgtcatatattggaatcgtgttttttaggcaaatataacaatcctctactgcaggagagaaagtcttcttggtgatatgagaaatactggtgtgataatttcataaattattcaagtctgtggaaacactccagttcagagaagggtacctgggatttgttttcagctttctcgattttcacatgcacgttaggctatctggttttgatagtgcgtgttttcttctattaagtgaggatagctttctcaataattatatcagaaacagcagcagtgaggtgactagagggcctctactggcctcaggcattttctaaaaaccggaattagctgtcaaattttgagaatacagagcttccccacggcctcccccatccctgcatttggtgtgcacctcacaatttcatgcaatttagtgacttgcccaagctcctgcaggcatctgtgtttgtgctgaagatgtctgtctcctactgcggtgcaccgtgtcgtgtatcacagcatattggaatgggtctgtaggtaggaatagctgatttgttattcaggatggctttaacagccgctggaaggaacacaccatcttatggtagttgctcttccacacagctttgttctctgcatgggtgaagggtatctctggggtccatcaactattacatcatgatgcctgtgcaatatttacttgcttacgtccaatctactgggtccctgaagaataagcttttttcttcttcttagctaatatttacccctccttttctctaatgatagagtactgggaagcagaaatccntatctccaccttctctcacnaactccccagcctccccactcattctcagtcctggggactgggggctagtggctgagtgtgggctatactgccttgctgtttgcaat

SEQ ID NO: 329572 - DNA, 364 bp, Homo Sapiens
  misc_feature (17)..(17): n is a, c, g, or t
cgggacccccactggcncccagctttggcacagggcctaccctccccttacctttccttcaggcgccttgcctaaaatacccgtccctctcaatgaggccctacccctgagcacccctgtttaaaattgtaacctgccgttcccctccccctacaagctttcaaatttcgtcatctttttttagtttttgcctataacaattaatcactttctaatatactaattctaataagaatttacttatttatatatttattgcttaacgtctatatctgtctgtgagaatataaggcccatgaagtcagggatctttttctgttcttaacattgttgtattccaaatgggagactgttgcttggctca

SEQ ID NO: 329573 - DNA, 495 bp, Homo Sapiens
  misc_feature (349)..(349): n is a, c, g, or t
gcgctcaaacgtgtatcacttttcaaaaagaggttacacagactgagaaggacaagacctgtttccttgagactttcctaggtggaaaaggaaagcaagtctgcagttccttgctaatctgagctacttagagtgtggtctccccaccaactccagttttgtgccctaagcctcatttctcatgttcagacctcacatcttctaagccgccctgtgtctctgaccccttctcatttgcctagtatctctgcccctgcctccctaattagctagggctggggtcagccactgccaatcctgccttactcaggaaggcaggaggaaagagactgcctctccagagcaaagnccagctgggcagagggtgaaaaagagaaattgtgagatccgctcccccaccaccccgcccagcccctagccccactccctgcctcctgaaatggttcccacccagaactaatttattttttattaaagatggtcatgacaaatgaa

SEQ ID NO: 329574 - DNA, 413 bp, Homo Sapiens
  misc_feature (258)..(258): n is a, c, g, or t
  misc_feature (341)..(341): n is a, c, g, or t
  misc_feature (353)..(353): n is a, c, g, or t
  misc_feature (371)..(371): n is a, c, g, or t
  misc_feature (390)..(390): n is a, c, g, or t
  misc_feature (395)..(395): n is a, c, g, or t
tttttgtgtgctggagggaggggatttaattttaattttaaaatgtttaggaaatttatacaaagaaactttttaataaagtatattgaaagtttcctgggtgtgacgttcttggcagtcttgtttccatagcagcgattgtcagaatcacccctaggctggggaaactgggtttggttctggccccatggagctgtgcaacacccttttcggtttcccagtggaaggaggccaaaagagctttatcagcccagtgtngcaaagaagacccggcttggagacaaggcatcccccgctttgtgggattcagcccccacatgctcccgtgcttccatgggccnagccggagggtntttcccgctgtttggggnccccggcagtgttttccgnatttncaagagtccaggttgggt

SEQ ID NO: 329575 - DNA, 355 bp, Homo Sapiens
  misc_feature (37)..(37): n is a, c, g, or t
  misc_feature (82)..(82): n is a, c, g, or t
  misc_feature (91)..(91): n is a, c, g, or t
  misc_feature (99)..(99): n is a, c, g, or t
  misc_feature (180)..(180): n is a, c, g, or t
ccgcagggtggagcatggcagcgggccttaccccggnccccccagcctctgaagagatccagcccctacctaagtttccccnggatttgtnacccgcanctggcgagccccctcaccctccccccatgaccatccctcccatgagccctccctgatgtagtgtcctgatgatgagaaagnttcatgggaagaaaaaagggaaatttaagaaaaaggaaaagaggactgaagctatgcagcctttcaggaagatagctctggagatgaggcagaaagtccttctaaaatgaagaggtccaagggaatccatgttttcaagaagcccagcttttctaaaaagaaggaaaaggatttt

SEQ ID NO: 329576 - DNA, 334 bp, Homo Sapiens
ttttttctgagaaaaatgtgaaaacttttactgttacattaagaacaggtggtagaagcaacctattccgcacttctcaaaagatacagaggggcacatatgccacactggaataaagattacagaatcaaacatgtacaaaggtaccacagcaggttatggttcatacaggactttaaatgacccatgttgacaatacaatttgcaaaaaatatgagaaaagcaatacatatttctgaaacaaaaacatacctgttgtaaaaaacaacacgcgtagtatcagaatagaacagttaacagagcagcagttactaaagacagacggcaacaggca

SEQ ID NO: 329577 - DNA, 423 bp, Homo Sapiens
  misc_feature (67)..(83): n is a, c, g, or t
  misc_feature (390)..(390): n is a, c, g, or t
  misc_feature (401)..(401): n is a, c, g, or t
tacaggattctaaatgttccccttgccaacttttttgttgttcatcatcaccatcctccaggagccnnnnnnnnnnnnnnnnncgtggatcacctcctcatgaaatatgaacacaaaagtcacatgacatatctatgttctgtacattacatctgtgattatacagtaaaaaataacaagatttcactcccaagaatcaatttctcttccttagggacaccgtgtcctatgtagagaatgcagactctagaattattcattcccaaggtgattctcagattctctattttcatttatagccatatcttctggagcagtgaatttcacagcctctggtcccctcacccttggacccttttagggaacccaaagagctttgttccgtgtggnttctttctttnttatttttctcctgaggctgag

SEQ ID NO: 329578 - DNA, 478 bp, Homo Sapiens
  misc_feature (413)..(413): n is a, c, g, or t
  misc_feature (441)..(441): n is a, c, g, or t
  misc_feature (455)..(455): n is a, c, g, or t
atttttaatttcaaaagggttttcttccctctgtgctccattctgaggctcaagagcttaatgcaagtatgttttctgagttaaaataacacttttagatgagaaaatgcttgtatcatacagggctataatataaataaataaattgtatgtatgcaaaatttatcatattttctaccccttaaaaaattaagttagaaataagcttattttcttgcacatcaatatttttctgttggtaaagaggacacagtttctagtagattgttaataacatcaggaagatatttctttcgtcagaactaattgtgtgcttattcccatattctcagctcataactccctgttttgggctgctctctttattttacaattgtttcattgcaaacagcaaggcagtatagcccacactncaggccactagcccccagttccccgggnctgaggaatgagtnggggagggctggggtagttgggt

SEQ ID NO: 329579 - DNA, 433 bp, Homo Sapiens
  misc_feature (384)..(384): n is a, c, g, or t
cagcttcggaatgtgacaatttatttggggggtaaaagaggcttttcacccccctttcctggcgttgatacaatattgaagagcagcagaacaaacgtacaagacagagtaatcggcacagacccacccctcccccggaaccgccgaatccagaatggagcccaaacccacacccccaactaagcgtcttctccacagggggagaggcagggtggactgggggacctgcccccatgctggggcggcacctccgttttccatctcctgccaaccccactcttttcccatctttgaccactggaggcaaagtttagccagctgggagctggatggttgaaccacatacaaaggcaacaacattttcattttaaagttgagagaaanaaagagacagtgcccttccccaaatttgggagttatatatgtatatttt

SEQ ID NO: 329580 - DNA, 437 bp, Homo Sapiens
cttcgcccacacaggacagtggagccccacctggtcagttccacttccgggctcccatgcacttgcccaaggcggcctctttgggacggggatggtttgaggaaacacttttaaagaaaaaaggaagacattgaaaggttttagtttcttccctatctgcatgtcctctcatatagaaagcccagaattaggggctagaactccaggagagggtctccccgactcatctcttgctgacggtcaccagggatgcagaaatagggagatggttagtgggggccaaagatgccccctcccagggccttcgtgggttccctcctccgccccctgcaatctttgggaggagtcagtgcctcactccagcagtgagtgcctactgtatgcaggtaagtcagccaggggaaagagagattaacgggtttcatgggggaaccttt

SEQ ID NO: 329581 - DNA, 489 bp, Homo Sapiens
  misc_feature (235)..(235): n is a, c, g, or t
  misc_feature (247)..(247): n is a, c, g, or t
gcagcaagggcagccgggaacatgctccagctacctgcctcccgcaagaggttccccccatgagaccgttagtctcttctttgcctggctgactaccctgccatacagtaggcactcactgctggaagtgaggcaactgactcctccaaagattgcagggggcggaggagggaaccacgaaggcctgggagggggcatctttggcccccactaaccatctcccgtatttctgcantcctggtgaccngtcagcaagagatgagtcggggagaccctctcctggagttctagcccctaattctgggctttctatatgagaggacatgcagatagggaagaaactaaaacctttcaatgtcttccttttttctttaaaagtgtttcctcaaaccatccccgtcccaaagaggccgccttgggcaagtgcatgggagcccggaagtggaactgaccaggtggggctccactgtcctgtgtgggcgaagtgcg

SEQ ID NO: 329582 - DNA, 347 bp, Homo Sapiens
  misc_feature (36)..(36): n is a, c, g, or t
  misc_feature (52)..(52): n is a, c, g, or t
  misc_feature (57)..(57): n is a, c, g, or t
  misc_feature (94)..(94): n is a, c, g, or t
  misc_feature (139)..(139): n is a, c, g, or t
  misc_feature (157)..(157): n is a, c, g, or t
  misc_feature (174)..(174): n is a, c, g, or t
  misc_feature (223)..(223): n is a, c, g, or t
  misc_feature (239)..(239): n is a, c, g, or t
  misc_feature (246)..(246): n is a, c, g, or t
  misc_feature (249)..(249): n is a, c, g, or t
  misc_feature (267)..(267): n is a, c, g, or t
  misc_feature (290)..(290): n is a, c, g, or t
ccaaaagattttattattttcaacacaaggcttgancaaaattatctaaccngtcanaaccaaaacagtagtcacaattcaccttctttacagngatgaaaatgaagtttgggtggtagatattgagaatcaatgtccncccagtactccactgganttatccactcatttccncatgaccacttgctgaagtttctaacattgtcatttatctgggtttggngataccctagataagnaactggngantttttagctgcttttggnttagcattttaaaaaataaattnggttcaattttagaggagggagagtataagttctttcttcagtccactcttccaact

SEQ ID NO: 329583 - DNA, 388 bp, Homo Sapiens
  misc_feature (350)..(350): n is a, c, g, or t
  misc_feature (374)..(374): n is a, c, g, or t
aaagataaaataacctaaagtgcttttttattttattatttctttaatataccaatatgaggttctgcaaacttgtccctctggacacattcagcattatacaaagtctctcaggaaaacccacccaccctccaatatccccatcagtccacagccttgaccctgaaaataaaactctccgatctaccaactatcccagaggtgaagaagagaagccccttgccttttactcagagagatcttcacatcttaaggcccctcctggggttttggtaccatgatctccttctaaacggaggtgggaattcaataaatggacaccacttctggtcacccaaactgggtgggtngcccccatgaggactgggccaggnccctggccaggcaa

SEQ ID NO: 329584 - DNA, 487 bp, Homo Sapiens
  misc_feature (139)..(247): n is a, c, g, or t
  misc_feature (337)..(337): n is a, c, g, or t
  misc_feature (339)..(339): n is a, c, g, or t
  misc_feature (379)..(379): n is a, c, g, or t
  misc_feature (419)..(419): n is a, c, g, or t
  misc_feature (435)..(435): n is a, c, g, or t
  misc_feature (444)..(444): n is a, c, g, or t
aaggagaacgagcttataataaaaattcacaagacatacaaggaaataaaataccatgagtaaaaaccaacagaaacaacagataaacaaagaatccagacattggaattatcagacacaatatttaaaaaacaagtgnnnnnnnnnnnnnnnnnnnnnnnnnnnnnnnnnnnnnnnnnnnnnnnnnnnnnnnnnnnnnnnnnnnnnnnnnnnnnnnnnnnnnnnnnnnnnnnnnnnnnnnnnnnnngcaatgttttcagttggcattaccagtttggcatcagctagtttgtgcatgtaaacatgttcataccctccattcctaggttataccctngngaaactcttacatatgtgccagggagatgtaggaccagantgtccatagtaggtactgcttataatttttaaaaacctgnggattaatgctaatgntccccaatnttaaaactggatacattgtggctggtattcatacaatgccagg

SEQ ID NO: 329585 - DNA, 526 bp, Homo Sapiens
taaaggcaaccattttaagtgataatacatatcaagctagtagaaaaaagttggaagccctctcttttatctcacaaagtcatgcagacaagagaaggtatatctgatttgttctaatcaggcttcttggaattatcaaaatttcttttctggcaaagatgaatttggctcatcatagaaagaagttctttgaaggctgctgctaaacttgtttccctttgaaaaagtaaatttcaaggcatgatagtgcaagaggtaagcttttgatttatagaacatttatagactaattgtgcttagtctctaatttccaatttattttaaagaacagaaactacgctgataagtttcactttgcctaaatttaccagtatatccatgaatcgcaccagaattaggacaatttgattatcttaatgattctgtcatgaaacttgcacactgtatccaaaggtaaagagcagcggatggaggctcccacaagttctgtgcacaaggactctcttctcgggagttaaggtatctg

SEQ ID NO: 329586 - DNA, 419 bp, Homo Sapiens
ctgagatagacatctaagatgagctgtcctggcagcaggaaagagagcgtcaggctgggaacaggtgccacctgcttggaccccagaattcacccggctcaggcctctgctgcaggaaggatccctcgcctcccacataactctcgtctctgccaccttctctctgggccggtgcaagtcgctgggttgccaggcctggcttcagacagggtcgggtggaccaggtggggtttgcgccatcagatcatcttaggtgtcttacccattacaaagaagtgggaaagagatagcacctgtcgatgatagagctgcctgcagccctcagaccagccctgtccctcacctggggtgcagtcctgctacttagagcagtactgcctttgattcccttcacagctttccccctttcttcctttgtc

SEQ ID NO: 329587 - DNA, 406 bp, Homo Sapiens
  misc_feature (290)..(290): n is a, c, g, or t
  misc_feature (311)..(323): n is a, c, g, or t
  misc_feature (330)..(330): n is a, c, g, or t
  misc_feature (345)..(345): n is a, c, g, or t
  misc_feature (369)..(369): n is a, c, g, or t
  misc_feature (385)..(385): n is a, c, g, or t
  misc_feature (391)..(391): n is a, c, g, or t
tttttttggatttccaactaggttttattttagtttccaatattatgagcaatgatacaggagtaactcaagcaaatacatcaccttaaatacatcagagaaaactcactgtgtcagcacgtcttgcgctccagcaaatgaacataaaaacaacaatgtcagcagcattaaagtgcttttggccatacttctttcagaaagggtctctccctcagtggtataaatttaattttacgtattgaagaagctcaaaatttcattcattccccgggggctacattgaaaaaaanttcatgtttacgctaaaggannnnnnnnnnnnnccaaaanggggcacaaattccnttgggatttgtggtggacagtggnttttccctggacatgnctgtgnagtgggcccctgtcc

SEQ ID NO: 329588 - DNA, 783 bp, Homo Sapiens
agaaagaaaagaggtttatttggctcactgttctgcatagaactgtataggaagcatggcgctggcatctgcttctggtgagggcctcacgaagcttacaatcatggcagaaggtgaaggggagccagtgtgtcacatggtgagagagagcaagcgagagaggaggaagttccaggctcttttaaacaaccagctcttgcataaacaaccagagtgagaactcactcattactatggggatggcacaaagtcatacataagggatccgcccccatgacccaaatacctcctactaggcccacctctaacactgaatgtcacactttgaacatgagatttggaggggacaaaacatccaaaccatatcaccacctgagaatggtacactacaggtcacagaaacttacagagtactggagttgaaagagaactgagatcacctagttcagagactaacgggaaacgttaggtcatttatggctctcagacacgttaagcctgcataacattttttaaaatcttgaaattagttcccaacacttaattgagagctttcacagaaaaatctagatatgtggcttatttttaaaaaacagaagatttgctgacttaaacactgcaaaattaaacatttatatctgaatccagcatctctttttgctttgtaaatgaggtcaaggatgaaatccagatgttcttcctttgtatttgtattgtcactgtatggaatctaggtatatccaaggaaaaataaacttaagataagcttattttccttatttc

SEQ ID NO: 329589 - DNA, 345 bp, Homo Sapiens
  misc_feature (300)..(300): n is a, c, g, or t
  misc_feature (315)..(315): n is a, c, g, or t
aagaccatttcatcacatactttattggacatctcctgtggctggtcactgggatagagtaaccaggaaatgcagtcggccctcatgaatgaacaaaacttacaaccccaggagggacgccagaaactcaattagtggcttagtttccacaacactacgtgctacaaagaggtacagaacaattccaggcaaactaagaacctgccccagcctggaaggacaggcatggggggtgagggaacccacaggcaagaagcctcccttaagctgagctcaggactggatgaaatgttcttggtngggcaggagggaaanttccagggcagggaaaacagcagggagttt

SEQ ID NO: 329590 - DNA, 544 bp, Homo Sapiens
  misc_feature (347)..(347): n is a, c, g, or t
agaatctttaaaccctgctttcttgatacaaacagagaaaaatccacttttctcgtggtcctgacacttttctccaactagtctttgtaaaatactgattctggcatttcatctgttctgcattttcatgggaatctgaacttaacagataaagtgggtgccattcctctttatatgattccattaaagaaggagttctcagattttatgctacccatccccctaaggaaagtaaagagggagtgcagggcagacagcatcgccgagcagccacccaccattggggctgccgattctcatctccagctcatgcagcgttacatgagtgagtttagtaatagcttctnaaacatagtctacgtgattttatagcattgatacatgctgagacttggaggagaaaataaacatttaattagtagatatatcatgggttgatgaacttaggactttggatagaaactcaaacttcatttttctccctaggttattaaacaggaggttacttggttaaattgggttcataaagttaacttcagacttc

SEQ ID NO: 329591 - DNA, 385 bp, Homo Sapiens
ggacatcaaaatcccactttctatctgagtggaaatcgttgggcgttcctaaaaagccatcctctatgagaaagacactttaaaaaaataattgactattggggaaatgtgttcagtgcatttgggagtgtaatgaaagattttccagagcccccgtttgctatgttactttggtaactttgtattttgtcattgtgacaagtgggactaatttgcatgcatactttatagcattcctcctggtcatttatgacaatgaaggttaatttgtaaactaaatcatataggattccttgactgttcaccattctctattttagggttacttataaatagttgttacttgtaggaagttgagtaaatatcttgatagagaaatctgcta

SEQ ID NO: 329592 - DNA, 494 bp, Homo Sapiens
  misc_feature (13)..(13): n is a, c, g, or t
  misc_feature (409)..(409): n is a, c, g, or t
  misc_feature (412)..(412): n is a, c, g, or t
attcggcacagtnttccctcctcacatccctcccaccctcggtcatatcattgagatcaccgtaccagcaaatctgcaaaccaagcactttgttaatctccagagagagcaaatacagcaatctagagtttagcctttttaaaaatgtgactttaacccgcccacctgtgtcctcccattggcgtggcatttctttggtgtctgctcagaaagaaacagcatgggaccgtgtgattgggtccaggctgggctgtcagggaagcgccctggtgtctccgactcatcaattctcgggtcttttttaaaagccaggctccccaaagcactctttgtcttcgcaattttgaggaggttgttccgacctggaagcgttaaactgctgcatgtcatctggcgtcagctgtgaggntgntctgcgtgttgtgcggtttgcaaaatgtattggcgtgactgtaaacacatcgttgaagtaaagcgattacatattgagtaaa

SEQ ID NO: 329593 - DNA, 359 bp, Homo Sapiens
atctttctctgttgtatttttccgtcttgtacactctttccttatggtgaattgccttgactgccttttattaccaagggtatttgttggatcacagaatctttatttcttaagagatatttgctgcttctacttaagtcacaatcctttgtcacaggacaatcatttccacagcaaccaactgtgatgtcacaattgaagggaggaggaccctcaaaggccacgaccagctggttcccgtcaccctcttggccattgcagtcatcctggctttcgtcatgggggccgtcttctcgggcatcaccgtctactgcgtctgtgatcatcggcgcaaagacgtgggaaaactgggccgcgtg

SEQ ID NO: 329594 - DNA, 491 bp, Homo Sapiens
  misc_feature (45)..(45): n is a, c, g, or t
  misc_feature (51)..(51): n is a, c, g, or t
  misc_feature (84)..(96): n is a, c, g, or t
ctgggagccaaaagtttgcaatgaacccaagatcgcgcccactgnactccnaccctgggcgtccagaaacgagactctgtctcnnnnnnnnnnnnnccatttgttctgaaatgtgcctccatcatccccaggcaggccatctgtaagtttcccattgtttcccacaaaaaccagtgggactagtctggaatagtaggcccaaacggtaggaagctttgattactctgctaacttgggggcccaagagtagggctaaagcattgtctgcagagaaacaaacagggaaattcagtaagaagggcctattttaacttgcagttagcaggagaatttgtccccagattttgatctagcttaaagtcccttgattccttcccctctacaaatggcaatcacggttgccctagagatgctgactgacaaggtctcccaaaggaggggcccttctgccatttatgggcccctaagtgcacacgtgggcttccatgcgg

SEQ ID NO: 329595 - DNA, 404 bp, Homo Sapiens
  misc_feature (337)..(337): n is a, c, g, or t
catgccaccatccacacagaaaattgtaactgaaaagcataccagtgtaagcaggtgagtcttggccatgtaggtgaccagtcctgaggtcccctctcctttgccaccctgcaaaggctcaacattcaggccacacctgtacctatatgcatcatactggtgttcagtggtatgctggtcaggatgctctcccctgtatgacttcttagaatcttgtttgatctgactctagagtatttggccacagtgatttttacagtttccagcaattcacctgagtattttcatggttcttgatgtccctctgatgaagtaggcaaaaggttttctgaaatgncagtaatcctagttcagagcttacttggctatttggctaaggtttgttatggtggctgtccattttt

SEQ ID NO: 329596 - DNA, 413 bp, Homo Sapiens
  misc_feature (369)..(369): n is a, c, g, or t
ttcggcacagatcaggacagtgttccggccgcccttggacatttacgacgtgctgattcgcctgtctcctcgccatatcccgcggcaccgcaggcttgtggactcgccagctgcctccttctgccggggcctgctcagccagccggggccctcatccctgatgcccgtgctgggttatgatcctcctcagctctatctgacgcagctcagggaggcctttggggatctggcccttttcttctatgaccagcatggtggagaggtgattggtgtcctctggaagcccaccagcttccagccgtagcccttcaaggcctccagcacaaaggggcgcatggtgatgtcttcgaggtggggagctagtaaatnggtgcccaatgttgaaagcaatccgggaggactttttctgttgc

SEQ ID NO: 329597 - DNA, 483 bp, Homo Sapiens
  misc_feature (445)..(445): n is a, c, g, or t
ccttattttccttcaaaaaatagtttattctgcacatttcctagtaggctctctgcccaccgttccagggtagcagctactcataacttgtctttctctccaaaaccaagagggccttcccaacagaaaaaccttcagttcccaaagcagcatcgattcttcccctcaccccagcaaacctcggggtggaaataatgaatcattcaccttctcccacccctcactgccccgccccaccttcatttgccaggactgtcactggctgatggtcagattttgtctttttcaacttggataccctcaagcatcccagcttttggaggcttccctggggcaacctcatggggcttccacattgaccggggattacattcagcatccttgggacaaaccacccattcagaggcagtggggttgtgggccagttccctccattccccgattncggcccaatgggagaaaccagagggtcaaaggggcctt

SEQ ID NO: 329598 - DNA, 320 bp, Homo Sapiens
  misc_feature (22)..(22): n is a, c, g, or t
tttttagagtcctagttttatncctctttgctccctaaaacacacctagcatcctcatttaaataattcaggtagaggaacagctgttgaggagttaatgattagataaagaaacagagtatggtcatttgaaaacactatttctgcaatgtgttaacattctgttaaaaagaatagccttgtaaggaactaggctgaagaataaaactatattaacatactccgaaggatgaaagagttcaggtaattccctgagggccaaaccctgagagcaagactagaatcacccaaggtatctgattaaccataatttacaaaca

SEQ ID NO: 329599 - DNA, 439 bp, Homo Sapiens
acaattattattggaagttggatttccccccaggagactgtaatattgcaaattagacaaaacatatataacaaagatagctttttatcttcttaaaactttgattagcaggaaaaagcaagccaagtggctcgtccatgctatagtgacttctatggagccaccacacttaaatgctgccacaaagctttggtaacattgaagaggtccctttctgtatggcacttgtttggctctcacacaagtgggaaacattcaatttgttgaaaatagtctgcttcgtatccagctgctaaaagcatgttcatttaaaattcaaggaatgctttattctagactttttgtttttacatttctgaggttcacatctcatgtcatgatacagataagagaacaggggaaggaaaatgcagcctgagaaatggaaatatagaagttc

SEQ ID NO: 329600 - DNA, 359 bp, Homo Sapiens
gacttttttggcaatctcaccctattaacaaagctttaaatcatcacctcccatgaaaatgacttcctaatttccttctttttagttccaggaatattctcttcccacattccagatccatttagatgtaccattggaacttcaaactcaaaatacagtcatgggttgcttaatgaggatacatcctttagacatgcgtctttggatgactttatagttgtgggaatatcggtgtactcacacaaacctaaatggtatggcttgctacacacctatgctatgtgatacagcctattgctcctgggctacaaacctgtacagcatgttactgtactaaatactgtaggcaaactgtatct

SEQ ID NO: 329601 - DNA, 471 bp, Homo Sapiens
  misc_feature (315)..(315): n is a, c, g, or t
  misc_feature (324)..(324): n is a, c, g, or t
  misc_feature (376)..(376): n is a, c, g, or t
cagtttttatttcaataaaacaagaggcaacacttgttgtataaagtactacatatggagaacatttacacaaatatacaaaaattcaaaaaactaaactccagtttatttccatagccttaagaaggtagggaacacacaaaaatagccaaagtcgtcgtttattctttaggaatgtaaactctaggaatacaattagaaacaaatatatttactatgaaaagattagtatcactaaatgattagaaataaaggtaagaggtacacaataagttccatataagagaaagcaacaatacgtgaaataaaatcttngggtttatnggtaaaaacttcctatttaagacaaatgtactctaaaactctactataaaanaacacaaaaacatctcccaaaatgttcgttgttagtttctttaggatatggcacaagttacaaagtatagaagacaatatatttatgctctctga

SEQ ID NO: 329602 - DNA, 534 bp, Homo Sapiens
  misc_feature (17)..(17): n is a, c, g, or t
  misc_feature (39)..(39): n is a, c, g, or t
  misc_feature (478)..(478): n is a, c, g, or t
cttttaccctcaacctnaaaatcaaaatggtcctgttcnttattttatgggtccccataaagtaggacacgcacttgggacttctgggttttagaacattcctattgttatcctttctccttttaataaacacacactagtttcggaggaatctccctaataatcctggcctgacatgctgcagaacttcaatttcataattttactaacaacagaggaatttcatcttattattaccaactaccacattaaaggatctgaaacagtaattcatgcataattctatttaataatggttttcaaagtactttgctgtttgaaaatgcttcccagatgattctgatcggagagttgggaaccactgccctagactgtaaccactcaattgaactttactcagtgctgcttccctgcccacttcaagtaaacaatgcttaactttttcgtttctaaaacaactgagattactttctccccnttagtttctacaatgattgttgaaaatttgtgggaaaagtttatccttacaaatga

SEQ ID NO: 329603 - DNA, 427 bp, Homo Sapiens
  misc_feature (370)..(370): n is a, c, g, or t
  misc_feature (404)..(404): n is a, c, g, or t
  misc_feature (411)..(411): n is a, c, g, or t
acttagtttttaatttttcccaattaccaggcatgcttctgattcactaaaatggttaacaggataaaaaaggaatgttccaagtaagttggtcaagaggagggctagattcacagcattaaaagcaccacgttaagcaaatatagcaacattattatttgtaaaaacaatctaggcgtgtttatccggattgttacacaattcctttgggttttgtgtctgaaaaccttctaagtgtgggaaaatgtaatacaagctatgctctacaatgctgcctaattgcttaagcgcagtacagtcaggcatttctgggcatgggagacccacctcaaaggccatccaaaagtccttggggacacttaaggtttcnttgggctggacagggtccccaaatttgggcaacngcttggnttcccttaccaatggg

SEQ ID NO: 329604 - DNA, 386 bp, Homo Sapiens
  misc_feature (17)..(17): n is a, c, g, or t
  misc_feature (22)..(22): n is a, c, g, or t
  misc_feature (51)..(51): n is a, c, g, or t
  misc_feature (376)..(376): n is a, c, g, or t
aagcaagctgttgccanatttnggacctgtcagcccaagaaacttaagtgntccaatgacttttggatggcctttgaggtgggtctcccttgccccagaaatgcctgactgtactgcgcttaagcaattaggcagcattgtagagcatagcttgtattacattttcccacacttagaaggttttcagacacaaaacccaaaggaattgtgtaacaatccggataaacacgcctagattgtttttacaaataataatgttgctatatttgcttaacgtggtgcttttaatgctgtgaatctagccctcctcttgaccaacttacttggaacattcctttttttatcctgttaaccattttagtgaatcagaagcatncctggtaatt

SEQ ID NO: 329605 - DNA, 303 bp, Homo Sapiens
gcccccaaaacaaacaaacaaataaagagccttcctctcccttatgaccttatttaaagccttgggaaattgttcccaattcaaatgctttaaatggacttgagctaaaacagaatgtggtatatgaaatgttcttataatcaggtgattgtaaaaattgatccagataatgttagcatagcattttactgaactagtagtttacaaacacttcaaaaattatagaataacatttgcatataaaattcctcatacatttccctatccagtgaattggaagcttacaatatacaatattaccca

SEQ ID NO: 329606 - DNA, 420 bp, Homo Sapiens
  misc_feature (81)..(81): n is a, c, g, or t
aattttatgcatttttatgtatccactcttatccatcctgtaaacctagtttcattcacaaaggtgaaacacatttagttntcttcaaaatacatgagagactggctgggaaataatccccccccaggagttacccaaaagaggtttcaacatttgaaggcccaccctgagcccatgggaacaatggagaggacctcactgtgtgactcctagtctgtctcccttgccccctgagaggagataacacctcctcttctctcagttctgtacagctcagccttgaccttgaggttcctgggaagttgttagaattgtgttaggttagtacgaaatctattcattcctaagctgatcagatcccatttcctgacttcttgtcattgaatacttcacatttagtttactctgaaatgtacgtta

SEQ ID NO: 329607 - DNA, 434 bp, Homo Sapiens
  misc_feature (270)..(270): n is a, c, g, or t
  misc_feature (300)..(300): n is a, c, g, or t
  misc_feature (352)..(352): n is a, c, g, or t
  misc_feature (358)..(358): n is a, c, g, or t
  misc_feature (373)..(373): n is a, c, g, or t
  misc_feature (413)..(413): n is a, c, g, or t
  misc_feature (422)..(422): n is a, c, g, or t
gtcattcttctatatttttgccacagtgggtctgcttggcccgcgggagagggacagcagtgtgcaggggaatgtgagaggcaggctgacgtcttcataatgtccttacctaggcttgcacagtggggaggctgaggaacgcatggggttagaatgggaagggtggggagacaggcttctagacagcagagtgccacagtgtcctgggctgtgaggttctccctgtggcccagggctctgaggccagggctgggcttcaggggcagaatncttggtgttcccaagatgggtacatttgtngccagaaaggcggtggcatttttccaagtttaggtgaacacctgcagcgttnaccctnagaagggatttcttnatttcaaaccaaacatttcagatgatgatcttcccacatntcacgtacntaagggcgccaa

SEQ ID NO: 329608 - DNA, 135 bp, Homo Sapiens
attttaaatacaagcaggttctccctatgttgcccaggctggtattgaactcctggcctcaagcaatcctcccacctcagccttccaaagtgctgaaattacaggcacaggccactgtgcccaggcctagatttt

SEQ ID NO: 329609 - DNA, 387 bp, Homo Sapiens
  misc_feature (274)..(274): n is a, c, g, or t
  misc_feature (290)..(290): n is a, c, g, or t
  misc_feature (311)..(311): n is a, c, g, or t
  misc_feature (319)..(319): n is a, c, g, or t
  misc_feature (338)..(338): n is a, c, g, or t
ttacagtatggtacacaattttaatggaaggaaccacaggtatgttgaaagaacatcagtacagctggagacagggagggaccatatgatatataactcctaaaagccggaaggagttattatcacataatttctgggcgctacagaagtttttcatcactcactagtattacataatttgctagggatctattaagaaacttcgagtagcctgattaggaagaaaagacattagggaaaagcaagtctcaagagttgggaaagaggaaggacntggcatcagcaatccngaattgcttgcagtggggcanaagggttncaagaaagacctgcaggtngagaaggaaggacctggggtacctgaggtactgagggtaacatacctgg

SEQ ID NO: 329610 - DNA, 185 bp, Homo Sapiens
aatatggacagggagtctcattgtgtttatcatatcaattaatattacagtacatccttggtaatacaaaattgtacaccttcatcaaataaattagggataaattaaaccaataaattatggcaaagtcttcaggaacaataggacaacaacaaaaattcacaattgaaattgcctctagctaa

SEQ ID NO: 329611 - DNA, 463 bp, Homo Sapiens
  misc_feature (21)..(21): n is a, c, g, or t
  misc_feature (70)..(70): n is a, c, g, or t
  misc_feature (111)..(111): n is a, c, g, or t
aactggaacaggtccaaattnatctgaacctgtgtaaaatccattgtctggccactaacagttgaaatcnaccttgaacactgaacctccaggagcagccccatttcaagnaagccatcttgtaaataacaaagtgaacaccttcgagattacagttgcagctatgcaagtcaattcacagagtagctgagggctctcttctgaaggaggaccccattacatgaaggtagacctttcatgtcttgttggccgacgtccaagtctcttgcggtccagaaatgcccaggatggttgtttcaaatgcattgggtatgaattgcaccttgaatctgcccttccctttttcgattaaaccttttcacatagctgctgctgctccttagcagtccatcccctggacggaggcggcctctcaggacctggagcagagctgtagggagctgccgtctcttatggtagatgt

SEQ ID NO: 329612 - DNA, 471 bp, Homo Sapiens
  misc_feature (177)..(177): n is a, c, g, or t
  misc_feature (181)..(182): n is a, c, g, or t
  misc_feature (192)..(192): n is a, c, g, or t
tcaatagcttttgaggtacaagtgttttttttgttacatgaatacattatatagtggtgaattctgagattttagtgcacccattacattatggtaatgagtacattatacctaaatttatttttattacttcaaatccaaattaatttcaaactcaaggctcatgcatgttatggnatcnnggggaaaaangcataggctttgaatctgaattctatatccctgtattacatacaacactggaaatggaaatgatttatatggattatcattgcttatgatcataggggagcatggggatattttgaatatctagagggtgccctcagggttctattttggaatttgcatgtggccctctttctccagctcttacttctgaaccttgccttcctggaagaggatacagtcagtatgttacctcagtacctcagtacctcagtacctccttctccacctggcagtcctctc

SEQ ID NO: 329613 - DNA, 340 bp, Homo Sapiens
cctttaaaaatctgccttcaagccaaatgtcctacaaacttgcctggttgcccattgaaggaacccctggaaatagggttggtggccttccatccagaactcaggttcctttaaaagatatttctctttctcccagcattaccgtttagttccaccatagcctgttttcttcttcggcgtttccctggtgctgctggagggtgtgtttctgctcatgtttcagcggctttggctgggccttggggctgccctcggctccatgctgcaggtattggtgaggctgctggtgatgatgatggtggtggtggttgtggctgtggttgtagaaataataatggtg

SEQ ID NO: 329614 - DNA, 558 bp, Homo Sapiens
  misc_feature (485)..(485): n is a, c, g, or t
gaattacaattcaggagttgtatatccgctctcagatccactaccatcattatctgctcctttacccatataaccattagtaatataaccagaattatttgttaccacaccatttggaattggtatagtatcagacttatctacagactgattctctccagatttattttcataagacttcccattctttttgtccatactgtttttctgaatgaaattcttggttttaattcctgctttcccaaaggtgttggcctttacagtctgcttcaggctagtgtctacaacttgctggttgccattgaggaccctggaaatagggttggtggcttcatcagaactcaggttctttaaagatatttctctttctccagcattaccgtttagttcaccatagcctgttttcttcttcggcgtttcctggtgctgctggagggtgtgtttctgctcatgtttcagcggctttggctgggccttggggcctncctcggctccatgctacaggtattggtgaggctgctggtgatgatgatggtggtggtggttgtggctgtggtt

SEQ ID NO: 329615 - DNA, 691 bp, Homo Sapiens
  misc_feature (659)..(659): n is a, c, g, or t
agaatcctgggagcagtaatttacagaaaataaccaaggagccaataattgactattttgacgtccaggactaagaagatcatgatgcacttagataaaagaatgattaggtatagtggagacttatttgccagcagataaatcatgcccgttcccctctgcctggcagaatcacagtctcacatactgtcttgtactgacacatccaaagcatgagtgtgtcagaaatcccttgtctattcctgtctgtataaagtgtttcattatgaccagatctctgattgtatggtcactaggtatgcaatcacgcattcaaagaggctctttacaccatcactgtgattgctctgagagttgagggactattgggctttatttggacaaaccaaacttttagcctgaaaccaactttatgccactaagtcatagcctcagttgtcccagttatttgtcctcctgaaaatgcctgaaacatcagacagacattgcttgctttacccaaactgatcaaaatctttaggagcacaaatgaattttttagtctgaaataccaaataatgaattggtataccatatccgggaatcacacatgtttatctttaaacccagccatcatacctaagtcttttttgccaaaacctctcatagggtatattctngctggaactttttttggggcatttttcattgt

SEQ ID NO: 329616 - DNA, 604 bp, Homo Sapiens
  misc_feature (136)..(136): n is a, c, g, or t
  misc_feature (138)..(138): n is a, c, g, or t
  misc_feature (144)..(144): n is a, c, g, or t
  misc_feature (161)..(162): n is a, c, g, or t
  misc_feature (188)..(188): n is a, c, g, or t
  misc_feature (195)..(195): n is a, c, g, or t
  misc_feature (197)..(197): n is a, c, g, or t
  misc_feature (199)..(199): n is a, c, g, or t
  misc_feature (205)..(205): n is a, c, g, or t
  misc_feature (209)..(209): n is a, c, g, or t
  misc_feature (212)..(212): n is a, c, g, or t
  misc_feature (216)..(216): n is a, c, g, or t
  misc_feature (222)..(222): n is a, c, g, or t
  misc_feature (224)..(224): n is a, c, g, or t
  misc_feature (452)..(452): n is a, c, g, or t
  misc_feature (525)..(525): n is a, c, g, or t
ccaaaacctctcataggtatatctagctgaacttattttggcattttcaatgtgatcagttctagacctagaagggggtcaggctgctttacagaattctatttccttaagtccctggcacttctcataccacatnantggaanctggtcagtaaaccatnnagtttggccgtccccaaggattggtnggaattntngngagcangttnttntgcnagggtnanactgggggtctctggaactggaccaagtaatatcccctaactccctcctttgaataagaagaaaagaagtctcaaaatgggacaactgttcctggtggttgcctttcccttaggccttcaagcaagcctattggctctccctgccctctggagctctgggactctgtttgaatattcccaagtagtatatggacagtccaggggcttatgcccggcagcccactgganggcattcttcaggctcctttaaggcaggtgcattgatagttccattagtgtgacccttgcattggcacccctnccacctggaggccaggcttccagcaacttccttctgccctagagcaagccatgagccccagagcagtagcaggagactt

SEQ ID NO: 329617 - DNA, 477 bp, Homo Sapiens
  misc_feature (395)..(395): n is a, c, g, or t
ctatttccttaagtccctggcacttctcataccacatcactgaacctgttcagtaacaatcagtttggccgtcccccatgatggtaggaaatatagagagcaagttcttctgccagggtcacactgtggtctctgaactgaccagtatatccctaactcctctttgatagagaaagagtctcaaatggacaactgtcctgtgttgctttccctaggccttcagccagcctattggctctccctgcctctgagctctggactctgtttgaatattccaagtagtatatggacagtccaggcttatgcccagcagcccactggaggcattcttcaggctcctttaaggcaggtgcattgatagttccattagtgtgacccttgcattggcacccctnccacctggaggccagcttccagcaacttccttctgccctagagcaagccatgagccccagagcagtagcaggagacttgaga

SEQ ID NO: 329618 - DNA, 267 bp, Homo Sapiens
aagtcagagggtaaagcagtctgtttaagtttattgtttggcattgttttaatccaggctttaaacaaatttgaatcttactaagagtggcttactttcaaagaaatccctgatttcccatcctttgatcctaatgattctggggcatgacccagtgctgattattatggatggactcctgttaacttggcaaatcagccatggacctgtgacggccatgggtacaagacaaagctgctaacagaaagggaatatggattgtgtgga

SEQ ID NO: 329619 - DNA, 475 bp, Homo Sapiens
  misc_feature (337)..(337): n is a, c, g, or t
  misc_feature (463)..(463): n is a, c, g, or t
tggaatctcactgtacattactactgtttgttgatgtcaagtggaatttggcagagaggcaaagaagaagaaggagtttatggttttctaatagaagatatcaggaaggaagtgaatagagcttctaaactgaaatgctgtgtttgcaagaaaaatggtgcttcaattggatgtgttgcaccccgatgtaaacgaagttattcatttcccatgtggacttcagagagaatgtattttccagtttactggcaattttgcgtcattttgttgggaccatcgacctgttcaaataattacatctaataattatagagagtccttaccatggcaccatttngcttgggaatttatttgagcctattccaagttattaacatattacggagtccttgttgtaaggaacgcttggttttcataggagactgtttacaggtttcaagcattaatgcgggagtgtttttcnttagggtgtact

SEQ ID NO: 329620 - DNA, 598 bp, Homo Sapiens
ggcacgagactccagatggtgacgagaaggacataacgcaggacaattctgaattaaaacacagatcctcaaagaaagatttgttagagatagacaggttcacaatttgtggaaaccgaattgactgaatctgtggcttcatgcgctgaagaagctgggtcctggggcaacaagtgctgtgttgccaggacaaatagatgctaaacatggcacttaaatatttatttaaaaacttaaattattattggcaagcaaatcttagtatctttcttccagtaatatggccctggctgagggtcagacccacaggacaggagcgacctccggccttgactgtctgggaagcttgatggattattaaaacttcctcctgccctggccaagcagcagcatcatttcccgggacccaacaaaggcaacatcaaaatctgttttgctttgtcagtctgggcttccagaatgttgaatttgcctcaaggcctcttcagtataaggaaatacctggaaaactgtgaaacttttaccacgacgtaatctttccagtctcatactattttcacaaacagttttcaaacgttacttcatctgccaaagcatt

SEQ ID NO: 329621 - DNA, 537 bp, Homo Sapiens
  misc_feature (205)..(205): n is a, c, g, or t
  misc_feature (358)..(358): n is a, c, g, or t
  misc_feature (448)..(448): n is a, c, g, or t
  misc_feature (471)..(471): n is a, c, g, or t
  misc_feature (485)..(485): n is a, c, g, or t
  misc_feature (494)..(494): n is a, c, g, or t
  misc_feature (509)..(509): n is a, c, g, or t
gagatggagtctcattctgtcgcccaggtatgtttggcagtgaaggaccagttgagtcatagctgcaagtaaccaccctgcagtggtccctatcttggccgttagcttacattgacatttaacactcaaatttactcagtaacaccagctatcatgttttccactaaaactccacaggcattctgggcaacttttctattttagnggcaataaaggtaaattgttaggcatccctttgacatataaatatttctacaaataggtaattctctaggccattcatttggagtatttaaaactcaacattcatagcacattttatgtgacaaagaacttatgttcagaacacaaaaataangtccgtacgtcttccatttaaaaacaggtggaagaatttgaacaaacatttggcaaactaaaaattaccaatggaatacactcaacatcnttaaaccaggagaataaaatttntggggataatcccntaataatcncctacatatgcaccncagtggttaaaattttttaagttaagcc

SEQ ID NO: 329622 - DNA, 452 bp, Homo Sapiens
  misc_feature (413)..(413): n is a, c, g, or t
gcaaataaggaatttttattaattctttaaatgcaaatgtccagtaatgtctccacttgccccaccccctgcagcgctccaggtaggaaagaattgcaacctgctagctggtggccgaatggaaaaaagagtgattattcatggggtctctgatgtcaaatagtacatacagctgaatataaaagaccctccttctcccccacaacctactcctttgctaagagcacaggtatgaaacacagatgcaaaatgggagggaatccctctcatttgtccccctgggcagggacatattttaggattaaaaccgggcaaggtaccttgggcagggcacccaggcgtattcagggtaaattgtttaacttatccgacttatttcttttttacaaggggccaaaattgaggtgtggatntttaaggcaaggcctcttttatttttaaattattaggtt

SEQ ID NO: 329623 - DNA, 380 bp, Homo Sapiens
  misc_feature (24)..(24): n is a, c, g, or t
  misc_feature (33)..(33): n is a, c, g, or t
  misc_feature (38)..(38): n is a, c, g, or t
  misc_feature (71)..(93): n is a, c, g, or t
ccactgcactcccagccctgagtnccagttgcncaganccaagtgcctaaagacaggccaagactgtctcnnnnnnnnnnnnnnnnnnnnnnntattttgcccatttgtcacagcatagatgagtcaggaggactgaaaagaaaaacattgcacaatctcatttacatgtgaaatttttttaaaaaatcaaatatacagaattagagaacaaaacagtgatgtgggagttagtaaaggaagagatataggtcagagaatataaaggaacaggtacgtaggctgaacaagtctaacgatctaatgtacaacatgacaactataggtaataaaattatactgtaaacaggatccatgctaaatgagattttagctgttgcca

SEQ ID NO: 329624 - DNA, 604 bp, Homo Sapiens
  misc_feature (111)..(169): n is a, c, g, or t
  misc_feature (310)..(310): n is a, c, g, or t
  misc_feature (426)..(452): n is a, c, g, or t
  misc_feature (542)..(542): n is a, c, g, or t
  misc_feature (547)..(547): n is a, c, g, or t
  misc_feature (589)..(589): n is a, c, g, or t
ttttctattattgtctacttggacttaaagttgtaaatccaagtggtaaggccttcttcactctaaagggcattttgcctcatcagtttttattccctttcttactactgnnnnnnnnnnnnnnnnnnnnnnnnnnnnnnnnnnnnnnnnnnnnnnnnnnnnnnnnnnnaagattgttttatttttcaatgtttttattgtgataaaatacacataaaattcaccatattaaccctttcgagtatacaattcagtagtattaagtacattcatactgctgtgcaaccatcaccgtaatccatctccaggnctcatttcttcttcccaaactgaaaccttgtacacattacacagtaattccctctcgctgcccttcctgcaacccctgggcaaccatcattctactttctgtctctataattctgnnnnnnnnnnnnnnnnnnnnnnnnnnntattcacagggcacaatcaggcatactgcaggccttgaacttcagggcctcaaggcaatcctactacctcaggtttccagaggtaggctnggggnctacatacaaggggtttcaatccttgaaggcaggttgtacanggaatggggttttca

SEQ ID NO: 329625 - DNA, 475 bp, Homo Sapiens
  misc_feature (26)..(26): n is a, c, g, or t
  misc_feature (35)..(35): n is a, c, g, or t
  misc_feature (49)..(49): n is a, c, g, or t
  misc_feature (55)..(55): n is a, c, g, or t
  misc_feature (66)..(66): n is a, c, g, or t
  misc_feature (93)..(93): n is a, c, g, or t
  misc_feature (120)..(120): n is a, c, g, or t
  misc_feature (126)..(126): n is a, c, g, or t
  misc_feature (132)..(132): n is a, c, g, or t
ataagacgcccaaaaatttgaaacanttcttgtgncaaaaccctaaaanggaagnctgcctaacangaaacttcttccctcaatcaacccaanccttgaacaaaaacacggaaaggcccnacccantcccanctggcggcaatgcaaggaacaaacagggccctgcccttcaatgcaactccctggcccccggtccacatctgtttaagggccaggctgaacccagcaggaggatgaagatgcacagggggttcctgtcgcttgaatcaggtggagaagcccctgatgtgcaggaaggaactgctggggagcaggagcagccagtctctggttccagtccctgctgctgggggctgtgggaccctaagcaagatactctgtgtctctgatggccaatttccctggcaggagcatgagaacacctgccccacctggccttcagggaggctccagagatcaacggtaacagctctct

SEQ ID NO: 329626 - DNA, 313 bp, Homo Sapiens
  misc_feature (193)..(193): n is a, c, g, or t
  misc_feature (258)..(258): n is a, c, g, or t
  misc_feature (293)..(293): n is a, c, g, or t
tttctcttacaaagaatttttcctgttaaaggtgtttgagagacatttaattagtgatattgtaattggcctgtgctcaggggaaacattgatcaataagtcactttgaaaatgttgccatggttttaatggcaaagcacccctgaaaacaagtagctatgtgcctctataacagaatacatggtcctgacgncttattgctttttggagataaacaaaatcattttgttcaaacataagaccaacagtgaataaatntaataaacaggttaggaatattagctttggggggncgggggatagtggggaaatg

SEQ ID NO: 329627 - DNA, 395 bp, Homo Sapiens
  misc_feature (227)..(227): n is a, c, g, or t
  misc_feature (383)..(383): n is a, c, g, or t
tgagatgtaagaagcttttcttttcctgtggcattgattctgacttagagctgaagtaaagatcactgaaacatcacgtcaagttgaagtcactcataggtctttgtcctttaggcaggacaggagagtcattaagaagcatttcactgtagcattctatcacaatatcatctggaattgttttctttgcccagaaagccttaacttgcctctagagaatccctggnattacaacgatattgcggcattagaattccaactcttctgctgtggaagtttgaagcgactgacaaggcagaaccagagaatttcctcaagtggcctgtaggttccttgttatcttatgcccccacccctccctcaacaatatgagtgatccaganctggcccaaaca

SEQ ID NO: 329628 - DNA, 405 bp, Homo Sapiens
  misc_feature (301)..(301): n is a, c, g, or t
  misc_feature (383)..(383): n is a, c, g, or t
ttttttaaagcgaatcatggtgtaatggaaaacgcacagtacttgtcatcagaacactgccactcttgccacttgctgggtgtgccacttaactgcctcatgggcctcagtttcctcagcagttgaatgagtgggttgaagtagatgctctccaaggccccttcccgcattaggaactcggatttggtccagaagctgttctgccaactctgctaactgaagaaacatctgtgttcccaattcagttcccttaaaatacagctcctgcacagacttaagtcccctttgaattggatttgtnccatggcaggttttgcagaccagagacttgttagggttggagttatacccttctgggtattcaggactctttctgtaggcantgtttttaatgtggcagtgtcc

SEQ ID NO: 329629 - DNA, 993 bp, Homo Sapiens
aaaggaaacagggggcacataataaaaatcctaagacttgtgcccattaagttaaaaaaaacctgttccataagaaaaatgggttcccttttcccacctcccaaccccccaaattggaaattttccaggctttaaaaatttaaagtaaatcccacctggtctgaaggatatgaacctcttgcccattttttccttcaactgttacttgtgagggtttagtttggagatgatgacttaataggtttctctttggagtgaagttttcccattgtaggcactaggaagaaccaaggcaaaagctgcagttagcgtctcatgtgtcccatttgataactctctcgggggtctgacgctggggttgctgaatgggctgtggaggtctcctcctctttaaagtgcctggaagtggtttaggaggaggcaactttggattactacttggagtatgaacactgcatatcttaataaatccagccattagcatgatcagagcaattcccataagtaatactgcccaccaatgagccacaatccattcagcaatgttttcatagagctctggactaaaaattgcttttttaagcctagctagaggaccatcagcatctactaatctgcaccgcatgaaaacatcacagtaacctctaaaatcgttgcaaggggatccaggttgcagggtgatggttcgaccactgaagtgcctactccactgcacagaccctgtactggcacaagttgatgggtccattttcttcatacagcatacatggcataattctttatcatctttgccatcagaactggcacacgtacactcctctaagccatatttctcacagatagaacctgcacattgcccattaatgcacacttgtgtatgcctattacagtctgtgaagtttggtttagggtcagatgctgggcagagagctgtgaagccattacatattccttcccttgcacagtctgaatcatcccgacacttctcagact

SEQ ID NO: 329630 - DNA, 496 bp, Homo Sapiens
  misc_feature (444)..(444): n is a, c, g, or t
  misc_feature (478)..(478): n is a, c, g, or t
attacttatgggaattgctctgatcatgctaatggctggatttattaagatatgcagtgttcatactccaagtagtaatccaaagttgcctcctcctaaaccacttccaggcactttaaagaggaggagacctccacagcccattcagcaaccccagcgtcagtcgcccgagagagttatcaaatgggacacatgagacgctaactgcagcttttgccttggttcttcctagtgcctacaatgggaaaacttcactccaaagagaaacctattaagtcatcatctccaaacttaaaccctcacaagtaacagttgaagaaaaaatgggcaagagatcatattccttcagaccaggtgggaattacttaaattttaaaaggcctggaaatttccatttggggggtgggaggtggaaaagggaacccattttgttatggaccggtntttttaacttatggcacaaagtctttggatattnttatgtgcccctgttcct

SEQ ID NO: 329631 - DNA, 441 bp, Homo Sapiens
  misc_feature (25)..(25): n is a, c, g, or t
  misc_feature (110)..(110): n is a, c, g, or t
  misc_feature (121)..(121): n is a, c, g, or t
tcacccatgttgcccaaacccaacnggttttgaaactccctggggttcaaacgaatccgccctgccctcaagcctccccgaaaatgcctaggattacagacgtgaagccnactatgcctangcccatttctgctaattcaaaacacttcatttatgtgccagcaccctgtattagtcatcagaaggtttttcattaagtgtggaaccagagtgaagggaggggggtggttctggacagttctaggagaatcttgatggactgtgcctgccctacacagaggacacctgtccagttggttcattttgacatcagttgtgttcaggccccagaagtgttagacctgccctgttggtctcatgtcctgatggtgaccatcagagatatgattatgttccccaagactcaccccagggtattgaactcatggtgctagctctctt

SEQ ID NO: 329632 - DNA, 406 bp, Homo Sapiens
aaccaaataaaaagacccccctaaaaggaggcaaacacttgccttgccaacccccggggtaacccccactttgtccagggtataattttagtgtatatatcattgaatacactgcctattccttcctatgaccctatctgtgcctcatggtccgctcagtctagccccctctatccctgacttggtcctgccctgactgtggtcccagagagctgtggggcagaggcccagggtgtgtgtgcatgtggtggttgttgggggcatgggatggggggtgtcaaagcacctgatgatgatttcgccagcatcacaacctcaagtacgatatggtgtctcatccttttaagttttagtttttaacaggatatgttaaaaactaacatatttagtttaacaggatatgcct

SEQ ID NO: 329633 - DNA, 645 bp, Homo Sapiens
gacaacactgttttgttctcagcgaaaactccagaaagaacacagtcctgggaggttggggattggggtcaggactccaccaccaattgtcttggcaggtaggggacaggtctcactgcggcactcggacctccagcttgcactcagccagcgcctctcccagctcgttgacggcccggcatgtgtaagtcccagcgtcgaagggcgaggggcgacggatgttcagcgtcaggactccttggtaattggttatcaggaacttgggatcttcacggatttccatcttgttcttcatccagacccacttcggctgttgagagtcaagggagaggaggccaacttagagagagaccctgggcaatgatgacaaaatggggctcaggaagccgatctgggttcgtagctctgccaccctcttgccagatgttcttggacgagtcacttctccctgaccctcagtctcctcttatgtaaaagcaggttgataatcccacttcacagggtaacggtggggtcttcccattgctctcaggacaaagagctcactgtttgtagtggccacagggtcccacactctttgacccccattacttctctgctccagccaaacaggctacctcactgtccttcaaacagaccagacag

SEQ ID NO: 329634 - DNA, 189 bp, Homo Sapiens
  misc_feature (40)..(40): n is a, c, g, or t
  misc_feature (47)..(47): n is a, c, g, or t
  misc_feature (53)..(53): n is a, c, g, or t
gttgcccaggctgttttcaaacttgggcccaagcagtccngctgccncagccnccagaatagctgggattacaggcacacagtcttttaaaggtgatttgcattgttaaaattatgcccattaagggattctttttgtaaaatgcttttcttgagacattttattagactgagctcatagggagaactt

SEQ ID NO: 329635 - DNA, 434 bp, Homo Sapiens
  misc_feature (238)..(246): n is a, c, g, or t
  misc_feature (374)..(374): n is a, c, g, or t
cattcaatagatatttattgtgtacctgttatgtttcaggcactgtgtaaagaactgagtatacaatggtaaacaagaaagcaagattccctgccctcatggagcttacattctagtggggcagtcagtcccacccacccacacacatacataaagccaaaaagcaaaataagtttaaagagttgtcatcgatacaaaataacaagggtgacctgctttccatggaaaaggaacgtgnnnnnnnnngtatcaggaaccgaaagatggccagtgtggctggagcatcgtgcactgaaaggaggattggagtggaatgacactggagaggttcgcagggccctgttcatgtaaagcaataaaataaaggcatcagnattccattttaagtcttgggaagccagtgaagaggtttaagttaccgagtcatgtgatca

SEQ ID NO: 329636 - DNA, 418 bp, Homo Sapiens
  misc_feature (55)..(55): n is a, c, g, or t
  misc_feature (211)..(211): n is a, c, g, or t
cccctgtcattggtgccatctttgtttcccttgggctactttttgctgttcaacnggaaacaatgtcccatcagtagctccctggcctcacattttataacttcatcagtagagagcttcttcccttaattcccaatttgaaaatccctggggaaaaaccaagatgggcctggcttggaaacacctgcccaccccagcagccagtggacgnacctctgcgatgggcaacaactttcacagaacaggatagttgcaatgagggggagcgcccctcagaggaggtgagggtactgatcagaacaatagctgtccctgcactggggttcagccaaggccccaaaacgctttttcagcataagaattaatactacttttatatgtaatgatagtttttattcctaatcttaccctgaaacgc

SEQ ID NO: 329637 - DNA, 352 bp, Homo Sapiens
aaaataccaagtcaggtgagcaccatatgacttgtcacaatcaaaattaaaagaggctgcattgtgaatggtatagcccttcctaggagatacatactgcagtatttaaaggtgaggagtcataatctctgcaacttatttctgaaagatatagcaaaaaataaggatatgtactaagtatgtaagagaaagatagtgtagagagaaataaagcaaatgtgtcagtgttaatgggtgtatcgagatgaagggtgtgtaggagttcattattatatttttgcaacttttctgtatacctgaatttttttcaaaacatttaatttaaaaaatgggctggcacagtggcccaaac

SEQ ID NO: 329638 - DNA, 434 bp, Homo Sapiens
  misc_feature (353)..(381): n is a, c, g, or t
ccccctttattaagtcccccggaaaaaaaccagccaataggaagggaccaccaggggaccaccaccaccacaccctgattaagggaaaccttcccctaggctgccatgcccccattcctgccataagtagagaatgaatcctatgttgaccagagggaagagaaccctaacctaaaaaggggaaaggtcaaagaagggagaaaggaattactttagttgatagagaaagtgaaaaatcaaatttatcaggtgcaggttcctatgggccatcatctgagaatataatcatgtctgaaaatttgtccggaacatggcaataagcaaagattgctgttattactgctacattaacnnnnnnnnnnnnnnnnnnnnnnnnnnnnntatgtataagcatgtaacctgcattttttcgctgggttcacagtttttttgag

SEQ ID NO: 329639 - DNA, 535 bp, Homo Sapiens
  misc_feature (420)..(420): n is a, c, g, or t
gacattcccaaaagcaaaaggaagaattacgtccaccttaggtacaatgcttgtttatatataagaaacaaagcaaaacaattgtagggaaggtctactgttaggggatctttggggtgtcacttttctgaccggaaacatctgtgaccagtggcgcctttgcttgagatttggtggggcccactggcgtcattctgcctacttggccttgcaggctgtgctttgctcacgctactggccttgatcccatgtctcccaagggcgagtaaggtgggagcggtgaagggtatgtgagcaagtgtgaggtctggccactgcacacagtcagacaggctggttgctgcagtggggtgggcagctccaagtgccggcatgggtgctggttctttgcaaggctgtggcaagaccaggtgctactgnaagcagcttccacagctggcactggggaccatggtggtgcctggaagcttggagattgcagggccccaaagagggagtcacaggcctgtgggggagctccaggtctgctcgtgcc

SEQ ID NO: 329640 - DNA, 415 bp, Homo Sapiens
gactaatctctagatgtttatagtattaatactagggatttttttctacattaagaaaagaaataaccaattattcaattatttccagtggtctttttgtgttctgtgtttccaggcgggcacatgaacgccccccaccccatccacataggatgcacccaaactatggtcatgggcatcatattcatgtgcctcagactatgtcctcacatcctcgacaggctccagagaggtctgcctgggaactgggaattgaagctggagtgactgcagctacttatacacctggtgcattgcatcctcacttggcccattatcacgcacctcctcgacttcatcacttacaattaggagctcttcctttaatgggttcctggatatggcaggctatcctcacatccggttacatttcatc

SEQ ID NO: 329641 - DNA, 430 bp, Homo Sapiens
  misc_feature (209)..(209): n is a, c, g, or t
  misc_feature (215)..(215): n is a, c, g, or t
  misc_feature (366)..(366): n is a, c, g, or t
ggcacgagaaaatttatttggcaggcagtgtggaggacagattaggagcatataaacccagaggtgtgccccaggagggtttttgcaaaggtcaaaatgagatagaatgagggcctgaaataattcagtaatttggagatggagaagaggaaagacttctcgtgctcttgcactgccatcagcctggtctcgggccatggtcatctctngacccnggaagactgaccccacctcttggctcaccctctgcctcccaacctcctcttcacaaagaagccagagggatacttttaacacacaacccagatcacatgacttcgtaacttaaacctcttcactggcttcccaaagacttaaaatgaattntgatgcctttattttattgctttacatgaacagggccctgcggaacctttccagtgttcatttc

SEQ ID NO: 329642 - DNA, 822 bp, Homo Sapiens
ttttccatctattttcctttaataaacttcagcacggacacaaattcgcccaacatgtaaaagtgcaattccgaaaggatcctgctagaacaaggtccacggtacaaaagcatcctatggttatgtaactgcagcggccaccaagcgtccccctctgggctctggagggtttcggccctgcctgcctcccccctcctcctggggcagctgggacaggggacccctgtttgaagacagcggggacaacggcccgggaggcagctgaattgcccattgtgaggcccttcttccttggcactgcctgaaccccgtagcccactccggctgcccgggctcttctgccttctcctggcaccagcctccgggcccgggccagctgctaggagagcgagaacactgtttctgaaaggggtgctgcttgcttctttgttcccggtttccgaagcgcgaatcccggaacgccgtgagaaacctcaggctcgggcggcagcgcgggagtctggggcgctggaacgccggcgccggctgcggaggaggagcgccctctagcggcaggtccgcccagggagaggcggaaacgcggagtctgattcgaaggcgggcactggggaccctgccccgggccgaaagccccctggaggacagtggtgtttggcttcggtcccaacatacaggccctgggcagtcgcagggatggcagctttcaaactgaaacccaagaagtgatcatgcagaccctgcctcaagtggcatcacttcttaattgaaaagaggccgaggcgaggcgggaatgaaggccacgctgaagccctgcagaacagg

SEQ ID NO: 329643 - DNA, 383 bp, Homo Sapiens
  misc_feature (34)..(34): n is a, c, g, or t
agtgactgtcaacccacattaattgaagaaaaanggctaccaactaccaacaggcccaggatctttcccatttttgtctcctcaccttctccccagaaccagtcatgctgaaatgacccatcactgaatcctacggaactttgacaaacgatgaaactagtggaggctttcaatgtagacatcctcagcagaggagtgtagccctcgtactgctgctagaagtcacacgctgagtcacattgctgtctgcagagtgatgtgaacctgtgtatacgtgcagtttcttctttacccttcgtcccttccccaacatcctcagtgagcgaatcgcatttctacctggtgagaacacccctgtaaagagcctactttgttggtccaac

SEQ ID NO: 329644 - DNA, 639 bp, Homo Sapiens
  misc_feature (628)..(628): n is a, c, g, or t
agcaaaggtggtacatgttttattctgctagaatgtcttactgtcacgttttacaatgtatctcttaggaaacggcaagagccatccacacaatgtggatttaaaggggactctattataatttcagctttcctacgtcttcatacaaaccatcttctctgcaaacacacaggcaatatctctgtgttcatttctattgggagccctgtatgcaaggtggagagagccacatttccccctgagatgttatgtaaaagtttgaggttgagatgacatatctgacactctgttgttactctcagaagctactacatgtgaaattctaatgactgcattatcctgccaagtgaaaggggcaggcatgagcaagggacggttaagaggggtggggagccttatcatgatggggggagtcttgttctgacatctttgggaaaaactgtccacagtgtgaaggtcatcaacttgttatcctgggggttacagtttgaggtaggctgttgttatggggtgtccgaacattttgggtgagttctgagtgggctcacctgtccagggtaccaggggttttcccctggaattttacctcgagttgtccccctccagcttttagggggcttctgggacngagtggggtcc

SEQ ID NO: 329645 - DNA, 607 bp, Homo Sapiens
  misc_feature (101)..(110): n is a, c, g, or t
  misc_feature (535)..(535): n is a, c, g, or t
  misc_feature (595)..(595): n is a, c, g, or t
agatttggtgattgtctggggggattcctgggtttccctgggtaccttgttccaggcagtcagtccatttgccttcctagtacttagccccctctgacaannnnnnnnnnaatgtgccttttgggttggtagaaacggaagtagaagtaggctggaggatgagttgggacagtcttccttttgttgggaggtgagcacatttacagatattttgcttcatagtttccatgccctctgcccagctcagtttagacagtaaacgttccttgtttcttttctcccatgacactgacaagaggaattaccacctcagcctcttttgcccctcttcttgcctttcacccaggctctcagccctaattaacacactgacccaaaggtgcttgtgttgcaggtcccatctcctttgatgaggttaacaattcccactttggcattttcctaactattcgtgtggctagaattggttggttggtcacttgacaagaaaaaccatacttacctgggccaaggctctgttcctgccttcgcaaanttctcaaaagagtaaagtttatgaaaagaaagtggcagggcaaacacaactcttgactgnacctcccacaat

SEQ ID NO: 329646 - DNA, 541 bp, Homo Sapiens
  misc_feature (146)..(146): n is a, c, g, or t
ctcctaccacctttaagtgtccaaaatttagtaagcccccaccattaaaatttgtgccatgccttccacccaccttaaattcccagaacctttggcctgggaatttggaaaaccatgccatccttgttttggatgaattttcctgnattggcctggaaaccctccaaatggatgtccacatgcctgttaagagcagactttgccaaagaaaaagacagttgatcttctttgtttcaggtggtctgttccctcagtttaggttttgtttgatttggggagtatttattaactttagggatgagttgcattttctttctaatatccatttgttcacaaaaacacctagtaggtattcagttcatattggaatgaatgagaaaatgagcagcacatcaattgtaacaaatgtaccactttggtcggagatgttgataatgggggaggctatatgcatgtgtggaggcaggggatatataggaaatctgtctaccttctgttcaattttgctgtgaacctaaaagcgctctaaaaaataaagttt

SEQ ID NO: 329647 - DNA, 486 bp, Homo Sapiens
tcaaaatcataatgcctggagcgtgggtccactcttttccctgggactccattatttctctttgaagcacaggagccaatccccctggtccctatcaggagccacacagttttggttgaagagggaggggctgagagtctggtaggctcatgggtgtggttatccagcgcaggggccagagaagtgccctatgctcttctttccccaccgtgcttggctgactctaaaaattcctgggcacatcacagttactagtcagctttctggacatgtctattcaaagaagtttctggaagatcagagaatcttgaaaaggtgaaatccagtctcttgggcagaatctccaccacctttgtgagccagcacccagcctttgctctgttgattcggggcaaggccaggcacatcttactttgcaagcacagtttagccttctgagaacctgggcttggggtctctgagctatctcagttcatcacaaagggg

SEQ ID NO: 329648 - DNA, 486 bp, Homo Sapiens
  misc_feature (94)..(94): n is a, c, g, or t
aaaatctcaccccataatcctgccctaaacaccaggctagggaacactgtggccctcaggtgattttctttaacccaggtctgggagccacacnaacggccagagggagcaggaaacactatgcaaatagaggccaggacagcagggagggcctgttcatgatagaacccaggcaaaactctcctcagaaagcgagtgtggagaaacatagatcatgcctgagacctggtggattagagcactggctactggggaattgaaaggaaggggcttcaccgtgcagaggaccagaggtgccaatcttggaaatgcagaattgctgggagatggggaggcacggaccatggaagtaccctctggagactcatggtgaagagaacaaatgaatgaagtaactggcagaaattagaggtcctggtagaacaaaatagaatcccacaatgagaacatacaccatgtatgtcccccaaggaagacaatatctcc

SEQ ID NO: 329649 - DNA, 351 bp, Homo Sapiens
  misc_feature (318)..(318): n is a, c, g, or t
  misc_feature (331)..(331): n is a, c, g, or t
atttcggcacagagtgagtcggtggcaggaacgtgggctctagactgtgcattcaggctctcctacttggcagaatgatcttggggaaacgacttcatctgaacttcagatatttcacatgtgaagcggggacaaaaccatgcagctcagaggtccctgtggggctgggggagctgccctgcagtcttggcacatgcacagcaggctccccatagctttgtcaccacaaagggcactgttctattcacagcacctcctgcttctgcctggcaactgtgtctccctgtgctatatttaattccaccagcaaagtgtcgnaggcagggccagnctgaaagggagatctccttg

SEQ ID NO: 329650 - DNA, 331 bp, Homo Sapiens
  misc_feature (183)..(183): n is a, c, g, or t
  misc_feature (207)..(207): n is a, c, g, or t
  misc_feature (243)..(243): n is a, c, g, or t
  misc_feature (303)..(303): n is a, c, g, or t
ttcccacaatcttttattaagaaaaattccaaacatacagaaaagttgaaagaacaagtacactgttcactgaaataccagccactgcagattcaacaatgaacattttggccttatttgctttgtgtattttggggggaactatttggaattaaattacacatttcttgaaggcattcaccnatataatccaggcatctatctccnaagaatgaggacattttcccatgaactgcagtaccnttaaatgggctattagagggaatgggttgggtctttgtgaggggtctcacggtccggggnacctcatcaaaggtgtgctagggccctt

SEQ ID NO: 329651 - DNA, 810 bp, Homo Sapiens
catgaattgtaaattatgtgcatgttatttaggcatgttttatgttttataggcatcaaatgggtacttttcatcttatttaaaataagtaaaatgaaaagtaattgttctccagcaaaatatataaattacatttctctctgagttcctgattcaagatctctgtagaagaagaataacaaagaacacctaggaatgatacaaatgatactttcaattttggcacttgtctgccctactgccatgtcctcatgagagtatccctgaactcagttctcgttggtcatttgacgtttgctgggagcgtactatgggcgaggtcttatgctgagggtgagcctaagtggtgtctcacttcttgtagcttgggtcaggaaatggagatcagctactgtatcccagaaccttcttgccttcccagtcccaaggcaggtgctgtgggaagagtgtgtataaggtctgatggggacagacctggggtgaatctcagtggcacttctcaacagctatagatccctaagtaagttatctaatcatcatccccaccagtgttctcagatgaaaatgcggggtaataccccatctcataggagtttaaaaggattaaatagggaatgtatctatcatcttgtgcctggaattctgcaaagcatatgaaggtgcccttggaacttccttcccatttttcatatttgctctgccacctctacacccagccccgctttctgcaaccaattgtattataaccccctcccaaacacttagtgcatcctcccactcatgtaatttgtttaccttgttttctattta

SEQ ID NO: 329652 - DNA, 456 bp, Homo Sapiens
  misc_feature (388)..(388): n is a, c, g, or t
ctatgaactagttttatttgcatttaacatgattatacacattcatgtgtctaacaagatctgcactgttacattaaaaatacagtacaataacattcaacatgaggtacttcatatttatgtattttttccttcataaataatgctgtaagctactaaattcaagcacactgatgcacaagtggctacagtgtcttgaattagctgagcttatttaaacaccttaataaacaaaaaagttcagtgcaataattatgtagaaattagaccatttacttaaatactattttaagatatgcttaaagaatgtcacattagaactgctagcctaagttcccctttatccccagaatgaacaacgacaaagactggccagccagatacgttnggggaaaagcatctacagtgtattctgcttaataaagttgtgtttatagaataaagttgcctgctttg

SEQ ID NO: 329653 - DNA, 671 bp, Homo Sapiens
ggtatggatggtaatggggggccctttttttaaggattttggtgccggtaaataccctaacctggatttattttttaaatccatttaaaatattaatccaaccttcccctaaaataaatagccccctagggtaaaaatataagaacctgatatatttcattcctcttatatagtattcattttcccaccctatattacacaaaaaagtatagaaaagatttaagtaattttgccatcctaggcttaaatgcaatattcctggtattatttacaatgcagaattttttgagtaattctagctttcaaaaattagtgaagttcttttactgtaattggtgacaatgtcacataatgaatgctattgaaaaggttaacagatacagctcggagttgtgagcactctactgcaagacttaaatagttcagtataaattgtcgtttttttcttgtgctgactaactataagcatgatcttgttaatgcatttttgatgggaagaaaaggtacatgtttacaaagaggttttatgaaaagaataaaaattgacttcttgcttgtacatataggagcaatactattatattatgtagtccgttaacactacttaaaagtttagggttttctcttggttgtagagtggcccagaattgcattctgaatgaataaaggtt

SEQ ID NO: 329654 - DNA, 529 bp, Homo Sapiens
  misc_feature (113)..(167): n is a, c, g, or t
  misc_feature (484)..(484): n is a, c, g, or t
aaattttcttgattttaaaaaatgtatttgtgttttgcaggttggaacgcaaacccagtctggccacgtcccgtgaagttgtggacaaaatgtttcagtttctgttcacctcnnnnnnnnnnnnnnnnnnnnnnnnnnnnnnnnnnnnnnnnnnnnnnnnnnnnnnnggggtgggggatggggtaggtatgtgcttttggctcatgtttgtgatgataactgaagtcttttgtgggtccgacctgttgtagggtgtgggggaaagtgaaggaagagaatgaaggtgagtccccgccgttgcaaaccttcaccaaaccacgcggcccagttttcgtgagtacccctgtgtcccagagaggaggacccagcgtcctcggctctgcgcagcccttcttggtctggtgggtactcgaggcagttgagaaccttgctgagctgagcgggcacctcgccttgcctgctggttcgacacctgaccccctcncctgggattatgtacacgcatcattgggcttcatggatgtggaaa

SEQ ID NO: 329655 - DNA, 418 bp, Homo Sapiens
caagttctagtttgaaaaaaatacataactaatttaattttacacaaaaatatttatgcagattttcagaatttcatatcaggaaatgacctttttatgtctgttaaatatcaaaacaatttgctacagtgttaatctgcatggtctttaagcctgctgtagttgagttgcagacagtgcatgaaaaagtattccgctgggaattgagccatgccaccaaagccaagaggagcgcatggaaacccggtagtctagaactaatcagattactgattttagggcacagcaccagatgaattgttgtatatgcttgtaaaaattgattctgtgtgttcctctgaacaaagcggagaaaatgatgataccatcaatattgaaattaaacttccaacttctctaatacacaattaaaacacgc

SEQ ID NO: 329656 - DNA, 465 bp, Homo Sapiens
  misc_feature (354)..(354): n is a, c, g, or t
  misc_feature (430)..(430): n is a, c, g, or t
  misc_feature (442)..(442): n is a, c, g, or t
ttggagtgtggagacttaactctgtcatggaactccctgattatggtattttctgaagttcacaatgttatgtattctaaagggaaaaaattaaccagccatggctttccaggtacaatctttgaggaaggaagtgagactgtttaccgtgttttctatcagaaaaggaatgttttcagctcatctgcacttggatcaatatttttatctttgggtatcatttggcattgctgtcactggagctgcaaaaaacatggggaggagccagggataacccaaaattctcatcctgcactttgcaaaagagaggacaagctggggtgtcgctctgtcatgtgtgggtccccacctccnggggagcttggggccagggaggggaactggggaatgcctatgccccattcagcaatagggcgtcccggggggcacngggtcagaaagncatagagggagggggagggagaa

SEQ ID NO: 329657 - DNA, 461 bp, Homo Sapiens
  misc_feature (390)..(390): n is a, c, g, or t
  misc_feature (439)..(439): n is a, c, g, or t
ttacaatttaaaattattttgtctcagaattttttctttaacttttattttaagttcaggggtacaaatgcaggttacacaggtaacttgtgtcactggggtttgttgtacagattatttaatcatccaggtattaagtctagaatccatcagttatttttcctgatctccctcctctcaccctccaccaggccccagtgtgtgctgttcccctctatatgtccacatgctctcatcatttagctcccacttataagtgagaacatgaggggtttggttttctgttcctgtattagtttgctaagaataatggcctccagctggcatccatgtccatgcaaagggacgcgatctcatgctttttgtgggctgcataggtattccatgggngtggaatttttttcacatataggcttggctcaagggcttaaataaaggnttatatggggaaggatacattt

SEQ ID NO: 329658 - DNA, 424 bp, Homo Sapiens
  misc_feature (130)..(156): n is a, c, g, or t
ttttatagttcataagaataatcacttacctggttcttttgtgcatttcacattttactagataggaccacattgaacctgtgtggtggtgaaaaactaccacttattaacatctaccccctcaccctcnnnnnnnnnnnnnnnnnnnnnnnnnnngggttgcaaagtagacacttaaatagcaagggaaaagaaagcattgaggtggggagagtttctcaaatcgagcctaatatttattgccgtttatatctttttctctactggtaatgtgtgccatatggaaacttccaattaagtctaaagtaattttccccttctttcagccgcctttttataggccgaaacacagctggaaatgtacggacaacattttggaacaagcctctccagctggaaaccaatttttacaatttccggcagg

SEQ ID NO: 329659 - DNA, 476 bp, Homo Sapiens
  misc_feature (131)..(131): n is a, c, g, or t
atgtttcaacaacctacgcaaaagccccgcccacacacataaccatttatgtcaaacataacttaaacgactaaactgaaagaacagcccacttgtagggaaaactcactaatttagaagaagcagtatgncaatgtttctgaataaaattttgtcaacaacagcagaactgtttacccaggaaactgtgataaatgtacgaggtacctagggaggtagatttttttgcactacctgtggaacttagatttttacctgcacacctgtacaggcaaatcacagtgaagcctcttcacaggtgctgagtaaattgaacaagaacagctcctccaacgctacctccttaggaggatacacacctattcagtgacctcacaattttgcacaatcacttgtgaaagtctctttttaaaaatgcttctagaggccacagcacattctttgacagaacctcaagagtagcaaattttttgggg

SEQ ID NO: 329660 - DNA, 423 bp, Homo Sapiens
  misc_feature (298)..(298): n is a, c, g, or t
  misc_feature (324)..(324): n is a, c, g, or t
  misc_feature (339)..(339): n is a, c, g, or t
  misc_feature (345)..(345): n is a, c, g, or t
  misc_feature (350)..(350): n is a, c, g, or t
  misc_feature (359)..(359): n is a, c, g, or t
  misc_feature (381)..(381): n is a, c, g, or t
  misc_feature (400)..(400): n is a, c, g, or t
  misc_feature (413)..(413): n is a, c, g, or t
ataattatttcttttattattttggatcagttacaacatgataaaatgatatatacttaatatttgtcacatcatgtttattaaaccaatcaggcagtatgaaaagaaatagcctagtatttaaaaactatatatcaggataaaatgtatttctttgtcactaggaaaaatatgttttaaataggattatgtctacttgggaaaataattataaaagggcagccacaggaaatatattttgtcatgtacagtaggatatttaaataaatataaaaataaaattttaatggggttaggnataggcttctacacactaatgggggngttggttattttacntagggnggggnaaatggaantgggtattttgtttagggggtnttttaaaggtaccttcccngggcccccccttnaaacccccac

SEQ ID NO: 329661 - DNA, 455 bp, Homo Sapiens
  misc_feature (37)..(37): n is a, c, g, or t
acagcccaaaagaaaatccgcgggcccctgtacttanttcccgcgcctgacccagtgaaagcgcccctttccattgtaaaaacattgtgcctttaccctacctacccctagcccttgtctttacccgagggatgcctagtgagtcccaagtggtggcaaatatagactgcaaacaagtgcttgttgccccacacggcccagattcacttgaagcagaagttagcatccctgggcccagtttgttctctcagaacccagaatctttgagggtaaggttatctgtctgatactgagcagaaacagaatgatcctggagctttgctttctattgaaggcttttgacggtaataggtggtaacttggtaaaaggctgcctttactgtagctcacccagcatctcttttaccaaccagagagtgtgaaactagtttcatatattacctagttattctttc

SEQ ID NO: 329662 - DNA, 591 bp, Homo Sapiens
gttttgaaagaataactaggtaatatatgaaactagtttcacactctctggttggtaaaagagatgctgggtgagctacagtaaaggcagccttttaccaagttaccacctattaccgtcaaaagccttcaatagaaagcaaagtccaggatcattctgtttctgctcagtatcagacagataaccttaccctcaaagattctgggttctgagagaacaaactggcccaggatgctaacttctgcttcaagtgaatctgggccgtgtggggcaacaagcacttgtttgcagtctatattttccaccacttggactcactagcatccctcggtaaagacaaggctagggtagtaggtaaagcacaatgttttacaatgaaagggcgcttcactggtcagcgcaggaaataagtacaggggcctgcggcatttcttttggctgtccatcatgggtgagcggagttgacctctgacctctgtgcacattttccatggctgccacttcagccagcgcagcgaggctaaagaacgcagacacggcaggcatttctggagtaactgtccgcgtctccccgacctcggtgttgtgtga

SEQ ID NO: 329663 - DNA, 694 bp, Homo Sapiens
  misc_feature (520)..(520): n is a, c, g, or t
  misc_feature (531)..(531): n is a, c, g, or t
  misc_feature (565)..(565): n is a, c, g, or t
ggagggtgacaacacatctcttaggcagagcagtgacaggctgtgcccaaaagtccaaacaggccaggcagagaagggcagggacagggctcaggctgagaagaacagctggcgtccaggcagggtggccagaacgggtgggcacaaaggatgggcccgcagcctaagtcatttggtgcggcgcctccagcatctccataaggaaggtgtcaatgggtgtgtccccgatgagcttgaagaagaagagatgttccaggcatttgagcccgatggagcgcagagccggcaggcggagcaagagcttagcgaaccttcccggctgctctgggtacttgtgcttgcagtaggcctccaaggacgcatagaccttctccctcagcgcctccacctcggccgggttcgagagccccttggagtcagggttaaagaggacgatggcgcgcaggcagcccagctccgtcttgtccatctgcatgtcccgcatcttggacacaagctccgtcagcaccctgtcaaagantaggccacccnctcgctgtgggcgctgttccggtggacgtgcagnccggtggccaggaggatcccgtccttcacggcgatggagcggtgggagaaggaggcgatgagcagctcattccaagcctgcccgcagcaggatgacctggtcgtccaggggcagctctgagaagtgtgg

SEQ ID NO: 329664 - DNA, 433 bp, Homo Sapiens
  misc_feature (12)..(12): n is a, c, g, or t
  misc_feature (23)..(23): n is a, c, g, or t
  misc_feature (37)..(37): n is a, c, g, or t
  misc_feature (56)..(56): n is a, c, g, or t
  misc_feature (80)..(80): n is a, c, g, or t
ccctaacggganctctctgccanggaaccccacgcantccctcaagaactaagcanaactcccgcctccggtccgcgaantggcgactgccggtattaagtcgacctcgcgatttcctcaaatagtgcaggaagaagacattaaatagcgaatgctagagactgcattcacaacattggagggtggaagtgacttaggctaaccagttatttttggaacacacgatgtgaaaacatttaaaagctgctggaccctctccccccccatcaacaacaacaaaaaaacccattttaaaacttgagagatgtgatgggtcacatataacttcagttcagattataaatttaattcgatttttcttgttctgttcaatgactagagagactcaaacgatgtcaccagatgacagcaactcatgcgtgttaaactcttc

SEQ ID NO: 329665 - DNA, 466 bp, Homo Sapiens
  misc_feature (20)..(20): n is a, c, g, or t
cctatgggatgtggttttancagacaattttttcttttaatttcacaattacttttaaatatctgtaaaataaaggaattattttaaattcattttcccagtccccaaaagttaaatacaggcccacttacttctttaacccaaatgatatagtttggctctgtgtccccacccaaatctcatgtcaaattgtaatccccgcatgtcagcggagggacctggtgggaggtgattggatcatggggagggatttcccccttgctgttctgttgatagtgaacgagttctcacgaaatctgatggtttaaaagtgcagcacttctccctttgctctctctctcctgctgtgccatggtaagacgtgccttgcttccccttgtgttccgccatgattgtacctttcctgaggcctctccagccatgtggaactgtgagccaattaaacttcttttctttagaatttaaa

SEQ ID NO: 329666 - DNA, 452 bp, Homo Sapiens
  misc_feature (25)..(25): n is a, c, g, or t
  misc_feature (89)..(89): n is a, c, g, or t
aacagtggaataatgggtggaaaanaaaaacatccaattggaaaaggatgggggttaaaatagaacctgacttctggtactggtaactnctcttgtcaatccaagcaccctaattatgcccccggttacccctgttacccaaacggccccagtgaactgtagtgagttttagatgaaaggcagtatagccggccccaagaaacattacaagacagaaactttgtctttgaaaagtcaaaatttgctaaaatatccagatcgatactaaattgaacattaggtactaaagtatacttttttaaatgaaaggtatttccaggcagttaatgacacattaaggtccccaaggcaaaactaagcattaacaaggctacttcttaaagaaaacaccaaagtctagcagtgaaatgagagctgatttttgttcatatagtttcattttgcctcgtgcc

SEQ ID NO: 329667 - DNA, 373 bp, Homo Sapiens
agttcttcacagtttgctatagacaatctgaaaattgggttctgaactactaatcagattagccaatgcaaagaaggaattataaatatactgcttagataagataaaaacatatcagctactcagaaatgtaataattcattagagaagttggaaaaatgtaccttgaaggactgaaaagggagacaatatgaaataagcaaccgagttctaaacccacaaatgaaatgcaataggaaattctacacagctgtttctcctgcaagcatggacccatagcagatcctggagcacaatttagagtggccacatgccaacaagaagcttgctggggcattgcgacagggctctgcgcacatacaaacctccgttc

SEQ ID NO: 329668 - DNA, 566 bp, Homo Sapiens
gtgattgagataataaacttttatttattgaagagtaaaatagtacattaacaaaatcttatctgatagagagataataccagaagtcttcttactgtgattatcagctaagtgactggttgaaatcaggatataaatcactggatagtttttttctggaaagacttagaacacatcaataaggccctctaataaagaaattgaaatgagatcttgccctttggagaaagagaactgtgtaattcctgtagccagggcacttagtcaaagagaaacagagggttgtgacaatggtccagtgagcctggccccagaactcccttcaactagtctcttgcttgactttgggggagaagactgggcattatttagaggctggagactaattcgacaatgggaagatgccaaaattcatatcctgggttcaccctttgatgttggggccattaaatccagtttgtctttgcctctcttgtctaaaagatgctcagatattagtttcaccactttgagagacatggctgctgccgtcagtgagtgaaagatggtcttgctgctgagatggg

SEQ ID NO: 329669 - DNA, 376 bp, Homo Sapiens
  misc_feature (44)..(44): n is a, c, g, or t
taatttttaaaactgagtactacacacacgtggcacatgatttnggtccccctacaaacacccttcaaagggagaccagttaacaagctctcaactccagcttctagtaagtgtttaaggcacttacttttaaatatgaattcacagccaagagtcacagaatgcttgaggaaggcctctaaatgtgaatgacaacagaataacaaaaaatgcagggagctaaaaacacattaaaaacttaaatagcttcagaggtgaaaaaatactgcatacttaaaagaatgattgctataaaaatgaacatccatatagaagataacttggaaataaaattataacaaataaaaattcactggataataaagaaatttcctag

SEQ ID NO: 329670 - DNA, 276 bp, Homo Sapiens
  misc_feature (11)..(11): n is a, c, g, or t
  misc_feature (33)..(33): n is a, c, g, or t
  misc_feature (84)..(84): n is a, c, g, or t
  misc_feature (192)..(192): n is a, c, g, or t
aacaaaaacantctgtaatgaaatattgtatgntcagattttataaaagacatttttaaaagccccatttacagccgtatattntcctatgatgtaatttatgaaaaagatgtctgtactaacaggtgctgtaacactactgttgttggattttattgtttggtgataaatgtatacaatatttctaagggnaactatgtactgtgatgtaaaagtctgggccaaatgtatataatcctgtatataattatgtatttgattataattactgattgt

SEQ ID NO: 329671 - DNA, 417 bp, Homo Sapiens
  misc_feature (400)..(400): n is a, c, g, or t
tatgtgtgggtctgcagcttggatttcttgataatgttaaataaaactccatctactcttccacaaacacttcaagaaacctaagacttttggccagagtaacaccgaggtttgagagaaaggatatgtgtgtgagaggtgtggtttcattagaacatattatttgacttcatgttgaatcaacacttttgtgcaaaatgcagttttaccagcctctttccttgttttggtcacataatttaacttaacattctcggtacttgattttctaacataaaatggggattgagaggggaattttgaagttcccatgggtctgtcctctacattctggacaggctcattattctctgcgggtattgttctcacatttaaagtagagggttaggcgggaggcagnagggcctctacaggccc

SEQ ID NO: 329672 - DNA, 194 bp, Homo Sapiens
  misc_feature (45)..(58): n is a, c, g, or t
actccagtttattaagacaggtgtgacaagtaaaataaaattcannnnnnnnnnnnnngcctctgctaggccactatatttctgtacaaacaagataatgcaagatttgacagttaaggctttgaagcacagcacacaaaatgaaacaatttaaaaccccttcataaaaatgggaaaaattcccaggccaaagg

SEQ ID NO: 329673 - DNA, 359 bp, Homo Sapiens
  misc_feature (19)..(19): n is a, c, g, or t
  misc_feature (24)..(24): n is a, c, g, or t
  misc_feature (116)..(116): n is a, c, g, or t
ccgcacccggccccctttnttttntcccagattttaagttgcccagctggatcatggggtatacttctaaaaatcattaccctagcacctccatagatttatatgctctgtaattncctaaggttgatctatctcttctttcctcattcccatagggtaagcaataaatggaggcagtgataatttggacttgaggaaaggatgtgactgttgctgcttggtacaaattctaacacaggcaggtgcttaataagtgagagtaagtggcaggctgtgttttcttcatagaattctctgactttttccccccccgagatagagcctccagcctgggcaacagagcgagactccatctcaaa

SEQ ID NO: 329674 - DNA, 458 bp, Homo Sapiens
  misc_feature (111)..(111): n is a, c, g, or t
  misc_feature (178)..(178): n is a, c, g, or t
  misc_feature (392)..(392): n is a, c, g, or t
  misc_feature (435)..(435): n is a, c, g, or t
tttcacaggtttgtcttttaatcagcatccatgaaaattcattaaaaggtctgatacgaaaagcaccaggctaacaaatcagtcctgaattcaattttacaaaaacacccntgtcctcttccatctcatccctaatatttctacgttatctcgaaggtgcagcgaaatataaaagggntccttgacataaaaacgtattaaaaagccaccatgagtaggaatgtacgggtaacagcgtctgactcagccggcaggacagggaaacctacaggaaccaccatgccggggctttgtgtgagcaggcgggcactccacatcggcacgtgtgagcaggcgagcactccacatggggcacgtgagtcaggccgggcactccacatggggcacgtgtntgagcaggcggcactccacatccgggcacatgtcgagcaggtngggcactccacatggggcacatg

SEQ ID NO: 329675 - DNA, 473 bp, Homo Sapiens
tttagcattttagagagtttatttgagcaagggtgattcatgaacaggcagggcaaactgcaagcaactgggtctctactacagaggtacaagggggaaaattttataaggttcccacagaagcaagacaaagaaaatacttggttaaagttgaaaggacctagttagaggttagatggtggtttctaattggttaagcttgtttggctgtttacactgagtcgggtgttagtttgcttggtgctggaacctaaatggtggaactgttaccagcagcaaatccaatgggtctgcagcagactccatccttgccccccggaggaggaggaggggaatttggccggggaggcgtaaggtagcatgatagtccaaggcaagttttatagcaggagtaaaagttttagagcaagaacaaaaggaagcaaagtgcacttgaagagagccaagcgggtgacttgagagatccaattgcc

SEQ ID NO: 329676 - DNA, 452 bp, Homo Sapiens
  misc_feature (440)..(440): n is a, c, g, or t
ttttgcctttatttttttatttcccatccagaaaccccagtgtgatggtggaagcagcatgaaaacaacatctccccaggcctcgcagtagaggcgaagggaacagagctgcccatgtgcctgtctctaaagacgccaccctcaggttgatgtcacctgtgggagaccgggtccacctacagacaccagggtgatggtccaccaggccccaagctccagcctgctgagtccccaagacacaggctcattaaatagcttcgtacaaaaacccaagggtgtccctccagctggtaaaaattggggcaatttctacttgaggtctgctgtgggggtggacctcaccttgggagatgtctttccagaataaaactaagccctacttcagggaaaaatgggtgatgaaaggcagctcacagacattgcacgactaattaatcttntttgaaaagggg

SEQ ID NO: 329677 - DNA, 411 bp, Homo Sapiens
tcattcaatgcattgtttattgagtactaactagctttgggcccaggctctgggttagcagcatgcgtgaaacaatcagaaacaatcatgagcgcctgcccacatggggcatacagtctggcagggcaagactgtagacacagaaataaatatccgattataagctgtgattagaggcatgatggaaaagagcaaggcttcctgagagaaacagggcgagcacaggaaaacctctctgagacagtgacatgaacttgaaacttgaagggtaaacaggagtgggcaagacaaaaggggaaagaaggaatgttccaggcagagagaaagagaaaagacccaggcacggtatagagccgaggacatttgaggaagaaagggccgccgggtttggggccctctgggtgactggga

SEQ ID NO: 329678 - DNA, 245 bp, Homo Sapiens
  misc_feature (212)..(212): n is a, c, g, or t
tgcttgtactgctctaatcttgtaccttttaaaatctttcggctgggttagttgtcctagtttcaacagtgctatgtatgaaatatatacatatgggtcatgaaatacatttttttcctgcagaaggtcaaattttctactactctactgggggatgactgtggggaattgtgggcctctctggctaatcatcatttttatactatctaagnttatgcctaaggaaagtcccatttacgtcatcc

SEQ ID NO: 329679 - DNA, 398 bp, Homo Sapiens
  misc_feature (365)..(365): n is a, c, g, or t
ttgtgaagtgcttttactttctctctggctcacagtatcgcaaggagctaagtaaggcctgtatggaatctccactgtatccatgggatgggaggtgctgaacacacgcccaaggcaacaaggccactcagggaaggagccaggccatgccactgcgtgccttccatcctaccaagctgcttctgctattctttgctttacacttcagctcatttactcaaggaaatgaaatgaagtggcaaacaggacagaaatgaaaatagaattctttaagtggtaaatttgggacaataaaggcatcaattaaaatatggttcaggaataggggagaggtgctccttcgtgcctcacagaagcacggacanttctgtgctatttattgtctttgaaagagggtt

SEQ ID NO: 329680 - DNA, 404 bp, Homo Sapiens
cccctactgggaagagcccatgaactgaaagtcaagtaccctggttcctatcccctggctttccccacaaactgagctatatgacctctgtatattcttcagaacttaagttgtcttatttggcaagtacaggcatcgcactagtctagatgatttcccatggcacccttcaagccctaaaattggcttgcccaaatagtactgaaaagttctgatcacctcccaagacaggttagaaaatcgtctatagtggggaaaatgttctggtttcaaaataattgaggttaaaactttagccattttaattcccacttaggcagattctcttctgactgaatttaataacttcatagaattggacattatcaacaaaaatattacttccaccgggtgtgatggctcag

SEQ ID NO: 329681 - DNA, 375 bp, Homo Sapiens
  misc_feature (133)..(133): n is a, c, g, or t
aaagagtgggttgatagtggtagacaaatgtttggtgtctggtcagtgccaatctgggctgtgggacttggtcagtggagaccttgggaccgagtcagcagagacgcttgtcagtggggccctggtcaggcanggctggtccgtggaacttaatcagtgggggcctggtcagagaggacttgatcattggtggcttttgtagcactggtctacggggtgacctggtcagcggggatctgagcagtgtgtgcctgttcagtggggcgtagtcattagggtccccagtcaggggcatcttgtcaccctcagtccctgggttagcaaagggccctgggtcacttgcctgcctattccctgcaggcctgggtcagtggg

SEQ ID NO: 329682 - DNA, 437 bp, Homo Sapiens
aattctcataatatacaaagtgtagtttttctgaacagtaactcaagcagcaagctaataacatcaatcatatgtgatcatgactttgcactggagataactgtccttgaactaagaacaatgaaaaacccctgaagcaaatttctcttttaaactaaaaagatgctaatttatgtaacccccacaataagctgacattaactgcttaaatgaatgagattttacttcaatttttaaacagcactcaaagcaattacctttctcactgctttcaatttactacattttttaacgcgtataacgtatagagtcccgcgtcatttaagttaaaatgcaggaattttggatgcagctgctggggatgagtatgcaaagaggagattcaatgaagagcccgatgtgggagctgaggcctcgggctccacgcacgccacagg

SEQ ID NO: 329683 - DNA, 418 bp, Homo Sapiens
  misc_feature (364)..(364): n is a, c, g, or t
  misc_feature (405)..(405): n is a, c, g, or t
tgtttgtttgtttgtttttcctcttcatcttgctatagagttcctctactagtaaatattgcaatagccaggcctcatgaactggggggctgtcccatttgcaggggtctcacgtcacttcagtagggggcaaatcggctgtagccacctcggtataaactcgccacagcgccaactccatagctagcggcaggggcaagggcatggtaggggtcggctgtgtacaccctgccataaccgtcactgtaagcggctgcagcggctgcagcagcggttggctcgggtttgcagtagcaggctgtgcatatctgtaggctgcatatccacccctgggataggcggggatggctgttgggaggtaccntttcggactgcaccatatactgtccgccctctgcccctcanatgggctcctctg

SEQ ID NO: 329684 - DNA, 443 bp, Homo Sapiens
  misc_feature (347)..(347): n is a, c, g, or t
  misc_feature (395)..(395): n is a, c, g, or t
  misc_feature (407)..(407): n is a, c, g, or t
  misc_feature (416)..(416): n is a, c, g, or t
taaaattgtaaatgactgcaatagatggtatgaaaaggacaatctttaccatttaaattttaattaccatttgcacttgagaaaagaagcaacccttcagtgttgtgttctgatgtttttctcaagcactgttttactacacatgagctttacatttaaaaagaacaacttcaatttatagtttcagaataaacctaatgcaatcgttgtatgttaagaatttaggaaatgcctccaagttagtcaaaactcaggcttttcttgcaaccgcaaggcaaagaccaaaaaccctaaaattaaggggacagatctgctcagtctgttggaaattcaaaaagggctggggnaggaaattaaggcaggaaaccgacggtcttcggctgtttaaggacccntgtggctggccnggcttcggnaacatctccagtggaacggttaggggg

SEQ ID NO: 329685 - DNA, 284 bp, Homo Sapiens
  misc_feature (201)..(216): n is a, c, g, or t
ttttgataccacagagaatagttgggatgaaaggcatccagcccctgcttcctttaagatggcctctaggcagtgggtgttctgtaagcctggcaaaaattctggagccaatctctggcaaggctgagtgccaggcggggcctagggacccagggtcggtgcttaatgcctcccgcccattggaaattactgacctccaannnnnnnnnnnnnnnngttttttaatttaaaggggaagtacactgcacaccttcctccactgggagaaagagggcccaatcccc

SEQ ID NO: 329686 - DNA, 595 bp, Homo Sapiens
  misc_feature (343)..(357): n is a, c, g, or t
  misc_feature (543)..(543): n is a, c, g, or t
  misc_feature (556)..(556): n is a, c, g, or t
  misc_feature (564)..(564): n is a, c, g, or t
tcagcgtggaggctttagaccaagttaagcagggtttttaaaacatggtgttaatgtacataatgcagccattctcaaaagtatgacatggggagacccctgggaggttttctgagacccttttaaggagtctgccgagtcaaaactatttttgtgatactagtaaaacatttgcttttttcattctgtctctcacaagtgtagagtggaattttccagaggttacatgatgtgtgatatcacaacagattgaatgtagaagcttgtatgaaaatttcatacaaatatattatttgtgttataatgtgcttattgttattttgaaatcaattgttaaatactnnnnnnnnnnnnnnnacagtttctcagtttttatttgtattttgggtagatattccgttgatacaacccacatttgggggaaatgagtaatctttaaaagtggtaaaagggacccaaaagtgtgagaatgtttgatgtagagaactccaagctcattcccggaccttgggctaaagatgccttcctcagggatgggcctcnggggccgtgtccngcaggatncccagtaggaagccagccccttgatcctatg

SEQ ID NO: 329687 - DNA, 960 bp, Homo Sapiens
cagagttactaataggattttattatttaagtgtaaaatcagtttccccccctttcccatttctctgatttctaaggaaaaacggcaccaggggacccaggagggtggtcccattggggtgaaccctaactccacagccctgcttgcagactcttcctccccaccctgggcgtccctcctctcccatgccctagggcctcagtcactcttctccgtgggctgaggctggtgcactggacaaaggctgtccctccacaggtggtaggtgagggctgaagtcacggtgagccaggctaggtagggcagcagtaacagggcagccagtttgttgatgggatgccagatcagtgctgtgctcaccaccagcccatacagcagcagcaggtgcagcagggccagaccagggttgtggactgtgaaaaagagaaccaggacagtccagctgatggtgagctgaacagtatagaggctaagaggcagggccaggggccaccccaagccctctcccaggtccttccacaccaggtaggaggcatagcccacgacagagtagatggctgtctgtaacaagcaaataagactttgtaagaatgggcacccaggacagcatcctcgggccctcacaccaaccagacatgtgatcacgagtgaacagccagaccaggatgggccccaggtggggcaggagcacaaagatagccccttgaagccgcattcaccttgaagaggcaaaatcttgcccatctcctggcttccatggacttcttttctccacagcactcctctggcacttggaggacactgcccagcactggtaactgcttctaagtgaataggccttcctccaagtgcttctgagtcctggagatcaggtcccgggtgatgagcttttctgcagtgggcagcgcttagccaggtatgtagctggccctcaccgagaactgttctacctaagctgat

SEQ ID NO: 329688 - DNA, 405 bp, Homo Sapiens
  misc_feature (331)..(331): n is a, c, g, or t
aaaggatcacagccaagcacaattcctgcagccccactgacaaccaactctggcctgatgcctccctctgttgcagttgttggccctttacacatacctcagaacataaaattttcttctgctcctgtaccgcctaatgccctctccagtagtcctgctccaaacatccagacaggtcgacctttggtccttagctcacgagccacccctgttcagcttccttcccctccttgtacgtcttctccagttgtcccttctcatccccctgtgcagcaagtgaaagaattgaatccagatgaggctagccctcaggtgaacacctcagcagatncaggaacactcttccctttttcacagttcaaccacaatgggttttcttccccttttggaccaatagtccggggt

SEQ ID NO: 329689 - DNA, 438 bp, Homo Sapiens
  misc_feature (21)..(21): n is a, c, g, or t
  misc_feature (38)..(38): n is a, c, g, or t
caactcccaaaatcggacacntgttgaaccagtccaancactcccacatgggcacgtgaagcaggcgggcaactcccacatgggcacgtgtgtgaagcaggcggcactccacatcggcacatgtgagcaggtgggcactccacatgggcacatgagcaggtgggcactccacatggacatgtgtgaagcaggcgggcactccgcatcgacatgtgtgagcaggcgggcactccacatgggcacatgagcaggcgggcactccacatgggcacgtgtgagcaggcgggcactccacattggcacaaagcgagggctcatgcataagaggtgcagggacacctggacagctatttgaaatttaaaaactgggtttcctggctcacattttgtatcaaaaactagaagtagatcaatgatttcaatatgactgtgccgaat

SEQ ID NO: 329690 - DNA, 438 bp, Homo Sapiens
  misc_feature (313)..(313): n is a, c, g, or t
gtctttgcttttggtagcaaaataatactgatttcataaatgaattaggaagtattcccttattttctggcagagactacacagaaatagtgtaaattcttctttaagcctttgctagaattctccaatgaaatcattcgggcctattttcattttaaaattataaagttctattaagttgtagcactattcaaattatctatgccatactgagtgacttgcagtatgttgtactttctggaaaacttagtttattttcatcaaagttgtccaaatttatttctgtaggatttttaaaaatagtatccttttncatgtccacagggctccagagtgggtgggagcctccccaaatctggataatcctggaatcccggaaatggctccccaaaatctggaaactttttaggggggtaccccaccagggacacttcaagg

SEQ ID NO: 329691 - DNA, 601 bp, Homo Sapiens
  misc_feature (531)..(531): n is a, c, g, or t
  misc_feature (559)..(559): n is a, c, g, or t
  misc_feature (581)..(581): n is a, c, g, or t
gaacaaatcgactctttagcagccgtagtccttcaaaatcgtcgaggactagacatgttaacggcagcacagggaggaatttgtttggccttagatgaaaaatgttgcttttgggtaaatcaatcaggaaacgtacaagacaacatcagacaactcctaaatcaagcctccagtttacgggaacgagccactcagggttggttaaattgggaaggaacttggaaatggttctcttgggttcttccccttacaggcccacttgttagtctcctacttttgctcctttttggtccatgtctcctaaatctaataacccaatttgtctcctctcgccttcaggccataaagctccagacgaatctcagtgcaggacgccatcctcgcaatattcaagagtcacccttctaaggaggacccctaggactgctcgctagtgggaacacgacagagggcgaaatcctgccccgttttcccgtgggaccggggtgggatatggttttttggccaatccacagaggccattcctggccntgtacagctaggcaagagggccaagganccacaggaacaaccattacagncccttttgttcaggcaggga

SEQ ID NO: 329692 - DNA, 414 bp, Homo Sapiens
  misc_feature (213)..(213): n is a, c, g, or t
  misc_feature (218)..(218): n is a, c, g, or t
aatttttcagaactcatccagtccttgtaatcttaaacagatgcaaatcctacccctgcccttaatgtaactagggaccaatatgtgccacgtgcctgtggtgcagactcccagagaaccagcactgggtttacagaatgaggccctggatccccaccacagccccagctgcctcagagcaggcacagcacaaggcaggcccagccccatggncgttncacaaaggcttgatcactgcctgggcatgggcacaaccattcccccatgttcgctacagaacatggggcccagagcaccttgaaaggagacccttggattgttgattgggcagggcaggttgaggggggcacagcaccccttccccgggctttttgccaggttcaggcacaggaaggacaccgattttgcttttgg

SEQ ID NO: 329693 - DNA, 438 bp, Homo Sapiens
tggaaactgaggcatctaatatgaaggtatcaagactgtgacttttaattgtagtttatccatttttattcagtattccctcttgtaaacttgaggtaagacactttacttaaaagtgtattttaaattaagcaataatatgtaaactctttcttgcaaaagttagcatttatatttttaaataagatatattgaattcattcagtgaatcatataaagaaaataagtgtaaaactccaatggctagttagttcttagttctttttaagattaaagagaagagaccaaatataggcatcactgtactgagggcaaggttttctgtgtaggttcataggaaactaggcctccatggattttaggaatatggccttggaatatttaggtgtaggccttcctccccaactcccttcaggttcttggccaccccttaggtgc

SEQ ID NO: 329694 - DNA, 439 bp, Homo Sapiens
aaaagaactggaaccaatggtggccttttggtaaacaactggtcctacggggtgaccctggtccagcggggaatctgaagcagtgtgtgccctgtttcagtggggcgtagtccattaagggtccccagtccaggggccatcttgtcacctcaagtccctggttaagcaggggccctggtcactggctgcctattccctgcaggccctggtcagtggggccttcgtctgtgggaccagacgatgaggtcatgatcggcggaacctgatcagtgaggccttgtcagtaaggacctcgtcagtgaggccttgccagtgaggccttgtcagtaaggtcctcgtcagtggagtcctggtcattgtgggcctggcagcgggaatctagttagtgaggcctggtgatggggctctaatcagtgagggtgtggtcagggaggaagtg

SEQ ID NO: 329695 - DNA, 688 bp, Homo Sapiens
  misc_feature (35)..(35): n is a, c, g, or t
  misc_feature (45)..(45): n is a, c, g, or t
  misc_feature (69)..(69): n is a, c, g, or t
caacccttcctgtgccctttttaatactttccccnccctaacaanggaaaaactgggttaaaggaacangttccctcccctttccattgcgtttcctaagaacttttccagggcaggttcttttaaaatttagtcatcttacaacacaacagtattctagcacggtggcgaagtgacaggcggcagatacgggggaggaaggagacgttcacgggaaattccacattctactctatgtgaactgctccagaaaaatacagacatgatttcacagtgggattccccagagtaaatgatgaatacatgggacaactgacctccctcctaaagaaagcccggctggggcagcagtgagcttttcatggagccacgcagactggcccggaagcaacaccccggttcaacatttaagagcactcgctataacattctttttggacgccaggtggtggaaaagtttaaaaaacaggcggaggagtgacggggggatacaagcatatcctatactgggggtgacggtcattcaaagagcaaattactgcagcttatatcttttccactatgttgcaagaaatgaatctatcctgacccataatatgaaagatgcgacgcacatgcattcccgaggctctaaaatcccattttaaagaaccgtttcacatcctcgtggagtggagagtggtccact

SEQ ID NO: 329696 - DNA, 429 bp, Homo Sapiens
tttcacaagttatattttattttaacacgagattaacatatagttacaaggtcaatacaagcctccagtggaagctctttatttggtttaattccatctccagagacaaacaggcaactctaggacctttacagtggcgatcggcctcacacagcaaaatgcctccaaagtttagaattagtgcaacacacatacgaacattttaaaggtgctcaacatcaggttaaaatagaattctggacctttttaaaaagtttttggatgatataagcacaggaggcagagccaataagaaacatgaaaccaatatttctggaaaaacacttagcatgaacgtcactttttgacgtcgtgtaaactttcttctgcaatgacggatgttaccaaaaggcatcgagacctttgcgctgcgctggttagacaagccgc

SEQ ID NO: 329697 - DNA, 339 bp, Homo Sapiens
  misc_feature (267)..(268): n is a, c, g, or t
  misc_feature (271)..(272): n is a, c, g, or t
  misc_feature (275)..(275): n is a, c, g, or t
  misc_feature (283)..(284): n is a, c, g, or t
  misc_feature (291)..(291): n is a, c, g, or t
  misc_feature (297)..(297): n is a, c, g, or t
ttttgctcacctgagtattttgctttattcaatctaataaacattttatttatgtaaaagacaaacaatgcatagaataaaaataagtgcttgagacttttgatataaaaagagtatatagcattcacattcctattttaatacatgagtacagctgaagtgttccataaaagaataaaactttccctttatgtatagtagtgaaaaaagtcagtatttttaggaactacagaatgttattccttggtcttttttcttgaataaggnnaannaancataaacnnaaacaangccacnggtatcctctgacactacattcccgtttatgctggataaccc

SEQ ID NO: 329698 - DNA, 454 bp, Homo Sapiens
  misc_feature (68)..(109): n is a, c, g, or t
tttatacttacatttcaggatttttattaataaagatctattgagtaagattgtattaatttttagtnnnnnnnnnnnnnnnnnnnnnnnnnnnnnnnnnnnnnnnnnntacttcagtggcttaaacaagtgagaggtgtctttttcttctgtaacaagatgggtgaaggcaggcaacccaggctgaagtagctgcacaaaggatgttcaggaatcaggctgaatatcttcctgctctgccatctgtggtgtgtggcttttgtccaagtgatcacagcatggctgctgtgcattcgggaaagaagaaagggggaagagactcaggttttcttttacccaggctttattcagaaagggacagcctgcatagggccttgtgcctatatttcattgacaagacaatgtcacctggccttcatctagctgcaagggagtctaggaaggtaaatatttt

SEQ ID NO: 329699 - DNA, 116 bp, Homo Sapiens
ttccagtgaaataatagaaaacttttattagcagcatccttaaaaagtagggaaacaaacaccccagtctcttgataaaaatgagtctcttgggcccaggcgtggtggctcatgct

SEQ ID NO: 329700 - DNA, 216 bp, Homo Sapiens
  misc_feature (11)..(11): n is a, c, g, or t
  misc_feature (24)..(24): n is a, c, g, or t
  misc_feature (31)..(31): n is a, c, g, or t
  misc_feature (71)..(71): n is a, c, g, or t
  misc_feature (175)..(175): n is a, c, g, or t
ccctttcctantctccctaaaggntgtggtnaattattttccttaaaatttgccattcgtggatatttagncccttatttttgtaaatttataagtcctatggccatagtttatcaaagacccctaaaccccatgattttttaaaataaaaatagaaaccggccgggtgtggtgnctcatgccctgtaatccctagcactttgagaggctgaggca

SEQ ID NO: 329701 - DNA, 525 bp, Homo Sapiens
gttatctgaaaagtgcaataaaagtgcaacgaaaatgaggtgtgccttaccatacacacctatgatcaataatgtataaattaggcaccaataggagattaacaaccaataactaataatggaacatttataaccaacgtgccggcatcactactcctgcactttgaggtcattattaagtaaaataacacaaacactgcaatagttttgacagtcaataacaacagttaatctgatgacttaggccattacatgggtgggcagcatatactgtgaggatcctacaggaccaagggatgattcacgtcctgggcaggacagagagggaaggtgtaggatctcatcacgctacccagaatggcacacaacttaaatcttatgaattatttattactgaagttttcaatttaatattttcagaccaagagtaactaaaactggaaagtgaaactgcagataaggggggattactataatttaacctcacagtaattcagagtcataataatcgatgaacattaatat

SEQ ID NO: 329702 - DNA, 297 bp, Homo Sapiens
attttaacctttcttttacttgacgcgtgtcgaggctgagaggacgcaccaggccgtctcacctgggcaatgagcaaaagatcttttctaccccttttgctcctttagacctggggcagcctgggggagcttttgtgtgccttgtgcttttttggcttctgtgcctgggtagggtctccatgcatttgttgagagagggaacatgtgtgcttgtgagcacagatgggtgggatttatacaggggtgagggaaaggttggtaccctcaggaacagtttgaggcaaaccttaagttttt

SEQ ID NO: 329703 - DNA, 491 bp, Homo Sapiens
  misc_feature (326)..(346): n is a, c, g, or t
ctctaattattctgggaaattatcaaataaattgaattttctaattttaacctttcttttacttgacgcgtgtcgaggctgagaggacgcaccaggccgtctcacctgggcaatgagcaaaagatcttttctaccccttttgctcctttagacctggggcagcctggggagcttttgtgtgccttgtgcttttttggcttctgtgcctggtagggtctccatgcatttgttgagagagggaacatgtgtgcttgtgagcacagatggtggatttatacaggggtgaggaaaggtggtacctcagaacagttgagcaaaccttaagnnnnnnnnnnnnnnnnnnnnncttcctcccagcctgttgtttaggcctgagcaaataaatggggagtttaattcaattaggagcctgggctgtaggtcagtgcctcatgacagaaattattcaatattttttccccctcacaattgtttggggttacaacatcact

SEQ ID NO: 329704 - DNA, 411 bp, Homo Sapiens
  misc_feature (23)..(23): n is a, c, g, or t
  misc_feature (35)..(35): n is a, c, g, or t
aaaaaaaactaaacctctttaanagcattgcaagnggttgaaaagtttcctcctcctccctaaactctccccaaactaagaaatctgtgaagactccccatacttaacttgttttcctcctccttctgtggaagctcctcttggggctttttccccaggctccctctcccctaaattttgatcattctcagagactcatccttaaatcatttcctttgtctccctgttcattctcctcaagtcacttatcttctctcaaaggccctgtgttttgtgacttgtaaatttctatatgcagcccagccctcagtcctctagtccctctccactgaaagtcccacaggcactcattcgcatgccccagaatgagccatcagcatcctgcttatttcctcttctctctctccactc

SEQ ID NO: 329705 - DNA, 407 bp, Homo Sapiens
  misc_feature (15)..(15): n is a, c, g, or t
  misc_feature (31)..(31): n is a, c, g, or t
  misc_feature (56)..(56): n is a, c, g, or t
  misc_feature (127)..(127): n is a, c, g, or t
  misc_feature (176)..(176): n is a, c, g, or t
  misc_feature (240)..(240): n is a, c, g, or t
  misc_feature (246)..(247): n is a, c, g, or t
aatcaccaagacaangaaagaaaagtctccnaaggcaatgtcaagagatctttaanggcagcccctcccttcaacggtcctgaagcctaggaggaaaaaatagattgtgggtcaggcccagggctcnactgctgtgtgcagcctggcgacttggtgacctgtgtccctgctgctcngagctccagccatggtgaaaatgggccaaggtacagcttgaggcattgcttcagagggtgcagnccccannccttggccgcttccacgtggcgttgagcctggctctagctgcaagtcttttcacccaggtgaaaatgcatttgtagtagttctgctcctgcccaggccatattttaggggccataaattttctcttacttctgcttctctttgcaaatcttcattcttct

SEQ ID NO: 329706 - DNA, 685 bp, Homo Sapiens
  misc_feature (623)..(623): n is a, c, g, or t
  misc_feature (642)..(642): n is a, c, g, or t
aacaaacaaaaacaaataaaaagaagttttggtaacttttctgttttgtgtgtctttaagtcgtggtgtttatataatcgacacccatttatttcagtaattcagcaagccttttagagcagtgtctcaacttcagcactgttgacactttggataattatctttattgtgggggactgtcctgtacattgtagaatagccagcaccttgtcctctacccactagatgtcagtaacttccccttgtttgtgacaacagtgtgttcagacattgctaaatattccctggggagcaaaattgtcctcagttgagagccattgtttaagagcttactctgtgccagcctggtggataggtactgaagatagaaaatttcaagggaattaatggcagtgagggcagaacgggcttataaacacataattggaaatctgtaagataagtgtaccagaaaatagcaatcaagacacctcaaaggcttgggctggtgagctatctcagaatatctcaggagcatttagtagacagctatgcttagaacatgaaatgatagaatgggtattggtaggaaataaaagcagagaagacaactttattttacataaccatttaattgatgaagnctcactgtttagtacttgncagtttattttttactgttgtgggtagtggctttaagtttgga

SEQ ID NO: 329707 - DNA, 298 bp, Homo Sapiens
ccttcctccccagcctgttgtttaggcctgagcaaataaatgggagtttaattcaattagagcctggctgtagtcagtgcctcatgacagaaattattcaatatttttcccctcacattgtttggtttacacatcactgactcccttccttttgtactctgtttagagtggccataatgtgttgagcttttgtgtctgccatgtcactgtccctttcaccgttgtctggttttgtcaattgtgaggtgcaatgatgctgttttgaaaacagggtcctagtcagggtattgaagctcat

SEQ ID NO: 329708 - DNA, 409 bp, Homo Sapiens
  misc_feature (21)..(21): n is a, c, g, or t
ggtcctatgttaaggaagagnaacctagagagtattaaatgttttaaggattaggaataaggacctcgaaaaagaggaaaaaaagtcaagactttggaaagcactgaagggaagtttcagaggcttgtttctatccaactgaagaaatcctgtcatagcctcatgacattggagggtgctgttgctttgtagcacacttggatcattgctggcattcaagagggggagtggagcacaccaatctgagatcctgttagatacattactacactaagagttaggtgaagactggtggccacctgggttcccttacttattacatatgatcagttaatttcttaaaatagaatctacaagaggctattaactgacaatttcttcatttctactgtacagttctttacataaa

SEQ ID NO: 329709 - DNA, 630 bp, Homo Sapiens
  misc_feature (35)..(35): n is a, c, g, or t
  misc_feature (57)..(57): n is a, c, g, or t
  misc_feature (96)..(96): n is a, c, g, or t
  misc_feature (130)..(130): n is a, c, g, or t
  misc_feature (164)..(164): n is a, c, g, or t
cttgaaccgggaacaagctcttttgacaccatccnggatgggaaaattgagtgagtnaatagcccggtgccccttcaggaggatctgtgtgctatngggtctggtgctgagggaaggcaaaataccattngggccactgtcctctcaaaaagggcttagacttngggatttcccatgtaatcaggtgccttagggtctaggttaccagccacatggctttccccacagtgaccttcaagacaccttctgggggctctcccagatcacacagacccagctctgccccagcttgtcaaaggaggcttcattagtgaagaagcccaaaattaggtctcctcttccctccctgccctagtgtgatatgcacactgttgaaggtattttacaaatatgcagagatccaaacaccagattttcatccctgggaaaccctcaaacaagtgggtacctgtaagctgtctgagattgccagtgcttacaggcctgactactaggccactgaagaatttgtggaagagtatgcagatgcaggggtatccaatcttttggcttccctggtctacagtggaataagaattgtcttgggccacacataaaatacactaacactaataatatctgatgagctaa

SEQ ID NO: 329710 - DNA, 575 bp, Homo Sapiens
cgcccgcgctcagtagtgacgttaaccctgagcaagccccgcccccggagacgcctgcctgtaggtgaaaacgcccacggtgggcgggtcccgggaatacctgacgtcattggagaagcctgcgtccctccctttcatcactttctggtaattataaacttttgctctggtgggaagtgtttctgctaaggttccctaagagatgattggaagttgtggagagagagattggtaagccaaggcagttcttcaagcactcactctatactgtccctaataccaacgaacagaagtttgtgatgttttatcaggattccgacagcactaatgccatgccttcctagcaaggaatgcatgattttcagatactaacagttaagaattttacacttctacgtaatttcatttgatcttatcttaggtcttttcatgattctagcttttctttacaaatgctgctccctttaattttaaggttcctctcacttaaccttgcaataactttcaggtatagtttcatgctaactcactgaactttttgttatttcttcaagctgttaatttctctattaatc

SEQ ID NO: 329711 - DNA, 165 bp, Homo Sapiens
cactgcactcgggctgagataaggccttttttgttcttaaaagatcttgaaggaaataaggattttcacggtttctctttgaagattatctaacagtaataaaacatatccgggctgtgaagcttaatatgtgggccccaatttttccctcaacttgaggtcatt

SEQ ID NO: 329712 - DNA, 260 bp, Homo Sapiens
  misc_feature (208)..(208): n is a, c, g, or t
  misc_feature (214)..(214): n is a, c, g, or t
gcaacaaaagaaactatttatttggaatatgcattaccagtacaaattaggagactgtaaaacctacaccgtgttagtatcattagagaacacaaaagttcagttggaatcaaaagggacagaagcctgtgctctcacagaagcagaaaagcttaaacttttcaaaaccaaaacagagcagagctttgcaggtttatattctgattantaaganaaggggaggggtagggggagattaaaaccaacaaccaaaggaaagc

SEQ ID NO: 329713 - DNA, 512 bp, Homo Sapiens
  misc_feature (380)..(380): n is a, c, g, or t
  misc_feature (387)..(387): n is a, c, g, or t
  misc_feature (488)..(488): n is a, c, g, or t
catatcacatccgtcctatcttttcatcttcagtgaatcattcctcatgtttgtaattaaagccatatttaccatcataatctgcagtcacccgagctcattttgctctgaagccagtgatattaagctgttctatttctaacgtgtcccttaacttgattctagtaaaagcagcaagcagtggtatttaatatacaaactcatcaaattccacataaaacatttaaccacagttttaaaaactcaagtgtcctttacactaggctaccttgggaaggtaggtactggcacttttctcaccatggttgtcattgtgttatggcattcttgggaatttcccttttggtaattaccttaaggagcctttcataaaccacagnggaatcnggtctgctttataatcctatcagggtgggctacaaataggcttgtcccacgggtctcttactttataaaccggtgtgggcgtactggcttgggctcttggntggcttccttccattcattcaccg

SEQ ID NO: 329714 - DNA, 226 bp, Homo Sapiens
aaattacaaaatactttattgccaaaaatgctaacaatcatctgagcctttagcaagtcgtacactttgtatttttgcttttattataatttttcatggacacataataattgtacatttttatggtaaacagcgtgatatttcaatacatatatacaatgtgtaatcatcaaatcagggtaattagcatatctgtcacttcaaatatttatcatttctttgtgtt

SEQ ID NO: 329715 - DNA, 412 bp, Homo Sapiens
aagccgagggagaagaaacccccaaattttagcccacggggtccccccgagaattgttgaggtttttaggggacccccaatgtgtccccttgtgatcagtattgttggtggacaaactgttataaaacgtcctaaagaatggagaggagccttaaaggtatattcatcaaacaagttttagaagacagtcccagcagggaagacgaacgcacttaaaactggagataaaatacttgaggtgtctggagttgatttgcagaatgcctcacacagcgaagcagttgaggccattaagaatgcaggaaaccctgtggtgttcattgttcagagtttgtcatccactccacgagtcattcctaatgtacataacaaggccaacaaaatcaccggtaaccagaaaccaggacaccaa

SEQ ID NO: 329716 - DNA, 118 bp, Homo Sapiens
tcaaattccagctcaagtttatttttaaggattagttgagcaagtttggagttggaagtgagagaatcgtgtttaaaggaaagggtaggtcatccacagaacagctttcagtcattac

SEQ ID NO: 329717 - DNA, 830 bp, Homo Sapiens
  misc_feature (818)..(818): n is a, c, g, or t
attttagacgtcaaccatcgctttattaaggctgcgagtcggggggctgagtcatgcactccacagacacccccactgctcccaaggtccacttttggatgaccctgaaggcagagactcctgagatctgggccacaatctagggtgagccacccacagtgccctgctggacaggggggtatgcggactgcacgggggggccctcagcaggggtcttcctgcctagggtggggctggctccagtgggtcctgggctcaggcagtgggggtggcagggaggcagggacatccccccgccctctggcctatggcttttgttgccctattgccaccagcgcagaagcaatgtgctataccgtgaggtgatgaagaagagccccgggaggaagcaggcagctctgtgcctggggcctggccaagacctcaggggtgcttgtggcccttgctccttgttccccctcagctccttcccagcaatgggtcttcctccagtggaggtcagtcactcagaagtggacccgcagcacatcttggctagcaaccggccgctggcaggctgtgcacgtcatgggcagggagcgttgcttctcacccaggcagggtcggcacaggaggtggccgcagggcagctggtacaccggctcctttttgaagtagggagaaaatactcttttgcaggaggcacattcggggcccaggatgctccccagcgctttctgtcgagcagtccatatgtgtcaggctgggctcattggtggctttcattttcttagcagtgtgctctgaggtagtgggtaagaccaaagggcttgtggcanaaaaacaggaag

SEQ ID NO: 329718 - DNA, 545 bp, Homo Sapiens
  misc_feature (364)..(364): n is a, c, g, or t
  misc_feature (385)..(385): n is a, c, g, or t
  misc_feature (396)..(396): n is a, c, g, or t
  misc_feature (424)..(424): n is a, c, g, or t
  misc_feature (445)..(445): n is a, c, g, or t
  misc_feature (463)..(463): n is a, c, g, or t
  misc_feature (475)..(475): n is a, c, g, or t
  misc_feature (481)..(481): n is a, c, g, or t
  misc_feature (532)..(532): n is a, c, g, or t
agaacagcgtctttctattcttagagccttcaagcctaaatgctccctgcctggctccaggccatgcccccttcctccccacccactttccccagaaaatttttgttgtggaaaattacacattcacaaattgtgtttctttcctcacaccaagcatattcccacacagagacagattctggaatgaatctcatggatgactcatgcccattatctggctgtttataggagctgcctttagacaaagatttggtcataagctacgttaagaccccttcattgtcttgccagttgcccttgcagggggatgggcttatgggcttatccgatgggagtcctggagtggggagtgggggaagggganttcttaggacttaaaaagctngctttttgganttccactttttgttcccatccaactgtngggaccctggttcccattgtncttcttggaactcttggnaggcaaccttcntgcttngatgtccagccaagcaggcctgggtcccaagatggccagctgcacttgtantccgggaaggggc

SEQ ID NO: 329719 - DNA, 766 bp, Homo Sapiens
  misc_feature (29)..(29): n is a, c, g, or t
  misc_feature (50)..(50): n is a, c, g, or t
  misc_feature (64)..(64): n is a, c, g, or t
  misc_feature (81)..(81): n is a, c, g, or t
accccacagataaaggttaccaaaccccncaaagttgtccccttgcccangtcaaaaaattggnccaagcgtctttctttnccggcttacgacagagcagcttccagcccttggtgtggtatctacatgtagccctccgtaccctgctttctttttagcattccaaagcccactcagggcctcaaattagccaaatggtgaatatggatataggacttttagagggatgcaggttgagttgtacataacttagaggtgaagtgcaggtccgaaacagggctagactttggagaactgtaaaatggctcactgagcatgacagcatcaggacccctggagtggctttcaaaacttaaccttcttctgcaggctacttctggaaatccctaggaacttaccagctttctgaaacactgcgcatcatgggagggtgaagaggaaaaggggctagttaaaatcttgcttctactgtgggccgaactcaggaggagccctaaagctaagcccttgggcttgacagctctacttttcacctctaactaccactgtgccaatgagtgccgagtgccaagatcagctgtgacactcggaccctaggtcaaagtcacaacaccaccactgagtcccacatgaccattcacatacacagtagatacagagaactcaaagcagcaaagacacacacacatgaataaacagctgttggttgaactcttgctctctgcatacaaaacactgtgacattaccatttgaactagcatttct

SEQ ID NO: 329720 - DNA, 435 bp, Homo Sapiens
  misc_feature (144)..(144): n is a, c, g, or t
  misc_feature (148)..(148): n is a, c, g, or t
  misc_feature (265)..(265): n is a, c, g, or t
  misc_feature (423)..(423): n is a, c, g, or t
tttctttggtataatgtttatttaaatagtaatcttaaaaaggctttatacaaatcatataaacacagtttgacattgttgtttattttttacattgaagaatcacagtaaaagctctcaagttcccgtgatctggctcagccntcgnaatggtcgaatacctctaactgcaaaccctgaaaaagttaacctgctatgtgacaggttaactctttcccttgttttcttgtcattcatgcttattccttgggaccctcatccctgntcaactcccctggccccaccaaaggacaggaaaggcaaccctgtgggccctggttggaccacctaggtccggggaggaggtgtggggagggtaatggtggtcatttcaggtacaaggggcaaaaaggggaggatccaatactggggcagtgggggggnttttcccaaagg

SEQ ID NO: 329721 - DNA, 541 bp, Homo Sapiens
tttttttctctggtataatgtttatttaaatagtaatcttaaaaaggctttatacaaatcatataaacacagtttgacattgttgtttattttttacattgaagaatcacagtaaaagctctcaagttcccgtgatctggctcagccagtgaatggtcgaatacctctaactgcaaaccctgaaaaagttaacctgctatgtgacaggttaactctttcccttgttttcttgtcattcatgcttattccttggaccctcatccctgtcaactcccctgccccaccaaagacagaaagcaaccctgtggccctgttgaccacctagtccgggagagtgtggaggtaatgtgtcattcagtacaaggcaaaaaggagatcaatactggcagtggggtttcccaaagggaattgactcaaggagatgggtcagctagcctacccacagataaagataacaaacacaccaaggtgtcccctggccaagtcaaaattgggcccagcgtctttctttctgtcctacgacagagcagcctccagcctt

SEQ ID NO: 329722 - DNA, 499 bp, Homo Sapiens
  misc_feature (269)..(269): n is a, c, g, or t
cttgaccaagggtccaggcgaatgtttgcgggcttcaacaaaggcccaggcgaatcgaaaaggcagcttgtgtcacttagccaaacgctctgccctttacaaatttggtgccctctgtatctctccattttggggccgctgaccctggcaggctgcacggagggtttacaaactcacagggttccccacagagcattccaggcaaggatcctgcctggctgaggttccctcacatataaaatggggatggccgtgctgaacacctgttntgccacctcctccctaacagactgccccgaaagacacaggcaatggtgccactgatgggctttgtgggcaacagcacagcgccactcaaatcccagagtgctgctaattaagaccaggtgaccccaaacaaaatgcctgagccaggattagtcttagtcactgctgttattattgttatactaaatccccttttagacatgacttcctgacccttacattttcagctgtc

SEQ ID NO: 329723 - DNA, 455 bp, Homo Sapiens
  misc_feature (36)..(36): n is a, c, g, or t
cgtaaaagaagcggtgctctggctcccatgtgggtncaggatcagccgcaggacctccatccacaaatgggtggtgggtcgagctccatctcctttcccagtgcagggttttctcccaggatggggaataaatccagccagacacaggagcacagcctgaatgaggtggtgctctggtgtgtacaggtggttggaaatggcatggtataggacctgggctctgttatactggagcaaatcagcagctggcacattaagcacaatgtgatggagacagtgtacacccaggattttgttctcagtctgatagtcatctgaaatgaccaatgatgcgggaagtaccctttccagatgctggctcagccagggccgagtgacctgttgcagagtccatgagaaaacatgtttgatggcagggttattcttccaggattccttatacaagtcgggtttga

SEQ ID NO: 329724 - DNA, 510 bp, Homo Sapiens
  misc_feature (497)..(497): n is a, c, g, or t
acatatcatataaatatatttgttcaaactacaaagggatggatatcagggggaagcttttattgctgtggggggacctggagagggaggggggccttggaaatggggatacctgggaccacttgttccccccattcctcacagaaggcacaaatacattatttctttccatgtgaggagatgcgaggagaggatacagaatacaggaatcctcaaaaatacaaaaaacccctccaaactgaatacctaaggttatggaaaaggctagggtggggcacagaagtcaatgggggaacagaaagaggaaccaatgaaactgagaaccaaaagggacctgagaggccatgatgtccatgctgctgcctctgtgcagaccccagagaaaactcaggtaaaccaacggaaactcccaaataagagagggtagggtgccccagggaatttgctttggggcatcagacaaggggagtttgagttttagttttgtgtttgcagtngctttttattcag

SEQ ID NO: 329725 - DNA, 604 bp, Homo Sapiens
  misc_feature (76)..(76): n is a, c, g, or t
  misc_feature (466)..(466): n is a, c, g, or t
ctcaaaacattaactgaattccacctaccaaaggagaatcaaaggaaggaactaggacttcgattcagagcagggnaaaagtgggatgcagctcctgagcactgccaatagggcatgctaggtctcctcacccagtctgccttctgtgtcttaggttaattcgctattttccaaacacaggattttaacaacttggccatggaggaatttggcaagttttggtacagaaccactgtgaggaactgacccctggaggaagactaggattatttttacagagtctaggtctcaaaatttcaccctatggatttggttctttttggtctaccatacaaatttggatttctgctgccaattacagcagactcaagtcatatataaaaacctggaggttagcatgtctagtcacatttttctcctggtcatgatgtctctctttctgtggttcctcttctttggcaagtgnttggcagcaaatatacccactagggacctctctgccttctcttagtggcaagttccccatcaacaaccttgagaatttgggcctccctttgctaactacttgcaagagtatgactcgcctgtaaccagcaaattttta

SEQ ID NO: 329726 - DNA, 368 bp, Homo Sapiens
  misc_feature (20)..(20): n is a, c, g, or t
  misc_feature (181)..(248): n is a, c, g, or t
  misc_feature (262)..(319): n is a, c, g, or t
  misc_feature (351)..(351): n is a, c, g, or t
aaccttcaaaaaatgcatcnagaccccgcccctttcttcgaacacttggctgaccaaacccctggtcctgtccacccttggctcctgtctggatgctcccagcagcctcctcccctgggctcccttgccctgccccagtctgttccccacgcacagccgcccaggggatcctgtaacaccnnnnnnnnnnnnnnnnnnnnnnnnnnnnnnnnnnnnnnnnnnnnnnnnnnnnnnnnnnnnnnnnnnnnggccgggcgcagtnnnnnnnnnnnnnnnnnnnnnnnnnnnnnnnnnnnnnnnnnnnnnnnnnnnnnnnnnngcaccactgcactccagcctggataacagagncgagctccgtcttaaaa

SEQ ID NO: 329727 - DNA, 411 bp, Homo Sapiens
  misc_feature (22)..(22): n is a, c, g, or t
  misc_feature (70)..(70): n is a, c, g, or t
  misc_feature (97)..(97): n is a, c, g, or t
  misc_feature (269)..(269): n is a, c, g, or t
  misc_feature (296)..(296): n is a, c, g, or t
  misc_feature (328)..(328): n is a, c, g, or t
  misc_feature (381)..(381): n is a, c, g, or t
ctttaatcagaagcacgtgcgncccacagtgtgctcttcaagccccaaaggcacgcctctaggactgcgnccttagagcgaggctcgggctcttggnaaaaaagcatttgcttgattttatttaaacaatggggaatcttcaaggggccagtctacatgcccaacagtcctccagggttcaaggccacagtcaccgtcactcagagactgcctcatttggcaagagagaaaaacagtgaccaccacagaggggcagggagtgacaaagnttgtagggctaatgctgcaaaagccgntaggaaactggggggccacacacaaggggccngcagggtgcgcctcgggggtttgcgtgggctccccttgctgcccccccggggngggttttttctcccactgggctttttctcg

SEQ ID NO: 329728 - DNA, 303 bp, Homo Sapiens
  misc_feature (113)..(114): n is a, c, g, or t
  misc_feature (149)..(151): n is a, c, g, or t
  misc_feature (186)..(187): n is a, c, g, or t
  misc_feature (206)..(206): n is a, c, g, or t
  misc_feature (240)..(240): n is a, c, g, or t
  misc_feature (253)..(253): n is a, c, g, or t
  misc_feature (262)..(262): n is a, c, g, or t
tgtgtttatatttacacggtacattttaaagcaatggctacattggtcatacatattagaaaccataaaacaaagttaagacctaaaatgtacatcatacacttgtatatatnnctcccacacagaggtaaaaaggcttattataaaannntcaatacaacagggtttttagtatacaggtaaagnntgaattatgcttcaggcantttaatttgttaatgtgaggcaaatagcttgggngggtcggggaggnttctggganaggaaaatcttttgggttaatgttttgttaccacaggatac

SEQ ID NO: 329729 - DNA, 493 bp, Homo Sapiens
  misc_feature (154)..(154): n is a, c, g, or t
tgggtgcagtggtgtagtctccatacagcttctccaggtgagatcagtgttagtgatgactgcagatgccttagtgacctggctgcatgattttgtggcagtgatattgattgtgtaggcatattatgaataagggcttttagagatccctacntgttcttgtctttctaacactgggaagtcttagctgaagaggcctttgttgatattggttctgacatggttcacaggcagtcacagtgacactgggattcagggcataatatctattttaattcccttgggccacagaaacataaaagtaaaatactctggcatttcacttatacaatataagcagccttaattcaagcccactttttgacttcagtaaactataaatctcttcttttagttataggatagtaaactaattcaaagaggttcaatgagattgatgttggcattctccttgaagatgcaacttgctataattatctttgattatgcatca

SEQ ID NO: 329730 - DNA, 537 bp, Homo Sapiens
  misc_feature (373)..(373): n is a, c, g, or t
  misc_feature (421)..(421): n is a, c, g, or t
  misc_feature (485)..(485): n is a, c, g, or t
gcttaattgattgaaatctttggcttcaagatttctgattcttttttatgatatatatttctttgttgaatttgtcattgagatcatgaattactttgctgatttcattgaattttctatttgtatactattttgtctctcttggttttcttaagatcattaatttaaattccttttcaataacttcataaatttctgtaaatttgggggtcagatactgggaaattctcatgttcccttggtgggcatcatgttcccttgcattttcatgtttctgggtattcccacattaatgcttgcgcatcttctgggtacagtctcctcttccaaacttcagaggaatgactttcatagggggaaaaactttcacctngacgacaggctggagggcatcggttgggcagagtgcagttgttctggnactaggtgggtgcagtggtgtagtctccatacagccttctccaggtggagatcagtggttagtngatgactgcagatgccttagtgaccgggtgcatgaatttggggcagtggata

SEQ ID NO: 329731 - DNA, 473 bp, Homo Sapiens
  misc_feature (455)..(455): n is a, c, g, or t
gtatacccttgaagacttaaaatttttttattatagtaagctagttctttggtcctcctataaagctttatcagcttcttcttatttccctttaatgtttcttgtcaactcacatgtatctctgcaagaaaaaagttgtagaaggggaacattataaggtacttaaatttctctgaggcagaaaacttcagggtctgaatttctggtgtttgtgggccagtcaaaatagtgaagaagcacttaaaagtgggtctttgggaatttttaatttaaatatttaccactttattctgttaggtaaatgaggatcagggaataggtggatttgattaaatcacatggtatcaacctataaaaggtgttaaggctcccttatccattgtttacactggggcttcccaaagggccctcaggcatcccggaagggaggcctaccaaggggccacccggggggncctttttcccgcttcccg

SEQ ID NO: 329732 - DNA, 625 bp, Homo Sapiens
  misc_feature (28)..(28): n is a, c, g, or t
  misc_feature (87)..(87): n is a, c, g, or t
  misc_feature (150)..(150): n is a, c, g, or t
tccaaggaccaggaatggttctttcagnggattggtttccattgggccaattgggataacctatttccactgggatttcaggatacngtcaaaataggcttaataactcaggacatctttgtgctaaactgtgaactctggacaaaaatngagagtctctgaatagggcaggagcaggaaaatggctcctgggtggctcttgtatgcttcttcaggatgctgatggcctttgggaagcccagtgtaaacaatgataaaggagcttaacacttttataggtgatacatgtgatttaatcaaatcactattcctgatctcatttactaacagaataaagtggtaaatatttaaattaaaaattccaaagaccacttttaagtgcttcttcactattttgactggcccacaaacaccagaaattcagaccctgaagttttctgcctcagagaaatttaagtaccttataatgttccccttctacaacttttttcttgcagagatacatgtgagttgacaagaaacattaaagggaaataagaagaagctgataaagctttataggaggaccaaagaactagcttactataataaaaaaattttaagtcttcaagggtatacatcataa

SEQ ID NO: 329733 - DNA, 298 bp, Homo Sapiens
  misc_feature (14)..(14): n is a, c, g, or t
  misc_feature (31)..(31): n is a, c, g, or t
  misc_feature (44)..(44): n is a, c, g, or t
  misc_feature (95)..(95): n is a, c, g, or t
ttgcccccggcctnctgctgctggtgaccantgtaaccccggantcccagccccggttttccctgactcagaaagactgagccttttcccccggnatgttattaaatagcctaattgtgtcccaagcaacccaagggcccttgaagtcctgccttggttcctgccttatggcctcacatcaagaaatggagcctagtcccatgtcctgtagtccccaatgctttgggaagcccatgatgggaaggttgtcggaggccaaaagttcaagaaccaggctgggcaatatcacaagactcca

SEQ ID NO: 329734 - DNA, 469 bp, Homo Sapiens
  misc_feature (136)..(136): n is a, c, g, or t
ccctcctacctcaattttaatttcctcctaataattgttcctccctcctccatcaccaaaaagtctgttccctgccatggtggtaaaaggaagaagaagatctaagcagcccacttcctgccagcaaggcccagcnagtgaaggtaaaatctggtgaacagctgtagccgtgcccagcctctgcttaatggagggctgtaatgagtccctgggagttggaggggcagtggtcagaccacttccatctgcttgtggttcatcttcactctcacattggtaacacattctttcttctgctccttgggggaagacttcatttgaagaattatctttatttttaccttctagagagttttcacataaatactcagtcctacttatttcattgtctgttgtggcggatttattactttcctcttcagtatcatttttactgacttttcccatatctgaattcattgatggttct

SEQ ID NO: 329735 - DNA, 407 bp, Homo Sapiens
  misc_feature (224)..(224): n is a, c, g, or t
  misc_feature (245)..(245): n is a, c, g, or t
  misc_feature (265)..(265): n is a, c, g, or t
  misc_feature (381)..(381): n is a, c, g, or t
gtatcaattaatttttttattcagaacctggatctttaagactggtataaacaaaaataaaatacaaacaacttgttattaacataatagctgcagttattaactgcaagattacagtaaaaaggagtcatactaaatgttaatgttcttgcaacagatttttcccaatcaccttaaggtagcaaattctggcaaggaaatgataattcatttcttattaaaantacttaaagattttccaaggnttgatcagttgtgccacaantaaaacaggcagtttattcaaaagagcccttacctttctcttattttcctaaaggatctgccatttacgggtaactactaatttcggatcagtttttcaaaccgggggttcttccngtaaaatccacatcttagggttttac

SEQ ID NO: 329736 - DNA, 842 bp, Homo Sapiens
agccttgctgtgttgcccagactatcctgcctctgccttcctaagtactgggattacaggtgtaagccgctgagcccagcctagaccctcattttgtgggagtactgagtccagtaacttcctgagaaaggaagcatagaaataaatttttgagattttatttgtgtctgtaataccgtgtatctttctttctctttaaatgtttaaagttttattatccttcctgcattgtccctgtattcctattttttctttttctctgagttttccccttccctgtttgttttgctgaccatatgtgggagttttcctcaaatatttagagctctctgctatggtatgtccaggttggggtgggttggaaagaggagtttgagaactgatagacttcagcctgggatgataggatggggatcctcatttgtcattctctgcagaaatgttctcttgggctggtcagcttttccagagagtagttcctgcttggagagtagttcttgcctaaaccatatcttgagagtgagagctgagtggatgcaggtaggagtggaggatagagaaatctcactgttcagcataccagtgtacactgaagcccccagttttcattgtggcttctcacctccaccctgtcctcagctctactgagattttcagagcctaggacctcaacctttccagaatatacatcacctgatttctcttgaggctaaggcgaaggtggttgctcagggttgggagaagtcgtggtagctaaatgctccttatgcagactttaatattgcccctgttttcagccctgaagcatgccttgtgcttgaagggtatgtgattcctccagt

SEQ ID NO: 329737 - DNA, 472 bp, Homo Sapiens
  misc_feature (123)..(123): n is a, c, g, or t
tgtagaaaacaaggtcctcactatgttgcctcaggctggtcctcaaaaactggctggccctcaggtgttccctgcccacctcagtctccccaaagtgcctaggattaataggcgtgagccacntgcactcagcctgctgcctttttaaagtaaagttttactggaatactgccatgttcattcatttacatttggtctgttgctgcttttgtgctacaaaaacagactctgaggagctgtgcctgagaatgtatggctcagaaaaacaaaaatactgactatctggtcctttacagaaaaaaatattgtacagccattcactttgcctaggaatactcttcaacccacttttcttgtgagcgcttattcttctaatcccaggtttaaacactatcacttcctcaaacagccctttcttgacctatgtggttgtctttatcattttttcctctatcactgtgctgtgccgaat

SEQ ID NO: 329738 - DNA, 944 bp, Homo Sapiens
  misc_feature (826)..(867): n is a, c, g, or t
gaaggtacagatatttatttatttattgagatatggtctcactatgtggcttaggctgtagtgcagtgaatgttcagaggagcaattatagccagtacagcctcaaattcctgggcttaagcaatcctctttcctcagggcctctgaggaactgagattacaggcgtgccagcacaccaggctcatcagggatttcttatatactcctactcaacccctacatgcataaactcccccattatcaatatttcctaccaaagtgatacaatagatgagcgtacattgacatctcattatcacccaaagttcatagtttacactggggttcactggtggtgttgcataatctatgggtttggacatacgtataatgacatggaagctacatgatattttcctacagggtagtttcactgccctaaaatattctgtgaatcgtctctttatgcccctcacccaacccccaggatcccagtgttttctttttgagtttagctgctgatgtttgtcggtttatcaggcactcaaaaaactgcactctctattccctttgctctttttaagggggcatccttatttcctagacagatttgtgactgtgtagatgctgggaacatgttttgctttggagtggggaggggggaaatcttgtaaagatttctctttgtcacatttttgatttgtgaattctcagaggctggacctgggcttcctggaaggtaatgcagatgtgacgtcacaatttcctgtcccgtgctcttgggattggtgtgagaatagtttatcagaatgggctgaccttctgcagattccactgctgaactannnnnnnnnnnnnnnnnnnnnnnnnnnnnnnnnnnnnnnnnnagctgaagctcttgggattggtgtgagaacagtttatcagaatgggcaaaacctctggagactccactgctgagcta

SEQ ID NO: 329739 - DNA, 399 bp, Homo Sapiens
  misc_feature (313)..(313): n is a, c, g, or t
  misc_feature (379)..(379): n is a, c, g, or t
aaagacaagttatttttttgaagatatctgctcctaatcggcatgtcccagtggttacttttctgggcttcacttcctcatctgtaaaattagctcagcagtggagtctccagaggttttgcccattctgataaactgttctcacaccaatcccaagagcttcagttttctgggcctttctgggctcagcttcctcatctataaaattagttcagcagtggaatctgcagaaggtcagcccattctgataaacttattctcacaccaatcccaagagcacgggacaggaaattgtgacgtcacatctgcattnaccttccagggaagcccaggtccagcctctgagaattgcacaaattcggaaatgttgacaaagagnaatcttttacaagatttccc

SEQ ID NO: 329740 - DNA, 379 bp, Homo Sapiens
cgacttctagaagctttctttcatgatactcttcattttaagttactccatattcagcttgtgagaatgatgagaggcaaagaaagttttatgacctactcaaatcacacaggcaatagccaataaaacatatctcacccttacagctaaaaaagctttaaaatcccttcaaaaaacaattcatcttatctacttttcattagattgcaataaaatgattttcttaaattgagataaaggtacatgttctgcattctaactaatagtataggctgagctcttataactttgattgtctcctctgataaactcaagttctccacttgatgtaacagaccaccagaattatccttagtatttctatagaccacgtattgct

SEQ ID NO: 329741 - DNA, 340 bp, Homo Sapiens
  misc_feature (16)..(16): n is a, c, g, or t
  misc_feature (24)..(24): n is a, c, g, or t
  misc_feature (50)..(50): n is a, c, g, or t
  misc_feature (68)..(68): n is a, c, g, or t
caaaaataaccctcanctaagggnaataagccttgcggccgccttaaatnaaaagaccacttgggtcnggatcccccaagtaattttatgagaaagctcagaaaatattcagttttcatagtcccatgattacatactcctgttcatgagtactagtaaaaggttgattatgccagagaatttctataataagcattagcgagaacccaataccctgtcataattcagtaaggtttatatattttggcaaaatcaataaattaggcattcagcaagaggcaatgtagaggcagtcattcttgcagtgtaaagatctttttggccaggcacggtggctcat

SEQ ID NO: 329742 - DNA, 424 bp, Homo Sapiens
  misc_feature (248)..(248): n is a, c, g, or t
  misc_feature (322)..(322): n is a, c, g, or t
  misc_feature (361)..(361): n is a, c, g, or t
  misc_feature (407)..(407): n is a, c, g, or t
cctcacatacctatttttgtgatgagaacacaaaatcttttctcttagcaattttcaaaaatattatacattgttattaactgtagtcaccatgttatacaacagagctcttaaccttattgattttctaatattttattaaagatttttgagagtatgtttatgagggatattggtctatagttttcttttagtgtcttttccagatttttttgttagggttatgctgacctcataaaatgagttgnggaagtcttccctcccttttttatttctggttgagtttgtgcattaagttggttctaatgctgctaataaaganatatctgagactgggtaagttaataacagaacagagggnttaactgactcacagttccatatgggctgggggagacctcaccatncatgggtgggaaggcga

SEQ ID NO: 329743 - DNA, 407 bp, Homo Sapiens
ttttaatcagaactgagaatatgaaaagatctcggcaaatgaaaggtagaccataaaacttaacaggaggataaaatttaacagggatatacttgggcttaaaataaacaaagaaaacacatcttggcttaagtactgagtacaaagtgggagaaagatgactcaccaccatcagtagaccacgtcaaaaaagaagggctgtggtttcagttgactttgtgctccatatgagtcaacagtgtgatgcaactccagttcagaacagagaaagtaatagtcctgcgggtcaaaccatgcaggagatttgtgatccagcctattggccatcctttaagagagggtgaggcatgtccacaggaaagcagctagaataatgagagacagtgaccccatcatttgaggaagga

SEQ ID NO: 329744 - DNA, 402 bp, Homo Sapiens
ttcaataaaatagtcaaaagttgttgttttctaatctaccaagttcttcctaaagttcaaatgaaaattcagtttaagaatagccagaaaactttctgagaaaataggcaataaggcaggcagagggacaaatacacctgccagtcaatacaggatgaacagtgttagcccactgacttgatctaatattatctgaaagcaaaagtattttccttaacttgtatagtcatataaggtaaaaactcaatttcctttggctttaaaatatttagtcattaaaaataacctgtgtatttccatgactactttatttaatccaaatacactttccattggacctaggattacccggggtttaaataaggttgtggaaggggttccaatttaggtgatgggattttt

SEQ ID NO: 329745 - DNA, 508 bp, Homo Sapiens
  misc_feature (18)..(18): n is a, c, g, or t
  misc_feature (22)..(22): n is a, c, g, or t
  misc_feature (310)..(338): n is a, c, g, or t
ttgttgagcgctgcagcngagngcctccccgccggctagggtagcgctaaccttggtagcttctctgcaggggctgggactcccccatcgtatcctttcctctctggttcactgtctcctccggcgcaggaagctccgggttggtgtggaaccaggtatcctctctgaatttctctttccacttttctcgccctcgcctttcctctgtccagaacgaaatcttgaaaagcacagtgagcagcaacgacaagaaaaccaaaggccggacgggctggccgcagcacgtctgggccctggagctcaagcagtnnnnnnnnnnnnnnnnnnnnnnnnnnnnncgcgagtgagcaggggccaaggcgccagatgcagacccaggactccggaaaagccgtccgcgctccgtctgaggactccttgcatttggaatcatccggtttatttatgtgcaatttccttcccctctctttgaccccctttgaggcatctgctccccgtctcccccttc

SEQ ID NO: 329746 - DNA, 431 bp, Homo Sapiens
  misc_feature (20)..(20): n is a, c, g, or t
  misc_feature (63)..(63): n is a, c, g, or t
ctttgacccccctttgaggncatctgctcccccgtctcccccctcccaaaaaaaagtggatanttgaaagaaaagcaatcccatattttaatacgaagaggaacactcccgtgtggtaagggatcccgtcgtctcatagattctgtgtgccgtgaatgttccctcttggctgtgtagacaccagcgttgccccccgccaacctactcaaccccttccagataaagacagtgggcactagtgcgtttgtgaagtgtatctttaatacttggcctttggatataaatattcctgggtattataaagttttatttcaaagcagaaaacagggccgctaacatttccgttggggtcggtatctagtgctatccattcatctgtggtcgttccctctttgaagatgtttccaacagccacttgttttgtgtcacgt

SEQ ID NO: 329747 - DNA, 457 bp, Homo Sapiens
ttcattagtactttttgatgtcaatttattatttatccctttgccagtattcaaacagacaggcagtcataaaacattaaaaaagatcctttaaaacggtcaggcatctgttttacctcagttcattttagaaacctgggaaatcaggagccccggcttttatgctatagcaagtttgacacttgctgtatcaaaaatattgcttgaggatcactacgtaggaaagagttttgtttaaattttatgaaaggctgggttaggcaggcagacaatgggtttctaaggcaagatccagtgtaaatcaggcaatgtgctgtttcccaactgtttgactcctcagttcatattctgaaaccagggcgttgacaaaacccactgttcagtaattagcatcctgtcaaatctttccaatcaagactagcatgctgcacctggtcctagttaaaaaacacattgt

SEQ ID NO: 329748 - DNA, 540 bp, Homo Sapiens
  misc_feature (436)..(436): n is a, c, g, or t
  misc_feature (486)..(486): n is a, c, g, or t
tttttactttttgatgtcaatttattatttatccctttgccagtattcaaacagacaggcagtcataaaacattaaaaaagatcctttaaaacggtcaggcatctgttttacctcagttcctttttagaaacctggaaatcaggagccccggcttttatgctatagcaagtttgacacttgctgtatcaaaaatattgcttgaggatcactacgtagaaagagttttgtttaaattttatgaaaggctggttaggcaggcagacaatggtttctaaggcaagatccagtgtaaatcagcaatgtgctggtttccaactgtttgactcctcagttcatatttctggaaaccaggggcgtttgacaaaacccactgttcagtaattaggcatcctgtcaaatctttccaatcaaggactaggcatgctgcaccggggncctaggtttaaaaaacacattgtggggggcaattctgatctggaccctcnggggcccgctggccatgcttcaggaactggcattcagcgtgcatggccctcgtg

SEQ ID NO: 329749 - DNA, 647 bp, Homo Sapiens
  misc_feature (14)..(14): n is a, c, g, or t
  misc_feature (27)..(27): n is a, c, g, or t
  misc_feature (43)..(43): n is a, c, g, or t
  misc_feature (51)..(51): n is a, c, g, or t
  misc_feature (143)..(143): n is a, c, g, or t
tttaaaaacgggtncaggccacctgtntataaccctccagttncaattttnagaaacccgggaaaatccaggagccccgggcttttaatgcctaatagcaaagtttgaacacttgcctgtatccaaaaatattgccttgaggnatcactacgtagaaagagttttgtttaaattttatgaaaggctggttaggcaggcagacaatggtttctaaggcaagatccagtgtaaatcagcaatgtgctgtttccaactgtttgactcctcagttcatattctgaaaccagggcgttgacaaaacccactgttcagtaattagcatcctgtcaaatctttccaatcaagactagcatgctgcacctggtcctagttaaaaaacacattgtgggcaattctgatctgaccctcaggggccgctgccatgctcagaactgcattcagcgtgcatgccataattaccatccacacaaaataagtagacctccttgtccagcagctctgagagattctgcctaatcctaatgacctgccacaccattttaacttctttgataaatgtctatccttgtgatttagacctttcctctcctgtaaagaaggtatctcttcctgggacagaagactcctcagaagtagaatcactgtag

SEQ ID NO: 329750 - DNA, 593 bp, Homo Sapiens
  misc_feature (494)..(494): n is a, c, g, or t
  misc_feature (517)..(517): n is a, c, g, or t
  misc_feature (519)..(519): n is a, c, g, or t
  misc_feature (527)..(527): n is a, c, g, or t
  misc_feature (560)..(560): n is a, c, g, or t
  misc_feature (565)..(565): n is a, c, g, or t
tttattaaaaacgtttgtttttattttgtatttttgagactggaaactgataaaaatttctgattaggaaactttgagaatagagtctttcttctttccaaaataacaaatgtcttttagtttgagagctccagctgtggcaacaagaatgataaatgcttttgagaaaattagcaaggttttgccccacttaaatggttaacagtaacagcagcacagacccaaacttgataaaactttggtacttgttatttggactaaaattttgtctcactcgattcagacacttaaatggggagttttcagtttatcctgcccactgattcataactggggagacagattcatggggaagggcagcattgggacacatactccttctcttgctgagaaccaccactataatctaattctctttttttaggtgagagatgcagaggcccaaaggaatattgcaaatacccaaggtcaccctgtcaggagtggcagaatanggctggaacaaggactcctttcncnggacagcntgcacctacaatcccttccatctggcacctacnatccnctcgaacactgcagcatggaggcagact

SEQ ID NO: 329751 - DNA, 500 bp, Homo Sapiens
aagttcttttttattttcctccacactggcaaaagttccgagggagcctaaagttttgtaaacattttaactatccctcttacccacccccaacttttgaatttacaaagcaaaggagagtaggagccccaatttttaatggtttcctctcccctcatgctatttgatccaaaaactatatacaattttgtagcagtctctgtatagttattacacatgtttagaagggagggaggcaagaagggatagggagaatggtgatccaaaataataaaaatagaagccaaatataatactccaaacccaaactgctctcagagcaactccagccttcttcaggcaacaatgacaggcagcaaaggtgcttttccaggggctgcccagaccacagcaccttctcgcacaggcacagctgcccaatgactccaacccagtgtgagtggcaattccaggtgatgttctgtaggggtttggtggaggcaggaaaagtatttgtctat

SEQ ID NO: 329752 - DNA, 605 bp, Homo Sapiens
  misc_feature (576)..(576): n is a, c, g, or t
tcatggttcagctgtttattgtctccatggggtgggtgaagaggagtggcccagctgagctgaggaaggtgaccactgagaacccattcaacctgctgagcaggctgggcagaaaggagcaggacttgggacagacgactgaagatgcagagaccccatgggccccacccctgggccttcctcccatgtggctgcaggccatcctctctgatcactgctgggttgcttcctggttaaagggccagaaaggtgaaggagatgggcttttcaggcatcagaatgaggttgaatgtggtgcccacatcgctgaggtgttggatttcaactctgaagttctccagcatattgatgaggaagatggtcatctctagctcagcgatccgccgtcccagacactgccgcacaccccagccaaagcccaagttccggaagtaggtgatgttcttgtctttgctcagccatcgggttgggtcaaaattttccgggtcgaagaagaaggtgggctctcggccagagcatagatggccacttgcaccagtgtctggggcaaggtgatcagaggcctgagtaagcccnacttccccacagccctgagcacaaaaccc

SEQ ID NO: 329753 - DNA, 352 bp, Homo Sapiens
  misc_feature (41)..(41): n is a, c, g, or t
cttctcccctttttcccctagcatgcccttgccctttccanagccctgagcctatgcctggcctgggtaccttagccccttgcctttccttccctgtttgaagcctgcccaagccccagggttgcccttttgttattctgctgcctagaagttagaacattcaagaattgagggtacacctataaacagactggcagatgatatagtgcttaatgtcttgcctccagtttgtcattgtgtcagaacatccgaaaaaagataggagaaaagttggagtttagggcataattttcctgtaataatttggagctcaaaaatattacaatgagaaaataaaaagctattaattagc

SEQ ID NO: 329754 - DNA, 562 bp, Homo Sapiens
  misc_feature (385)..(478): n is a, c, g, or t
  misc_feature (530)..(530): n is a, c, g, or t
  misc_feature (551)..(551): n is a, c, g, or t
tttcagttcttgaatatttatttcctttaagagaatatcaaactgatgtcaccaaatctaaacccacttgaagaccaatagctattacagttgtactacagaataggtcaaagtcaccgttagaaatattacactttattgaattctggagcagctaatctaccctcccctattgaccaatgacaagaatggaagaaaatatacaatggttaaagaaagagtctataaccactgtttgtttaaaatgttgaaacaactttcactgtactggtgaaacagttttaataccctaacatacacagtaatgattcattcttgtttaaaacaagaggtgatttcgacttgggattgggatttttattttttgagatggagttttgttctnnnnnnnnnnnnnnnnnnnnnnnnnnnnnnnnnnnnnnnnnnnnnnnnnnnnnnnnnnnnnnnnnnnnnnnnnnnnnnnnnnnnnnnnnnnnnnagatgatgttcaattttaatatacagcaatcaactcttagagggacaaaganatctgggattaggtagcatgngccccagcttt

SEQ ID NO: 329755 - DNA, 300 bp, Homo Sapiens
tttttttagaaaatgctgtgattttattcatagtatatacaccacaaaacagacactttccattattttgattacttcaaaatttaaaatctgcttgtttttcaattgatttttttcatgacagatgctgagttctgacccatttttttcccctgacagtatcaataggctgcccgactacatgatacaattgtttttagcatttaaatttaagactatggctcagtgtttgaaaaataaataagttaacaaaagagaaacattattaggaggaaaatgaaaacatattcaccacatgat

SEQ ID NO: 329756 - DNA, 413 bp, Homo Sapiens
  misc_feature (208)..(221): n is a, c, g, or t
tggcattgggcagctttcatctgtgtttattttttttcatataaaagttacatgtttgaaatgtctgcaggaagatgccaccatcagacaggttagctggggcatatatattacaatgtaaccctgtggaggtcgtggggccggagcgggaagatgctccccagaatcgggttcaggtcagacatggtgtgtgcctgcccctccttgnnnnnnnnnnnnnngacacctgcaggtgaggactgacctctgcaaggaacgagtcctccgcctgggctcacgtctgtctgtgaagactgattcccacaacccgcccgggccccccaaaggaacagacgagccacggccaggccgcagcactgagcacagagctcagcaataaccagggccaggcttagggggcacagggggctgcc

SEQ ID NO: 329757 - DNA, 404 bp, Homo Sapiens
  misc_feature (13)..(13): n is a, c, g, or t
  misc_feature (27)..(27): n is a, c, g, or t
  misc_feature (35)..(35): n is a, c, g, or t
  misc_feature (103)..(103): n is a, c, g, or t
  misc_feature (111)..(111): n is a, c, g, or t
ggcccgcttttcnagaaaagcccctgnaagtgccncccaagatgggaaaaaggcggggccccgggcccccggttggggcctgcattttgggagaagtccccanaccccacnggaccccaggttttcccccccaaggcttggctttgtgtagcctacctaacttcttggggcattcctgagagtgtgggcagagagaattatgtggcctcatcctcccccaaggctgtgcttgcagcccgggcaccttccccactttctagctctggagaggttggattttgcttttgtaaacacatgaatccttatgataaaagtctgtcagtcaaaaatacatttataaattatttaatgccagtcctcatgtaacctcaggtatcttcagcttgtggagaataaatctggtt

SEQ ID NO: 329758 - DNA, 484 bp, Homo Sapiens
attaaaccagatttattctccacaagctgaagatacctgaggttacatgaggactggcattaaataatttataaatgtatttttgactgacagacttttatcataaggattcatgtgtttacaaaagcaaaatccaacctctccagagctagaaagtgggaaggtgcccgggctgcaacacagccttgggggaggatgaggccacataattctctctgcccacactctcagaatgccccaagaagttagtagctacacaaagccaagccttgggggaaaacctggtccgtggtgtggactctccaaaatgcagacccaaccggagccgggcccgcctttccatctggaggcactgcagggcttctgaaagcggcccatcccaggagcctggcaaacacccccagagaccctcaggatgcgccacgcccggggctttgtcctgagaagctggagctccgtggcccagcttgtggatgggtgccca

SEQ ID NO: 329759 - DNA, 241 bp, Homo Sapiens
tttttttactgatgcaaaatatttattccaagttagttattttatgcagtagtttccccctcgagacttgtgataaccacatcttttaaatctgtaaataatgttatcaaaataatcttaatctttgaaatctcacaaaaatttatattttacaatccaccctgaatatcaaggctgcaagaataacacaacatttcctatatccaaatattttacagctgtacccaaaaagggaaaaggg

SEQ ID NO: 329760 - DNA, 693 bp, Homo Sapiens
  misc_feature (61)..(61): n is a, c, g, or t
  misc_feature (165)..(173): n is a, c, g, or t
  misc_feature (628)..(628): n is a, c, g, or t
  misc_feature (645)..(645): n is a, c, g, or t
  misc_feature (670)..(670): n is a, c, g, or t
  misc_feature (676)..(676): n is a, c, g, or t
tctctgcccctcatcttggtaattagccagcctcagatacttctgtgggccctgaagtggnctctcaaggtcagaccaaggttgctgatctcagtcccactgtcttcagccagctgaagctgtggggctgggctggcagcttctattgtcatcttgcttcaccannnnnnnnnctctctcttttcattctattttaagtttagaccaaaaaaatacagagtcatcccctacccccacccctctagagaccctccagctaaaaacagagcctgagttcagggacccaagtggtgagcggcgtcttttgggggtgagggagcttgggtagatgaggctcctggctgagccctccctgtggtgatcccagcctaagatggcccctcttccctcctggtgggagacagaggactggaccctgggtctcaggttccagcaagtcaggctagggacctggggggaggagacccatggacttcacccatactcagtgagggggctcctgccgtcctgacgccaccccgccccatcagcacttaagccacatgacacaaagtctgttaccgcacgggaaatgtttcacgcgctgggccgtgttgcatgggccttcccgggctgttggggcagccgnattttgttgaggttganttcgttgaaagttagggtgatttcnttttgncaggaattttcagggga

SEQ ID NO: 329761 - DNA, 342 bp, Homo Sapiens
  misc_feature (16)..(16): n is a, c, g, or t
  misc_feature (149)..(182): n is a, c, g, or t
agggccttcagaaatnaatcattatatatctgaaaagaatcaaaaggattttaaatcataattttcctgattacgaggtgatggttgaagcagctgtttccttctcttggtactcctaaaatctagctcattagactgtccccccaccnnnnnnnnnnnnnnnnnnnnnnnnnnnnnnnnnnacaaaatagagtagctataatgtgattctgtgggcttttttctctcttgatttaagcattctgtgcctctcctccagataaataacctcattgtttaacttgttagatatccctttataggaccaataatgaccataaatgaattatacagggtattgaa

SEQ ID NO: 329762 - DNA, 461 bp, Homo Sapiens
  misc_feature (387)..(387): n is a, c, g, or t
  misc_feature (410)..(410): n is a, c, g, or t
  misc_feature (423)..(423): n is a, c, g, or t
  misc_feature (447)..(447): n is a, c, g, or t
atatagaaagtcttagtttattttggtagacttgctttttataggcattggtttaaagtgattcttttcagagacatcctttgagaagttaaaattgcagaggcttacgctttcttttatttcaaatatgcatagtgattaaccaggaataaggattctcccatgttctgcctgttaagagcaaacagatctggagaacggaagcccaccctgcctcccttttccatctgaagcagtgcggggaggctggctcctctctttgttcccagactccaggggcaaggggcgaccatgctgtatatgctgtgccttggggggacccccagagggctgcgctctgtgggcctgtgcttcccccgacctgtgcacccggacccccagtcggcnacttgcttttcacatcagggaangtcagcctgctgnagtgaaattcaaaccacgattttnctttggacacaaat

SEQ ID NO: 329763 - DNA, 501 bp, Homo Sapiens
  misc_feature (17)..(17): n is a, c, g, or t
  misc_feature (36)..(36): n is a, c, g, or t
  misc_feature (41)..(41): n is a, c, g, or t
  misc_feature (47)..(47): n is a, c, g, or t
  misc_feature (55)..(55): n is a, c, g, or t
  misc_feature (463)..(463): n is a, c, g, or t
  misc_feature (471)..(471): n is a, c, g, or t
agaagaaacccctttantcccaacaaaaatcccccnacccnggaacncctaaagnagacgaacaatcccactgaactgtcaaactgggagccgtgggtttgtgtggatgaactctgtgtgagctgaaacagcctctgcagggtaaggagccccacagactgtattacagcccctgctcaccaagccccgacggccttccgcaactctgccctttggactacggaggaacaaaataatcgttcagttttctgggccacaaaatacaagatgggtctgggttgtacaaggagcttacacacggaggcaagaaagcgtgcaaacaggggcgggaatttttcaccccctgggtgagccagtgctcaagacatggaaggaggacctgagtcaccctcctggagtccacacgggtttgtgtttctggcttttatgaaccatgtccaactccagcttccgtcttctcctnagaggaanaagaatattctatgacgtcaatgatttttt

SEQ ID NO: 329764 - DNA, 329 bp, Homo Sapiens
  misc_feature (11)..(11): n is a, c, g, or t
  misc_feature (25)..(25): n is a, c, g, or t
gttatgccaantgcctcaaccaagncccccggcagaggaaaatattccagtaaatacctttgcctctcacgattttagtccgccctgatgtgttttgtatgttcagcacctctgtattttccttaatagctcctaggcctcataaattttgtcaccctctctgaaacttaggcccctggaaattggaagcaaatagtttgaaattttaacatctagttaatatttctcattggtgtacactcatttattcaatagttattaaaattctgatttgcctaattacaaaagaagtaattttcaatacatcaagattctttaggccaggcatg

SEQ ID NO: 329765 - DNA, 287 bp, Homo Sapiens
  misc_feature (216)..(216): n is a, c, g, or t
  misc_feature (265)..(265): n is a, c, g, or t
  misc_feature (276)..(276): n is a, c, g, or t
atgagccaccgcacccagccaggtctgttaaatttaaagcccatgatgttagcccggatcagtcctgtttctcaaggtctctcctacctgagatgtgctaaggaggagaagggggtctctctcttaatggggcagtacatgtgcattgctctcatcactgccttggtccttagctctccgctcaaaggagggctggcctatggatgagacctgggntttcattctctgaagtctcctgcatcaaatcaatgtccaatgccatggnttatttctttnaatttaagggg

SEQ ID NO: 329766 - DNA, 462 bp, Homo Sapiens
  misc_feature (25)..(25): n is a, c, g, or t
  misc_feature (50)..(50): n is a, c, g, or t
attctgtgaaaaaattatataattnataaaattttaagctgttgcatatnccttgcttcaacttagaatacacttacaaagaagaaagttaaataactttgaggtctaccatgaaaatttaatgtttttaatcattttgttgtatatttttatagctttctcccataatttcttgggttttcttcacagaaggcttaaatgagtagtcaagtatatatatgtttatttggaatttactttcctattaataacatgtttttcttttttgaattttggtagccaaggctcctttgaaagcatggtttatttgttccatttaacttgttctcagctatactgaagtatgattgacaaataaaacttgcatatatttgagatgtacagtgtgatgatacatgtatgtatacaatgtgaaatgattgtcataatcataatcaataattggtatattggtttaggaaa

SEQ ID NO: 329767 - DNA, 273 bp, Homo Sapiens
  misc_feature (254)..(254): n is a, c, g, or t
agccaccatgccaggccaaactatcttctctttctcagaccttgaaaatctgggctgctaggctttgctgatttcataaaccctaataattaacgactaacaataaaagatatctatttaaggtaatatatgaggggactgggcaaggatctaacctctatctatgtagatccaatcccaggtttctcttaaaggcccctgtaggaatctcttttcactgatttatgtgacatcaggtttcaatcaacattttncaattaggcatttgtaggc

SEQ ID NO: 329768 - DNA, 695 bp, Homo Sapiens
  misc_feature (27)..(27): n is a, c, g, or t
  misc_feature (34)..(34): n is a, c, g, or t
  misc_feature (42)..(42): n is a, c, g, or t
  misc_feature (92)..(92): n is a, c, g, or t
  misc_feature (601)..(601): n is a, c, g, or t
  misc_feature (630)..(630): n is a, c, g, or t
aactctgctcttcttgaacttcccagnaagtggnaaattgtnaaaacctggaccctgcttccaacccccccagggaaagggcagagccaggncctggggcaaggaagggagtgccccaaagatgatccctggagcccgtgcccagggaaagcagcccccagggcagctgagtgagcagcagggtctggcccaggactataaaggtttgccaagggtgccctctgtgactgcccgtgtggcttgctcagggatgcggcccgggtcggtcaggatactggtagatgtgcccagctggcgtagggagttcaggacagttggccggagagcgggcagagagcagtactggtccagccaggccagtgaggtctggcggagggtgtgcacacttgccgtggacaccatcccgttgaaggactcaaacagaggccggatgaggatgctgaacacccagaacttccagttgtgcagcgtacgggttcggacgtagtcatcaaacatgtctcgcatctggtcaaaacgctggtgtgtgatgggtacccctgtggcgggcagctgctgctggcacaggttaatggcggcattgagctcctcaatctcatcncgcagctgctgggcctcctcctgcaagcncgcacgctcctgctgtagcataaggatgtactcagctgtcttctgcagcgtggtactttgctcac

SEQ ID NO: 329769 - DNA, 410 bp, Homo Sapiens
ctttggcagtactccaccagttttcttcactccaggctgaaaggtcaacttttctgggccatgctccctgctgggctggtaaaccaactttgagggagaagggggaagtccagatatgtagtgtttgctatttctatgatgtaaatgctcccacaatggccgatttcaagctacaaacagtccaacaagtggcttgcaagttcctgggaaatttaacaattagctcctgtacatgactggcacaagctgctttccaaactcacattccgcatgcctcagttctgctcactttctattggtcaaaacttgctgtcagtgggtgggggaagtgtaccccttctcttaaaggaagccttgcaagtcttgtggacaatgaaacagggagagtttccctgattttcctcccggcc

SEQ ID NO: 329770 - DNA, 635 bp, Homo Sapiens
  misc_feature (458)..(478): n is a, c, g, or t
  misc_feature (493)..(493): n is a, c, g, or t
  misc_feature (587)..(587): n is a, c, g, or t
  misc_feature (605)..(605): n is a, c, g, or t
  misc_feature (619)..(619): n is a, c, g, or t
ttacaggtgtgagccaccacacctggccaacatgtggctttcagttcttacttgaagacagctgctctagctagaaacttcctatcggcatttgagccagctggtagagggcattacctcccccacccccaagaacacttcttggaagttacacacaatacataaacttcaatttcaaacagttgcttggtcccactagccatgaagctggatgggacgtaatattctatctgggttgtcatgggccaaattaacattttgagattctgttaggaagatgagaattggataatgggcacctctaacagtgtctgtcagagttgacatacattgtgtatctcctgcaccaaagcatttttgagatcaagtgttcttccagctgagcagaaatttggaaggctattcagtgctgcttagtgtagcagctaataatgttccaacttctatgatagtttgcnnnnnnnnnnnnnnnnnnnnnctagagacagagtcncgtttgcccagggtggtctccaattcctgggtttcaagcaatcctcccgactcagcctcctaaatgctgggggtttaccagggcatggaaccantgtggcccagtccatatnttaataggttttangaaggaatttctggcc

SEQ ID NO: 329771 - DNA, 415 bp, Homo Sapiens
  misc_feature (265)..(265): n is a, c, g, or t
  misc_feature (270)..(270): n is a, c, g, or t
  misc_feature (302)..(302): n is a, c, g, or t
  misc_feature (315)..(315): n is a, c, g, or t
  misc_feature (354)..(354): n is a, c, g, or t
  misc_feature (367)..(367): n is a, c, g, or t
  misc_feature (375)..(375): n is a, c, g, or t
  misc_feature (397)..(397): n is a, c, g, or t
ccacatgtttattttcaactttacttccaaactttatgatcacaatggaaggctaccaggaaaaagcattcttttagtgggttttctcatgaagatttaggaagaagataacttggcaattagagtaaaagtattaaaacacttaatccaagatctaggactagcatcattgtgttgtattggggcttaagatggttaattttctttcaggtgctttgcaaggcacttatgttcaagggctatctggggtattaaatcctgattncagcngtccaaagaaggttaagcctgaaattatcctnccaacatctattnagcaagcaagacttaatcatgccaaaaccaaccttttantaaacaggtgacntttaattnggaccttagttatattaggggntttttggttatatttagg

SEQ ID NO: 329772 - DNA, 541 bp, Homo Sapiens
ttactgagaaaaagtgaatttttaattatcttgtgaatctacttagaaaaacacacacaagcaatgttcacaactataaatttaaaccttttgcactaaaaaaacacaaaacaacaaacacaaaaccacaggcatgaactgtaaacctgtattaactatgaactggtcttaaggttaattcttagcagtcattcagtattttcctccttggcaactgtaatgttttagcaccggatgatctcccgcagaggtactagtaatgactggctgccagtgtagggagatgcttccatatacaccacttcacacacataccgtccactctcacacccacccagacgggaggcacattgagatggggtcacacgccgactctcagggtaccggaagttagggcagggtggcgcatatggttgcacatcttctatgtagtgcattcgtagaagaaggccagctttcgctcctaggcgtgctctcgtcctcagacattaatgtcatgatctagaagatgcagacgttattgcttaatactaatctatac

SEQ ID NO: 329773 - DNA, 464 bp, Homo Sapiens
  misc_feature (150)..(236): n is a, c, g, or t
tcttgtctctttttaggtgagaaatacagcattacaggtaatcagtcatgtatatgtgaaggtctatattatctgaaaatgaccatatgattgattgtgatcatgttatacatacacaatcttcctatctttctttttaacaaaaacagnnnnnnnnnnnnnnnnnnnnnnnnnnnnnnnnnnnnnnnnnnnnnnnnnnnnnnnnnnnnnnnnnnnnnnnnnnnnnnnnnnnnnnncaggtgagccactgagcctggcccatatgtttgtattttgtttatatacaatgaacttttaatgccttagaaatatttgttgacataatgggtaataaataacctaacacaaggatggaataccatcttagggataaaaagtgctgccaggttctattttcagtatttgaccctaccaataactcaatgtgctacaagctgtgcttgaggttttggttttttaaatgg

SEQ ID NO: 329774 - DNA, 576 bp, Homo Sapiens
  misc_feature (151)..(173): n is a, c, g, or t
  misc_feature (459)..(459): n is a, c, g, or t
  misc_feature (468)..(468): n is a, c, g, or t
  misc_feature (478)..(478): n is a, c, g, or t
  misc_feature (487)..(487): n is a, c, g, or t
  misc_feature (537)..(537): n is a, c, g, or t
ctttgtttatcctctctttcctacatgatatctgctattttctgattcctgtttctctgaaacattcaggaattaagtgacgaacgcagagaactgtaagccgccttggcctccaataacccagtttccttgtgaggctcttaacatctcnnnnnnnnnnnnnnnnnnnnnnnctgatgtggaaatcaaaggaaaaagaaaacaaagccaaatgttgtgttaatcccgccccgccccacaaacccttaaagtcttaaataggaaactagtgttctgctttctcattaaaacacagaaaaggctcgatacaatactaaggtgggatacaatactatgtcgcacaaacgtcgttgagtgaggggcctctgctcccagtccctgaagttctggcaagggaatcacctactttcacggggtcacctcacaggtgcggctgccccacagcccggggaggccatngcacacggncgggggcgtngaacatttncccgtgcgggtacaggctttgtgtcatgtgggcttaggtgctgatggggncggggtggcctcagggcggcggggcccctcacttaggtt

SEQ ID NO: 329775 - DNA, 494 bp, Homo Sapiens
ttttggataaaatttatatatccagctttattttggtattacccaaattcatgtttgagtgggaaagaaaaaccaaaccacattataaatttaaattttaagaaaaaacctttgacaggtcagaaattagtttatattttgctttacatacaccattctaaaaggaaggaaacactaactgaaggcctggttttacattagcatattcatgtaataagcacagattaagtttgaaacttcttaagcagatctattacgtattttctcattttcaaaaacatcttagaaaactgtctcttttagaggaatgaaaacagcctgacagactacatgttttcttggaatgaagtctcccccaatttcttgtagccctaacaactaaaaccatgagctgatttccacgttaaacatgcttctgtgcagcaatctaaaaacactctttcacaaccacgggatgaactatttcattggaatttaaaatttgctttttgaat

SEQ ID NO: 329776 - DNA, 430 bp, Homo Sapiens
  misc_feature (31)..(31): n is a, c, g, or t
  misc_feature (403)..(403): n is a, c, g, or t
cccatttataatttagctccatttacatttnggtggcatttgttgaatagctacagaaagaatgaaagtgcaccatcagagtgtaattaggtctgtgtgacccaggaagtgtctgttaaacagagatttctcaagggcaaagtggcttctaaccagtaaaagtcttatatttcatcaggagggtcattctactagcatcccagctgactggctatgaaactggctatgaaaatgacttctcaagaaactagaaagtctagtagtattgcagtgtcaaaaagagatttttgctgcagagatgggagtgtttgagcttatcattgagggattaagagccagagtgttagcaactatccttcaagtagccatgataatgtcaagaacctccatgggtaggagtacntggtattgcctttaagcactgaagttt

SEQ ID NO: 329777 - DNA, 482 bp, Homo Sapiens
  misc_feature (368)..(384): n is a, c, g, or t
  misc_feature (435)..(435): n is a, c, g, or t
  misc_feature (469)..(469): n is a, c, g, or t
tttattaacaaatttatttccctaattgggtaacgtatctcagtgcttgactcaagggcatcgtaataggtttccatactgcagaagaaggaattaattagaactgtttgttcttattccatatttacacttgtccaccagtcttgtaaacattgcccctggtttcctccgtcctccaggttcttctgactccccaacccacccccaaaataaataaatagaaagcagagagtagagcaggacgtcagtgggtccctttttatgtgcgttcacccccactgcaagccgcgtctcatggtcagaatgtggcagaatggggaactccaaagtctgctaagagattcctcattttaagagattttgggggnnnnnnnnnnnnnnnnngcctgtaaagggaccctcctttccacaggcaaaaatggggaatctggggtnttctttgccagagctcatgcccgggttgggtttntccattaggagct

SEQ ID NO: 329778 - DNA, 357 bp, Homo Sapiens
tgaatagcaaggcattgcatatttggcaggtttttaaaaattgtttgcagcaatagaagtaattgtttacaattggttcctgtttctgactggataaaactcatagtagcaaaaaaactttcacaataacagctcctgaaaagttgaagttcggtcataaaataaattactaattttaaattcataaaagaagtacctgactataactgccaaacatgaaggtatcaaagtactaatgtactcatgtccttgtacaactgacctgtatcagagtgcctcattttcaaaattaggactctctcatatttctacaatttccaaatgcattatcaattttttcattgtttttgaaatccg

SEQ ID NO: 329779 - DNA, 392 bp, Homo Sapiens
  misc_feature (244)..(244): n is a, c, g, or t
  misc_feature (347)..(347): n is a, c, g, or t
  misc_feature (358)..(358): n is a, c, g, or t
ctgtaaataatggcaaatagctaaaagcatactttattttaaagcaagagagatgcaaattcgacttgtgctttagaatgctcactctggcagcaagtagagaatggagacaattagaaaattattgtaacaattggtagcaagcagtgatgggggcctgaattaagatgaaggctgggtgttggggcggtggattccatgggtgcttgaggtgtgagaaaggtgggagtccccagggctgctnggcttctgtgactgtaaattatgggtgggagtccctaggaggaggggaagggttggagggagggaggttccatgggaggaaagatgaccaaacttcagttccnaaccaactttngagtttgactttggggccaccaaacgggaggtcc

SEQ ID NO: 329780 - DNA, 390 bp, Homo Sapiens
  misc_feature (302)..(323): n is a, c, g, or t
ttttttcaggaatgaatcatttattcaaacaaaacaaaaagctatataattttgagaatttcattttttgagagtaaaaactacaaaattgaacagcgaggaggaaaaaattctgacaatgtgattcaacattaatcctttaaaagtcactgtaacaaatttaaacataagtgctttatttttctattcacaaaactaattataatacaccacaatgaattttgttacggttttatgtgtgtaatagagggtatacatctccatactactagctaatttgtctgtttgttcaaaagagttannnnnnnnnnnnnnnnnnnnnngagacagggtctcacgctcttgcccaggctatagcataagggcacatcacagctcactgcagccaca

SEQ ID NO: 329781 - DNA, 559 bp, Homo Sapiens
  misc_feature (425)..(425): n is a, c, g, or t
  misc_feature (435)..(435): n is a, c, g, or t
  misc_feature (468)..(468): n is a, c, g, or t
  misc_feature (478)..(478): n is a, c, g, or t
  misc_feature (512)..(512): n is a, c, g, or t
  misc_feature (518)..(518): n is a, c, g, or t
ttactgattctatagccattttataagccttggtgattgctccttagacctttcatggttggaaaaacagtgttattagggtaaaccagagttgtgctaaacagcagctgccatcatggtacacacagagacaaaggttatgaagccttacccttgaatacaaacttcctcctttgttgtgttcaaaccagcatgattacaaagtttaagtattgtcttcatattatgagtctatttcaatggaaaaattaacagaatggttttctttttcagctaaacagaaagaatttactgacaatgtgaggcagtgcttttggaacaagggtactttcttttcttccgctttcttaaatatgggaaaggaaatttcaagcactgaaggcatagccatttcatttcaataactagctattatataccttccnatgataagcnatataggggagatatgaaatacctatgaggtcnacatttccgncctttaaaaaaatggccttaagaatccacattcngggcangcacgggtggctaaaggccggtaatcccaacactggggagg

SEQ ID NO: 329782 - DNA, 120 bp, Homo Sapiens
agattacttataatacctaataaatgtaaatgctacataaagagttcttgtattgttcagagaataatgacaagaaaaaagtctgtacatgttcaatacggatgtaaccatccttttttt

SEQ ID NO: 329783 - DNA, 294 bp, Homo Sapiens
  misc_feature (162)..(162): n is a, c, g, or t
  misc_feature (189)..(189): n is a, c, g, or t
  misc_feature (196)..(196): n is a, c, g, or t
  misc_feature (224)..(224): n is a, c, g, or t
  misc_feature (275)..(275): n is a, c, g, or t
aaacaaagttttattaagaacacagccatgctcattcttttacttattgtctgtgactactacaaaggcaacttgggcactcaagccaaaaatattactatctggtcctttaaaaaaagtttgctgaccgctattctatatattgaagcttttctctagggnttattctttattgcacctactactttngtccctncattgggggtcttcataaagagatgcanaataaacattttttttgtataatgggagaaagtattttaaaatttttgttncaaactttaactcaacttg

SEQ ID NO: 329784 - DNA, 348 bp, Homo Sapiens
  misc_feature (305)..(305): n is a, c, g, or t
gttttttaacattttaatttcaacgtgccagcatttgtccaaatgagatgatacaggctagaatgcacggcggaattccagactggactcactccataagccaactcatcactgcccgtgaacatgaattctggtcctcagagaagctgacattgtttccctgaacattcccgtggtctccctctgaaagccgatgaccatccaaccctgactcacctgaaatatcctacgagcatcgccctccgagactgacgattattaaccacccacacggaaaaagaaacagcccctccatcacccacatnttgtacacaaaaaaatgccaccactaatgccataaattcaggg

SEQ ID NO: 329785 - DNA, 434 bp, Homo Sapiens
  misc_feature (319)..(319): n is a, c, g, or t
  misc_feature (326)..(326): n is a, c, g, or t
gaacaggtaagttttatttggactttcaacttgttcagagagcacaggggcccctgcctcccctctccaggcccccttccccatttccactccctggggacgctcagggtacaatgacgtgtccttggccccttccccgcctgacataccccttcactcccctgctctatagaggggaggggtgcagggaggtggggcctgggaagagttggataagagcgggacatgcgctgtcggtagcggccactgctccccacccagagctgagacctggggagagggcgcgcagtgggagcagggtggattcattgtgggggtnggcaggnttttcgccgtaggaaggcttccccacctcagccctggggaccccctggcctcctgcttacccgtccttctgagggtacaactctgaggtagatttcacagaggaaatg

SEQ ID NO: 329786 - DNA, 512 bp, Homo Sapiens
  misc_feature (466)..(466): n is a, c, g, or t
  misc_feature (478)..(478): n is a, c, g, or t
  misc_feature (494)..(494): n is a, c, g, or t
ggatatccaagagggagaatgaaacttcctgggcttatctggattcttctgggctatagatctcaaatagagacctgttggttgctagggtagtccagacaccccttagatgtcttcataatagtcctatctaccttcaaaaaccatctctatatatggcagactatattaacagctgctgaacaaatcagctctggaggtgattccacatcccctggcattatgctctaatgctgctcatcggagaacagacagccaggataaagtggcaccttctggagtacactggagggggcagcccaagttagaggccagcattgctgacattctgggaatattttgcatctaaaaatgtttactcgttgccatgctggcagtccgcacaagctgtggaggcaggaaaacttggactttgaaggcagccttggaagagtgagtttcatggaggctcatgggtttttctccnttgttatgggantgctcgttccaagggncagggcagtgttcatgga

SEQ ID NO: 329787 - DNA, 299 bp, Homo Sapiens
  misc_feature (45)..(45): n is a, c, g, or t
aaagcccccaggtcttaactgtaataaatgatttaattttccccnacacgtctaccctcaaaattggcttcatgcagatttccctttgaatcctaatgcttggagaggaaaggggaggggaagtgggagggtggtgggcagggtggcttgaccctgtcagcctcccagggaactcgggaccacggctccccagcacaggctgaacaagtaccaggaacaaggtctatgcatctgcgttagatctgaaggccttggcagcacctcttcaattttaagagaatcaggccgggcgcggtgca

SEQ ID NO: 329788 - DNA, 659 bp, Homo Sapiens
  misc_feature (39)..(39): n is a, c, g, or t
  misc_feature (498)..(498): n is a, c, g, or t
agcccatctttttgcctttggcctgaatgggggaaatcnaaaattcctgaagaatgaactgcctccttttccttgaacaacaaaacaagcccacagaaacactttcccctaacataacaattatggccagccaggccaagcagaaaggccctgctggcctcggatttaaggccacttgaaaagagacacaaggtacatccctccttcccctgcagccccccacaggcctcaggggaccctgtttccccaccctttatcctcaggtccccttacccctgcccctccctactgctgggcaatgaggaggacaggagcgtgccttaaaggaccatggtttggtgggagtacagggtaggaggatgaggaaaacaagaagggagctggagatttggccaaggagcaacttcagaaggacaggagagcacgagcattaggaggaagccaaggcagcagcagagggaagccagttaagtcatgagagaccaacggcagtgatgnttttggcgcagatgcagaagccagagggaggcccctccaaccttccctggtgaggcaggctgggagcagagaaagggttaagagagccaaccccagacagagaacctcagaagacagggccgcaaggacaggcagggggaatggtctttctctgtttctcc

SEQ ID NO: 329789 - DNA, 442 bp, Homo Sapiens
aacaactggtcatcaatttattaaaatagttgacttaagcaagaggaaacagtgaaggctctcccacaatccttacatttataaggtttctctccagtgtgagtttttctgtgctgagtaagttgacaagacctggtgaaggctttcccacactccttacactcatagggattgtctccagtgtgggttcccatgtgaatattaaggtatgcagaatatctaaatccttttccacattccttacatttgtagggtttttctgacctgtgagtttgtatacgcacagcaaggtctgtggagtgaataaagcctctcccacattccttccattcatggagactttctccattgtgagttcttaaaatgtccctgaaggtgtgaatgattaatgaaggatttcccagagtcactgcaatcaaaagctttctctccctgtgccgaa

SEQ ID NO: 329790 - DNA, 612 bp, Homo Sapiens
  misc_feature (593)..(593): n is a, c, g, or t
gatatttaaacctctattattttagacaagactgtctagaacttaagtttgatctgtcagccagtactcccattaaattcagtgtagtttcacttgatagaatcagatatgttatcgaaatgttagcagcagcttcatcctccttctgattaaagtaagtagaaatgggatgttttgtttaataacagccatagtgtgtgtttagaccacagcggatgttgtagaccaggaccatagatgatacatgtcagtgctgtggaatgtgcattctctgagtgttgttttgtggtatcattgtctttcctgaatgactttctaactgtgcagaaaggcagaaaagtcatcatatgtatatgtcatatgactttataaaatatttaatgtgacaaaaagtggaaagaatctttacaaaccctgcaattacttttttaaggcacttttactctttggttttatcattccattttgctaatatttactagctttataaattacagtaagggtaccaaaaactccatcttgttattattttccatttttggaagtggaaaaagtacatattattttgcacaggttttatactgctaagtgcntggttggggtggtgaggta

SEQ ID NO: 329791 - DNA, 211 bp, Homo Sapiens
  misc_feature (71)..(71): n is a, c, g, or t
  misc_feature (137)..(137): n is a, c, g, or t
ttaggaaatagaggttccaagaacctttcccaaagcccaggagctgtgccccaagctctggttgcctggcnggccctgggaccgaaactcctcagctcctcaaatgagctggttactcgtcatctccctccagcacncctctttcctcatgaaactcccccaactcagagtcaacagacccagcctccggtggcaccacaggctccctcct

SEQ ID NO: 329792 - DNA, 208 bp, Homo Sapiens
aagcaatccactcacctcagcctctactcacatggatccacttacctggggactataggtgtaagccaccacacccagccagattttttataaatataacctacacataatctacatccaaaaggaagagggcagctggggctctgtgggtcacagctttacatagctaacataaccaaagctttttttggttgttcttcaatcaaat

SEQ ID NO: 329793 - DNA, 965 bp, Homo Sapiens
  misc_feature (836)..(836): n is a, c, g, or t
acattgttttaaagttttatttgcttacaaaagaaaatggaaataggtttgcgaaaacttatctgcatgtacaaagtaatccccgtagataaggagaggcaacccctggaacacactgctggataaatcgttcattaaaattatatctctttgcatcagagctggtggaaaatcattatttcacatgagttaaaaccactgaaaaactaaatctgtttcttaaactaccaaattcagaaagcttaaatccaaatgctgatttttggatacacatgaaaccagttaccaagtgatctcagagttggacagatcaattaaacaagaggtagtttctccaatattgtccctttttttcttatcagcaaggttattcctacagcaagtaggagtaagtgacatattctttgaacctctttgaattcttttcctgctagggacatatttccctcaaacacaatcatatctgtttgttcaattttaggacttgagagagaagattccagagttcaatttatttttcccaattcctctttgagctctcttctctggaaaaacaaattatctgacatgccattaagacaccaaagggaaatcattgctaccatgtcatagattaagggaactttttaaaaatatatattttttgttaataataataataatattaacattatccaaggaggagatttaggctgctgaaatgagccctgccccccaaaagtagcatacaaaccacataacaacattttctcaaacaagattccttaagagttcttgcagttggtcttcaaatttctcctgaggctatcagactccagggccccacagttccatgnttccagctcatcttggacaggggtgaactctggctgatctggatggggagctctcacaccataggcagaacatgatgaggggtcacaatatccaggctggccagaagaccttggggtccaggaaccccc

SEQ ID NO: 329794 - DNA, 426 bp, Homo Sapiens
  misc_feature (180)..(349): n is a, c, g, or t
  misc_feature (354)..(354): n is a, c, g, or t
  misc_feature (361)..(361): n is a, c, g, or t
  misc_feature (383)..(383): n is a, c, g, or t
  misc_feature (388)..(388): n is a, c, g, or t
  misc_feature (399)..(399): n is a, c, g, or t
  misc_feature (410)..(410): n is a, c, g, or t
tcagtgggtgtcgttgctacgatgaagactttggaaatttcctttctcttttaggacagggtcaggatttaggactcatagcctgaaagctcattacatactccttgtaaccatcagtccaaggttcagttcactaaagtgcatgttctaaaacaagagctatcctcattccaaattttnnnnnnnnnnnnnnnnnnnnnnnnnnnnnnnnnnnnnnnnnnnnnnnnnnnnnnnnnnnnnnnnnnnnnnnnnnnnnnnnnnnnnnnnnnnnnnnnnnnnnnnnnnnnnnnnnnnnnnnnnnnnnnnnnnnnnnnnnnnnnnnnnnnnnnnnnnnnnnnnnnnnnnnnnnctttngcctgtnaattcccaggttactcgggganggctnagggcaggtgnattcactttgnatccggggagggcaga

SEQ ID NO: 329795 - DNA, 445 bp, Homo Sapiens
  misc_feature (19)..(19): n is a, c, g, or t
  misc_feature (121)..(121): n is a, c, g, or t
aagggacaataatacaaangcaagaggaggcaacacccacaaaagcgggtaaattgaatgtgtttcctcctatgccacaaaagatgtgttgactttccacactcccaccagaataagaaantttctcatttgacactttaaaatttcctttaatatctatatttgtaatacacatgtacttttaaaacaaataaacaatttacatttcacacgattttttaaaaaatcaaatgctttgaaaaagtaacaacacaatcatgtctgaattatttcgaattcaaaattagtgtagtagaaattaatgcagatttcacaaaagtcctaagatgtatatccagaggtggttttaaatttggcatgtgtaattaattccttgagttcctaatgaattccttcatttcttttatgttctgagctctctttatagtgctattttgacactttt

SEQ ID NO: 329796 - DNA, 162 bp, Homo Sapiens
  misc_feature (20)..(20): n is a, c, g, or t
  misc_feature (28)..(28): n is a, c, g, or t
ccacctccttttgtttactnggaatgcncttttttaattagaaatgacttttgttttaatttgtaatacaattttaatgcccgtataatgtgcaggaacttcagaatagaattgctaccctgcttaaagtctgtagatgggaggctgggcacagtggctcag

SEQ ID NO: 329797 - DNA, 376 bp, Homo Sapiens
  misc_feature (109)..(249): n is a, c, g, or t
  misc_feature (256)..(281): n is a, c, g, or t
  misc_feature (339)..(339): n is a, c, g, or t
  misc_feature (344)..(344): n is a, c, g, or t
tggacttaacaagttttgctctttacaccaatgtgatcatctttgagacagaagctttctgtctaggagacagtggttccaaaatacacacatcagaatcaccttagannnnnnnnnnnnnnnnnnnnnnnnnnnnnnnnnnnnnnnnnnnnnnnnnnnnnnnnnnnnnnnnnnnnnnnnnnnnnnnnnnnnnnnnnnnnnnnnnnnnnnnnnnnnnnnnnnnnnnnnnnnnnnnnnnnnnnnnnnnnnttcttcnnnnnnnnnnnnnnnnnnnnnnnnnncacctttaggagattttaaaaaaggttcttaatttcagatcttgggggtagggccccnggggnttatgttatttttttaaaaagctttccccctt

SEQ ID NO: 329798 - DNA, 188 bp, Homo Sapiens
  misc_feature (139)..(139): n is a, c, g, or t
  misc_feature (178)..(178): n is a, c, g, or t
ttctttgccttcttgtactcagccttctaaatcattacacaatgatgtaataaagtatttctaaaacttttcaaaattcacagacttgtctctatctccaaaagacacataagtatgtatgtacctatcactgaaaccnagagagcaactaataattccaaccatgtacatcttcttntcttcttcca

SEQ ID NO: 329799 - DNA, 420 bp, Homo Sapiens
ggagaaggccgtctgtttactgcttctggagccctctgcgtaagtgcaattaggaacgagtggaaacaatgaggaggggaagcataagaatagcttggttgtgaccactggaacccaaagcagcacttgtcttgtcagcgctgtgttatcaatcaggaaggcagccgtggcttctcccgggaggcaggcaccaagatgaggaagcctgaagttctgggccctgcagagtcctttcagtgcaggggggcagagagaaggagcgtgaggagacccacatgggaggcatgcaggaggccctctgtgtatgtctatggaatgggcccctcaaggaggcgctaagcagcgggaaactccacccactggcttattctcacccctgggctcctccatcccctcacccttcatagagcccaaaacaaa

SEQ ID NO: 329800 - DNA, 777 bp, Homo Sapiens
  misc_feature (548)..(548): n is a, c, g, or t
  misc_feature (550)..(550): n is a, c, g, or t
  misc_feature (553)..(553): n is a, c, g, or t
  misc_feature (619)..(619): n is a, c, g, or t
  misc_feature (623)..(623): n is a, c, g, or t
  misc_feature (647)..(647): n is a, c, g, or t
  misc_feature (734)..(734): n is a, c, g, or t
gtgtgagccactgcgcccgggccagcattacttctgagctctgctccctgccctgggcgctctgacacggcagcccaccagcttcactccagggccctttgcttccctggcttccctttgtgcctggctttccctcattcttcaaaacatcttcctctgaaccaggctgggagtgggcagttggcattccagctctggagttggaaccccagttacccatctactttgagtcctcccacccgtggtgagacggcatcaccctggccaatgcaaggtgagagcaaggacacctgagccagtgtgggtttgagagtttaatctgtgctctggcgcccacagtgctgcagcccctcatgggccagagacagggtgcacggggactcccagcccctacccggcaagagaggcatcactgaggctgcatctgccatgcgctcctggtgtgactgcaccctgtcaggccagacccggcttgagccaacttagccaagccagcgtcagtgtcaccagcctcatgggtggagccaccctcatgctgctctgcaacncnctntggaacccgatatcccaggcctgggaggtgctgaaggctcaggacgcctcttattgctctgaagtntttntgaccaagtggagtgctgtgactntggggccaagagagaagctgccagggtacagggaaaggcgttggtagggagccagccagaaggtgcagcatcccgggatggccctgntgagtttgtttcaggctttgaaaggtcagcagagcaaggagtt

SEQ ID NO: 329801 - DNA, 841 bp, Homo Sapiens
  misc_feature (797)..(797): n is a, c, g, or t
tcctagcaaagctcacttttaaatctgatctcaacagtcattcaaaggtcagcaacagatgatttagacagtaagattcggattgatacaaatataattgcttatgatggtctaggctcccgataatggcagactagataatttggatcaccagtgagaatgactagaaaacctgcacaaaatacagaaattgtctatatgaaatgctagagcaaatagtaaagcattattggacaggattgggttggagttggggctaagaatggtgggggcctttttctccccttgaggtatttgcccagagattgaggagtaattttgataggctcacagggctgagaaatcacagcttagagtgcaaggatcatgcatggtgaatgtgtctccttgtcttgagttgggaccctgaaaagtctgcactattatagtaaagataaattagctagtaagttgttccctcacagggactaaagctcagcaactaaaattggattaaagtgaaatcatatcgctggctccctcaagtttccttgtagaatcaaatgtaaatccttgctagaaagaaaaagaaaacatctaggcctccaacttattcaataatgaattttgcaaaaacagtattcacagaattagaaataaccaggtttgttaggagattagacaatgcgaacatagtgagaccccatccccacaaaaaattagctgggcaaagtggtgtgtgcttgtattcctagctacttgggagactgaggtgggaggattgcttgagcccaggagttcaagggtgcagtgaatangccactgcactccagcctaagtgacagaatgagaccctgtcttt

SEQ ID NO: 329802 - DNA, 183 bp, Homo Sapiens
  misc_feature (123)..(123): n is a, c, g, or t
catcttacactttaatatccttactgttccataaaaaatgttttaaataatgcccacctaataaaagaatctctcatatctttggtgcagcaacaattgggtcacatggctttcacatgtgantattaggcagggtttgaaaaaagagcataaagttttttggagagtttaattacatcttat

SEQ ID NO: 329803 - DNA, 371 bp, Homo Sapiens
tttgcatgtactgtaattttatttttaaattatcttttaacaatacacttctaattttgttcctagccacataattcaagttaagtgtttccataaacttcataagtagacttagagactttattcactttttcagggaatagtgaacatatgaggctcttaaatagtaccagattataattatttaatctaccctataaaaggaaatttataaaatattggaataaagtatccttttaaatgtattattttaggctacaaatgaggaacataaggactcaggtatttttaaaccataaccatcaataaggagagggacagggccgggcacagggggcttcacggcctgttaattcccaggcactttaggg

SEQ ID NO: 329804 - DNA, 461 bp, Homo Sapiens
gtcccatttttatattgatcctggatcccccaaagagaaacgctacagaacacaacagtgcaatgattttaccacatatttcattgcccaggcaaccccagagccaatcagccctttctgagatcagcccatcccccatgggagtcttatctcctcagtggggaagggtgaggacatctccataccttcccaggtggccaagagcatgctcttaatccagacacacaaagatccaagtatccccctcagtgccatttagccatccccaaaagtattaaatgtatttcctacctagttatattacacaccaaagttctctcataatgtgaagtaatttctgatacccccaaagtaaaaaacagataatgcagtgcaaaacagaacagagccatagattttgagagggatctatccacttttaataattctcggggttccatgaggaaaatagaggtttttcc

SEQ ID NO: 329805 - DNA, 442 bp, Homo Sapiens
  misc_feature (221)..(221): n is a, c, g, or t
acccaaatggaaggaaaatgagccaaatcacccacttgcccaccttagttatgaatttagcaggacccaggagaataacagagtggctagaaggcaggaaatggtggtggctgtggccttcagatgacactgctttcctcttcagtttgatggcccacccacaagcaagatttaatttataaaccctgcccatcatatatggtgcccaatcccaaataaanacttatgctatttttcttttatcaatgaatttaaattcttttgaagaagtagttccaattctcaatttcttcagtttgaaaaactatccaaaaatgacagtagcctcaactattctggctaacatttaaaaataaatatgtattctcattatttcacttgacaagtttcaaagtagagtataaatattcattttaaccagcttactaaatatggatttaat

SEQ ID NO: 329806 - DNA, 275 bp, Homo Sapiens
  misc_feature (239)..(239): n is a, c, g, or t
gggaccagcttagctgcaacgttcttgtaagtattatttccacaggttccaacaggatccttcaagtagggtgtctggcagccttaagagtcaaaaagaggtaacacagtggtagtttgaataaggtgacaccacagaaggtcctaatgtttaatgtttaagggaatctctttaaattctactgtttacaaagatggtttaatttattgtgttaagtttcaagtttaagttttgagccnagtctatggtattaaccaggttactcttgattaacc

SEQ ID NO: 329807 - DNA, 412 bp, Homo Sapiens
cctagtatttggaaccattataacaactccctcggtacttcctgggttggttcctcctacacttggtgacacaaacctttgaattcctgaacaggctgtcaaagctgtctcttggtgacttaaaacacttatcacgtggttatctggggaagcaacattaagtcactgggggtaagtccaaatcactacttttcagggctttagatacgtgtgatgcatgaggaaatatgcacatgaaatgtaaagtttatgctcacaattcttaaatattacagtatgacctatatgtgttatgaagtggtcatttataattgccgtgagcaacagaatcaacaaaagcactcaactttaagcatggagaaagacagagggctgaaattttgtcagttcatggtgttacactgccattctt

SEQ ID NO: 329808 - DNA, 532 bp, Homo Sapiens
  misc_feature (109)..(109): n is a, c, g, or t
  misc_feature (113)..(113): n is a, c, g, or t
  misc_feature (171)..(171): n is a, c, g, or t
  misc_feature (449)..(449): n is a, c, g, or t
  misc_feature (493)..(493): n is a, c, g, or t
aactgtgtcaggcaatggatttgaattttaagtgtattaatagctgtgctctgtgtcgtaggcaaaattccactgaaggagcctctgtgccctgcagccggcagcgcgntganaggcattgtgttggccaaggaatgcctgtcatccaggtgccctgcagccagcagcggncttcaagcatgtgttggccaaggaatgcctgtcagtcatccagggctctgggaggggacgagagttatgtccccaagaacaggaagtcctttacaaagcatccagtctcttcctgtcctccccttccctaggctggggtaggggttagagactggtggcccaggaggtcacctgccttgcccgggatttccctctttcagtgggccagcaggacttgggcagggcaccagctcgccaaggttctggggcggggttccagctctcctgcctgctccttngctctgctgacctttcacaggcctgacagcagactcagcagggncatcccgggatgctgcacctttctggctggctccctacc

SEQ ID NO: 329809 - DNA, 468 bp, Homo Sapiens
  misc_feature (429)..(429): n is a, c, g, or t
caatttatgtttttattaagtgccttgaaaaaatgaagaaaaatgtattttccctttatgtaaaaattagtgaatatcttatgaattaaggcattcctctttccctaaccccgatggctccattcccaagtaccccaactcactgctgatcctattaaaggaatgagtcctgctacccgagtggtagtcatagccctagatgactctcaactactcttcaaagggaggcatcaggaatagaatgaaactgtgtgaaggataagattgttcgcatcaagatccaaatcttgatttcatattaacgcctaaggattgcctgtgtgctgggaaatatatttggaaactcaaccagtatgcccagcctattggcatattcattgtcaggaccatttttggctggctgtgggtcacccacgattttcatttgtnttattacccgggcgaaggggaagggtgaatggggatggg

SEQ ID NO: 329810 - DNA, 453 bp, Homo Sapiens
  misc_feature (332)..(332): n is a, c, g, or t
  misc_feature (395)..(395): n is a, c, g, or t
  misc_feature (408)..(408): n is a, c, g, or t
  misc_feature (421)..(421): n is a, c, g, or t
  misc_feature (433)..(433): n is a, c, g, or t
aacattttaatctatctttggaatatttaagcaaatattaaaatatgtggttacctaacatggctatatattaaaatataaatgttatattaccctgtaacattttaaatgatttactaatctattatgtaaagtaatataagaagccagtttagtggtagaaatgttaattttattttaactttagtatttcaaaacaaagatgttatttttgaactcaaagtggtagaagcagagaggaggtgacaaactgaggaaccttttgattttgttgggggtgggacttggtctgctgttatagctgacattattactgtatctcaatggttttntgagggttttggggaaaattgttttaatgtttcactcccaagcgctggaagttactccagaantcttggccgttcngttcccattaacnttggcgcttccnttttgaagctacaacagtgt

SEQ ID NO: 329811 - DNA, 623 bp, Homo Sapiens
  misc_feature (24)..(24): n is a, c, g, or t
  misc_feature (137)..(137): n is a, c, g, or t
  misc_feature (473)..(473): n is a, c, g, or t
acatcattttttaaaagttgaagncaggaccgcatactcaggagaaagatcacttactccattactaagccccagagatgactcaactggttcttgcttgatgtgcttaactttgtcttctttttctgtctttggtntctttcctttcttagaaggccgttctgataggggcagcattcggtagaccctgaaggcattatttcctttctttatgcttttatccttgacttcttcaatatcaggcaaggaattcatggcgcatctgaaattcgccttccatgttttgggatcaggtttatctactcctggttgatgctttcctgtatggattgcccagtttctaaagagtggtgcatctttttccacatcccacccatgtctagccgcatgcatccaggggatctgaaaaatcttcttttccttgttaagccacttgagccccgggatcgtgttggagtttatctgctcctccnagccactggcgcatgcgcatcctttccaccggcatggtgccctctcagtgtgcttttttcacgctaccaatacaattccgcaaggtataagtgttgctagggtgtgtgaaatggaaatgaaagcccgtcagttgaataatcgcaggagca

SEQ ID NO: 329812 - DNA, 634 bp, Homo Sapiens
caggaaaagaagatttttcagatcccctggatgcatgcggctagacatgggtgggatgtggaaaaagatgcaccactctttagaaactgggcaatccatacaggtactaaaactccctgcggcgtttatagaggaaggcactcttgcttagttttgtttttattacacataaaatagcctggcttatgacctcatgaagatggctctgaaaaacctgtgacttgtccctaggcacatccaggacacatggggtacaaactgcagccctcagaagtaatgctcccctcatcccatacactcttagtccttcaatttcctataaatgtggtattctaagaagttccctgggtgttacccggggaatagaaacctcagttgttctgatgctataaactttggtccaaatttatctcccccccaaaaagggtagtcagaaatacctgtatttattacaacctttacgtagggagctgtttacaggaatggactttgttggagcgtcagatgaaaatgaggcactcagcttccctctgcctgttgactttgcagcctctcagtcttctatatttttcttacgctgatgctccattcttccagcatttatagtttcctcaagctgttcagtagaaccagg

SEQ ID NO: 329813 - DNA, 529 bp, Homo Sapiens
  misc_feature (480)..(480): n is a, c, g, or t
atgctgccctgagctggaataaagcaaggtgcccagcaagaagcattggattgcatcacagagaggattaaaatgcccattatgaggtaagactcgagtcaaagcagaaggaaaagaagacaggctgtaaaagaaaatgggctgcaggcagtaaaatattgattgcaaagaactgaaaacaccacggcatccacactccctgccctgctctgcacgccttgaggtctgccaatctcctgacttcataatctactctctctctacagctaataatgcttcagccactctggtcttcctcctgggctttccaacacaaggacacttgattcctgacttgggtctttacagctgcctttcctctagcgaaccctatgctccatacaccagctcccagccatcttcacatttaggtctcagctcaaatgcccagtcttcagggaagcctttgttggcatcctagtgaaaatagctcccctcccnaactggacactttccattgcattgctctcatgcattttctttgagacac

SEQ ID NO: 329814 - DNA, 444 bp, Homo Sapiens
  misc_feature (23)..(23): n is a, c, g, or t
  misc_feature (28)..(28): n is a, c, g, or t
aattcaggaagaaaaataactgnccctnactgggttccaactgctgttcagtacgaaggcaagtgaacacatgggtctttacttctagctgcttttgaaaagagcagatcaccaccatccagtgcagttgtataacacaggtggggcagggagacttctctcgctgccattaattagcctacttagtttgttgcattggttagctgtcacattgggaggtcaacagcagacagtagctggaaaaccgtagtcataacaaatacagagtggcagccactcctgaagtggtggatggtgccagttgcctctagcagccatgtaaacccaagtcaatacatagacgctttagcttgtgcctgcactgtccctggaattcctgtcacatgagagtctccaggctgaaggaagaaatcaatatttcttgactccaagatgggcctgtca

SEQ ID NO: 329815 - DNA, 625 bp, Homo Sapiens
  misc_feature (69)..(69): n is a, c, g, or t
  misc_feature (201)..(201): n is a, c, g, or t
  misc_feature (526)..(526): n is a, c, g, or t
gctgccctaaagtatttgacaaacagaggccttacccctcgtgaattcaactcttacggagctcgaagngttaatgatgctgtaatgacaagaggcacttttgcaaatatcaagctttttaataagtttattggaaaaccagctcctaaaacaattcattttccatcaggacagacgctagatgtatttgaggctgcagantgtaccagaaagaaggtatcccactgattattttagcaggaaagaaatatggttcaggaaactccagagactgggctgccaaaggaccgtatttactgggtgtgaaagctgttttggccgaaagttatgaaaaaatacacaaagatcatttgattggaattggcatagctccacttcagttccttccaggagaaaatgcagattccttgggcctctccggtagagaaacattttctttaacatttcctgaagaactgtctcctgggaattacattgaatatacagacaagcactggaaaagtattcagcgtgattgcttcgtttnaagatgatgtgggaaataacattatacaaacatgggaggattattaaactttgtgggcacgaaaattctcatagtatctacttaccatagattaccttt

SEQ ID NO: 329816 - DNA, 565 bp, Homo Sapiens
  misc_feature (393)..(393): n is a, c, g, or t
  misc_feature (418)..(418): n is a, c, g, or t
  misc_feature (457)..(457): n is a, c, g, or t
  misc_feature (462)..(462): n is a, c, g, or t
  misc_feature (487)..(487): n is a, c, g, or t
  misc_feature (502)..(502): n is a, c, g, or t
  misc_feature (520)..(520): n is a, c, g, or t
  misc_feature (529)..(529): n is a, c, g, or t
  misc_feature (540)..(540): n is a, c, g, or t
ttttttctaccaaagatcacagaccagaaaaagttccatctaaaatatcatgcccaggaaagcacatgggatcaaaagtaaaatagcatcatgtgtgatctcgtcttccagcgtgccgtcagttccccgaatccgtgtgcacacgtgtgatctcgtcttcagtgtgccgctcagttccctgaatccgtgtgcacactgcgtatgtgtacgcgcagatggctatactgaactcaacaagatcttggctgtacataaatatttgtaaaagagaccctttgcacctttttactgtaatgttgagacttcattacttaaatgttctacggaaggttctggtgtggttgttggagccggagggagcgtgtcagcacgtgctgagggcatggggcctgnccctgggaccccattcacaaacttnggcaaggggttccaggttttcaggggaaaagccccgggnttggngcatcccgaaggtctctgggggggnttttccaaggtcctnggaatgggccgcttttanaagccctgnagtgcctccanatggaaagcgggccggcctccggtt

SEQ ID NO: 329817 - DNA, 372 bp, Homo Sapiens
cccggtgtttgttggtaatgtgtcctgtggtaatggcctcagccagatggtgtccatgggatgggaaataagaggagtgggtaatttagataggcagactttcctttggtttcccatgtatttgagcctcctacagggtaaagtggtagagtgggtgggttgacagaggaagaacaatgctcaggctggcattccgaggaagaggatacttcccacaatggagtgaggtcaggctcacttttcagagataagttcattcattccttattttcaagctcctaatcaacagttttcctggtggcctagaatttggagatttcatcctctggattttcagttacctttgtttttgcaaacatttcattcatccta

SEQ ID NO: 329818 - DNA, 469 bp, Homo Sapiens
  misc_feature (84)..(104): n is a, c, g, or t
catttgagctgtcaaagaaaggtttcaagtgggttgggcagctggcttcaactctgagacagttttacttattagagtgaagannnnnnnnnnnnnnnnnnnnnattctgattcccccggctgttctgaggtcagccatggggtaaacatgaagtctgaggctctaggtcatgtcagaacatgaaggctttgcaaaacttatttctataaagaattatggctgttgagaaggaaccagaggaagtgagaggaactgagaaattgcttaggggaattgttgtgaggctggattccaacgctgggcagaaaaatacttaggaccagtccaggggagttgggcaatttgaagactcaggatttctccaggggtaggagggacctggcagagggcctgtattctttggtgaggcctggctgactgcggactgtcatttccctccatctgctttgggctgcattctattctttt

SEQ ID NO: 329819 - DNA, 450 bp, Homo Sapiens
  misc_feature (78)..(78): n is a, c, g, or t
  misc_feature (85)..(85): n is a, c, g, or t
  misc_feature (423)..(423): n is a, c, g, or t
tacttcatccaccttgagatctgtagaaggcctctcgttcatcccaccaagagcaggactggacagatgaaagcatgngcttacnaggaggccaacacaataggaggtagggctttgggaagacagcataggtttcaaaagaaccaagaagctgttgaaaaggagagcagatgggcagggaagacaagtcccagatagaatgccctttgcaacctagggggagctgaccacagtgtgcatcctgacactcgaagacaaggtctccatcagcagattgcccaacagaacaagttcagagcccagagatcccagttccagatctcagatctcccacaccctgtgggctctgtgctgctttcgtcctgaaacaaagtcctttagtaaaggactctttaaattcactccatctgtgctttgcttgcnaatagcagggtgcgtctgttctctgcc

SEQ ID NO: 329820 - DNA, 482 bp, Homo Sapiens
  misc_feature (295)..(340): n is a, c, g, or t
  misc_feature (413)..(413): n is a, c, g, or t
  misc_feature (434)..(434): n is a, c, g, or t
  misc_feature (451)..(451): n is a, c, g, or t
ttccattgtgcacataatgctttatgtacctgctgttaaaaattggaattaaacagaagtgggtaattagtaaaggctaaaattaaattgcagaagtaaactggcaaggattttttgtgcatgtcacattaaaatcatcacctacttttcaacgggagagatcataaaatttagccaactatttgaagtatcctttaataaactggggtctgaacatttgaaagacaatgcctatcctgtttttgtagatttttttgaaattaaaactttgtttcttggccagggggatgggtgnnnnnnnnnnnnnnnnnnnnnnnnnnnnnnnnnnnnnnnnnnnnnngcagatccacttggggcccgggggattccaagatccaaccggggggcaacatggggcaaagcccccattcttnttaccaaaaaaacccaaaaantaggccggggtttagtnggccttgaggccgttaggtccccggctactc

SEQ ID NO: 329821 - DNA, 480 bp, Homo Sapiens
  misc_feature (408)..(410): n is a, c, g, or t
cgaggttctttgtgtttccctactcaaccagcaaaacatgaaatgctgggaacaagctgcccaggagctaaaacagccgatcaaaaaagccagtgaaatgtgattcgtattatctgtactggcccagcctcttcagacacaagctgcaactcacatggtaagcttcctggctcaacaaagccagcggctgttctctggcaaaagggctctccaacggggaagagcaaaccccagaatacattgggccaagaatgctgccaggagtcagcaaaacaccccaagtcctttctttcttcggagagaggtgtatggagaagccattagaatcctgcaaaatgactttcacctgcccctgactcacacaaattcattctaagatatttcattctaagagagccactttccccnnnttttacacctcaccaatcagggtgtgtcttacaatcaatggtgtgtcacagtttaatcggtaggtttttt

SEQ ID NO: 329822 - DNA, 339 bp, Homo Sapiens
tgtgagccaccacacccggccacagaaggaaggaatttttaaatgaggaaactttacagagttttctggaatgaaataaagatcctgtatcaacttcaacacttgcattttattttccttaatcattacataacacattcaaggcaggaatgaatatccgttttgataggtggggaaactgagactgagggaggcaaagtggtctgcacagggccacaatcatgaggcactaagccagccacgggcacagctaggaatccagccccaagtctttctcgttctgaagacgaggttctttgtgtttcctactcacagcaaacatgaatgctgggaacaagc

SEQ ID NO: 329823 - DNA, 400 bp, Homo Sapiens
  misc_feature (162)..(162): n is a, c, g, or t
  misc_feature (220)..(220): n is a, c, g, or t
  misc_feature (222)..(223): n is a, c, g, or t
agactgcatagggctcggcgtggggcggagtgctgggcaacatgtgaacagggctgtaattccttctgctctttcaatttcttataaatttcctgctcagaattataatgaaaagtccagaatcaggatgctagaaataaaatattttaggcagccctctgnaaaatttatcctattcaaggctgttcccatgtttggcaatttaaaactctaagttaanannaaaattaagcatccctgttatagggacaagaatgcagaaaaatagcctctgctctaatgaagtagatatgttcgatgttcatcagcatccactccaataggagtatagattttgcttgacaagtacaattccgggttactctctttctcatgtgtgttgctctgaaaccttacttgt

SEQ ID NO: 329824 - DNA, 419 bp, Homo Sapiens
  misc_feature (352)..(352): n is a, c, g, or t
  misc_feature (358)..(358): n is a, c, g, or t
  misc_feature (368)..(368): n is a, c, g, or t
  misc_feature (378)..(378): n is a, c, g, or t
  misc_feature (405)..(405): n is a, c, g, or t
taaaatatgtataacttttattaggagggaatttgctcatgatacaaaacatgaagttaaaaaatacaatagcattctaattttattttttaaatatatgtacttagaaaaaaggccaaaagaaaatgcatagcaatggttatttctgggtgattagttaatggactatttcttatacctgtctacattttcagggttttcatcataaacacacattatctttgcactaagcaaaaataataagtatttttaagggaacaaaataacattttaaatacgttttagggctgggcacgggtgggcttacaccctgggatccccagcacttttgggagggccaaggcaggcagantcaccntggagggtcnagggagttcngagaccagcctgggccaacatgggggnaacccccatctcta

SEQ ID NO: 329825 - DNA, 533 bp, Homo Sapiens
  misc_feature (24)..(24): n is a, c, g, or t
  misc_feature (479)..(479): n is a, c, g, or t
  misc_feature (519)..(519): n is a, c, g, or t
tccacgaacgttgtaaaaacgaanggcccagtgcccaagccaaaaattaccccctcaactaaaagggaaataagcttgcggcccgccttaattaaatgagtgcatctgaggaactgccattttaaacttgaaaatttaattttaattggaaatagccacatgaggctagtaactgtaaagaactgtgacaagcctgagatgtctccctatttgcaagctgacaaattagcctgctgacagatgctggcagaagacaggagcttcctggatcagagacaagggacttcattactcaaagcacagcgggcagccagcttgagtttcatacttgcgtcatttctgcttgcctctaagtcttatggggttttgtgcaaaagcatttaccattatctgcactgttttgtatgatgcacaagctttcagagagggactatatatttcactcctcattggtatctccagttctcgtggccgaattntgggcctcgaggggccaaattccctataggtgagtccganttaaattcggaatc

SEQ ID NO: 329826 - DNA, 578 bp, Homo Sapiens
  misc_feature (18)..(18): n is a, c, g, or t
  misc_feature (29)..(29): n is a, c, g, or t
  misc_feature (47)..(47): n is a, c, g, or t
  misc_feature (437)..(437): n is a, c, g, or t
aggaccaggattacgaanttaatacgacncaccaatagggaaatttngccctcgaggcccaagaattcggcacgagtgccagaaaacacctttggagtatatggatttccttcatatttcctagttatttcccttaaggtaggttccccaggtatgatttttgagtcaaaggatatgagagttttttaatcttgaaatgtggttaaattgcttctcaaaaggatagtattactagtactgtttcactgtattcttttagattgggtattagtgctgttttctccttcccccaacttactaggcgagaaaggtacttcactgttgtggttttagagtgcatttctttatgtaacagttttttcatgaagagtaaaattgattataatgtcctaagacatggaactttaaaaaatgtgattattacttttaaattaagncggccgcaagcttatttcccttttagttgaggggttaatttttagccttgggcactgggccgttcgtttttagcaacgtccgtggactgggggaaaacccggggcgtttaccccatcttaattcgccttggcaggcacagg

SEQ ID NO: 329827 - DNA, 464 bp, Homo Sapiens
  misc_feature (335)..(343): n is a, c, g, or t
attttttttaatatacatctaattttttaatactcaatgcacaatcaacatttctgatcaacagtataaaccatataaaagagaattctgcttttcatttgtacaaatactgctttcatcattgcaaaactttcaaggttaaaacgtaccatatgttgaagctataaagctattgcttgaatgtttctaaaacgaagttattgctgtctgttgttaatcggttacattgtcacctctaataccagtcatcaaatccataggatctcttaatttccaagagattgtattgtacagcaagattatttttgtggccaaatcaggtcatagggattccnnnnnnnnnaaaggataaggtaaatgccatcccggaaatgttatggcaccggattttaaggttttccccataggttttatctggctagggtgatagggttgggaggcttcttaggtggcttctgctgggg

SEQ ID NO: 329828 - DNA, 429 bp, Homo Sapiens
  misc_feature (17)..(17): n is a, c, g, or t
  misc_feature (29)..(29): n is a, c, g, or t
  misc_feature (77)..(77): n is a, c, g, or t
  misc_feature (159)..(159): n is a, c, g, or t
aggtaaggccccccggnggaggaaatgtnaagcagtagccccaacaatatccgcccaagattttttaaaatgagcanttatataaatgaatgtatgtaaacaacatgtagtgtgtaatccaataaatgctggcaccccccgagagcctgtgacattatnttttttgttttggtaaatttgttggtagtgttccttccccaaatatattgtttaatataaagtatgccttgaattaattttattaagagaagaactgcatattattccattcaataactgaaaaacttccaatgagatttgataattatcattactcaaacacagatggactctgtatcgttttgcagcacacactcacctatcagtgatatttgcatccacctcatattaagtctgtatcaaatacttatatatccccaaggtcactca

SEQ ID NO: 329829 - DNA, 423 bp, Homo Sapiens
  misc_feature (243)..(243): n is a, c, g, or t
  misc_feature (379)..(379): n is a, c, g, or t
  misc_feature (411)..(411): n is a, c, g, or t
aggttaaacaagtattggacagaattaatcaaatctaaaggaataaaataatcaaaaggaaagaacttgtcatcagataaattttaaacataattctaaattattttaaatgctctgtaacaatccacttgctgaaaagaaaaccttttaaagggtttctcatgatatatatatatagcacatattttagctcacaatactatgttactaatagttccttgtttttgtgacttaacatttggnagaccaaaaaaatttagaaaaaagatccttcctcttctgaattatcagttcaaattgcagatttaagtaacatacacaatggaatgggtttgttagggtcaaatcgtatgacattgtcaatatggcatatttttgnatatacaatactaggcatttcatttactttcnttttttgtagga

SEQ ID NO: 329830 - DNA, 643 bp, Homo Sapiens
tttctttggagaaaagcttaaaactttattaagatattttactttaaaatatctaatataaaaacagtttgtgttgtttcagcttatcttcctttaaacctgtgatttcccttcacctgcttctggcattttaaagtgctctgcttttggtagaatcttccccttgacatcagtaccaccttcacatccatccccagtctttgtctgacatagctcctggagatcggcttccaggtcaggcacttgaatctcagctgcaccctgatcatcttctctcttctgatcaggtgtaggattccgacttttagtgggtggtttctcttctttaggctcttcatcagtgggttcaagcatagccccaatcagctcaggaggctgtaaacttcttcttggcctaggcctatatgttgatcttcctcgccaactcatatttcactatttcagttcctgggaggactggcctgcggacctataggctgcgtctcagtaggagagaaagagtccagacggctggaacgtgcccctcacactctcacagctccccagcggtcaccacgtgggcaaaggggtcgaagggaagatgcccagtgaacatgcacactgaggcaggtgtccaaggaacatgcacactgaaagctggtgc

SEQ ID NO: 329831 - DNA, 550 bp, Homo Sapiens
  misc_feature (517)..(517): n is a, c, g, or t
cctgcactactctgtcaaattaaaaaatataatagctatctttattctcattttaaagcatgataatcatcaaaatgttgaagtttatcacagttctacattaaaaataagtcatttttgtaggtgagttatccaatacagcaaaggccatcaaagagaaagccaatacttttcatggagagctcagagccttaatagatcccagcagcaatgcttcaaccattcccaactccatgttccttgctagatgctcctcaccccaaactcctgcaaatttcaagaatttctgtgtatgtgtgtgttaagggaggagttttaaagtatctctgtattcaacaagatacgtcagcttgtaagcagcagaaacctacttaaactatcttacatgagaaaataacattataaagacatagggagtgtttctacaccaagagctgggaggtattgtttgggtttccatgaagggttaaaatctgtaattccaaaagtaggacttcagggcagctgccacattcantctgtgtctttcttcttctgggtactgtgggga

SEQ ID NO: 329832 - DNA, 436 bp, Homo Sapiens
  misc_feature (390)..(390): n is a, c, g, or t
  misc_feature (408)..(408): n is a, c, g, or t
  misc_feature (415)..(415): n is a, c, g, or t
attgccatggactcctttggcagtgataaagcctataggtccttctcagaatgatgttttaagatgcataaaataaaaggcataggataacacagaaaattatcttgaaatacagttactaaaacgtttaaaaagtaatttttgatatagtaaaaagttttttaataatgtattaagtaactagatccagaaggctgaaatattgaggtggggatgagcatatatatttcaagctatctaagtataatgtgacataaaattattgattctttgtattaggtaactgtcacagttcagtttccccagaaagccggaatctaaggctgggagattgggcatttggggggagtttgctaggggaacgctctttggacatccacctgagggggnagggccagggtggggacncggtccngggggagggttggcctttgag

SEQ ID NO: 329833 - DNA, 716 bp, Homo Sapiens
ttgccatggactcctttggcagtgataaagcctataggtccttctcagaatgatgttttaagatgcataaaataaaaggcataggataacacagaaaattatcttgaaatacagttactaaaatgtttaaaaagtaattttcgatatagtaaaaagttttttaataatgtattaagtaactagatgcatatatatttcaagctatctaagtataatgtgacataaaaatattgattctttgtattagtaactgtcacagttcagtttccccagaaagcagaatctaagctggagattgggcatttgggggagtttgctagggaacgctcttgacatcaacatgagggaaggccaaggtggaactggtcagagaaggatgacattgagctgtgatgaagtctgagaggaagcttcagccaaccttacagaaggtctgaagattatatgacccttcagaagtgccctgaatcaaagagggccaggtgtttattacccagctgaggtggctctctgcaactgaggccatttccctggggctgccagctgagggcactctgccaacagctttcatagtagctggggtaagtcctcatttctgaaagaagatctaggtgtaacattataacatcaatcacagtgacaaatttataggttctgcaagttccactgtgcttgctgcctacattcacagttgaagaaaagactgaatttcggtt

SEQ ID NO: 329834 - DNA, 448 bp, Homo Sapiens
  misc_feature (267)..(288): n is a, c, g, or t
  misc_feature (403)..(403): n is a, c, g, or t
tctcacacacttttgttgagcatctgaaaaccatacacatgatgacagttcaacccataatgttttagtttgcatctcccaagaataaggtttttcttctgtataacaagaatattgtaatcatacctaagaaaatgaattttattacatatgtgttctatattcaaatttctgtaattacccctaaggatgtcttttaaatgatttttagcattgatagtctgtgcctgtgtagattataacattgggctattgcaaaataatggnnnnnnnnnnnnnnnnnnnnnngagacgaaatcttgctctattgtccaagctgggagggcagtgggcacaatctcgggctcactgcaacctccgcctcccggggttcaaggcagtttcttcatggcttcaccctccnggagtaggctgggggtttacaggggcagggtgcccactgtggctt

SEQ ID NO: 329835 - DNA, 517 bp, Homo Sapiens
  misc_feature (14)..(14): n is a, c, g, or t
  misc_feature (67)..(67): n is a, c, g, or t
  misc_feature (73)..(73): n is a, c, g, or t
  misc_feature (83)..(83): n is a, c, g, or t
  misc_feature (394)..(394): n is a, c, g, or t
  misc_feature (498)..(498): n is a, c, g, or t
ccctcctcaaggtnggttaaccattaggccccttaataacacccggtttaccaatatccccctaaanggcccnctttaagatncccacctgtgattaaatttccaaatacaaaaaagtaaaacggatttgggaaacttttctataaagtacagcaattaatttgcaatccaaaatataaagcaaattttatataatttatgctttactatattagtacttgcttcacattaaaattaaagatcagtatggcaccacacatgaataacatgcaggctcaggttaccattatacataaatttttaaaataaatatatggcaaaaataataattgtcattccattgaaagaatatttattttgcagctgttaaaagacatttttccctaaaaaaagnaaaagctgtgctttacataggcaatcttataaaaggaaatgctaggaatcaggaaaaccatcattttgggctggggtgcagtgggctcacacctggtaaccccngcactttgggggagggacg

SEQ ID NO: 329836 - DNA, 476 bp, Homo Sapiens
tgcacatgaaagttttgcaaagggaaacaggctaaatgcaccaagaaagcttcttcagagtgaagaatcttaatgcttgtaatttaaacatttgttcctggagttttgatttggtggatgtgatggttggttttatttgtcagtttggttggggctatagcacacagttatttaatcaaacagtaatcctaggtgtggctgtgaaggtattttgtagatgtgattaacatcctacaatcagttgactttaagtgaaagagattacttaaataatttgggtgagctgcacctgattagttgaaaggcctcaagaacaaacactgcagtttcctggaaaagaagaaactttgcctcaagactatagccatcgactcctgcctgagtttccagcctgctagtctgccctatggatttgaagtttgccaaccccaacaattgtgtgaattaatttctaaaaataaagctatatacagcca

SEQ ID NO: 329837 - DNA, 446 bp, Homo Sapiens
  misc_feature (13)..(13): n is a, c, g, or t
acacctcccctgnattaaaaacgggtgtgtattttttaaaattacctttgaaatcctgcctcctgtagttttgcccgcctccttaaccccccataaaaaccctattaacatttgccatatggggaaagtggacttttttaaagggcaaattttaaatttacatttagaagaatgcattaaatctctggttacaatagcctttatttccttgataaattgattgtggtacacctttgaatgctgtcattttaacatgatgaagttccttaaaataataaccagaggacaggaatatttaaaattaaggcatgatccactttctttcagctgccatcaatagctgtgtggtgcagtcagagacagcaaggagcaaaccctttgctaggctagtctactgtggcactaactgcataattacctggatcgcatgagaggagggaggggac

SEQ ID NO: 329838 - DNA, 544 bp, Homo Sapiens
  misc_feature (13)..(13): n is a, c, g, or t
  misc_feature (106)..(106): n is a, c, g, or t
  misc_feature (115)..(115): n is a, c, g, or t
aaccccttgggangaaaatattcctggcggggggaagcagcatcctcaagcctggtgaccagtggtaacgaggcagcccaacagaggagatggttcagatgtttcnaggtcaaanaccctcaaaccctcaagtgactggcttgaacaagtacatttaggtgtgaactgcacacatctgggctctaaatgaattacaggtacagatggtatgcctaggtggagtatgcttgatagagactttgattcacttaattccaactcagtgataaacccactgacattagggttgaatacagagaagttcccttgaatggtagcttcattttttattttaacccttacagggaatttcctttgtacttaattgaatagcttttcccctttttgctgacaaaaagaagagcaagataaagagaaacaaaaatgaaataaataagttgtattccacactctaagaaaatgcagtcctctatttagcctaggcttgacaatacttaaattgaacatttaaactaaaggcttactccctaatctttgggtggct

SEQ ID NO: 329839 - DNA, 228 bp, Homo Sapiens
  misc_feature (23)..(23): n is a, c, g, or t
  misc_feature (36)..(36): n is a, c, g, or t
  misc_feature (47)..(47): n is a, c, g, or t
gttaaatttttaggggaaaaagnaaaggtcctatgncctagattccntgtttgaaatattaaatggtgaaagacacccttcaagagaatgaaaagacaaacccacagactggggaaaatatttgcaaaacataaatcctgataaaagacacatatcctaaacaatataaatggctcttgaaaccccaatgacatgaaaacaactcaattaaaaagtgatctgagcgga

SEQ ID NO: 329840 - DNA, 123 bp, Homo Sapiens
agtggagcacaaaaagcataagctttaaaggaaaagactgataaattagattttattaaaattaagaacatccattcatcaaaagacatcattaagattgttgaaaagggtgcagtggttcat

SEQ ID NO: 329841 - DNA, 506 bp, Homo Sapiens
  misc_feature (417)..(417): n is a, c, g, or t
  misc_feature (424)..(424): n is a, c, g, or t
  misc_feature (457)..(457): n is a, c, g, or t
  misc_feature (467)..(467): n is a, c, g, or t
  misc_feature (482)..(482): n is a, c, g, or t
  misc_feature (492)..(492): n is a, c, g, or t
gaaagttaaggttttatttagaatatcattttagagacaaaaagcagttcactttatttagcaaaataaacttaaccaatgcatttaaatatagtaaattcaagaactttggtggttttttttcttagatgcttgcttttttgccagttggagtttctgtcttctggcccaacaggcttctttccaagttaatgcagctatattccaaggaagtgttttatgaaatctgaatactcaaacaccccttctgtattttcactcaaccatcattgtattagatgatacataaggaaagtgacttagggaagtaagttcagaaggaaatgtgttcccttctccctcatattatcttttcaacagaggcctgggattgcctaaatgggattatggaaaggcaaattgctactggggagggtngatgggnccaaaggcaaacttaggatgggttttcacaccntccgtcctcntggactccaaggggnatgctagccncaccctttttcccg

SEQ ID NO: 329842 - DNA, 616 bp, Homo Sapiens
aacatgtgtcaaaagattttattaaactaattcaatttgttagggaaatggtaagatgttacaactggttaagaggagcattaaaagtgcagacatatattcaggccatcaagaatgaggaaatgaatttgctaaattgatgcaacatcaatcaatagccagggcctgtcattcacagacaatcactccaccacacgcacacatacattcctacggtttgtccacaacttccagagctgaagagtagctcaaggacatcaaagggcagaggcccctaggaagggctgagccacaatgaagcagtgctccttcactcccgatttccatggctaccaccgtttttctctggcaaatcagagacgaattttaaagactgagtaaatctataaaagcgattaatcacagaagttcaatgtctgataaattattccaaaagtgttcctgggcactgagactcaccaagcatacattctgaaatcaaattctatttctatccaaaaagtgcaggccatcagtgttcttaaaggaggcaaatggttgttgtgaggtagcaaacattttccaatgcaggtaaggatgtagataccaggtaaatgttacagttgtgttcatacta

SEQ ID NO: 329843 - DNA, 322 bp, Homo Sapiens
  misc_feature (288)..(288): n is a, c, g, or t
taacttaacctttgtgaatacttcacaaaaatacacatacagaagtaaataaaactatacagttgaactaaatatccagcagatacaacaagtagtcagaagttcaaagatggataagttaggcagctgatgaggttgtctgcataatcaaaggggtagcacaaataatgaacaaataacttttaacaaaagcattctagttaacataaaagaatttggtagtctataaaatggttgaatggggtaacatgccattgatcaatacaacagcccataatatttactganttcaaactatttacttgtaaacatttaacaaagc

SEQ ID NO: 329844 - DNA, 333 bp, Homo Sapiens
  misc_feature (14)..(14): n is a, c, g, or t
  misc_feature (26)..(26): n is a, c, g, or t
ggttccaaaagggnttgtgtttaaanacgggtaagaggtcaacagggatttcctgatcccacttatgttgaaaaatcagccttgtgttttagaagaggtaagaatctcttctaaatgtgttaatcaatcccctccaatacagtgtgataggaatattcaatcctattctctttatgattttgcacagacttccttttcaaatgtatcagcccagggatttgtatcattacaaatttgtgaatatggatgcagatttgttggaaactatgtggaaaatatgagaagtctaagagatatccaagttatttgctaattataacaaaactgtagcaa

SEQ ID NO: 329845 - DNA, 507 bp, Homo Sapiens
  misc_feature (36)..(36): n is a, c, g, or t
  misc_feature (87)..(87): n is a, c, g, or t
ggagtgatgtggcccacaaaccgaagaagcccaggnaaggcccggtagccccccggatgattgagaagccagggaacaaaatccttntccccgggccctcccagagggagtatgtcccctgcctaaatacctttgaatttccagacttcctggccctcccagactgataatgcatttcctgtttaaagccccccagtttgtggttatttgttacagcagccgcaggaaactaatgtatcattctgaggtcccccaaatctcaacccattgcagttcaagatagagtccaaaatctcattagctgagaagtatggcgtaccagaaaagaagtgactactgtaataaaaggcatacatctaaagattagaagacatgatgaaaacatcttccatcagtgctatagtttgaatgtttgtcccctccaaaattcttgttgaaagataattcccagtgtaacagtattgagagatgggccctctaagaagtgattgagttatgaggactcta

SEQ ID NO: 329846 - DNA, 424 bp, Homo Sapiens
  misc_feature (383)..(383): n is a, c, g, or t
tagaagaaagctttttaatgcaacagcttaaacacacagttcaacaaaatcagtcaattcaaattaacttcaacatattacaaagaactatgaagcccggagaaggccactgttggaacaaaaaaccaagtccctgcccagaaagcatggacactgaccaaggaggcctcttgccccctcccacctctaggaggagcagccacaatcactggggctctttaaacagcttagggtgcctctctgcagaaggcagcagcacagagtcaaggacaaccattcaagggtcaggggtctgcttttccccaccaaagggaggggcccgaacaggaagggcactggggggcttcaggacataggggggacttttggcaaggggcaggggncagggggcagggggccaggcagcttttacacccggggggag

SEQ ID NO: 329847 - DNA, 339 bp, Homo Sapiens
  misc_feature (223)..(223): n is a, c, g, or t
  misc_feature (287)..(287): n is a, c, g, or t
  misc_feature (297)..(297): n is a, c, g, or t
  misc_feature (308)..(308): n is a, c, g, or t
taaaaaaagattgaacttcaaaaccattttcttacatactcagtagaagttgttatgagccaacattttttgtgagctatactattttaaacatctaaagtaaattatttgacatataaaaagacttcttcatttaaaaatatatcttttaaaaataattttacaaggtgatgggccatctcattttaggaaggaagggggcctcaatggacaggcggttacnggtaactcggttgctggaatatggtttttaaatacagggtggctgtggttccggccttggtacntacattatcnaattttattcnggataatatggctgcctgggtggtattgggc

SEQ ID NO: 329848 - DNA, 445 bp, Homo Sapiens
ttttaatataaacagacagtatccacatagtttatttctcacagttctcctgacaaatgaacatcattcaagaacatactgtatacacagataagaagaaacatacaaaatgttttaaatgatgcacaacaaaatccagcagtataaaagaatgcatgtgaacccttgctcactgtgcagactaaatttaatcacttgtttaaataggtaataaaaatacaatcttttatgggatcttgtgcagactacaaaagagggaaattattaccatatatatgatttttatattaggcagttttctttgatgagttgtactgacaactccaaatacagaggcagaaggctgtgtattttaaaggaattaatgttgtgaattagaaactttacacagttactaccactgggcacttttccccataggtttgtacacatcccctgatcatct

SEQ ID NO: 329849 - DNA, 530 bp, Homo Sapiens
  misc_feature (423)..(423): n is a, c, g, or t
cccactgctttaacacagaaagatacacatagcttccctattgttattttcttttcctaattatgtacatttagaaaaaaaatacaacactgtgttaaacagcaggacagctagcaatggaacatacaacactatgctgaaaaaccacaacagcttggttaagcggaggagagaaacagagatggccttcatggagtgaagctgtcaatgcctgccaatctccttagtctgtgacggatctgcactctgagggcaggccttctgaacgccgccactttgccaggcgctgcttaaaccatttctgggtctcctcctcggaaaaggcgtgcctcggccgcgatgaggcacagcgtggtggaatccgggtgcttgtcgaccttgttgaagttgtactccaggatttccacctggtcctctgtgggngcgactacgggtctccgccgacatggtccctgcgcgctcttccagtcttcttctgtaacagcccaggaaaatgagcataggaagactaactttctgaatgttgccca

SEQ ID NO: 329850 - DNA, 491 bp, Homo Sapiens
  misc_feature (12)..(12): n is a, c, g, or t
  misc_feature (25)..(25): n is a, c, g, or t
  misc_feature (43)..(43): n is a, c, g, or t
  misc_feature (67)..(67): n is a, c, g, or t
  misc_feature (73)..(73): n is a, c, g, or t
  misc_feature (126)..(140): n is a, c, g, or t
taattacaggantaggtacctaagngggtaaaattgtggaacntccacccatcgggaaaccgaaaanccgaantggtgtgattacaacctgtgaggtggatgaagagcctacatgatagactattnnnnnnnnnnnnnnnccactagggatatatgaaaatggtcaaagtcagttatacttcaaaggatttcaatatgtctgaaaagtaaagataaaatatgacattaacagcagataaagtaatgatgaataggatgctttggttgattagacaattaactataacaatataattagttgcatgcattagaatcacacaaggaacttctttaaaaatatacattcctgggacatactctcacaaactgattgaataagtttggagtgaacttgagaatccagacttttaacaagcactgcagctgattctgttgtagctggttcacaaagtactgcctatcctagaaggatgacaggggcaaatagttca

SEQ ID NO: 329851 - DNA, 464 bp, Homo Sapiens
  misc_feature (37)..(37): n is a, c, g, or t
  misc_feature (73)..(73): n is a, c, g, or t
  misc_feature (116)..(116): n is a, c, g, or t
tgagtagaaacacaaaaagaactttttgaacaattanaacctactaacaaggaaataagctgtctcatgagcncccagggtactgtagggttcaaccaagagcttctgggaaaggntgttacagaggggagcttcacccctgaaggaagtttatactagatgtccacttctcatggtcagctttgaggctcggtgataagaggtcactgagttccgtatttattgaatgttgaggaggggtgcccaggaacgcattttctaatagtaatgcctttgtgcccctgttggaaaaattatacattacctaaatggaaattgttgtggactagaagtctgaaccttagagggccactcacttatgacagtgtttgaaatctgcttatgggagacatctgatggcctcacgcagtggattcagtcttcattctttcatgtccttttgtggaaatttaaagtgattatct

SEQ ID NO: 329852 - DNA, 935 bp, Homo Sapiens
  misc_feature (72)..(72): n is a, c, g, or t
  misc_feature (132)..(388): n is a, c, g, or t
  misc_feature (918)..(918): n is a, c, g, or t
acacttgaataaatcaactgcctttatgccatcaattcacaatatttacttgaataacatttaactggccanaattaaaatcccagtttataaaactggaatggctggcccaggccgaaggatgtcacgccnnnnnnnnnnnnnnnnnnnnnnnnnnnnnnnnnnnnnnnnnnnnnnnnnnnnnnnnnnnnnnnnnnnnnnnnnnnnnnnnnnnnnnnnnnnnnnnnnnnnnnnnnnnnnnnnnnnnnnnnnnnnnnnnnnnnnnnnnnnnnnnnnnnnnnnnnnnnnnnnnnnnnnnnnnnnnnnnnnnnnnnnnnnnnnnnnnnnnnnnnnnnnnnnnnnnnnnnnnnnnnnnnnnnnnnnnnnnnnnnnnnnnnnnnnnnnnnnnctccgtctcgaagaaaaataaaaaataataaactggagggttagttttaaaaataattttgaattcttgtttttttataaactaaattacttctcttctactaaatagaaataactggaaaaattgcaaataccatatgaacgttaaataatgtgatctcaaagtcatacaagttttcctctaagcaggttcctaagttatttgtaaacaaaggtttttatgccagaattttcctcagtgccttgcattcttctccctcaaccgaacatccggtgaacaggatggtggattaaagcaagtcacagcagagaggaaatgccttggtaaagcactgaacttcaaaagaggaatgtacaacagagaaagggaattggacatttgctgagcacctactatgtaccagatagtttatacgtggtttcttttctattcctcaagaaagccatttaagctcggtttcactttcagcattttacagctggggaaacaggctgatgcagggctattaaaagggtgccccggtcacaggnttagtcagtggcagtgc

SEQ ID NO: 329853 - DNA, 553 bp, Homo Sapiens
aatggtttctacaaatttttggctttgttcagggcccaccccaagaaggaaaatactcctggatccttcaactagccttcaggtagacacatgttagaacagcctgtcaacgtcctgaagcatcactcccctgcctagaggagtgaggcagggagactcccagggcaggtggcccctagtgcctggggtccaaagaaatattcttctcagggctttgaagcaccacgtgaacctgattctactcatgatacaatctggggaaagggattagtacagttcatttctagaagttatcttgttcagtttcaaagccttgttctcactggagccacagaaaatcagtggattctactcaagggacagtctaaattctattctgtgtactcctgccctggccatactccaatccagaccaccgggctcagcaacaggctcagctgactacccagccagccaggcacaagttccacaccttctaaacttgttcttctaatgattggtatgtatgtgtctaactggataaggtgtggcatggagatgggtagaggtggga

SEQ ID NO: 329854 - DNA, 418 bp, Homo Sapiens
  misc_feature (305)..(305): n is a, c, g, or t
  misc_feature (405)..(405): n is a, c, g, or t
ttaatggttttatttccatctgtaacactagcagaggagtccaaagcagactgatatccatggatatagtttaaatgtaacaaagaaagagttgaactatgtacattgaaaaaaggaaagacattttttcataccaacctttccctagttcgcagtttctgaatagtagaaacaaaacacatttttaaatctttctatcaatttaatttaggacgaagtaacacaacttttataattaaccactgaagttgtctttaagggacaaaactttaaattttaaaatggggtgttcccatattttatgnggtggggctgactcccagggttgccttgctccaggtctggggcatcgtggacattgccgtggatgcccggaaggaaagttaatgggcaatggatggtccngtcagagggggca

SEQ ID NO: 329855 - DNA, 453 bp, Homo Sapiens
  misc_feature (31)..(31): n is a, c, g, or t
  misc_feature (48)..(48): n is a, c, g, or t
  misc_feature (136)..(136): n is a, c, g, or t
ccactggattttaaaacaaaaaaatggaganaacctacctcctgaaangaatgcctgaagaacagtacccgtgtaactccctgcctaggaaaaaatgaggaagttaaacatacctcatcttcccacctttcccttntcccttactttttttgttgaaagtatcattgtggacactttccccagttgacttcccacttgatcccctgaattaactaactggcactggcgtttccctttgtaaaaatgttacaatgtcagccaccatcttgctactaaagtgtggcctgtggaccacaacatggggggaatctcaggtctcacctcagacttgctgggtcagaacctgagttttgagaggctctgggcaaccggcacctctcagacctgctgttgggttctcatcgatggacccgatgcttcctagcaaatgatacctgttgtatgtgttattgg

SEQ ID NO: 329856 - DNA, 381 bp, Homo Sapiens
aaatgcttgtggcattaatagtaaatcagaatcagacctccacctattttgtgccatttcagcactaagccaaggagaaaaattattgaggaaattaatgcttcccttaagcacagtaggaacacgaagctaacatactgccgtataacctgatttcactggtattctttctgaaatttttgtttttctatttctattgcatattggacttcatggctaaaacaaagtgcaattatgaggaggatgttttctcaaaatctgtagggtctggttgggtcacataacctttcagaagaaacattatctactgggatgacttaggatgttattcaccaataggattatcaagggtttatctccaggatgttccattaattcact

SEQ ID NO: 329857 - DNA, 439 bp, Homo Sapiens
  misc_feature (367)..(380): n is a, c, g, or t
ttttgtacttgacttccctagtcatattacttgaaggctcagtctcccttcagttcccagaataatctggctttgaagtagtatcgaagcagctttcagttttcacataacagctccatatcagctaggtctactttggtctccttccctggtttcttttctaggaaacattcttgtcctttgcaccctttgggagaaccagagccctgcccttctcttgccaacagggactggaactgtgcccttgagcctcagcccagccacttctttgtgtatttggagaaaaggactgcaggaggctttattttaatctcttagagtgatgaggacgcgtggtcagatccgctttggcagcaagctatggtcnnnnnnnnnnnnnngtaaggggaaggctctcactgagtctcaagaggagagagagtttaattactaacatgat

SEQ ID NO: 329858 - DNA, 295 bp, Homo Sapiens
  misc_feature (103)..(103): n is a, c, g, or t
  misc_feature (115)..(116): n is a, c, g, or t
  misc_feature (118)..(119): n is a, c, g, or t
  misc_feature (149)..(149): n is a, c, g, or t
  misc_feature (155)..(155): n is a, c, g, or t
  misc_feature (158)..(158): n is a, c, g, or t
  misc_feature (172)..(172): n is a, c, g, or t
  misc_feature (190)..(190): n is a, c, g, or t
  misc_feature (237)..(237): n is a, c, g, or t
  misc_feature (251)..(251): n is a, c, g, or t
atttctgacatctatttatgatacaataaagactagtttttaagaaacattttactttcccgtcataaccaaataatacatgttcattgaaggccctacaacnaagcaaaaaaanntnnttttattacctataactccaccatacttgntaacanctngttaaatatatttncctgtcctttagctgctntccatgtaaataagtgcccatttgggggaaacaaaaatgaaatcacnttcttcatactgtnctgtgctataggtttcctactccttaggtatgggctgtcaggca

SEQ ID NO: 329859 - DNA, 567 bp, Homo Sapiens
tctaagctgatctcactattcagtggactgtgagtcatggcttgaaatacactggatatgaggttacaattttgagatcatcagacctgagatatcttggaacactgactgctttttctgttgctttacgatcattacttttcaatcatatttacctcttcttttttgaaggtaggcttgtcttcttggagcttttctcttttagcttgcactttagttcccttctcttctccctttttattttcaagaatggtaaggtcacacaagtaaaagaagccctttctagtttacaagagtgacagggtgctcggatcgccttgcaagtgctgcgtgggatggcttctcttctgccgtctcagcgctcacagcacagtggttctaaacagcaaggtgggatattttcttcccaccccaacatcttctcgtgtggctgccattgcgctcactgaaatctagcatgatgtggcactcctcgtgtgtttacaaacctcgtgtgtggtttggtgcactttgctcatggtctcaattttagctgtgttcatgagcctcttgtacagaagcaggagt

SEQ ID NO: 329860 - DNA, 1005 bp, Homo Sapiens
tttagaaaaatagttctttgtttattggatacccaagaattaattttagaatttaaatttggctttagtatcagtaagtacggatatcacatcctcagaaccaaaaacgaacaactcattttcttctttcaggaaattaaaagctacaaaggcaaaaagagggttgaggatatatgaatataacaacttttaactagctgactaattaaagagaggattagcaaagataattgaagtctacttataatttcaaatttccattttgaaaaagttttatttttaattcaaagagattaaaataaggagcaaaactgatatgaatttcaaatactctttctctgccaatgatcaaaacaattagagatgaaatgaaaacaaaatcttaggtaattaacagactggatagtcaagtttaaaatcagtaagggttaactgtcaatatactttgatatcagaaagcttatatcaaggtttgttagaagggagattaaacagttgttgatacattacacagaaagaaaagagtaaaaggaggtatggagagaaagttctgagtcctttgggtcctccccaaatcttctatcactaaacaaaagtaactagttgcaagtgtgacaggataataacattagcccctgggcttcactgccagaaaggaagtcagccttcgatttcaataattcagggtcctgcgggagagacagtcttctcagtggaggaaggggaagtttgtggtgcccagaggaagagtcctttggttctttgaaactttgagttttgagttttctgtatagaaaaaagtggagacttaaattcatctttggggaagactttttcctttgttatgagaaagccgccctttacttagttataggaactgaaacaagtcctcacctgacccagtgtttttaaagagcgaaaagtggtgacatcgaaatgaattcaaaagcatccattctagagttagactgagcagccaaatgagctggtgtattttctcgtgcc

SEQ ID NO: 329861 - DNA, 228 bp, Homo Sapiens
ccctcgagccccaaaaatcggccacgaggtttggccctgtcctagtataataaatatgtttttgtccagaatttgaccccatttatgatgtaagcaaaaatgatatgtccttaatcccatttgtctcacacacctaattttataatttaaaagagcaatagtagtttcattcagaaagacaggtttaaggcccaggtgcagtggctcacacccataatcccagcattt

SEQ ID NO: 329862 - DNA, 251 bp, Homo Sapiens
ctatcgttgagtttataaataatgaaattttaaaaataagaaaatgaagctaacaagatacagatgaggctgttaccaggctccgtgcatgtgaacaagtgatgcgataaacctccagtcagtgcgtttaagaagcacggggtcgcacgccacatggcagcaacaatggcatacctaatctgtagcagatgaagaaaatttgggcaaactcacattgtaccagacaccaaagctttaaaaggaaaaaattt

SEQ ID NO: 329863 - DNA, 605 bp, Homo Sapiens
ttttaaaggtcacttttaattgagacccaatgacaaaaggtggacaataatcaatttggtaaaacaaattaacagtaccctttaaagcttctgtttctatgtttactaatggcttccccacataggcaatatcatctagactatgctagagttttcaatgactccatcataaggactagcgatggtaacagaagctttatcactttgaactttaccgatgttatcaaactgagacactgtatctccttcttttacataacattaacagttacttttctaatcccttcttcagtgtctgagaatctgaactgaacaagctgtccacatacagcattaattgttttcagaaagttatgtggatgactatacttgaatgaaggataatcaaagaaacacacataatttggcttcaaaacatgaacattactacatgttggaaaacagtgaaacaaatcagctgcccagcattcctgctccaggtcctcagtacacagactgcagacatcttacccgggaaatggcaactgtgccacagaccacaaggtacatttcaactgctcaatcgccaactgtagctagtcacgactgtactagacagaacaata

SEQ ID NO: 329864 - DNA, 127 bp, Homo Sapiens
taatttgaaatgcttgtttatttttaatacaactctaacaagatgaataatctgtgttactacatcattcccataggttatagttgtgcatgatatttataaaaaatagaaaagaagaagaggaagc

SEQ ID NO: 329865 - DNA, 551 bp, Homo Sapiens
  misc_feature (468)..(468): n is a, c, g, or t
  misc_feature (471)..(471): n is a, c, g, or t
  misc_feature (474)..(474): n is a, c, g, or t
  misc_feature (476)..(476): n is a, c, g, or t
  misc_feature (506)..(506): n is a, c, g, or t
  misc_feature (528)..(528): n is a, c, g, or t
  misc_feature (531)..(531): n is a, c, g, or t
taattgtgggtattacaactcccacaaaaatgaggtgctgaattcagatatagtaagcaggcaccatgcaaaagctgcccagttttgccaatcaaccttgatcacaatctacaacacagtccctcggatggcaggccccatctcaagtgtgaagaaactgccaagtgaacaaaatggtcttctcaacagtatttccatgtaaacaattaggacacaacattagttcaattagacaagttactaacacactgtgaaggaagaatgcattttcttaatagtagtagtcttattagttgaataaacaatttatggcaatgcaaattttgaatgtttatgcacacatgtgtacatgtaagtataatatatttagaaggcagacatatgacatttttttcatgcttgtgacctgatgggtgtccacaggtcgactcaagttacctggctgtctatcttctgcctgacccctgnagncgnantgcggctacgattgcgtcgctggggttttntttcactatcatctgtaattgnaangtttaccatgaactattctg

SEQ ID NO: 329866 - DNA, 635 bp, Homo Sapiens
  misc_feature (142)..(142): n is a, c, g, or t
  misc_feature (165)..(165): n is a, c, g, or t
aaaagcctccattgaaaagcttagtagctcattatccccaatgggatgacagtccctttgacaccaccctgttggggtgctgggtaccttgtcactgtctaggcccctcattgggcctccgctggagtggtgggtgggggtntggctacagttcctgcagaggtntttggctggaggaaagtagctactgtctcgagttttctgtcttgctaggctgccccttcccctggtccctctggctagaaagagtggacttttgttgggggctccgtttgtctgctcaggcctcatgggtgtttctggggtctccagtttctttagctccaagtctggggatatctgagccaagagggaaaaccccaggggactcaccagtgtgtcatttcttcagtttcccaaggtccctggcctgtctgtcttctttctacctttcagagtcttcttaggtttctttttatatacagtgtccaaggtttggggttgtctatatttatttcaataatttaagagtcattattaaaatatctgtaaaaatctggtaccctgaactgaatcctgctgactaggcataccctgggcccttctcaggaggcctgtgtggcatttttcatccttggtgtccaagttcaatcttg

SEQ ID NO: 329867 - DNA, 447 bp, Homo Sapiens
tctccccagcatattttatgctttaaattaaacaacatttccaacaacaggactgggcaattaagtgaactttaaaaagttcttatcctaaaaattcctgagaaatgggaaaatatcatcaaagtctagggaaatcctgatgggtacggcaaagacacactgggtatactgcatcccaatatatggctcaaaaattagggaaatttgtccccatgtgaggtgatatagattgaaatcagaaaaaggtacttcctcccacagaccatcctctggtgcttctactaggaaaaggtccttggtatggatggaccacatgcccaactgaatattgctgtccttttgatgttttctgccctacttatcattacctaccattaagtgatatggtacacttaaggaatacatggaggggcaagagtaaccttacagagctttacccaggtgtgc

SEQ ID NO: 329868 - DNA, 413 bp, Homo Sapiens
  misc_feature (21)..(21): n is a, c, g, or t
  misc_feature (204)..(238): n is a, c, g, or t
taggaacaaaaacttgccccngctttgccccggggtatttggtgcctggaaaccactgcggggatttttaggtgcttcccctgactgtatctctcaagctgaccagggaatataatagatgaataggtggtactaaacgtaggcttgaacaacccctggcactgaccctgaaaagcaaaaataaattgttttttaaaatcatcnnnnnnnnnnnnnnnnnnnnnnnnnnnnnnnnnnntaagttgggaggatagatgatttctgacaaagatggacgagttgtgtaagcatcacaaaaatgatatagagtatttctattacccccaaaattcctcgccaccttgccagcaaatactttttttctacctgtggcacctagtaactactaatctatcactatagttttgcctttt

SEQ ID NO: 329869 - DNA, 466 bp, Homo Sapiens
  misc_feature (22)..(22): n is a, c, g, or t
  misc_feature (37)..(37): n is a, c, g, or t
  misc_feature (55)..(55): n is a, c, g, or t
acccaattccagtcccccaaantgccgggaaattaanggtgtgaagcccaccgtnccctggcccaaaagtgtaacttttaaaagtttccctcctcaccttggggattcccaggcctctcttttggccccggttgcctgaaacaatttaggagaatttcctgaaaattttcaaagtattcataaatggaactttgctttcctcctcctaaatcaagacaaagctcacactgaccacagattatcttaaatttggtgaaaacatatttcagttggtggaaacacaattgttttgcaagttagctccagaagtggtaattgaaagtgacatttaagaaacattttctatggatctcagaagatgattactcattttgttttgaaggtttatgatatgctaaagtgtttttaaagcacattataattaaacaacttgtaaaaaaaatttaaatttccccctatggaagct

SEQ ID NO: 329870 - DNA, 381 bp, Homo Sapiens
  misc_feature (306)..(306): n is a, c, g, or t
  misc_feature (334)..(334): n is a, c, g, or t
  misc_feature (343)..(343): n is a, c, g, or t
aagagagtctcgttctgctgcccatgctgaagtgcaatggcatcatcatagctcactatagcctcaaactcctgggctcaagcaatcctcccacctcatccggccataaaatacttttttgaaaaagtagttaaatatccttgattccattcataaattgatagttcttcaagtattggtttgctttatcaagctatttcagccttaatatttctcctgtaacttgaaaaaagacataacagttttcctatttatccacaccctggatttaaacatttttattgaaaggtcacttgatggatcagnaggaattatttgttgctaagccactgcntccaaaggnctcttaaacctacacagtccaatgtggataggctgact

SEQ ID NO: 329871 - DNA, 506 bp, Homo Sapiens
  misc_feature (437)..(437): n is a, c, g, or t
  misc_feature (461)..(461): n is a, c, g, or t
  misc_feature (474)..(474): n is a, c, g, or t
  misc_feature (483)..(483): n is a, c, g, or t
  misc_feature (494)..(494): n is a, c, g, or t
gcgcttggccatgaagttctttattaggtgattgtattagtccattttcatgctgctgatgaagacatacccaagactgggcaatttatacaggaaaaaggatttaatggactcacagttccacgtgctggggaggcctcacaatcatttcgaaaggtgaaaggcacatctcacatggcagcaggcaaagagagagagcttgtgcagaggaactcccccttataaaaccatcagatctcatgataattattcattatcacgagaacagcacaggaaagacctgccgccatggattcagttacctcccactgggtccctctcacaacacatggggaattcaagatgaggtttggggcggggacacagttcaagccatattcagtggatttaaatgttttagggactgtttagggtgtttctttgatggattcattccnttttatttattttggaggagggantttctattatccntgggtaatntttctttggtnctgttggcctac

SEQ ID NO: 329872 - DNA, 414 bp, Homo Sapiens
  misc_feature (372)..(372): n is a, c, g, or t
  misc_feature (388)..(388): n is a, c, g, or t
  misc_feature (394)..(394): n is a, c, g, or t
ggaattcagacaaacatgtcatgtgataattatatagccttgggtaatacattattattttttagttttaaagtactttaaaaattggcagagtatttttagtatactaagatttgaacagtttaaccagtagtgtcgggatttgattacgctgataaagatatgcaagaaataaagtaataaaagacaaaatgtaggtttggaaaattcaaattgtagttttatccattaatcatatactttactttgtgcttgtcattgtgataattacataaagataaataaaataacacacctagccccttaaagtagtagttctttactttttaaaggtcaggggtcccttgaggatctggaaaattgaggatctgntccccagggaagtgcncctacnccttaaatttttggggggtt

SEQ ID NO: 329873 - DNA, 357 bp, Homo Sapiens
  misc_feature (11)..(11): n is a, c, g, or t
  misc_feature (98)..(98): n is a, c, g, or t
tgaaattatgnataaacagggaatatatcttgattcaataagatgagtgcttggactactaagtgactttaaaaaatcttttcccaactcagaaagtnattgattaattctttgtttagagctttcctaagagttgtctgcaatttcaggaagaaattacaccactaatggcaacacaacatgagtcaacaatgcacacaactgtataggcagcagacatactttctaaattacacgatgattctatttacagatagatgcaaacacttgatcttatgctttatggcatagttgtgccacatcattaaatactgaaataaattttattataaattacttcccttttatttttctttt

SEQ ID NO: 329874 - DNA, 229 bp, Homo Sapiens
  misc_feature (215)..(215): n is a, c, g, or t
tctgtgtcttttgagaagtgcctgttcttcgttgcccacttgtcaatggggttgttaggtttttggttgttgacttgagtttcttatagattctggatattagacctttctcaggtgcatagttcacaaatattttctcccattttctagggtatctatggtactctgttgatagtttattttgctgtgcagaaactaccttagtttaattaggncccagtagtcaatt

SEQ ID NO: 329875 - DNA, 152 bp, Homo Sapiens
tagggctgttgggctgatatatatttgggggtcccacctccccgcctcatccgtacaccaccagggtgaacaggaggaagcaaaggaagtgcagggcccatagcaaagtttcataatcttgaatgcaagaggggagaaggaatggaaggggg

SEQ ID NO: 329876 - DNA, 476 bp, Homo Sapiens
  misc_feature (226)..(226): n is a, c, g, or t
  misc_feature (269)..(269): n is a, c, g, or t
  misc_feature (295)..(295): n is a, c, g, or t
  misc_feature (306)..(306): n is a, c, g, or t
  misc_feature (331)..(331): n is a, c, g, or t
  misc_feature (340)..(340): n is a, c, g, or t
  misc_feature (346)..(346): n is a, c, g, or t
  misc_feature (363)..(363): n is a, c, g, or t
  misc_feature (384)..(384): n is a, c, g, or t
  misc_feature (386)..(386): n is a, c, g, or t
  misc_feature (419)..(419): n is a, c, g, or t
  misc_feature (454)..(454): n is a, c, g, or t
gacttacaagagacaaaactaaaccatcaacacgtaggaggtaaaaggatttaaagatatacactaaataccaaccaaagctatattgagataacagaaaacagatttttatttgctaaggcaaaaagcattagcaataaggaagtcactacataacaagaagagttcaactcaccggggcaacacaagacttccacactttattcactcaataggaatgtataangttaaaactgataaaagaggggaaattgtcaaatctaccattncagtaggagacttcaaaatacctttntcaattattantaggtcagacaaaagttagtaaagntatgacagntttgcncaacacatttaacaagncaggtgccacatatgtaggancncattcagagggccgggtgccttgggctttacgnctggtcatcccaacacttcgggggggccagggcgnagggttccttttaggcccgggg

SEQ ID NO: 329877 - DNA, 438 bp, Homo Sapiens
  misc_feature (287)..(287): n is a, c, g, or t
  misc_feature (350)..(350): n is a, c, g, or t
  misc_feature (368)..(368): n is a, c, g, or t
  misc_feature (401)..(401): n is a, c, g, or t
ggcatctttttattgtctttaccattactttaatgcattttaaaatttatctacattaattgggaacaaagaaaaatagacatttctttgtttttcataaataactaatcttcatatttgataaaaatctcaaatgattattttaccttcccacaaatataatacatacaaaatttttctgaagtaaggtcaacaaattaagtatcttgaggactaacataaccacatacaactgctgtttctactgactcccggggaacgaggcaggaaacaaaaactcatcaagnctgctctggggtttccttttgtaaggtggttacaggattcaggaactggtaatcatggtatcnatctgcccggtaataacnatatgggattccaaattggattggtctaccaantaaaggtatcgctgggctctaggtggtacttctgggg

SEQ ID NO: 329878 - DNA, 583 bp, Homo Sapiens
acagcatctttttattgtctttaccattactttaatgcattttaaaatttatctacattaattgggaacaaagaaaaatagacatttctttgtttttcataaataactaatcttcatatttgataaaaatctcaaatgattattttaccttcccacaaatataatacatacaaaatttttctgaagtaaggtcaacaaattaagtatcttgagactaacataaccacatacaactgctgtttctactgactcccaggaacgaagcagaaacaaaaactcatcaagctgctctgggtttccttttgtaagtgttacagattcagaactgtaatcatgtatcatctgccagtaataacatatggattcaaattgattgtctacaaataaagtatcgctggctctagtgtaacttctggatttaacataacagtgactacagcatgggataggcactatacatatatggaaatcataaacagtatcgaatgccctggacttcaactactgactcggtatgtgcctcatttggctcagtaataaattcacctgcaccaaacccgtatcaaaagtcaccaaatctctc

SEQ ID NO: 329879 - DNA, 431 bp, Homo Sapiens
  misc_feature (355)..(355): n is a, c, g, or t
  misc_feature (360)..(360): n is a, c, g, or t
tttggaacattgaattttctttattgcaaattcttagggtttctgtcaaaagagatttgaaatacaacatgaaatgatgtactcacatccctcaccaccatctccaaataactgaattacataaataaaacattatatgaaaagtgctttgctacaatttatgggaggtaaatttaagaagagctggctcattgtaggaaaattcaacttatctttccctgatccttttatttaatacagggagagaaatttatgggcagttaaaaaaatctattactgtttctcataactgaatccattatttttctccatgatccatcagggtaaaaacaaggattaatagggttgctttggncaggncccttggaccataaatggtccccagggtttcaaacacggtaggttaaacgggggttttcgggtggggtttt

SEQ ID NO: 329880 - DNA, 370 bp, Homo Sapiens
  misc_feature (161)..(161): n is a, c, g, or t
  misc_feature (170)..(170): n is a, c, g, or t
gttaaaaccgcatctgtagtattattaattgggaaggaattattacttgacccgtaatagggttgtggccgttttctgatgcctaagtattatacagagcccacaatggccagtttacttccagaaagggcttcagtaagatattcttggacttgatactntcgtcagancctctttgtgccaagataatttatccagtcattgggaatagtaagtttctgtgtaacccatctcaattatagaagcaagttcagctttatgtatttgtatggggagttgaagattcagatagaggtattaagatgtgtggcatttacttaaaccatcacatttttttctttctacgccgagccctatgcagctctgccga

SEQ ID NO: 329881 - DNA, 430 bp, Homo Sapiens
  misc_feature (76)..(76): n is a, c, g, or t
  misc_feature (107)..(107): n is a, c, g, or t
  misc_feature (111)..(111): n is a, c, g, or t
  misc_feature (119)..(119): n is a, c, g, or t
  misc_feature (144)..(144): n is a, c, g, or t
ccaaggaacacccagggccaaggaacctgaatggttgcccagccctaagcgttttaagacttttgaaccccaaaantttttgttttgggtgtggaaaaaattttaanaggnatagggtnctcaagatataatcctttttaatanggcggtaggtcttaagagatgagggtccagaggaacggatgaaagcctgcttggaagcatgctgggatggccgtttggaaggagtgttgcatggaagcatggccttggctggcgctgccaggagcttaagggttgtaggttgtttgtctgaatcggctctcggcctaatcttgtggcttccaggaggaagaggagagatcaagctggctgtctgatgggcatggctttattctggaatggtgaacccaatggagagggtcctgcagatggacggcagttggtgtgc

SEQ ID NO: 329882 - DNA, 341 bp, Homo Sapiens
  misc_feature (293)..(293): n is a, c, g, or t
  misc_feature (319)..(319): n is a, c, g, or t
  misc_feature (328)..(328): n is a, c, g, or t
atgagacaccgcgcttggcctcccctagcttttttaaaatgtacaccctcctaagtagaatgaagaccaatggatgtagcttaaagagctacataaaatatgcagtgataagctacaatggatgtagcttaaagagcaacataaaatattcagtgataatactttattgcaactaaatgaactcttgcaaagtttcctccagttgtgaaagtcatgggctttcaggataatgaatgagggctttttccctttttaattggactagtttccatatttaacccaatcatattacngatttgggttactgttggcaaggggntgattgganattacacactttt

SEQ ID NO: 329883 - DNA, 436 bp, Homo Sapiens
  misc_feature (20)..(20): n is a, c, g, or t
  misc_feature (27)..(27): n is a, c, g, or t
  misc_feature (33)..(33): n is a, c, g, or t
  misc_feature (346)..(346): n is a, c, g, or t
tctggaagcaacgggaacgnatgcaangatggnccctacctgggatcccacttcaggcgtcacataatcctatcatcccagttcctattgattttactactttataatatcctaaatccaccctctatgttcatctcctagattactgcctacagtcctcatgaaatgcagcagctgccatcagtgccctccaacttagattaattttttcccttgagagactttacaaaacaaacgctgagtaacttatccttcattacttcatttaactcaatgtttataatttacagcatctattattacttaaggataaagtttttggaatcatataagcagggtttatgtncctgctctgccatacacttgcttgtgtgacttggacaaatttcttaatttcttgaagcttcagttctctttaactttttctgtgccgaat

SEQ ID NO: 329884 - DNA, 459 bp, Homo Sapiens
  misc_feature (170)..(353): n is a, c, g, or t
  misc_feature (397)..(397): n is a, c, g, or t
  misc_feature (411)..(411): n is a, c, g, or t
  misc_feature (416)..(416): n is a, c, g, or t
  misc_feature (425)..(425): n is a, c, g, or t
acaaaaggacagtggtttacataaaaatctatgaactgaaaatctggataattaatttcatattcactatctttatttcttttatattagcaatcctagctaactgggatcatgctagatttaaaaaacaatagctatttattctacagacccaaagagttcatatggtnnnnnnnnnnnnnnnnnnnnnnnnnnnnnnnnnnnnnnnnnnnnnnnnnnnnnnnnnnnnnnnnnnnnnnnnnnnnnnnnnnnnnnnnnnnnnnnnnnnnnnnnnnnnnnnnnnnnnnnnnnnnnnnnnnnnnnnnnnnnnnnnnnnnnnnnnnnnnnnnnnnnnnnnnnnnnnnnnnnnnnnntttgcatcctcctcattctctctttgcctactgccatccatgtnaggtggggacttgnctccnccttagccnaccaccattattagtgagggcttcccccagccac

SEQ ID NO: 329885 - DNA, 719 bp, Homo Sapiens
  misc_feature (553)..(553): n is a, c, g, or t
  misc_feature (611)..(611): n is a, c, g, or t
  misc_feature (707)..(707): n is a, c, g, or t
attctccagatctcaagacggtgtctggcacataccattcaatacaagtttggtacctggaacccactgaatatgcatgtccagtaactattaactacatgtgttggtgcaagggagaaggtcgagcaaccggatctgctccatcatagcccgtctcagtcgcttcattcaagtcagcggggtgaggttgaggggattccaacttcacaagggcagatttctcatggactctctttctctggttgtactggaacactttctggcgttattcctctgctgggacagcatgaacttatgaaacgtggtcctgtctgccctaaagccagggtctcaccgacaaggacagcgatgctggggcgagaaataaagttcgtcctgggcctgcgtacggtacagcgcccttgggaagcccttgtggagttaagggtgatgcccacttctttgtctccctcattctgtttcggtggctctctcgttcccagttccaagctgcccacttgttagaggagccactgcttaccaggcatctttagtgggcacatcagcacattcnacgattaatcacagctcctcacagttgcctataagtagtgacactaccgaaggacggnagttcctcctcctgcagtctgaggacttgcactctctaacggagtagattccaataaacttgcttcctctcactgcgctctgtgactcgcctccanactgtgccgaat

SEQ ID NO: 329886 - DNA, 367 bp, Homo Sapiens
aatcctaaatttagaagtccaggtatttatactccatatttattactatagtactaaatttcaataaatgtagttattaaacctagaatgtaaaatttccaagagaaaaaacctaaacacagtctctataatacatatctaactaacctttaaaaagtaaatgaagaaaataataatattctttgaaaattccctttaacagctcatgtagacattacttatcaattaagtttctgcaaaatacagtgtctgagaggcaggtactaggttgcgtctagggagggaaggagagtggggatggtggcagcaacaacaacaaaaaggatgtctgatttggcccacagacactgatattgcaagatatctt

SEQ ID NO: 329887 - DNA, 544 bp, Homo Sapiens
  misc_feature (12)..(12): n is a, c, g, or t
  misc_feature (27)..(27): n is a, c, g, or t
  misc_feature (38)..(38): n is a, c, g, or t
  misc_feature (53)..(53): n is a, c, g, or t
  misc_feature (63)..(63): n is a, c, g, or t
  misc_feature (104)..(104): n is a, c, g, or t
  misc_feature (117)..(117): n is a, c, g, or t
  misc_feature (159)..(159): n is a, c, g, or t
  misc_feature (191)..(191): n is a, c, g, or t
  misc_feature (200)..(200): n is a, c, g, or t
  misc_feature (210)..(210): n is a, c, g, or t
  misc_feature (501)..(501): n is a, c, g, or t
  misc_feature (527)..(527): n is a, c, g, or t
aaaacctttaancctcccgggcccccnaagttgtgggnaaattgtaacggganaacaaattcnacacgggaaaacagcctatgacaggattcccgaaattaaanacgactcaactanagggaaatttggcccctcgagccccaaaaattcggcacaagncggaagtgaagttgaattcccctgtttcctgnccctttgantccccttctnccctttcccgcccccaaggcccttgtagactctggctcttcaagattgaggggagaaaggaagcagagataatggtcaagtgtttagagaccagcattgttagcgggcactctgggtgtagctgctgtcccatgtgctgggtctttgttttgtgggtaatatgggctgttgggaacctgactgacagaaatctcccatctgcagcctctttgcttttgctttaggtcaggagttggcaaactacatacagctcatgggccaaatccgagcccagcacctgtttttgtgtgncctgaaggctaagagtgatttatacnatttgtaaatggttgag

SEQ ID NO: 329888 - DNA, 522 bp, Homo Sapiens
  misc_feature (123)..(123): n is a, c, g, or t
  misc_feature (173)..(173): n is a, c, g, or t
  misc_feature (198)..(198): n is a, c, g, or t
gttcccatttggggacttcaggaccccagagccactaggacttccttgggaagcccgttagcccagggtgggtcccgccaggacagtagggaaacagttgtttccctagccatttccgaatangcccatcattccgaagtcatcatctctgtttgctgccttccctggcccangccaggtggaagaaagtttcccaangctaggtctgggccgttggggatctcagcagtggggcaggagggtgcctgatttcggggagtcctgacccgagcctgttgtcagagttgggaggggctctgagcagtgttgggcaggccgggtctcccatcccgaggccagcgttcctgtgcagagccccatccactggttcttgccctgagccacatatgtctgtgccatgggctgagtgccacgacaggcccgtgtgacagctgctgcccacgcatgtggaagctaggtgggactcattcctaattctgccgttgtaatgagacttgattaaaacgaccgccacttttttgc

SEQ ID NO: 329889 - DNA, 207 bp, Homo Sapiens
agtacagcctggccaacgcagtgagaacctatctctacaaaaaaaatttaaaatttagccaggtgcagtatcacatgcctgtggtcacagctacttgggagctgcttgagaggatcatttgagcccaggagttgaaggctggaatgagctgtggccataccactgtactcgtcgtggcgcaatagagactctgcctctttaaaaaaa

SEQ ID NO: 329890 - DNA, 671 bp, Homo Sapiens
  misc_feature (42)..(42): n is a, c, g, or t
  misc_feature (64)..(64): n is a, c, g, or t
  misc_feature (80)..(80): n is a, c, g, or t
  misc_feature (288)..(288): n is a, c, g, or t
  misc_feature (659)..(659): n is a, c, g, or t
aatagccctggaaggggaaaaaggtcccagtgtgataaggtnattgccaaagaagtgacatttnaagcaaaagcctgcanccctatgcagaagttggccctccagtgagaaaaggttgggggagggttcccagtagagagggaaggtatgcaaaggcccagagttaggacagaacttgctgtgtttgagaaactgggaaaagaagagtgagcctgggggtatcacgtgatccagggcagagcaggtccaggccaggtgcagccaggtcacagcagccctagtgggttnagagcacaaatcaaagtttagcatttatctgaaacacaggagttggcccatgagtttcttaggcgaggaagcgctgtgaccatatttatgattgaaggagattcttttatatgctgtatatagaaagcctttcagggcaaagaaaggaagctactggggtagccctgggggagatgaagggagcttccactgggggcagtaagaaagccagggaaaggcggcagctttaagacctgttttggagatagaacggacaagctttgctgatgggctggagtggaacaggaagtcaagattacttcttctgggaagttctgttcctgggtctttaggatctagaggaagctgtgactttgtctctcatctctgcnctggctccaagc

SEQ ID NO: 329891 - DNA, 817 bp, Homo Sapiens
  misc_feature (142)..(151): n is a, c, g, or t
  misc_feature (435)..(435): n is a, c, g, or t
  misc_feature (580)..(580): n is a, c, g, or t
gtctaagaaaaatcaaggtttaggtgaatgagatgtatgagtaaatgtggtaaatgtttagcaagcttagaatgttttaaaatttgcacaataggagctttcatattttctgacagttggtggtaatattgcaggagagacnnnnnnnnnnaaccactagggaatgctgaaatatcaactgatcaactataatgggaaaaattttttttaaaattttaggtattctgattgctgcatcttttctgtttagcaaaataacaggacttacttagtagcctgtatgcattggggtgagagggtggatgtcgagaacactagtttagatttgtttcaagtcatatcatttcacattgattctaactcagaacattccttgtagataaacaaattttattctcctcctctagctttgcagttctcataagtgtactagantaaatctgcctcttttgttagttaagcaaactgagcgcatattcatggaagatgttggaccatacctgtattttagtagtctggtgaaaaggaatgtagtacagtggtctgcgtcagagatggtcactcagagctcctagtttangcactaatagggatcgatcttagggacctcgctgagatggtaggattgatggtgcatggcttcctacatactccgattgaataggtatattattgtctcgccggaatttaaggatatttcccggtctacaccctgtagtgggtttgatagtgggtcccgtaaaggctgtcaacgggcttctacttctctgtgacacgagtctgattcgtgcaaaacctagtgtggccccgctttctg

SEQ ID NO: 329892 - DNA, 450 bp, Homo Sapiens
caagtgattgttaccggattaaaggattgtgttctgtgtttttaatctgagtgtaaactgctccagtcctttctttgggaaattctgtccaaattttccctgtgcaagtcaacatggcaaattcactgtgttcaatgggagaccctcaggaagcctgggcccagccgggtgaatggccatcaccagagatcaacccagggcacccaggccatggggaggaagtgggaggctaaagggattgcatagagggtcttcgagaagaaggaagaggaggcggctttcaggagagagaaggaaattgtcttcttatcagttagccgtagctgccatatccggcatcctagaacattctccctaatgctacttagagcttctgacacctcccagggcactgtttgccttctcactctttccaggtaagtagttttaactgaaaagagagccacatca

SEQ ID NO: 329893 - DNA, 557 bp, Homo Sapiens
  misc_feature (379)..(379): n is a, c, g, or t
  misc_feature (395)..(395): n is a, c, g, or t
tagagctgaattccacaaacccgacttacttttcctggggctcttatgggatccagggctgggtacatttgtgtggttttaacttaacttgagttgagacactcagacatcacaggccagaaatcgtcctcttttacatgaaggaggggagtgtgggagggtggctgctcatggagggattacagacagaaaaagttgcaggggacaaaactcatccagaacgcttttcctgtcttttcccaccccaagtgttaagccatttcaccctcttcaaaagcaaacacacaactccgatttgcatgcaggtaagaaaacacccctgctgccacatgggatcctgggactttgtgtggcttgaagcaagaccagtgggcaaagnttttggtttctttctnggcgggcaggacaccttaaggttagagatgttttttaatttactgaactggttgcccatctgtttatctgcaagcccacaagtctgttttcacggtgtagggtctttaaacattctgttaagacacggggacaagttaatcaccctcgccgctccccaccaa

SEQ ID NO: 329894 - DNA, 458 bp, Homo Sapiens
gtaaagttagcgtgcataatcttaggtgttatatacacattttcagttgcatacagttgtgccttttatcaggactcctgtacttatcaaagcagagagtgctaatcaatattaagcccttctcttcgaactgtagatggcatgtaattgcagttgtcaatggtccttcaattagacttgggtttctgacctatcacaccctctttgctttattgcatggggtactattcacttaaggcccctttctcaaactgttaatgtgcctaatgacaattacatcagtatccttccttttgaaggacagcatggttggtgacacctaaaggccccatttcttggcctcccaatatgtgtgattgtatttgttcgaggttgctatgcactagaggaggaaagtggctcccctcatccccacttttcccttccagcaggaagtgcccacgccgaccctatgcagt

SEQ ID NO: 329895 - DNA, 415 bp, Homo Sapiens
  misc_feature (198)..(198): n is a, c, g, or t
tgagccaatgtgcctggccgagagagattcaagttagggaatatatatgtgtgttgacctgggtcctatatggccaagcttatgggctagcaggatgccctgtgtatgccagtcccagggcttgttctttgcaccccttgggagccagagtcagatggctcagtgtgagactgaaaccccaagagccatagctttagnctatagtcagcttttttttgagcagcctcaggaggaactttttggacctggaactacccgcttccaggtccatggagcacatttatctcggggcctgaggctccccctggaaatgagggtgctgtttttgtgtgcatctgtggtagtggcagctacagagccccacatgtctgttgaaagatcaggcatcacttttttctttctaaacttttattga

SEQ ID NO: 329896 - DNA, 449 bp, Homo Sapiens
  misc_feature (240)..(240): n is a, c, g, or t
  misc_feature (250)..(250): n is a, c, g, or t
  misc_feature (372)..(372): n is a, c, g, or t
  misc_feature (424)..(424): n is a, c, g, or t
caaaaccattgcttttcactttcagtataatattcaagaaattacatattgaatataagatattcaatatcttattctttattataggctttgtgttatataattttgcccaactaactgtaggctaatgtaagtgttctgaacatgttgaaggtaggttagactaagctctaatgttcagtagggtaggtgtattaagtgcattttcaacttacgaaatttaagctgatatccaaagantgagtaagantgaggtaaaggagcaagaaaacattgcttcaggcaaaggaatagtatgtgcaaaagccctggggtttaagaatatgatgtttttagagaactgcaaatgaatttcagtatggttggagcagngggatgtgggaatgatttattgatttctgttgggagagttagacagaggccngtttgctatgcttagttacaatttc

SEQ ID NO: 329897 - DNA, 550 bp, Homo Sapiens
  misc_feature (352)..(352): n is a, c, g, or t
  misc_feature (361)..(361): n is a, c, g, or t
  misc_feature (374)..(374): n is a, c, g, or t
  misc_feature (418)..(418): n is a, c, g, or t
  misc_feature (451)..(451): n is a, c, g, or t
  misc_feature (456)..(456): n is a, c, g, or t
  misc_feature (484)..(484): n is a, c, g, or t
  misc_feature (496)..(496): n is a, c, g, or t
  misc_feature (516)..(516): n is a, c, g, or t
  misc_feature (524)..(524): n is a, c, g, or t
  misc_feature (531)..(531): n is a, c, g, or t
ataatactgagagcggaagatttttttaaagagatatggtagtttaaataggtttgtttaaagaactcttgggaaatttcttaacaaattgtaattgtttttataaaccttcctacagagttgtgtaccattcatcatcaccatcatttaatatctgtaagtgcccagaaggtacaaggtgctatacagccgttaaacaccccctccctgcaactgtttaaaattagaatagatttttgcatcaaccactgctagaagctttccccacctaggtgggctggcaagggcctgcattcccaacatcccattacatgtttcccactccagaaagtctctggggtttattccagcntttttatcntggacgtgtcccntttcaccccctgggtttgggttgggttgggtttgttttttaaantcaggaaagttttcagggattcaaagggggtcnggacnttttttaacccggcggagtacaggtccntttttttgctanggttttgttgtggtacaggnaaccccanttggccnttagtgtgtgggtagttgt

SEQ ID NO: 329898 - DNA, 858 bp, Homo Sapiens
  misc_feature (14)..(14): n is a, c, g, or t
  misc_feature (222)..(222): n is a, c, g, or t
  misc_feature (261)..(261): n is a, c, g, or t
  misc_feature (676)..(676): n is a, c, g, or t
  misc_feature (848)..(848): n is a, c, g, or t
ccctggccctccanccctcgggagtacccccggggattaacaggtgccgtggcccaccgtgccccagcccatccgtgacatgtttaatacaaatataactttaagcaaatatttagccataactatcaaaattacaaatcatattaaatttgtataaatgtatgcaatttttggaacacgcatatcaacaacataccccataaatcatcaactgagctgcgnatctaatgtcacctcacttgaacagtgccctccccatgncagtatcggccacatttgcacaatgcctgcccatttaatctaccaaataaatcgaatcacttaatacctctacaagatgagagatacattctttagactccccaagggatgcagctgaaaaaaatcccaaagttagttttaagccaaaaagacttgatttaggattttgacactggagaaacccatcaaagatgtcaagtttgaaaacacttgatcaaaacagaatcacaggtcactattaaaagagtattaatttaaccagagacttccaaagcaatacagaaacttacatggatataaaaaccctaacccttttaaaggtcagatttgctaagtgatcaaaaggggtacttgaattgaatcgacacaggaagagtgtgtacagggttatgagtgtaggcaggtggttactttngtcatatctccatttgccacctgattacacatgagaatggcatctttactcaccagaaagccagtattataggaggtgtaggaggcattcttggatttgagacaagaacattgttgtgtagaaatttcattgactgtgttaaaattattctccatgggctggagaacacatnacatggcctt

SEQ ID NO: 329899 - DNA, 132 bp, Homo Sapiens
aattgcagcagctttgtagtaagttttagtatttctgaaatcaatctctcagctattgttagactgaattttacactgtaaaactttaaaataatttcatttcattcagtcctactccccgactgatatttt

SEQ ID NO: 329900 - DNA, 637 bp, Homo Sapiens
gtcaagatgcaaaatgttgataagcttgagtctctcccactctggctgcaaaaattaaaaagggctacaacaaaattatagactggaaatttgtgaccaaatacagcacaggattcttagactgcaaggaagacagcttcagagaaaggaacaaggagagtttacttacacttgtttatacccctaaggagggcttttttgtacatatttgttggtaatattttgaagatgtgaagtcaatgcactttaatccgctttggtatcatggtcccttccagccttccacctctgaggctgagccatgaggcctcttgccccaggggacagtaggacagttctgcctccagcaaaggtgtgatggatcagctttactcacaaagctgaatttctggagcacgcagcaagatcatgattttgaaagccaggctttgggagaaggaaatgtgttttctaagtttctttagcttccatgaatataaagtgttggctaattactatatacaaatgtagttggaactcagagtttagagatatggagaaattagaagtatttcccttttcctctgagatatggaacagcaaaatgaaaggaagacaaagggcaatgatattgggcattacagggtagggtgcaact

SEQ ID NO: 329901 - DNA, 643 bp, Homo Sapiens
gtctctgatgtcccaagttgctacttaatgtcaaattctcacatcaattcaaaacatttcccagtgggatgtttggttatagttcagtaaacttgtaagcatgcgccaaaggagtatatactaaacctattgaaggcttgataaacatattgtacggctgccttattgagactccacctttctcttgttcttacaatcattcaacaactgtatccttaggcccttcccaagcagcacccatggccatctaactgttgccacctctgcccaactccaagcactattaccctattcccagtctgctcatagcgacgtaggatatgagggtaatagttttgttgtgttatcatctgtatccaaagttaatgctctctgagctggaccttcccattggcagtagtaagttcagacctgcacactcacctgatctcctctgtgaacaggggtactcactcgtgaagcagctgacaagctttagagatgctggccaggattatacacgcaatctgtagctgcagaacaactcatctttctgataaaaaatgacccaaaatgggggtcgatagtacaacacaagcttctgcgatggcagcctctgtgtaagaagtatcttgcggtcaggtgtgcgtgcacgcctataatc

SEQ ID NO: 329902 - DNA, 543 bp, Homo Sapiens
  misc_feature (527)..(527): n is a, c, g, or t
ccttaaaaggtaacccctaaacacagctaaaactatgccatcagctgactccaaggtacacacagtcctgtatctggaactactgagtggcaggcatctttctctgcctctgacagtggagtccccatcactgcagagcatagccaaaggagtcaaaggtctcagcgggtcactgccttatcaaccctcaccagtcccttatgttttttaatattttataatcttgacatgacaccaagatgctttaataaaaaagcacctctaactcggtcttgtattcacttaccttgagcctgggacttctctaggctcctgaggcaaaaacaggtagaggggagatggtggaacataaaacacaattttgcttggcacccaccttgggcgtctgtccccatgaccaggtttttcaattcgatgattttgtacattgatggaggagcgatatcgtttctcaatgatattatgggttgtccgccttctccttctttggggggctcaagctgcctcgtgccgatttttgggctcgngggcaaattcccctag

SEQ ID NO: 329903 - DNA, 347 bp, Homo Sapiens
gagaatggagtcctcattatggtgcccccggcctagatttgaactccctgagctggccttagatttactttttgagtgttagaatatgtagatatttattagcccagcctctttaaaagtatggctcagcgtaggactgttaaaaacttgttaactgtggaagaagtatgactgagacaatcctgattgttttgtaaactgatgtttgcttgtttaagaaatattaatgtttgtaatcccagcactatggaaggccgactgggaggattgcttcggcccaggttatagtaagctatgctcttgacactgcacactccagcccgggtgacagcaagactctgtctctt

SEQ ID NO: 329904 - DNA, 379 bp, Homo Sapiens
  misc_feature (18)..(18): n is a, c, g, or t
aatccccagatccccagnaaaagcctagagggcagttcaccgatgactcccctccccagcagaccgtatcctgggaggttgccctctttgttcgctgaaggttacctaagagcctgtgtttcaaagatgcaatctggggaatggcaacaatgcacccatgtgtgtctgaagagcagctggtaggatattaaaagtcccaatttaaataactagtaggagataaaggagtgagtggcagagtgatgttctactactgggtctgaaatacttcataattcagcagtccattagccctgtttttcgttactgttgccgctgcggaccagagagccgccgccttctcctccaccccaatgaggttaagcgcttggtgcgggga

SEQ ID NO: 329905 - DNA, 430 bp, Homo Sapiens
tggttcactgggatgtaagttccatgagaacagggtttttgagggcccttttgcctgactgctgtattcctcagctccctgggacagtgcttgccctctcctcctctgttgaaagcatagccccactgcagttcagacgcaatatgtgttaaaatacccagctgtgtgccctgttgatggcaggttggggggtggtttagcacgtcgaggacagcacactgtggctttgcttgccggctcactgagcatatctgagagagcttttcgtgcattatcagtcagccttaattgcagtttcaggccttggtcctaccacactgatcctgtgtgttttgtacaagtagatataaacagggttcatagcactatacatagcactataattttaaaaaattgattatgatgtatttggaaatagctataaatgacc

SEQ ID NO: 329906 - DNA, 427 bp, Homo Sapiens
  misc_feature (63)..(63): n is a, c, g, or t
  misc_feature (402)..(402): n is a, c, g, or t
ccggaaaggggtgggtgttgggggccaaaaccccgatttttgtgttccaaaaagaaaaaatgnttttgccacctgaccagctgtatgccaaaccagtaacagtaccattaccaatgaacccccctaaaatatgaggaatccaagacctgttgacctttgggtgaaaagcgagtgattcaggccccaagtgattgagtagctccgatcaggtctggttttatctcttcctgataacacagcattggttgttacagggacaaaagcaggagtgatgtatttggctaaatctttaatcaataaaatagattaaggatcatgaatatggagttttcttttccccttaggatactttacttatactgtgctacaatttagtcccaaatgcctttcagtgaattaggnaaagctgtcacttccttaatcttgt

SEQ ID NO: 329907 - DNA, 458 bp, Homo Sapiens
  misc_feature (23)..(23): n is a, c, g, or t
  misc_feature (51)..(51): n is a, c, g, or t
  misc_feature (84)..(84): n is a, c, g, or t
  misc_feature (94)..(94): n is a, c, g, or t
gtaccgtaatgaaagccacaaanggagcctttataaaaagggccacacccnaaatcctatccagagaagatgccagcaggggtncaggggaagnctgtttagaggaacctaaagatgagccatataaccccttcacctaggacttcatccccaagagcaaatgggaagcctactggggctttcaagtaggacagatgatcaggctgccttttataaaaagttcactctagttgcagtgtacaaaatgacttgagaaaagcaatgcccaaaagaagacaatcagctatgaggttccggaagaagccttgagctaagagacagaagggaagggtcatggctgaatttaggagaacttaatgacattaataatagcaggaactaggggcttataatatgtgaggggaggggaacaaagggaaaggaagagcatacgatggtttttgtgttttttcacttga

SEQ ID NO: 329908 - DNA, 593 bp, Homo Sapiens
acaaatgaattttccacgcagttctttccatgggcataggtaagctgtgccttcagctgttgcagatgaaatgttctgttcaccctgcattacatgtgtttattcatccagcagtgttgctcagctcctacctctgtgccagggcagcattttcatatccaagatcaattccctctctcagcacagcctggggagggggtcattgttctcctcgtccatcagggatctcagaggctcagagactgcaagctgcttgcccaagtcacacagctagtgaagaccagagcagtttcatctggttgtgactctaagctcagtgctctctccactaccccacaccagccttggtgccaccaaaagtgctccccaaaaggaaggagaatgggatttttgctttttgagggcatgcacatctgggaattaaggtcaaattaattctcacatcccttttaaaagtaaacttatttttagggatcagcagtgtttcttcacagtttgggggcagccgttccttcttaattgaaggacaatggtttttggacattgttccctctttggggcagtttgcatttaggtaactttggaaagggttt

SEQ ID NO: 329909 - DNA, 443 bp, Homo Sapiens
gataagttatttccttcttccagctcagtattctcatctgtaaaataggaataataagtactctgtacaattccctgtgaagattaattgaatacttaattggcatgtagttgcactgagtcaaaagtatgtattctgtacaattcctatgaaaatttgttgagacacttaagtgccgtgtaattgcactgtctcaatgagttgcagtgagtcaatgagctgcttttattattttctttttaaagaaggaacaatttgaaaaatacaagtagaaaattattaactttggtaatattagagatttggtgcagaaaaagaaaaccagaaatttcaataccattaatatcagaagcccagataattacttgtaaagtgttttaatgctctcaggccaagagtttgagattagcccaggcaacatggcaagaccgccatctccgatt

SEQ ID NO: 329910 - DNA, 423 bp, Homo Sapiens
  misc_feature (62)..(62): n is a, c, g, or t
  misc_feature (365)..(365): n is a, c, g, or t
caaaatctgagccagatcaatttaggaagtttattttcccaaagttaagaatgcacgcaagnaaaaatggcctcaggaagtcctgacatgtgcctaaggtggttgggacacagctcggttttatacattttagggagacatgagacatcaatcaacatatgtaagatgaacattggctcagtctggaaaggtgggacaactcgaagcaaggagggagcccccaggttataggtagatgagagacaaatggtcgcattctttcgagtttctgatgagcctctccaaagggggaatcagatatgcatttatctcagtgagcagggggtgattttgagtaggatgggggcaggttggcccttaagccnttcccagcttgactttcccctttagcctagttgttttgggggccccaggtttattttc

SEQ ID NO: 329911 - DNA, 304 bp, Homo Sapiens
  misc_feature (23)..(23): n is a, c, g, or t
  misc_feature (59)..(149): n is a, c, g, or t
atacaaaaaattagccaggtgtngaggccgggtacctgtaatcccagcttgctccaggnnnnnnnnnnnnnnnnnnnnnnnnnnnnnnnnnnnnnnnnnnnnnnnnnnnnnnnnnnnnnnnnnnnnnnnnnnnnnnnnnnnnnnnnnnnaaactccctctcaataaagagttttggataaaggattttggacctgcatcacttttccctggcaaatagcaggtgataataagtgcttgttgaatgactaaactctgattcatccttgagaccatcaattatttgcctgccagtcctatgaatgt

SEQ ID NO: 329912 - DNA, 682 bp, Homo Sapiens
  misc_feature (530)..(530): n is a, c, g, or t
caggttgtctttattgatatgttcactcaccagagaattctacattctacgtaaaagctcaaatcgccagatactgttattactattttaggagggcttggctaatacaaatctggaccaaatgttggcccatgctaaattatatcaaaagaccaaacatccaagaaaggcaggaattcaaagatttcagaagataaaaatgcttgattgggtccctggcatgcacccagcccatcaaccccctcactgccctctggcaggacccagaagatgagctcccttcttgccacgagaaatacattcacgaggctctgctgattttcctctctaaggcctgggaggctgcttgaaagagctgctgtgaacgtgggctccctgatctcagcaacagagatagacagaaggaacaaaatagggcgctcatcgtaagggatagggcatggaaaccagacctcgagctgtgggtcccaggaatgaaaaaggccagacgcccctaagatatggcctagtaatgaccttaactaaagacnttctgggccaacagttctgtctcaagtgccaaggtaaagtcaagatctcccacttgatttccagaccttaaatggagaggaagtcaaatgtatttttgaaggaaaaacttattttaacacttagatgcatgttgtgaaccttccttgcagcc

SEQ ID NO: 329913 - DNA, 592 bp, Homo Sapiens
  misc_feature (461)..(461): n is a, c, g, or t
  misc_feature (505)..(505): n is a, c, g, or t
  misc_feature (512)..(512): n is a, c, g, or t
  misc_feature (520)..(520): n is a, c, g, or t
  misc_feature (526)..(526): n is a, c, g, or t
  misc_feature (571)..(571): n is a, c, g, or t
tgattctcttagcagttgtttgctgattttatggaacaggcattggcgtgtacttgacttcagctctgtcaccaccccccaggaatggtgtgatggcgtcagtgatgtacgctgtggtcacccccatgctgaaccttttcatctacagcctgagaaacagggacatacaaagtgccctgtggaggctgctcagcagaacagtcgaatctcatgatctgttccatcctttttcttgtgtgggtaagggcaaccacattaaatctctacttctgcaaatcctgcctcttagtcacattatttttgtgggcttgatgggcttttattcctttccgcatttcctttgtgaatattgctttcttcgttatgcctttaactgggaatggggtgaggattctggggatcccttgtttagcagaaacctcatgactgaatcccctatacccagggggcctctttttagnttccgaggcaataaccccgtcatcagggggggatcacaaccatnttttcanatacacgnaggccncaattcgtttgggattccccgaaaactgactttatggggacaatnacagggggtcgtgccgatttt

SEQ ID NO: 329914 - DNA, 591 bp, Homo Sapiens
tttaaaaaagctttcttgttctccaaggaaaaaagaggcatagtcacaataaagtcagttcctctcttacataaaggaaaattaaaagaaatctcacaaaagaccagttgatttacctgcagtcacctgggagtttgcaagacccatgcttaggactgcagccttgtcggcaaatagctgtaaaaaacagagaagggcgtgtcagcacactgcctgttccttgcatcgccccggtcatgagaatggcccattgcattaaagtctgcaaattccacgattttaacaggtctcatatcaagtcccttgtaaggagaggaagatgggaggggcccaaataacaaaaccagctttaaacttcaaggccttgttagcagattctgaaaacatgatattgtttggggacaaaatgcagacaagttgacgagggaagggggaccttcgtccagcctctctaaaccacagctaccctggctccttgagcagagcttggtcagtttccattctgcccacacccttttcattagaagaaaaaaaggtatagataatccttccccatcccaccaggacacattcagatgagcctcagccttt

SEQ ID NO: 329915 - DNA, 332 bp, Homo Sapiens
agtccctacaggaccgtgcttctcccctacctctgggcctgtctggaatgttctgtctactagcccacctattccttctacctggccatctcccctgctgaagctttgagactgtgagttctagagacagagatgtgggtttgactctaggttttgtaccttctggctggaagtcctagtcattccttctctgaatcttagctgtgagaagtcagtgagatcatgcatgtaaaagtgcttagcacaagtcaggacatatacatgtgccttgttgccacccaggctggtttgagagcatatgttactgcaatggcaatatattgagataagtc

SEQ ID NO: 329916 - DNA, 757 bp, Homo Sapiens
  misc_feature (539)..(576): n is a, c, g, or t
ctgatagcacggctcagttcaagtccagaatttcagaaccaaggaatctgacagtggtaactctcagtctgaggttgaaggcctaagatcctgcaggggcactggttcaagtctgaaggccagagaagctggagttctgatgtccaaggacatgacaagatggtgacccaaccccagaagagaacaaatttgctttcctctgtcttgtgttctatctgggtgctcagttgattggacagtgcctgtccaaattgggtgagagatctttcttagtccactgattcagtcctaagtctctttcagaaccaccctcataaagatacccagaaatgatacttttgccagctatctgttcagccctttttacccagtcaagttgccaccaaaaattaaccatcacagggtctctccggccgctgcagtcagatgatagctggggtcaggctctcttaaagccttctccattcacatgtgcctgcccggggaaaactcaaacagctctgggctgaaacggctggaaaaccttggcatgtctatgnnnnnnnnnnnnnnnnnnnnnnnnnnnnnnnnnnnnnnagcttttcatttggtctttcgaacgatcgagggcctcagggcaaccaaacttcttacattgtagccaaagacgccagaatgattatcccaagaaaaagtcactgatgctgggtgtggtggctcaggcctggaatcccagcactttaagaggctaaggtgagaggacaccgaatttagcagg

SEQ ID NO: 329917 - DNA, 310 bp, Homo Sapiens
cttcctttctgtctttgttacatgtccagacatgccacagtaccaggcgttatcagtactagctcacattcctttccttatttggaaatgctctctagctcattgcagacaccccttcccctttcccctctctcccttatgtgcccaccttatctttaaaaagttcaaatgtttagccaaccgggattagtttagaatttacggcctgaacccagccaatggggaaagggtacaggcgcacttgcttcaggaataaaggctctcgtgcccctttgttcaggtgtgctgtcatggcgactggccaaggagg

SEQ ID NO: 329918 - DNA, 428 bp, Homo Sapiens
  misc_feature (284)..(284): n is a, c, g, or t
  misc_feature (394)..(394): n is a, c, g, or t
ttgctcaatctattgagatttgtgaaagagaatttaaagctgtgtatggtcacagttctttcccaattttctgttggtgattctctctttttcttgctagagacagctgcataatttttatttgcttctagagctattctcttgctcctcttcccccagccactcaatctatatgcaattcagagaccagggctaattatggggtgctagagaagcagttgcccagagaaaagctctttaagcactcaactggggatagagctggggtcacactcgtgaccatnctctccattcacggtctgcatgtctgcgtgtgaggctgccttccactcttttgcaggttgcataaacaaactttttaggaaagggtcaacacagggattgaatgcttttncttaaggaccagggcaagggaaggtttcaggttt

SEQ ID NO: 329919 - DNA, 443 bp, Homo Sapiens
  misc_feature (382)..(382): n is a, c, g, or t
  misc_feature (417)..(417): n is a, c, g, or t
  misc_feature (426)..(426): n is a, c, g, or t
tattataaagaaaagaggtttaattggcttatgtttctgcaggctgtacaggaagcatagtggcatctgcttctggggaggcctcaggaagcttccaatcatggcggaaggcgaaggcaagcaggcacatcacatggtgagaatgggagcaaggtcggggagaaggcgccacacacttttaaatgaccagatctcatgagaactaaccatctgaagacaacacaaagtcatgagaggtctgcccccataagccagacactttccaccagggccccacctccagcattaggggattacagtttcaacatgaggttttggttgggggaacaatattacaaactattaggccaatgggatgggatccaaattaatttgttaaggngttcaactttctcttgcctttacttaaggcagggncccgggacntccccggtgggtttttt

SEQ ID NO: 329920 - DNA, 565 bp, Homo Sapiens
  misc_feature (44)..(44): n is a, c, g, or t
  misc_feature (49)..(49): n is a, c, g, or t
  misc_feature (62)..(62): n is a, c, g, or t
  misc_feature (66)..(66): n is a, c, g, or t
  misc_feature (68)..(68): n is a, c, g, or t
  misc_feature (112)..(112): n is a, c, g, or t
  misc_feature (139)..(139): n is a, c, g, or t
  misc_feature (180)..(180): n is a, c, g, or t
  misc_feature (202)..(202): n is a, c, g, or t
  misc_feature (245)..(245): n is a, c, g, or t
aggaatatttgaaaccttggggcaccccaactggggaacagtgnccggnacatgtgtagccncccnantatgtgacatttaagagttccccccggaaatccctttgccatcnacatccttcagtgccagcgggagacgnccttacctagacctcatacaaggccttattccttatttaancccctgtgcctcgaattacggncccacacaggcacctgaaaatgaagtatttccagtaaatcggncccgggcccaacaccccggatgtccagcctgcccaagacccaaactgtcccagtggaaacccttaaaggagcaatcaaatcccagctttggcaataaaaaggaaaagaacagaggccttagaacaaggaggattgcccaagaaactaattttttaaagagaacactggacaacattttactactgagggaaatagccaaaaaggcaaataatggaaaaatagtaaacattaagtaaatgctgtagaagtgagtttgtaaatattctacacatgtaaaatatgtaaaactatgggttatttttattaaatgtattttaatt

SEQ ID NO: 329921 - DNA, 420 bp, Homo Sapiens
  misc_feature (329)..(329): n is a, c, g, or t
caaaatgaatttgatttttgataactttcaaattcatttggaaattcatcagtcaagtccagtaaacaagaatccccagtgactactctggaaaccaacactcactccttaatgaacaacatgtttatcatgtccatttagttaagcaacaaatgtttattgaccatctaccagagagagagagatgggaaatgggaaattcccatctcccagatgggaaattctctttgaccccttcacaggccttgagacaagggtgcctcacttactcagtctgcagctctcagctgggacagggagcacgcaggtgaggcaggcgcagggagttngggacgagtgcttctgggcgccagcaggaacagaaccccgtgcagccctacagcagcatctatgagggtacctgagacccctggggcccca

SEQ ID NO: 329922 - DNA, 446 bp, Homo Sapiens
  misc_feature (14)..(14): n is a, c, g, or t
  misc_feature (39)..(39): n is a, c, g, or t
gctttgaaattccnccagcttcctatcccaaactcaaanggattccctttttcaactttgccccaagaagtatacagaatagtatttccttctctaaaaatgcttttaaatgcacagatcatgaccctgaagcaattagttttgaaatgtcctgcccttttatattattctgttcccagttttagaagagagaatgcaaggattattgagagaaggaatttccatagctcagataagagagacgccaatggttcttgaattaacaccacagatagtacagtacaggataaggaaactgaattcctcaggctacagaataaaggatggacatctagcaaatctaaatggatcaaaaaaagagtttgaagctaattttggcaaaattcaggccaaaaaagtaaggccattatttaaccctgtggcaccattaaatgttgaagaatgac

SEQ ID NO: 329923 - DNA, 550 bp, Homo Sapiens
taaagcacctattgaagtgttttattgaaggtctccagttggagaaacattatccctattggtgaaccgtttcagatactatagcatttggaataagattcggaactgttgtagtgagaccattgagggttgtgggagcatttctggcccctggtgaaaggccttggagcataggatgcagctgaatgtagggtaatgtagggagactgccgacttggtctaggtggaggccaagacagcaggaatgcaaaggaccgaagcagttcaggactgaatgagatcttaaactggacctatgagaatgagaagtgcaaaggcctgactgtgcagctgcttggtaaagctgtgctggataaaggatttgacaaattcgttagcagtgccttcaggcagatgataaacccttggtacttgttccttcatgggaaaatgaacatgtttctgcccctctctacatataaaaaacattcataaatctagtcagtttcattggagattctctgctctcattggatggcagaaaagaaacaggccttgttctaaagtactt

SEQ ID NO: 329924 - DNA, 663 bp, Homo Sapiens
  misc_feature (90)..(90): n is a, c, g, or t
  misc_feature (240)..(300): n is a, c, g, or t
atgatgctgaggttcagaatatggcatttcagtatgggaagcacatggccatgagtcataagataaattctgatgtccagccttttattnaagaaaagaccagtgactccatgacttttaatctaaactcagctcctgtagtcttacatcaggaatttcttggaagagatttgtggattaaacagatcggagaggctcaagaaaaaggaagattggactatgctaagagatagggtctcnnnnnnnnnnnnnnnnnnnnnnnnnnnnnnnnnnnnnnnnnnnnnnnnnnnnnnnnnnnnntgggctcaagtgatcctcttgccctcagactccccagttgcgagaaagaatcaaagctggcaaaggtgtgacttcagctattgacctgtgtcgttaccatggaaacaaggcactggaggccctggagagctttcctccctcggaggccagatctgctttagaaaacattgtgtttgctgtgaccagattttcatgacatcaaattaaaaagacactattgttagttagctgaaaatcctagggaatgaggttgattgggagcgctttcacgatgcgttaatgacttttaaaacatatgcatttttccttccttttatcacattgctaaatgagttctgctttctttttggaactgctacaaac

SEQ ID NO: 329925 - DNA, 426 bp, Homo Sapiens
  misc_feature (43)..(52): n is a, c, g, or t
  misc_feature (218)..(218): n is a, c, g, or t
ctaattctccaagaaattttgtatgtctttgtttcaaatgggnnnnnnnnnntggacacacgtccatcaggaatcaccatctttacattgtcagaataattctgtttaagttgttcttttcaaaggacaagaaggcccttcctttgcacatactgtcctttaggggatttcctttctctgaatcttgttctcctgttataaacttgtttgactacacnttcaaaactaggccatcctcaaatacttggcctcaaaatggatttctctcttggatgcagaagaaaaatgactacatttctgcatatttctcctgatttttattctttcccaaaaaaacagatgttattcagaccaaagtggttaccatagcatctccttattttaaaagttttatgtattactttattaaaggaagttttcataacg

SEQ ID NO: 329926 - DNA, 424 bp, Homo Sapiens
ttttttttgctttcttgctggtagaaaccagtcttcagcctgagactcatccctaggtaagtaactgaactggggtttgtcttggttaaagttaatattaacaactaactggtcgtaattcctccttaccattggagcgctcagtgatcctattgctgttttgtgtgtgtgtttgtttttgctatttgttcctgtctgaagttgttaaggaacctaattctagttcagagatgcattctaaaggctcttccctattgctttttctctcaaatttaatgttaattcagtttttctgtgtgcatttgtgtgagaaattgaactgctgttttcatatgttaatgagagactgagttttgtcagttgagaagaaaaagggtgttttgctcctcccagccagaaggcacccctgggtgaccgggtggcc

SEQ ID NO: 329927 - DNA, 495 bp, Homo Sapiens
  misc_feature (462)..(462): n is a, c, g, or t
ttgtttttgttttgtatgtcctctttccccttgaaaatcaaaaacgaagcagaacataaccctcagcgtctacagaaagctcctcggcgtgcacacactggagcaatgcagaccggatctaagaccaacgtttgccctcggaaacacttccttcccccgagcccctggtccactccatttttcaagaaaactgttctattcaaccaggaggcaacatttgccccattttttaatatttcaggctgactttttaaccactcaaaaatgctgtttgttttctgtaggcacagcctgaagccagatgatgatgtaagtgagaggagagagagggtctctctgggtactgcgcttccgtgcttaacggttaatcacccaacaccagcctcagcaactgttgacacaaaataggtggagatcaggtctgtgcaagcagaaaataccagaaaggcaaactatatgtanacacacttaagacatatttgacaagaatagacc

SEQ ID NO: 329928 - DNA, 491 bp, Homo Sapiens
ttttttttggagagataaggtcttgttttgtcatctaggctggagtgcagtggcacagtcatagctcatggtggcctccaacttttggtgtcaaggtatccttacgcctcgtcctccctagtagctgggactacaggtgtatgtgccactgcgcccagctaatatttttacattttgtagagatggagtcttgctgtcttgcccaggttgggtctcagaaaagaaaatttaaaagtagcatttagggacaaaaggaagagagaccatatctagagttgtttatgtatatattattatcatttcagtccaacaattttgaaaattacttgttttatcttgtaaagtcgttattggcttgtatttttgatccgacttcttgctcttttcattcattttcttagagactgattgcagcaccaatgcaacatacttgagtctgggctgtacctgcagcgggtcacattcagggtggggcctacaggggagggggc

SEQ ID NO: 329929 - DNA, 443 bp, Homo Sapiens
  misc_feature (386)..(386): n is a, c, g, or t
gaagtaaaaggtttttttaaataaaaaatgtaaagcctattcaaaagtacagttagcagaagataaagaacaagccatgaaaccacctctcctctgagtcttgtcttatttttctattttgaccgatttccttctgtgtttggttagcattaggtttggcagcatcgcaaaggtccctgtattcccctcttcccccacaaaaaggtgctttaaacaagatagaggttttttcctctcaggatatggcagctatgtggtcagcaaagacccagctcctatctttctgtgttgcagtctttagcttatgactttcctttctcagggttatctccttggttgcaaagaaggtcctttgcagctccatccgttgtgtttgtttttcaggncagcagaatcgaggggtgagggcaaaatggcccttctctctgtgaagttggtccctt

SEQ ID NO: 329930 - DNA, 231 bp, Homo Sapiens
  misc_feature (22)..(22): n is a, c, g, or t
taaaaatgttttaccaaaattngataacctccaaacctccatatcctaaactcccccactttagataacccctaaacctaccttccataaaagggaaccaaaagccttaatacttgcctatcagaggtatggcaaaagaatcccttttccttcacaattagtttccaatttctgtcaaaaccagcacccctaccctctactgataatcagacttctggcagtagctcacac

SEQ ID NO: 329931 - DNA, 574 bp, Homo Sapiens
gctgagtaatattctattgtatggatgtaccatagtttgtttatcctggtatatatttttaatttttacaatctatagcttccttgaaggcacattacttaggctgaagtttcagatatttcctaatctgaccctcgcctttcatcccaattttattctgacctcactgttccctgaacatgaccttcatttctctgagcttttgcttggagaacattccagggaatgttcaagcatggatagccatcaccccactgccatacggcaggtgcggaacctaagaccagacttaaacccattactgaattgcatttcccgggggattgatttagggaatgaggaatgttacctagttgggaaccaatgaaacctgcatttgagagttcataaatttgaagctgagagggtatgaggagcagtggcagctctattgtggcccaagggagaatgtgtctgagaacaggatcatttgtgggagaaatgaaaaagagaaattaggtcataaggatataatatacacccacaatcaaactgtattcatgtgcacctgtacattctttttcattcaagtgta

SEQ ID NO: 329932 - DNA, 427 bp, Homo Sapiens
  misc_feature (298)..(298): n is a, c, g, or t
  misc_feature (333)..(333): n is a, c, g, or t
tttttcttttctcatcttcagcagagtcgctgccaacaagagcctgtttgtggcatttcttcttcctttctacttcttcctcagagtcactgcaaggtgggccctgtttttgacatttcttcttccctttcttccctacttcagcagaggcactggcaaatgatgcctttttggggcatttcttcttcctttcctcctcctcctcctcagagtcacttatacataggctggggggatgctgggaaagagatgctgcctctagggcccgtaatgtggccaagagctggcggcgcttggnagcccttgttttgcgaggaggccgcaggcggaggntcgtgagattacgggcccaaggcccgcggctactggggccgcctcggcccactcaggctcttcgaacatgagggtcgggagggcagggtcgccg

SEQ ID NO: 329933 - DNA, 331 bp, Homo Sapiens
  misc_feature (285)..(285): n is a, c, g, or t
  misc_feature (299)..(299): n is a, c, g, or t
tttgcagcacaatttattatctggccatagtatttgggtacattatcaggtaccgatttaacaccatgtaacctctcttgacacagagcaacccaaaaagaaaactttaaaatgtgcgacagaattaaatatcaagctttgtcatctaaaatgtataaatataaaatatcagtcatttctggaaacatcttaagaaaatccggcaaccacatgtccatgagtaggtgtctgatgttgacggtgcttacattcaggaacatatcacctcagaatccaacacatttntttttatgtctttnaccaacacatgtttggcatatactgaacagcc

SEQ ID NO: 329934 - DNA, 492 bp, Homo Sapiens
ttgcatttctttcattactagtgaggtggaactattttaattatttattgaacatttacaatttttcttctaaattgtctatttttccattaggttcttttttttaattatgatatataagtacactcaacaatggatgtttgccctcaaatattatgacatctttgtttttccttctgtactgcccagcaagaaattaggagcagaaaagaaaactgaaagattatgaagacccatttcacatttcacctatacaggtctcagaaattcttaatgggtacccatctttcaaggtcaagtttcccaagagacttaggaaactgctcaggaatatattcacacattgataacaacctccagtttttgagctactgagtctacaccaggcgctgtaataaatacactccatatactttctcattttaatactctctataaaagacgattttacagatgaggaaatacagacttagagacattaagtaagtcatc

SEQ ID NO: 329935 - DNA, 474 bp, Homo Sapiens
  misc_feature (402)..(402): n is a, c, g, or t
  misc_feature (419)..(419): n is a, c, g, or t
ctctggcagcattttgaactagattagttaaaactttattataaaacaatgaaaaattaataaaacagggcaaacatcttttctcattgttttccagggctgacacaagtaaataccacattccttcctcagtccccacaaaggtcatgtccttctcacataagaaatacattcatcccaacccaacatcctcaaaagtattaacccattctagcatcaactcgaaatccaaatctcatctaaatcaagaatggggtaaggattacaggtatgaatcatgctgggggagaagttcatctccagctgtgaacctggggaaaacagacaagtttatctggctttccaaaatacaatgggtgacagggtaaagggtaggacattctcatttcaggatggaaaggnaattggagggagggggntcttgtatccccaggcaagtcaggaaacatggcctgacaattcccttaggttttt

SEQ ID NO: 329936 - DNA, 401 bp, Homo Sapiens
  misc_feature (266)..(266): n is a, c, g, or t
  misc_feature (367)..(367): n is a, c, g, or t
  misc_feature (388)..(388): n is a, c, g, or t
actttgttcatttctgaattgggaatttattttcatttatgtaagtgtttagggctatgaattttcctctgctcactgctttaaatgtattccacagattctgggtatgtagtattatgtagtacttttcttatcaaaattttccagaaactttgcaatttgtgtttcccttttacccattaaacttttaaaaattaagggcatactgttgaacacttatcaaaatatagggacttttctgtcactctaggaaaggctcccttccntgtccctttcccactcaatctctccccagtcctgagttctattagctttggctaaattttgtatatatttaggattttatataaagggcataaaatcgtangcatattttggggtctaattncttccagtcagca

SEQ ID NO: 329937 - DNA, 558 bp, Homo Sapiens
  misc_feature (278)..(286): n is a, c, g, or t
gctgcattattttaaacaaagctctctgtgttcgaatctattgaacttgaggggatatattccatcaatagatggaattccttcctgagctagacctcatcagacatgataactaggaggcaggctgcttctgacattcagataaaaggggcttgcctggggtgagggggcaatgagggtgggggaaactgctgatttgtggctaagttatttcagtcaaatcttaacacacaatcatttaacatcaccaacactttcaatagacttttgaaggaggnnnnnnnnnctgagcactcctcacttaccacatccaactcgcagaaataaaaatacctaaagcacatacatgaatggctttttaaaagcctgagagagcagagttgatctttattttcttacttaaaatgtggggcatttttctttagagttaatatgcagtcttttattttacattaagtactcttatgatttcatgtcttcacaaaattgcgcttaacttttgaagtaggaggtactttaaacaaaaatactgtgcaatgtcagcacttttttcctttt

SEQ ID NO: 329938 - DNA, 548 bp, Homo Sapiens
  misc_feature (399)..(458): n is a, c, g, or t
ctattttaaatgtctttaattgctgaatgcctctttggctaatatttggaagatcattatttagtcctacaaccgacgcattgttccactttcccatcattttgtttgcaaaccgctaaaagtcttatttcctcatctctttgacacattaccaaagtggaccctatgctgtaatcacacaggataatgttggaaagtatgaatatctaaattattttttaaaggtattatttttttccttctgttttcaaatcatttctgacagtttctaaagacatggtcacagctgcctgaagcatgtcttcttcactcatagcatcacctagatcactcccaagtgctcctgaactggtggctggcctttcacatggatgtgaactctgtcctgataggtccccnnnnnnnnnnnnnnnnnnnnnnnnnnnnnnnnnnnnnnnnnnnnnnnnnnnnnnnnnnnntttttcaaagtaggcttctcgtctcttccgaagctcttctgaagtaagatttgtacctgatgtctgtgtcatatcttgagaaatgtttcg

SEQ ID NO: 329939 - DNA, 444 bp, Homo Sapiens
tatttgaaaaacttttattttgcataaaacagacccattccctttgtgggtcagatgttaccacctttaaaaaaatgttttttaactctcctttctgtcccactgaaaaatttattttgaaagggttaagaagagtctatcattgctggtcaaaatcggcctgaggatggccgccaggtacagaggcctgaaggcatcatctgggcaggcctggaagcccacggggtgcagcatcctcaagcccaggggggtgacgcttccggcctgccctccagggaagctgcatgtggacctccacggtattcagcctccagtttagtcagccttgagtctgggctgctcccgcacctggtgttttatgcgtgtgatatatgtgtatccatcctgcttccctgccttcaagggaagacttaactttccgagagaaaacctgcctggagctgc

SEQ ID NO: 329940 - DNA, 474 bp, Homo Sapiens
  misc_feature (20)..(20): n is a, c, g, or t
  misc_feature (45)..(45): n is a, c, g, or t
  misc_feature (52)..(52): n is a, c, g, or t
  misc_feature (226)..(336): n is a, c, g, or t
  misc_feature (356)..(421): n is a, c, g, or t
cccgaatttttggaaatganaccaatagccatgtaaacctcccangttgganctatggggcctaaactgattgagcagcctcattttaggagagctcacaaatccttagagcaaataagtcctcaatgtcaataacttgtttgcccagttgctcagcacagtgtatatacatgcctgtgttcctgactgcttaaaagctggctgtgtgtggtggctcatgccgatnnnnnnnnnnnnnnnnnnnnnnnnnnnnnnnnnnnnnnnnnnnnnnnnnnnnnnnnnnnnnnnnnnnnnnnnnnnnnnnnnnnnnnnnnnnnnnnnnnnnnnnnnnnnnnngtgggcatggtggtgcatcnnnnnnnnnnnnnnnnnnnnnnnnnnnnnnnnnnnnnnnnnnnnnnnnnnnnnnnnnnnnnnnnnnagtgagctgtgatcacaccactacactctggcctgggtgacagtgagatcctg

SEQ ID NO: 329941 - DNA, 396 bp, Homo Sapiens
  misc_feature (31)..(31): n is a, c, g, or t
  misc_feature (386)..(386): n is a, c, g, or t
tgaacatttaggaaaacctttcagtattagnaaaatatccagatttaaatcccaaaggaaccacccccaacccccccaataaaaataacaaagtatgggaaccatcctttatacaatagctttaaaataataattaaaaaaacatgattacaggaatcttcctacataatttagacaatgtagtgcgacagtgtgctcctttataacttcagtggttcaatccccatatgatgagactgataatcgcaactccaatgacaaggataagaatgatgatgcacagggtttttctggatttgcgctgataatctgctgcccttgacagctgctgatttgcttgctgaacgtgcacctctgcattttccacattggcttctatgctatcnccgtgccgaa

SEQ ID NO: 329942 - DNA, 438 bp, Homo Sapiens
  misc_feature (394)..(394): n is a, c, g, or t
gtttcggaagaaatgatcagggttagatcacataaagaaagtggtccaattttgttaactttgcatcaattggttaaagtataaaaatttgtcactccatgtagaatgtttgcattctgatttagacaacatctctccagtattttcacttgtgtgtattggaaactgtcttacacagtactgtgaagataggctaagactaaacgggaaatatctgttgaaaatctggcattggattttatctactgatagtcacatttttatatttgactctgggaacaaatctggcctatgcctaaggaggtttgaagccttgacgaaagaactgtagctgactgctgttggattaatttacattttcgtatctgcatgaccttgacagaacagctatctntatactactactttaaatttggccagtaggtttgggctgggttt

SEQ ID NO: 329943 - DNA, 547 bp, Homo Sapiens
  misc_feature (438)..(438): n is a, c, g, or t
  misc_feature (535)..(535): n is a, c, g, or t
agagcttgttatcatccaaactaaaaccctcactaactcgatgtgtccctggatgactccctagtttatttcttcccttccctccactaagtcagttgtctccctatgcaccccaggagtagccattttccacagcggccaccacctctcctccagaaaatgggcggctcaaaatggagcccttcctctcctccggacctcaaatctgccacctgtctgctccattcatcattagttagctatagagcctgatttttctccaaactgtatgtatttaatccctgatttcttcctcacccccacgatgtgacatcctttcagcattttacctgctgggaaccagcggctctcttgtttctttttactgtgggtcacttgctaggagtttgaagggaaactttttgatgtggaacacatttcagttttttttccaatttnacaatgggagagaggaatgaaggggagagggggctttggcctcgttaatttctgttttgtttttgttctgggagaatgtaggaccatctgtggtctntcagaggtattt

SEQ ID NO: 329944 - DNA, 461 bp, Homo Sapiens
  misc_feature (19)..(19): n is a, c, g, or t
  misc_feature (39)..(39): n is a, c, g, or t
  misc_feature (101)..(101): n is a, c, g, or t
  misc_feature (179)..(179): n is a, c, g, or t
aggcgggacttgaaacagnaacacattcagccgaagccnaaagggaagcttgagaatagtttgtttggaaaacagagctttaacttgaaagctgattgccnagaaagggattcaagagaagccccaggaactccttgagcattaaattgcaggccccgggaggccctggtgaggccagngcttagccccttcttccacagcaaatctggggcagttgcagctgctcaagcccaaggagctgaggagagctgccagagttcccaggcaggtggggagcctgcacccaagggcttgcccatggtgatagcccacttccagttccagaagaaggcaggcctctaggaagcacccacaatctacactttaaaaaaggagaaaaaatgaaaagcccctgaaacgcagatgcagattcgtcaggggacttttcatgtcaggcagttttctgctgagatgctggattt

SEQ ID NO: 329945 - DNA, 306 bp, Homo Sapiens
aggatcaccctgaggcaggggaggtcaaggctgcagtgagcccgtgatcatgcccactgtactgcagcccgggagacagagttgggggtggggggaagcagtatattccttgattattagggatatacttgaagattcacattatattatttagatcttttatatccttttttacccactacatcttgtgctaagtgtcaaagtcccctaattttagttttttatttcttcttatacttcatatagattttgctttatacagattgttgctgtgttatgtggtacatatttaactgtgaattcttt

SEQ ID NO: 329946 - DNA, 435 bp, Homo Sapiens
  misc_feature (15)..(15): n is a, c, g, or t
  misc_feature (54)..(54): n is a, c, g, or t
  misc_feature (67)..(67): n is a, c, g, or t
  misc_feature (98)..(98): n is a, c, g, or t
  misc_feature (263)..(263): n is a, c, g, or t
ctttgctaaaatttngggtttcaccctcaagtatgggccaggaaaacctttttnccaaacaaaacancaaacccttaaatattcaggcagacatcccntttctaagactcataagattccaccactgcccccatatcaatgagctttcctctccatgcccagtcatggaacctgtgtgaaccaggggcccgatacccgtaacagtgagggtctgcttaccagcccctctgtctcctctgttgtcctctggaaatgttcagccnaggaccatgtagtcgccgcatctgcttgtgacattcaagacacttgattgagtaccggatgagcctcacagggtctgggtagagtggcaaggctggaggagggggactgcactgcccgaagtgaggccatgtttgggagaggatgaaggggctggggctgctggtgccgtgc

SEQ ID NO: 329947 - DNA, 422 bp, Homo Sapiens
gtgattaaagaaaatttggcaaaggctgaacaagcatgcctaaataccgactggcagattcagtctttacataaacaaaaatgtgatgatctacaacgaaacaaatgttaccaggaagtagccaaactccttagggaaaacagaaggaaagaaatagagataataaatgcaatggtggaggaggaagccaagaagtggaaggaagctgaaggaaaagagttccgtttgagatcagcaaagaaagcttctgctctttcagatgcgtctagaaagtggtttttaaagcaagagataaatgcggctgtagaacatgctgaaaatccatgtcataaagaagaacccaggttccaaaattgaacaggacttcaagctgttttgcctagaacctcacaatttaaatgactcttctgaaattggatccc

SEQ ID NO: 329948 - DNA, 376 bp, Homo Sapiens
  misc_feature (354)..(354): n is a, c, g, or t
  misc_feature (359)..(359): n is a, c, g, or t
tcaatgaaccagcagcttaaacaaatggcaagcagcttgcagaagtaagcagggctttggtgacttctacgctaaccacctcccatcttaactggtttacttacagagctggaaattaatcattctcctcccactcctctctctcagatttctgctcaggaaagtaggagaaagaagaaagaatacatggacagcctggagaaaaagtaagcctgctggcaaactgttgcgttcatcgggcagtatgcacagggaaatatgggtgtgcggagaatcggggagaagcagtttcaattcctctttctggccacctttggaaacccggttggttttatcagcttgtgggtttgcctntccanctagtggttattttgga

SEQ ID NO: 329949 - DNA, 687 bp, Homo Sapiens
  misc_feature (322)..(330): n is a, c, g, or t
aaataatgaattacaaagtcttttaagtgattatagttaaagctcttcatggttttgtacttatctttcttaaagggtaagggccaaagctgatcattttctatctttctaaagatttaaaatagttgttggtgtacaactaataccgatttagtacagactgagttcatgagtgattactcgcaggtgctgatagaaagcagagcttaattgtacaaataataactttttttgttttgacattcatatcacaaagaaatctaataatttcaggttataagtgcttgaaaattatatgttctttttttagtatcaaacttannnnnnnnncagttggtgcaatttgtgtgcacattcttgacttgtgctttttaaaatttagtttaagccttccttggtggtttgctgcttatttttcctggatagctgcctccttgttctgtattcacagatttatgcttctccatagtgtcacctttcccatcagtccaaccagcctagggtacaacagcagcacctcccttagacgtagcagatagtcactaagcacctacactgcgcactctagggatggaggagagagtagtagacagaaaagtcaaaagccagtgtttataagccctcaagaaacttgaaatctagctctgtagacatgtggagaaagatcaagagagcaaagtgttgtta

SEQ ID NO: 329950 - DNA, 369 bp, Homo Sapiens
tgttttcaaaagcctttgaagcgctttttgggatccatcctgcctgtgcacccatcccagtggcccagtttagggaactgcatggtggtctatccccagagatgagttctccaagtctacgtaagctactcagcgtcagatctgggtacccacaacatgacgagaagtctgggagttcattaacaccttaaagggttaccttcctgagctcctcctctctgcaatccccccagtactttctagtttcctgggtctccccttttctggttctctagccacacgcttcccacaactgcatccatatctgggccaggtaatggggagagagagagaataaagcatcggggggttcacactttaccccttgga

SEQ ID NO: 329951 - DNA, 532 bp, Homo Sapiens
  misc_feature (19)..(19): n is a, c, g, or t
  misc_feature (49)..(49): n is a, c, g, or t
  misc_feature (65)..(65): n is a, c, g, or t
ggccccagatatggatgcnagttgtggggaaaccgtgtggcctagagancccagaaaaggggagncccccggaaacctagaaagtacctggggggattgccagagaggaggagcctccaggaaggtaaacccctttaaaggtgttaaatgaacctccccagaccttcctccgtccatgttggtgggtaccccagatcctgacgctgagtagccttaccgtagacttggagaactcatctctgggatagacccacccatgcagttccctaactggccactggatggtgcacaggcaggatggatccaaaaagcgcttcaaaggctttgaaaacagctgacttgggaaccacaactcacagaaggctggctggaacttgtgtgtggaatctaactgcataaattgcttactaagataaaaacgtcaacattctcccaagggttgagagaaaattcagagtttcttaacacaatattgaaaatgtctagaatgcagttcaaaattaattggcttaagaactagaatcatctttaa

SEQ ID NO: 329952 - DNA, 348 bp, Homo Sapiens
  misc_feature (18)..(18): n is a, c, g, or t
ccatcccctgtatatgancagaattgtcactgcaaaaagagttatgctatggtttagctctttatttctacaattaaaagcagtaaaaacttaaaaaagaatttttacatcaatagaacattaactacagttggatttttcaatacctatgttcctcttccctctcttgattaacctgaagttgatattctttctgtctacttttaatacatatttatgattccatagataatactgtatatattagccattccctattttatcagtgacaaaaaatttgagagaagagacacagataatacttggagttatagatccagtcatagatataaggaaagttattagaag

SEQ ID NO: 329953 - DNA, 552 bp, Homo Sapiens
  misc_feature (498)..(498): n is a, c, g, or t
ttcaatttcaatataattttatgcaaatttgccatataccagcaatgctcaatagaaaatacagttcatgtgccacttaccaatgtatggcctctcagcccaaacacatccttttcgttctgctttgtgatactgagctggatcacatctaagctttgggtgagatccagtgtgatacccagctggaccctgtatacagttccttgctagccagcttgatgttgttcttcgctaatacagggcgatggatgaacactgtcaggtcagagcaggagggaggggctgtcttctccactgtggccagcggagggcaggagaggtaaccagcggccttcagttccactgtcctcaccttggtccggctcctgccctttccactgtccgctagctgtgagttctcggggcacccactccctcttctgaggtccagtctccaccttgaattgaaaggggaagggctctttcgtgtttccaagtttccctcctttttacttcctnagtcctaagggcacaagttccttcctgcagttgctattctgtaactcttagaaa

SEQ ID NO: 329954 - DNA, 520 bp, Homo Sapiens
  misc_feature (433)..(433): n is a, c, g, or t
  misc_feature (464)..(464): n is a, c, g, or t
  misc_feature (475)..(475): n is a, c, g, or t
  misc_feature (503)..(503): n is a, c, g, or t
tttttgagaagtagtactgttatgtccattattgtagagaaattgagtaccttgcccaaggtcacacaggtcacatagtaataagaaccgagattcaaagctctaaaatcagtagtcttcaccatggcaccacactgcttcaaactgaagggtaggttgagctgtgactagaaagacacaagcatggctacatatctgggagttgtcaactctggattttttagttggatttgggtcacctataattatctgtattcatctataattctgaaactaaattaggatggctgttttgattcttacacttttaggacagtgggtaggtttattataaattattcagtttacaaggatcttggtataatcaaattactctttttgtttaacccaaaattttttaggttgccattcttaatgagtgcagcagcccaanttgggttgggggaacctaagggactttaggncacttttgggnttcttaggccgggcgtggtccataaacntgtgttcttaggggccg

SEQ ID NO: 329955 - DNA, 342 bp, Homo Sapiens
  misc_feature (242)..(242): n is a, c, g, or t
gacagacaaggatggggactgccagggcaccacttcatcatgaatgctggttttcacaccttttccttattttattgccaatcaggacaaggccttgaaggaacgcagccttagacatcaggtgaggatgatggaggtagacagtcgactgaatgtcagctggaaaatccagtcactagttggggtttcggtggccatgttttctacccagacaggccctgcttttctaggatgtggccttnagagcaagaacagacccatcagccagccctttatcctccaagccgtctgcccatagcgaatcgtggagagcgggtgtttttgcctggacgccgcctcccg

SEQ ID NO: 329956 - DNA, 503 bp, Homo Sapiens
  misc_feature (388)..(388): n is a, c, g, or t
  misc_feature (414)..(414): n is a, c, g, or t
  misc_feature (454)..(454): n is a, c, g, or t
tttatttttaaaaatactattttatttttactcacatatgaaaaaaatggctgtactatcatgtttacatacatactaacattggaaacagaataacgaattgtatttaaattttatgaagaacacacaaacattaaaacactgattggttacagaaagcagagtttgaggaaaaaacattagctataattttcattttcattaaagagcagcaccctctgaggaataatcaaactgattaggtaatattcatctatactgcaaaataatatgtacaaagggaaagttaggtggattgtactggattttattacttttacccaggcccattttatggttccctcacttccaatggcaagggaaattaaaaccattaatctggaggggnaaaatatggtcccttatttatttatntcaccaattaaaaggttggggccttttattctggcaggcnggggggggccttattggttaccattggggccggccactttaccggggct

SEQ ID NO: 329957 - DNA, 505 bp, Homo Sapiens
  misc_feature (426)..(426): n is a, c, g, or t
ttttatatttttaaaaatactattttatttttactcacatatgaaaaaaatggctgtactatcatgtttacatacatactaacattggaaacagaataacgaattgtatttaaattttatgaagaacacacaaacattaaaacactgattggttacagaaagcagagtttgaggaaaaaacattagctataattttcattttcattaaagagcagcaccctctgagaataatcaaactgattagtaatattcatctatactgcaaaataatatgtacaaaggaaagttagtgattgtactgattttattacttttaccaagccattttatgttcctcactcaatgcaaagaaataaaacataatctgaagaaaaatatgtccttattattattcacaataaaaagttggctttattctgcaagccntgggcatattgtaccattgggcagcccttaacggctcaagtggatcaatgtaccagtttgattctgatccactgaatag

SEQ ID NO: 329958 - DNA, 484 bp, Homo Sapiens
  misc_feature (391)..(391): n is a, c, g, or t
  misc_feature (399)..(399): n is a, c, g, or t
  misc_feature (442)..(442): n is a, c, g, or t
  misc_feature (454)..(454): n is a, c, g, or t
  misc_feature (474)..(474): n is a, c, g, or t
ttagataatttttcttaatcattacttagtttttacatcattttattatctacattctctcactgacatgccaagtagtagtcaaattgcaatttctttataattaaacttttattttaaggtaattgtaaattctcttattataagaaatgatacagggagatccatcgctccctttaccctattgcccccagcagtgacatcttgcagaactacagcacatcacaccagggacatgggatggtaaacacagccagagcacccatcactgtgagggcccctcctgttgccctttatagggcacacctacttctctccacccctaggcaaaccctaatctgttctccacctcaggcaactgtgtcatttcaaaggtgttacaggaaagggncatacagngtggaaacctttagggaacgggttttttcattcaacataattntctggggggccntccgggtgccgtgtaggttngttcccttgg

SEQ ID NO: 329959 - DNA, 425 bp, Homo Sapiens
ggaattaatgataaactttatgtatattttgtcacaacttttttaaaagtaaaaagttatatacatataaatattccttaaatttgtatctacattatcaaaaactgggaacaagctgaagtataaaagggggaacaatttaacacacatcagtaagaatgaaacttgtttatgctaaaacagaaaatataaaatgatgtttgctaggagaataactattaaaaacatgcccacaaagactgaacactaatatacaaaaattaagataattctattataattttctctcatttccttcctctagttatattaacatgttagatttcttttcagtctactaacaacaacaatatgccacatcaaaataattatcctgactgctaagctactgggttgagataggtctgtttttaatacaagcagct

SEQ ID NO: 329960 - DNA, 391 bp, Homo Sapiens
ctgtctgcttggaggcattattattattttactgggaggctcggctaagaaggtaaaaggacacaaagccctgtagccttctcctgggagcatggattattttttcagattccctaagtgctgggagatggatgagtacattttaagggcacttggaagtaggatagaaggagtgaggtgggatctattctcctaagtaccaaggctgtagaaccataagttagggacagaggagaccactccagaacagagcattaaaaaggaacaagaggaggaatagcaaagaaaaaaatgtctcctttctgaattttgctaaatgctggccccagccccaagtggaaaaagcatgatattcttttaataaatcagctttgaaatgacttcccaaatg

SEQ ID NO: 329961 - DNA, 514 bp, Homo Sapiens
gctttcaaatacggtgcctttttatttaaaacagtgtaaacataacaactcaacaccaccaataattggaaaaagactggatatgtgaacactaatttcctcatatgtcccatgaaagtgagggtaaataaacagacaaatcttcaggagaggtttcagttcaccttagcagtggtaaaaatattgctttattccaaatgaacatacaacacaatttactgttcttttggggggcttcttgtgaactgaatagtctgggtatttttatttcaacaatttattcttcccatactaaccacagaagccgaagccttggtccacacatagcagacttgctataaaataaatggtaatgagaatgatgagaaagcaaatggtaactgtcaatttgttaattgtcttgtattaataatttaagtaggcatgattcaaaataaacacacatccttgatgaactcaccttatggatactggatatcattaatgaggccataggttgatcccctccaaaggt

SEQ ID NO: 329962 - DNA, 129 bp, Homo Sapiens
catatctggtagttgctgttcaaataaacgatcaactatgccattctttttaacttgcttaagtttagactctataatatcacagagattcttctgtaaggtagtcactgacttagagattttgtgtaa

SEQ ID NO: 329963 - DNA, 347 bp, Homo Sapiens
tttttattaaataaaatttaaacaatagagggaaaaaaagtgtagtttgttctgcaagccacagcccaaagaagtctatttcctacacaggatggctagagtttaggagccacgttctcctctatagctcaccagaggatgcagcctgaagagctcagggtttgaaggttgggccttgggcgggagtcagctactatttctagctgttctagaaagacctagaaacttcctgtgtgaaaacaggattaggaagctctgggggtgaaaatgccatgcacggagctggcccatgccaagtcccttctaactattttaaattacatctttggccaggcacggtggttcat

SEQ ID NO: 329964 - DNA, 192 bp, Homo Sapiens
tggcccatagcctagttttaaaatatcttatttgcagctcaaaaaatatggacagtaattcagggaaaatgtgacaaaagtacattttagttcatggcattttaaaatttcactctggggccagggtgcagtgccttcatggcctgtaattcccagcattttttgaggagggtgagggcagaagggtttttt

SEQ ID NO: 329965 - DNA, 473 bp, Homo Sapiens
tatttatcacatgctgtttttcttcaaaaggccaaactttaggcaaagcattcattcaataagtgtgcacacagaggctgaaggcctttggcaggaactaagaggtaggaatttatgactgtaagactgggctgggtgacccgataggtcccatccaagaaatgcaaactccacacgtcatatactttctttcttgggtgatttggcaaaattagactacaccatggaaaaaccaattttgttccctacatctattcaaacctttacccagatccagatgtttagaaatgagaatgtgggccagcaaacgtttggggagtaacttaaagttgctaacacccattgttctcaggaaattctctccttgggagcaagcaactgaaatatgaaacagggcagagtcaggcgatcaccccggggacaactacactgattgaacttccaatttgacacagctactgagctctgatctg

SEQ ID NO: 329966 - DNA, 379 bp, Homo Sapiens
atcagacattcacatgcttatgaatgaaggaccccttgtaatacttctgcccctgccccccattccacacaccaccccctccccaggagtagggattagaaatcgttagtctttccattttgtcttctgtggtttcagttaaagttctaaagacgtattttactaaaagtggaattgactttttgtattcaggggaacttgtcagtggttttcatattatgtgccgtggagtcccaggattccagaagatgcctcaagggagacccctcccttcctccgtatcccttccagctttaagcagcctgtctgctttaagctcttatatatattgagattctctcatgagatttcatttgtataaatgatttcacagcttacc

SEQ ID NO: 329967 - DNA, 432 bp, Homo Sapiens
tacaaaaaacaattgttatttgtgtacttttaaaacctcacagtaatattttcacactaccttcttggctgaaagttcacactcggaattccagagcagtccatggccagggccactgggtgacccttgctctctccttggctttggtaaccactggccccagggactcagcctgctttcctatccatcccctcagtagctgtcaccatgcaggttaccccttctgtttcttctaccactaactccatgtctgactgcaagtgaaagggaacaggaagcccaaacctttggggttttaagggagtttattgctaatctgtaaaacagaaagagacaggagataaggcatgacaaaatataggggaagaaatgacttttgccttaaactttccaaactgtgttacaatttgaaggccttctggttttataggt

SEQ ID NO: 329968 - DNA, 587 bp, Homo Sapiens
  misc_feature (31)..(31): n is a, c, g, or t
taaaaaccctgttaaaaccactaattttggntgtgtctgggaaggaatgttttcaagaggaacattagtgtgtgagtctgaagtggactaggtagggaagatctgacctcactgtggcaccatcaattggccagaagccaagagagcaaatacagaaaatggattggtctctgagagttaggacaagacttttcttctgcttccttggatatgagaacttcaggctcaggggcctttgtactccaggacttacactaagcagcccctcagggtcctcgaagctttcaatctcccactgagagttacaccaccagcttccttggttgaggccttaggaactggactgagctttgctactgcaaccccagagtctctggcttgcagatggactgttgtggaactcctcagccaccagaatctcttatgtgaattctcctaataaatctcttctcatatatctatatacatatcctattggttctctctctggagaaccctaatacagacctagtattggagaagccaatcattccttcttattgtattccttacaacacaatggaagacatctacggaactgtcccctc

SEQ ID NO: 329969 - DNA, 318 bp, Homo Sapiens
ccatatataaggatgtacgaggaggcagaaatataaatttaaaaaaatttgctatcaaaattcaagacaatctatctaaaccttatagtttaggaaatggcaacagatgccacatttcttcatgagcagatgtcttgggtcggccctatccataaaaccagactgcccttgagccaaacactgctttgaaccactcatttgcttagaaagcctggcctttgaagcattgcttgactttttctccccttgaggcacacaatcaagcagtttataaatgccagaacatatgttgtaggggtgtgggatggctttccttcc

SEQ ID NO: 329970 - DNA, 479 bp, Homo Sapiens
  misc_feature (50)..(50): n is a, c, g, or t
  misc_feature (73)..(73): n is a, c, g, or t
  misc_feature (434)..(435): n is a, c, g, or t
acactaggcaagaaactttaatgaaattgaaactggttaactgaacaacnataaaaaacccagtgataatcanatcacaaaattcatcattttaatgttcaggataaaattttatcatgttggcaacagaatatgtcctgccgacctccaagtggctggcatagtacatccaccccgtgacaggcccactgggactgtggtgaacgtgcctgtacctcagtacaaagtcccctttccctgagaaatgtacagaaggagagataaagagcgtgtatccaaaaggaagagggagaggctgggtgccctgtgccctgagctcagaacttcggggggatgaccggccagtacttgggctgctttgggtcacagtgcttgtcaaagctcagctgcacgttagcctccatggcctggatcttggcttgctttcccacaanncccgccaatctttagcgctccttttttaccttccttccccgtca

SEQ ID NO: 329971 - DNA, 636 bp, Homo Sapiens
  misc_feature (329)..(329): n is a, c, g, or t
tttatttgtttttaatttattttgtcatatttttgtaaaacggcagaaatgcaataaaaactatatttcaacagtgcccgaggtcagagcagtggaaaagggagtgggggtgggggagtctgggtggctggggctaggttgggaaccccctccccccatcctggtacaggctggcttgacccatgagggcctcctcccaaaaactgggtcttggccacagatggaaaactccaggctgcgcgccctctgagacggcccagatttggaggccaacttcagccctggcttcagcactagacaaaggaaggaatctctaagtgctgaaaagngggcgacaatgtgtgcacaggccccagtcctgagtaagacttccttctcaaagaggacagcgcggtggttttgcaagacgtggccccttctggcacacccgcctcctggaacatcgtctggggagccagagacagtgggaagagcttgtggcatgaacatcagaaggcacctggcacctgagcctcctgcagtccccgacttgtgatactgagagaatggcacatttgggtgtccccaggacacggggtggcattgggatgcagcagggatgtcccactgtgggacagacatcagacccaagtcact

SEQ ID NO: 329972 - DNA, 381 bp, Homo Sapiens
tgcagcatttttcggcctctttatttagaacccggcggacgaggggccggggcagtggtacagacggctcaggaaccattttaacagacttgtcttcaagtttcagataaacacagtcataataagagagacagcgaaagcgcgaagagactgcaagctagatgggcatgtatggcagctacagcttgtgagtgacccccttccccagagtccgcgatgaaaataaagttacacttgtcaataaccagatgtgggagatggagagtgcctttggataaaccaataaccgagctagtgcgtggcagagcggtccacgccctggacataaatagaaaatataagttagtataactttaaaaactttttgtacaaatatacatg

SEQ ID NO: 329973 - DNA, 228 bp, Homo Sapiens
ttttgcactgagtttcagcagagattaaacattttatataaatgactcttaaagctttacaccttgggaccagtgtaccttctcgtgcagaatacatttagatataaaaagacgttattaatacattgcacagttttcaaaatttaaaaacaaaaccgaaacgctgcctccggagccgccgccggttgctgctacatgaacggtcccgaccgaggcctatgcagtctc

SEQ ID NO: 329974 - DNA, 423 bp, Homo Sapiens
  misc_feature (24)..(24): n is a, c, g, or t
  misc_feature (36)..(36): n is a, c, g, or t
  misc_feature (134)..(134): n is a, c, g, or t
  misc_feature (338)..(338): n is a, c, g, or t
  misc_feature (370)..(370): n is a, c, g, or t
  misc_feature (376)..(376): n is a, c, g, or t
  misc_feature (384)..(384): n is a, c, g, or t
  misc_feature (411)..(411): n is a, c, g, or t
ttattgtatttaaaaaattttttnccagagtatttncaatctgcagttggttgaatgggcagatagatacagaacccgtgggtaatgaaggccaaatgtactatcttgattcaataattgctatgctaacattnctccacatttgatttaatttcaacacacacacactctaaatatgtttgttgctctaccatttgagattaagttgcagacattgtagtaaagttggcattgcagattggcagaggaaagatgggctctttagtgaattatattgggacagctgtccgcctcttcaggggaaaaataaattgtagccctattgaactctttgaccnaaaattaattctgggtggaaaccaaaaatttnaaatcncgaaaagngaaataattaaaaattgctagaggggngtataggggacg

SEQ ID NO: 329975 - DNA, 374 bp, Homo Sapiens
  misc_feature (302)..(302): n is a, c, g, or t
  misc_feature (310)..(322): n is a, c, g, or t
gataccctggcttcagtgatcttcctgccttggtctcccagtgttgagattacaggcgtgacacacttgcccagcccccagagtagtttaaatgtgaatttttcttaggagtaagactcagcatcttttcagatttttaataatcatctgtgtgtctcttcctgtgaacaatcttgttcttatctccttgcccatttttctgtggggcagttggcctttttcttaacttttagaagttttttttaatattaggaatatggaaccctgtatctgctctatggaattgcaaagattgtttcccnctgtcacnnnnnnnnnnnnncttgagacagtttgcattctgccaccgaggctgggagtgcagtgggtgtgaa

SEQ ID NO: 329976 - DNA, 281 bp, Homo Sapiens
  misc_feature (11)..(11): n is a, c, g, or t
cctatggatancagggggttaaggactgcaatattttaaaaatggttggtttaatgaaatatgttatttggaagatgggcataacctcagtaaatcctaggctttgccaaatgacccaatgcatgatgttgcaaaatcaagccaaggcaaaagatcttttgaaaattccagatatagcaatggattttaacagtaaaaaagtggattgatgtggtttcagattccaaaatgttaactgtcctttaagaaactactatttggcctagcgtggtggctcgctc

SEQ ID NO: 329977 - DNA, 353 bp, Homo Sapiens
gatagtttatttgtatattattttatttataaatatccagcaggtcctagcaaataggaaaggaatatcctacaaatgtttacctgttttaggtagaagaatataacagtcatgtccaaactttttgaaagagcaaggatgtggtggaaggattgggaaagaactggcagttaagcctcagggaagtggcatttaaactgtcatccacagagccctaaggtttcgacagaggtgacttaggactcagtacagggaaggcaggggactctaaggtgggacactgagccattccccactatctttaacccaagtggctttacttattggacttctgggagtctgctgatattcaa

SEQ ID NO: 329978 - DNA, 308 bp, Homo Sapiens
aattcatattactacatattttaagataaactgtatttagaacacccaagtagtaaattcataacataacaatgcaactgaaccatgaacccacatataagagaaaaaggcagaggaaagtgttacagttctgtgcataacttcacaaagagaatatttaatataattaatgtgctattgtgcaacaaaaacaggcaacaagtgataatatcatccatgtacatttttgtacattaaatttagggagaaagaagtaaggctatgggaattgccattcttcatttgtggaataatggaaattatattaa

SEQ ID NO: 329979 - DNA, 453 bp, Homo Sapiens
ccgacgtctgcgtctgtagttttattccgtatctggctgggggagggtggtctccgaggtggatggagtgagggtggaggggacagagatggtccctgctcccacctccccgagcccacctgggaagctgcgtggccgggctgctggagacatcccgagccctgggggagacagaggtgtgggtgtttgggcttcatcttccaggtacaaggagatacatttcatcaagcagttcctgatttcatggagttctttgagggctcggctgggaggtccctctccggggggctccaagtgccggacctggtggtttctggaaggatcaaggacaagtcctgggagtttcaggcttcggcagtaacagtgtgttaattgcacttgttcgattttctggcagaagccagggagagacggggacagcgtgcttctcttcggtgaccatcccaggcgcct

SEQ ID NO: 329980 - DNA, 403 bp, Homo Sapiens
ttgatatttacctttatacaatttattgggtttaatattcataacaataactttttctactgaaatagcagtttgtgtttacctgtcgaaccccaatatgagaaatgtgtacaaaagcaacagactgtgatagaaaaaggtatcgtgaaaaaattagcaaaccaaagcatgataaatggatgaagcactataaaattactttgctgtttacgtaactgtatctttaatctgtactgtgctaaacagcctatagccaagttttaaagagttacaggaacaactgctacacattcaaagaacaggcattcactgcagcctcctgatttgacctgatgggagggacaggagaatgagtcactctgccaccacttttcctgccttggatttgtagaggatttgtttt

SEQ ID NO: 329981 - DNA, 783 bp, Homo Sapiens
acacagacatagatcaatagtttatttatccacattatcttttaatccttaattcatacacataaatactgtggtactgtggatgtaatatcagtgcagattattaattacctggctttttaaagttattatataacattttcagattttattaatctcacttttaatgactaaatgagtgaacaaacaatatcaagtgaatgggaaatcttttttccaaatgatgttaataactcctcactcattttcttatttattcattatgtgctgggcagtctcctcagttgtcctttggttttgggaatgtcctcactcaatacttccctttcacattcagtcctgattcacaagcaggcctgtgcatgttatattgcagggtcaagctgaaaaggcaaggtttcttcaactggcttgagagctatgaggtaggctgtttcttctttcgctttgtccctattgtgggttctctggtgccccaataaggtgtgagctctgggtgaaggcctttcccacatttgttgcatgcatatgggcgctccccggtgtgagtcctctgatgtctgatgaggtgggagctctggcggaaggcttttccacagtcctgacacttgtaggcttagcgccagtgtgagtcctcaggtgctgggagatggctgagcgatcattgaaggtcctcccacactcctgacattcaaatggtctctctccagaatgaactctctgatgctgtgtgagggaagagctctgaacaaatcctttcccacagtcttgacacacataggg

SEQ ID NO: 329982 - DNA, 445 bp, Homo Sapiens
  misc_feature (29)..(29): n is a, c, g, or t
  misc_feature (43)..(43): n is a, c, g, or t
tttgtaaggtagttagcaattttaagtcnttctttggtcaacntttttttaatgtgaaaagttaggtaagacacttttttactgcttttatgtttttctgtcttgttttgagaccatgatggttacacttttggttcctaaataaaatttaaaaaattaacagccaagtcacaaaggtaatggattgcacatagactaaggaataaacttcagatttgtgatttttgtttctaatcttgatgtaaatttacactatttataaatacatatttattgcttgaaaatatttgtgaatggaatgctgttattttttccagatttacctgccattgaaattttaaggagttctgtaatttcaaacactactcctattacattttctatgtgtaaataaaactgcttagcattgtacagaaacttttattaaaattgtttaatgtttaaa

SEQ ID NO: 329983 - DNA, 452 bp, Homo Sapiens
  misc_feature (438)..(438): n is a, c, g, or t
gccacttttcatttgcatgaggcataaggagaataaccctaaaaccaaagcagctaacccattgtcaacgtgttgcattcagacagtcaacaaagccagacaaccacggggcctgctggggcacttcccaactggtagcaccaactttccaaaggatctatgtcacacaggattaggaggactacaataaaaccaatgactgtaccctaaaaattaattttcttgacaggatttatggagatgactatttacatggggcttgattttgagaattgggtggataacgacagagtgactgtttacttaagagaactggcatggccaggccaccacacacatagagcaagggatttgtctttatagccaggaaatttcagggctatgagtatataaaaatcaattgttatgtgaattatctcctagggccattagctaggntaggcataattgtt

SEQ ID NO: 329984 - DNA, 459 bp, Homo Sapiens
ataaagaaatgagatttattgccttgtggggggaagggatgtggttgtgataggcaggccactctgggatccctgggatgcaagcccagggacagcagagtccccaggtgggaaatctacacacacaccccagggatgtcccagagacttctaccctaagaggagatcctgggcaggatgtgagaaatctgagcatcctctgtttggatggccgaagctgctggcatcaaactctggtctggaagaatcagtcacctgagcaaggcttccggaagtagatgatgagaacaatgcccacgatgatgcccagcacacccagggccaaagcaacggccaccacagcacattctccagcagatctgaggggcagtgcgttccggggtacccaatagggaattgctgtgtagcggtcaattttcgtgagtcacaatgcaggggaaaattcagaaggttctggtt

SEQ ID NO: 329985 - DNA, 603 bp, Homo Sapiens
  misc_feature (479)..(479): n is a, c, g, or t
aaattttaatcttaatgcgtgaaaaagctaacacatcatctttgtagaaaactagaaattgagaaaacagtgtaagcaaaatcagtagtaaaataaagcctcccacaatcccaaggtccagagataatacagctcaagaattggtgcatttctctgccttcttccttttttttctctgtctctccatctgcatctgtatgtgtacaacctgttttctcttcttgctcttcacccacaaaagcaggcatccagccttttgagcatctcgcatatgattaagaacaaatccttcaaagacctgcctcacctaaggcccatttctcaggacccacctgcgggtctactcagggcctccttgtcatccaccaaggccctctctggcttcattggtactgccgcagggcttggggcactagtatctcctgggcgtctctgttgcacctgaggttccacggctggctgggtgttccttcctgggnttcaccaaggcctcccacaccagagtctcatctttcttgtctttcacttgcagcctgatccctggatcccaaggtggggccaacgtagggaactccgaggaacagctggggctttcttcggggg

SEQ ID NO: 329986 - DNA, 446 bp, Homo Sapiens
  misc_feature (390)..(390): n is a, c, g, or t
ggcacgagattctttctaggtcccttcctcttgccttcgtggacctggaacagtgatctggcctcaggggaccagcatgcttttcttcagcaagaatttttgtatttcttcaatttcttgtcttttggattactattcaggacaaccaatctctcaagaaagggtcaagtacctatcctagctgtggaacctacagaaccttacttcagaagcccaatatgagtaaacaggaaaaggggaatattctctggttgacaatggtgtggctgtcactggcatgtctgcaaaggaaaaactacaatgactgcatgttaaacacagtcatcacagactgttaccactggaaaaattttggagaagcttcttccacttggaacctctttcatggtncatggaattcaggtggccagtggctttagccttgaattacaggacaggatgggatt

SEQ ID NO: 329987 - DNA, 419 bp, Homo Sapiens
  misc_feature (330)..(330): n is a, c, g, or t
  misc_feature (343)..(343): n is a, c, g, or t
  misc_feature (363)..(363): n is a, c, g, or t
  misc_feature (381)..(381): n is a, c, g, or t
  misc_feature (402)..(402): n is a, c, g, or t
ttttagagaataaacaaactttattttataatagtattacaggaagcaaaatatcatttaatacaacttgaggctgctataaatctaatctggcatcgtaactatacatagggtcaaaggcaaaggaaaaaatgttcaatatagttaataagtccctatcgggtctctggtgccagctttaaatggtataactttcttgtaaccaacagaacaccaccacagccccctccccctctccccagcatcctcaaacctgtgcgaatcataaaactatctgaaagagataggcctgcttcaattaacaaaaggtaagtttttacatgtgtaggncaaagaggttttntacaaagcaaggagtttctncccatgtgtttccaattnatgggtttggattggaatttngggtttgttttggatgg

SEQ ID NO: 329988 - DNA, 539 bp, Homo Sapiens
  misc_feature (474)..(474): n is a, c, g, or t
  misc_feature (497)..(497): n is a, c, g, or t
  misc_feature (514)..(514): n is a, c, g, or t
  misc_feature (522)..(522): n is a, c, g, or t
ttgtgattgagatagaggagtttttgtttagagaataaacaaactttattttataatagtattacaggaagcaaaatatcatttaatacaacttgaggctgctataaatctaatctggcatcgtaactatacatagggtcaaaggcaaaggaaaaaatgttcaatatagttaataagtccctatcgggtctctggtgccagctttaaatggtataactttcttgtaaccaacagaacaccaccacagccccctccccctctccccagcatcctcaaacctgtgtgaatcataaaactatctgaaagagataggcctgctcaataacaaaaggtaagttttacatgtgtagacaaagaggtttaatacaaagcaagagttctacccaagtgtttcaaataatgggaaaggattggaatttgggtatgttaagaaagaaagcactagggttttaaagctgcctggattctttagtngtagggaagtaagttttcccctncccttccctccggttcngggatgcngccgaggctggtggtcg

SEQ ID NO: 329989 - DNA, 455 bp, Homo Sapiens
  misc_feature (358)..(358): n is a, c, g, or t
  misc_feature (402)..(402): n is a, c, g, or t
  misc_feature (432)..(432): n is a, c, g, or t
ggcacgagatttttaagaatttgtgattaaataaacatggataaagcatttatgttgcctagggaggtgtgattgttgtcatgaaggaaaagcatttgtgagattgggttgtgaatgaatggcttatttcatggagtagcatttttacttgaaagaacgactagcagactatggtttttcacacttagtatctggcagatatttcttgaaaatgaagtgagcttgtcacttttaggaaaacaactgacagtatttattaccagtgataaaatttgggtgaaaattagaatttttaaaaagttgacagctgggagtttgacagcttccctagtacttaaaagactttccttatgatatncagtggttaaggactgcaatattttaaaatgttgtttaatgatntatgttatttgggaggatggggccttaacnccgttaaatcctgggctttgcaa

SEQ ID NO: 329990 - DNA, 367 bp, Homo Sapiens
cttatttaaggttttggccatgaactcaggacaggtatggttaataaacaggttacaggggagagaaggggcagggaagtcctgggggagggaatggcagacccccacccaccccaggcaggttctgtacaggagaaaggactcacaggagggagggacactgtcttcagggggctctctggagccacgctgcctacgaaaaatatttacatgcatttgccacgctgaggccagggtcactgtggtgccaggcaggcacctgggggatgctggggccatcggctctcagatggcaactcccagggcccagtctcgatgcctctgtaaatctgtacagtttgcgggcttctatttacaggcaagaggc

SEQ ID NO: 329991 - DNA, 359 bp, Homo Sapiens
tttggtaaatctttttaataagctcatattttgttgaacttaatgtataggaatccagagagcctaatttagggatgctttcctccagaagaaaatttgtttatttttttctggaagccagtaggatgatttacctaggactattttaaccctcttcaagtgtactggctaaatagaagagtttcgaatttagctatcccattgtgtgtgagtgtgtgcacatgtacatgtgtgtacaaatatatatgtggggcatatatgcaaatgtgcatgtactcctgcattttaggattcctgattgcagtgctgggtgggttaaatttgggtccctgaacatcttggggctttcttgtacactt

SEQ ID NO: 329992 - DNA, 390 bp, Homo Sapiens
cagaggcctaaaataaaatggaaaaagatagatttttctgtaggaggcaaagaagagggaattggcaacaactcccatggcagaagcccctggtgctgtatgagcaggatggccagcatctccccaggcccagtcaggacatgaacttatcaaggcatgacaatctgactatgaacaactggaagatgagtgtttgccttagtcaacttaaatctgctatgtacccagagatcctagtgaaaagctaccacttgctgagttctcacaatgtgccataattgtagtaaatgatttatatgcatctatggcagagatgggaggctaatgtaaggtatgcctaatccaaggcctgtgatcttagccttagctactacttctcagaggtgggtt

SEQ ID NO: 329993 - DNA, 342 bp, Homo Sapiens
  misc_feature (28)..(28): n is a, c, g, or t
  misc_feature (82)..(82): n is a, c, g, or t
ttcagtggctagtggctattcacaagancgatcatcgcacactacctcaaactcctgggatcaagcaatcctcctgcctcanctttccaagtcgctgggacaataagtgtgtaccacagcatgtcagctctctctctccttcttgacctaaagcctagcataaaattagctaagtagaatgtttccaaagatgcctgcatcagtatctcccatcccacataatttctgtttgattttgccattcacccataaaatgggtggggtctacctcccctccttgcaaatttgaggctgggccctctggattcctgtcttaggatcttgaaggccggatatttaggg

SEQ ID NO: 329994 - DNA, 415 bp, Homo Sapiens
  misc_feature (110)..(110): n is a, c, g, or t
cctgggaacattccagggcctccaggccagaaaggaacccactgtggtgaaaagcccactgaacaattctggtgaagaagtagggtggcaagggttccaccccagggagngggaggtggctgcccttttcctcagggccctgctcttcaccttcccaaaggtccttagggtacacagaactcatggattttggtctcgccacgcccaggggccacacagaaaaaggggttcaactggaagtttgcagcatctgggaaaggccaattctggcagaactggaagattccagaccaggggagaggcgtccagggagagaagagtcctgcttgggttgatcataagcaaagtggacatcgttccgaagaggcagagagctcactatgttatcgataaaaaaattcttggccgggcacta

SEQ ID NO: 329995 - DNA, 712 bp, Homo Sapiens
  misc_feature (45)..(46): n is a, c, g, or t
  misc_feature (67)..(67): n is a, c, g, or t
  misc_feature (160)..(160): n is a, c, g, or t
  misc_feature (520)..(520): n is a, c, g, or t
ccctcgccactgatgttactaagcactctgacgcaatgagacccnncacagcagaaagggcacaagngggcgccagggcagcagggccagatctttctcatgcacctcgacctcttgcagactttcttcgtgagatgtactactcatttcaaaactgctntgcagggctcccctatgtattcggggggcccacggcacactcaggctggagatccttcctcactgcgctcaagatggcctcagccagacaccagttacccagctgaaagtcacaatccctcccagaagtctcccaacactagtgctgaccagaggtggggctctcaggctaggagtttcacacacaatgacaggctgctgggggacattgcaggaccccttttcctctcctctccatgctagaagccagccctaggcagctgcagttactccctgtgactcagcagcaggctgattcaacacagctgcccacacaaagccacgtggctaatacatctgtttacctttccctatcacccangacacaagcccctttcccaggtcaaaccacaggccgatgcatctccagtttgacagtcaaatcactacttccatttgctactttagatcagccaaagtgggtgactggttgcagtgtgtggctatccctacaaggcccacccaagggatggccaaagcccaaccttcttccagggctgcagccagaagcaac

SEQ ID NO: 329996 - DNA, 719 bp, Homo Sapiens
  misc_feature (694)..(694): n is a, c, g, or t
tttttttaagcaatcttaaaaaatggtaaacgtaataacattccaagagtttttgactaattggtgaagaagtatagaaaattgcaagtacactgagtaggataatggtcttagattcttaggaagattggctgaatgggagatagtaaggtaggctgtacttttatgttgcatagcaggctgttgaactttttgagagttatttcccctaacttcacaagcagactatatgtttgtagccatgagctattaacaatttgtatatcaaaataacctaccttacttttattttcaggctcctccattaccatccgcctcatcttgatattgttccatggacattaaatgagaccttttctgctattcaggaaataacccagttctgcaccactggtttttgtagctatctcgtaaggctgctggctgaaaactgtgtctatgcaaccttccaagtgcggagtgtcaaccaactggacgggagagagtactgctcctactccaggactctcacaaagctgatgagctgtacttcagaaaaaaataataatttccatgttttgtatatatctgacaaaactggcaacatcttacagactactgacttgaagacaacctcttttatatttctctatttctgggctgatgaatttgttttcatctgtcttttcccccttcagaattttccttgggaaanaaaatactagcctagctggtcattt

SEQ ID NO: 329997 - DNA, 605 bp, Homo Sapiens
ttggaaggttgcatagacacagttttcagccagcagccttacgagatagctacaaaaaccagtggtgcagaactgggttatttcctgaatagcagaaaaggtctcatttaatgtccatggaacaatatcaagatgaggcggatggtaatggaggagcctgaaaataaaagtaaggtaggttattttgatatacaaattgttaatagctcatggctacaaacatatagtctgcttgtgaagttagggggaaataactctcaaaaagttcaacagcctgctatgcaacataaaagtacagcctaccttactatctccccattcagcccaatccttccctaagggatcctaaggcccattatccctactcagtgtactttgcaattttcctatacttccttcacccaattagtcaaaaactcttggaatgttattacgtttaccattttttaagattgcttaaaaaaagggggcttcttgcaaaataatttaacaaattacaatttcactagtgactgccttcagaatctatctcagctaggtaatatattttcttcaacatatttcagataattttcttcttcaagcaatcttgaagaccattcaag

SEQ ID NO: 329998 - DNA, 404 bp, Homo Sapiens
  misc_feature (173)..(173): n is a, c, g, or t
atttttgaaccttttaatatacattacaaatattttagaccaatcacattttgttgtaacatatttacaaaacaaaaaatatattacaataaatatgatgaaacagtgaatctgatcaacaacaagctttgtcacaaccagttatttaaaaggaatgccaagaccctgttggntctggcatatattaggaggttttgagataaataggggtccagaattataatggtatcccggaaaaagagatgtgggggaaaatctcccaaatttaagtaaggattctttctcattgtaattacataatgttttaatggatgttttaaactgtgaaccttgatggattatccaaacatgatacaaagctaatgtagttctatcatttcaaaatacgtgacatccacagaata

SEQ ID NO: 329999 - DNA, 530 bp, Homo Sapiens
  misc_feature (507)..(507): n is a, c, g, or t
gaggaaaaacagcacatagaggcatccacagtatttaatttgtttggataacagttacagataaacaggtacaccccatatacaattaccaatactttttatacagttcatatttcggtacatcaacactattttatttacactctatttatgtacattaacatctttctaaagtcagtgcattgtcaacaagttttatacagtaatttacaaggtgaatgtagttaatagttaatttaataaattttctgctagttcatgccttcccaaaattaattaccatcagtactcacacacacagctcaaccaccccttagtagattgcgctacctgcttccataaaacatctgtaaagacaattatttaaaatcttccactttttaatgggaatgggacagattttatatactgaaaatcttggaacctataaagtatgcattttgtctgactttattacattagacaatttaggccagtcctacctacttggcaattatatttttttcnggaaagggtttccatttagggtg

SEQ ID NO: 330000 - DNA, 468 bp, Homo Sapiens
  misc_feature (31)..(31): n is a, c, g, or t
  misc_feature (74)..(74): n is a, c, g, or t
cttgttgtaacccattgttgaaataatgccnactatgaaacacagatgttcaaaatatgcgtggaacatttttnataggaatgtaacaacaacaaaaagcacacagtgggctcccatccatgagctcagctgcaatacagagatggggggcgctggaagtcgtggtggggcaactgaagcacctctctggaaatactggtgtcccagggggacagaaggtccaggcaggtgggtcctgcccagggacaaacctgacaatcactggcacatcagaattcctgtgaaactgcaaaaacaaaaagggtgcctgtgctgagccctagaccccctgattcagtctcttgatgaggaccctggacatgtgcatgcttaaaagcctctccggaggttctgacttgctacccttggggctgggaaccacacagcctgggacttgggaaggactccagcatctgtcctgtgccgaaa

SEQ ID NO: 330001 - DNA, 461 bp, Homo Sapiens
  misc_feature (395)..(395): n is a, c, g, or t
gaagagaattttttttaaacagtcattgcttgctcagatgtttactttaaaagataataatgaacaagaagcagtcacataaaatacaagcccaaattttatatcattagattctgattgtcatgaaagtttctaaagacttactttcatttctcaacttaccttgttgaccagcagggattggtgaaccatgctgtgagtagcattgggctagagagaggggaggcaggaatctagaagagctgttttccagatgtgaccatctcctgaggacagggaccatgtctcatgtgccacccatcaccccccacagacagagcctggcagccaatgccccagggagccctcggtttccaaccaacttgatggcccctgtggcccattgggcccacggncattgcaggccccagtccgtttttgcaaagcgggttatttccaaccattattttgggggttgggga

SEQ ID NO: 330002 - DNA, 312 bp, Homo Sapiens
  misc_feature (299)..(299): n is a, c, g, or t
atattcaacgtacattcaaaagccaaataaggaaagcttatctgggattatatgtaaaagaaaacaaataggatgtgaaagagatcccagggctcatttttgaagagattttagtgcatgagatttgtacagtaatattcgacactcagcatcctttttcaactcttgggatttgttttaagaggctgaagttgcaagaagactgacctctgggaaagcgaggtgttgttacttagctacttgggtagggatgggtaaactgactctaaatttttaatgattgcaaatgaatacagagngtattacttccgg

SEQ ID NO: 330003 - DNA, 421 bp, Homo Sapiens
cttgttttcccaatgtcacactttcctgggctttcctaatatggtctggtctctttcctgggtcttctttgcaggcccacccacctccactttacctttgaacatcagccttcctaatgacttaattgtagctcttcttttcttctcccaaggctttagttgctatttatatgctggcaacttccaaatttatctcttcagcccagttttctttctgagcctctaaaattacaaataaacatattcaaggacatctcagatgcatcatgtacaaactgaatttataattcttttatacctttgcaactcattccttttgggccttttgggacgtagtgaggtaaccaggccttcttgatgggggaactcaagggatacatctcaaatcccttcacttctttttacatcccttaggggaagg

SEQ ID NO: 330004 - DNA, 516 bp, Homo Sapiens
caaatccgaggactgttctgatagttcccacattggcaacaatatcctggagaacacaagacccctaagaagtaaaattgttctttctctacctgtttttgctctaccttccactcacattttctcaattttccaaatgccagcatacaaattttttttcaggaatgccaccaacaggaatcaacagaagttaacaatagctgagccagtcggagagtggtgaagatgactgcctttcagtgagtgccaaatcttatcatcagtggtcacgcagaggcataactacccaacaggttcatcttgcctgctgtgcagataggagtcgatttatcaagacaggggaattgcaacgaagagtttcatacacatagagctggctaaacaggagaccagagttttattattacttgaatcagcctccccaaaagttcagaggctagggttttagaaagatagtttggcaggcagagggggctaggaaatgggaaatgctgattggttgggtcagggatgaaa

SEQ ID NO: 330005 - DNA, 483 bp, Homo Sapiens
  misc_feature (40)..(40): n is a, c, g, or t
  misc_feature (45)..(45): n is a, c, g, or t
  misc_feature (48)..(139): n is a, c, g, or t
  misc_feature (150)..(226): n is a, c, g, or t
  misc_feature (239)..(291): n is a, c, g, or t
  misc_feature (318)..(319): n is a, c, g, or t
aaaatgaaataaatgtaaaattatggcccaagtgcggtgnctcanacnnnnnnnnnnnnnnnnnnnnnnnnnnnnnnnnnnnnnnnnnnnnnnnnnnnnnnnnnnnnnnnnnnnnnnnnnnnnnnnnnnnnnnnnnnnnctcctacaaannnnnnnnnnnnnnnnnnnnnnnnnnnnnnnnnnnnnnnnnnnnnnnnnnnnnnnnnnnnnnnnnnnnnnnnnnnnngcttgaatcccannnnnnnnnnnnnnnnnnnnnnnnnnnnnnnnnnnnnnnnnnnnnnnnnnnnngatagagtgagactccatcttaaaagnnaaataaataaataaaattatttatatattctatagcatataataatggtaaattagtgttagctattactaacttcagtcctctggcacatagaagtgcccagcctattttgttgaatgagtgaatgaatgatggtgaatatacctctaagcaatctgagcctt

SEQ ID NO: 330006 - DNA, 432 bp, Homo Sapiens
  misc_feature (20)..(20): n is a, c, g, or t
  misc_feature (33)..(33): n is a, c, g, or t
  misc_feature (66)..(66): n is a, c, g, or t
tccaagttgagccctttganaacccccataaantggttttagcctaaacaccttacctagtagtgntctttaaattatttaatcaacccttgtccttttccaaggaaattacccacttaaagagatagttgggtaaataaacatcctatgccttttcctcagaaatgatttgctgaactatgttccatattttacagcttagataatagtttatatggaaactattatacatctgctattgtgcaatgattgttaaattatactgaagtagctctagaaagacacatgtatacaaggcactattgtacacactttgctgaatattttgtcagttgtatttacaaagaaaggtactttcttaagagcatatatgttattaatatttgatatgattttaaagtcagaatagtacagattgttgagtattatact

SEQ ID NO: 330007 - DNA, 340 bp, Homo Sapiens
  misc_feature (317)..(317): n is a, c, g, or t
taattatataaggtttcatatttaatttggtcatggattcataaatacataagtattttgtacacaatgtgcttccttgtttgtattataacacatttcaaatagggacctttgacagggcagaagcatgaaaggacaccaaccacgagtgacacactatactatggctgtcctgtgtcacatgctatttggcctggggatatagcaaagcctaatgtaactaaacaacaaaacccccaattatttcatgtcgtcaggaagcttactttaaaagaatagcttggcctgggctggtgggctcacgcctgtaattcccngcactttcggagggccaggtggg

SEQ ID NO: 330008 - DNA, 429 bp, Homo Sapiens
  misc_feature (209)..(209): n is a, c, g, or t
  misc_feature (282)..(282): n is a, c, g, or t
  misc_feature (330)..(330): n is a, c, g, or t
agaaatctacgtttgaggtcccttttacaataatcttgattctattttgatgcgagtttctgatgtgccataactacaaaccaaataaagagatcataaaagcactaaagcttttattgctattatcatcaaattttaaaaacataaaggtacaagtaacttcacaatcacttcacaagagaaaagaggttcaatcattttagcatggnattcaaaccatcaattcacaattagtaattattcttatgaagggaataatctcaagtattcgtccagttattnccttatttaactcagtgcaacattttctccatgaggggatccttgggnacatgggaattaattgggcaaataggataggtcatacctttaagggaataaaaagggttcccacccctttacaggaaagccaaacggacttacccagga

SEQ ID NO: 330009 - DNA, 492 bp, Homo Sapiens
tacttagcagatgtcgaccagttggctaggtgtcttggtagctgctgaggacaccaagatgagaagtaggctgacttacaggtttgggacttgggcagtcaggagttgagcagtgttaggacttttgaagtccattgccttgctctgaactgttgtttaactcctttcattttatctttgacctgattgaaaactccccaaagagcgacagcaactggggactgctatctctttgtatcttcggagaagggtctcaattaggggatgccagataaaatagaggaacatctaggttaaatttgaatttcaggatgagtaatgagtaattttttagtgtaactatgtccaaaatattgctccagtattgcatgggacatgcaaaaaaaattgctttttatttgaaattccaactaaactgagtattctatattttaatttggtaaatctggcaaccctagtctcaagcaatgctttttgattatgacgatggta

SEQ ID NO: 330010 - DNA, 341 bp, Homo Sapiens
  misc_feature (41)..(41): n is a, c, g, or t
tatctcaccccagacctcagaaactgaaccacccaagcctnccttccccgggaatcacccaggaaatgtcctgaacaataacccggccccggagattactgcagggctggcagagttttaggaatcaggccaaactctttttcacacttaaccccactaggaaggatatagttcaaatgtaatgttgagtccttcagtttatttgaacactgaaacaatatgttgtagaaaccttcattttcccaaaataaaaatctgaaagatatatgcacatgatttcttagatcatctaaaagtacccataaaaacctgtcactagggccaggtgtgatggcttacac

SEQ ID NO: 330011 - DNA, 469 bp, Homo Sapiens
  misc_feature (429)..(429): n is a, c, g, or t
  misc_feature (446)..(446): n is a, c, g, or t
acacctttaaacagccagatctcatgagaactcattcaccatcacaagaacagcaccaagaggttggtactaacccattcatgagaaaccactcttatgatccactcatctcccaccaggccccacctccaacattgagaattacagtttgacatgggatgtgggcaaggacacagatccaaaccatatccacctagcagtggaattactgagtcatatgataacatttaaccctttgaggaactgccagactgtcttccaaagtagctgcacctttttacattcccagcattgggggtatgagagttctaatttcctcatattcttgccatttgctattattctggccttttttattataggccatcctaactaaggtacaaagtgatatctttgtgtggggttttggatttgtattacccgatgggntagtgagggttgaggcnttttttcatgtgcttgttgggcg

SEQ ID NO: 330012 - DNA, 569 bp, Homo Sapiens
  misc_feature (257)..(265): n is a, c, g, or t
  misc_feature (278)..(520): n is a, c, g, or t
  misc_feature (542)..(542): n is a, c, g, or t
cacattactactaaaataatactgaagttggataaggttatcctttctgtatttgcgtctttcttgtgactaaccaccctgatatagtattaaccactgtgttcaagagtaaaaacaatatatgcaattttcattgaacttaaagagtgaaaaccatgtaaactattgaaactattgtaatccattaatgcttttttagaatggcagaccttgatgtttatttctcaaatggttaagccctcttctttactcttaannnnnnnnngagacagagtcannnnnnnnnnnnnnnnnnnnnnnnnnnnnnnnnnnnnnnnnnnnnnnnnnnnnnnnnnnnnnnnnnnnnnnnnnnnnnnnnnnnnnnnnnnnnnnnnnnnnnnnnnnnnnnnnnnnnnnnnnnnnnnnnnnnnnnnnnnnnnnnnnnnnnnnnnnnnnnnnnnnnnnnnnnnnnnnnnnnnnnnnnnnnnnnnnnnnnnnnnnnnnnnnnnnnnnnnnnnnnnnnnnnnnnnnnnnnnnnnnnatgaatcaccacaactagcctnacccttaggatttttgggaagggatac

SEQ ID NO: 330013 - DNA, 420 bp, Homo Sapiens
  misc_feature (164)..(178): n is a, c, g, or t
  misc_feature (399)..(399): n is a, c, g, or t
agggataacctgtcatctacatttgaaaattaatgaacaattctcgttacatagataatatttttcagtgacagtcgtatttttttctgtgggagggtgcacatttatattcatgaaattttagtttccagctttgaactggcacccttgttaaaaattctgannnnnnnnnnnnnnnaaactctggggattttacttaacaggttctgaaaggcttggaggctataacattctcacattgggaaattccttactagggaattacttagtttgaacttaggaatgatggatgaacttttggggacttaaatatactataacttttgtcactagggatccggggatattcgggggtgtggaggtcaggtgagtgggtgttaatcaaggggtctgaaaggnccctgggggcatcctgtaggc

SEQ ID NO: 330014 - DNA, 475 bp, Homo Sapiens
aggatttaaagtgaaaaagaatttatttaatttttgccatatcaggacaacaaagcagcccttttatgtcaccactcattaaaaggacattacaaaacattaacataatgtagtagcccatgttttctttcaggcattttcaaagggcatctcagacccacaatattttctattgagtgtgcagaaaaacagagctgcaaaatcattagtaaggcaaaataataaaatgtctccctttttattgaaacatcaattttccatgttttagagatattctgaatttaacattcatagatatgcaatatttaagttttaggatattagcatactatcagcaatattgggtttaatagctactatcaagcaactgatttctaatgcacacaacataatttgatagtatatgtataagaagatggcctgaattttgccctcaaatgcacaaaaagaattttccatacacattctcaaaagt

SEQ ID NO: 330015 - DNA, 432 bp, Homo Sapiens
  misc_feature (114)..(114): n is a, c, g, or t
aactttcttaattatggaaagtaacagagatttagggtaactatcatgtacaattggtctgctttgatgaagatattgtgagtggtgaactgaaaaagcaagctgaaaagcganacccatatatgctaacacaagagtgccagcagagcaattctgggactcagagagccaaataaaaaggtatgaacccatataaatcacagctgaggtaacctgttgcaaattaaaggcctaactaaccagaccaaaacaaaattgttctgaattctttagggacacagtgatacactccattactgccctcttgggagcagctgatttcaaatgctaggctttcaatgaaaacttataagaagctagaattatggcaaatagtacccacacatggcacctaccttctgaagtctctgtacccacacatggcacctacct

SEQ ID NO: 330016 - DNA, 392 bp, Homo Sapiens
atactcaacatccattgatctttatttgatttgacaaaatctgcatttttaaaagacaggtaacaaaatctgaggttatactgaatctgacaaattgagttctatagtatctagaatatcatataagaaatatcaactgagggaaaagagaagtaccacatgcagatgctcctggcaaggggggaactgtatctgcaggtgaggtccagagtgtgcagtgcataagaaaatcctacagaaaatgccgttaacttacttggatgaaatgtttttcctttgagggggaggaagaggtggtaaagaggggcaggaattcaaaggcatatgcagaattggcttctccctttcaaaatgggtaataaaaatattttaaatccatgggcactaggggc

SEQ ID NO: 330017 - DNA, 416 bp, Homo Sapiens
  misc_feature (264)..(264): n is a, c, g, or t
  misc_feature (367)..(367): n is a, c, g, or t
  misc_feature (377)..(377): n is a, c, g, or t
  misc_feature (398)..(398): n is a, c, g, or t
acaaggcaatgtatttattttttctttagaatttggctcagaacagtaacaaaaatatttacattaaaataaattaacatgcaattacttaaccatatgtaataatttacgttggaatatattagccttcccatgagtttaataaaaactaatatttggttttagattcaataccatcctttcaaatatttggtatgaaacttggtagcaatgcaattgtctgatgtacagagcagatttcaccatgagagattacaccaaagnaacaggatgtcccttcccaggaacattatctcaccccaggactcaggaaactgagcagccaagcttccttcccagggaatcacccatgggttgtctggaaccntaacccgggncctgggggattacttgcaggngctggcaggagttttagg

SEQ ID NO: 330018 - DNA, 165 bp, Homo Sapiens
acattaaatctttttattgtttaaaaatctgggttgaacagtcaagctgcatatacataagtgaacccaaacaacaacaacaaccacctttaaaatataacccaggtccttacaaattgttaacagactactggactatcaactagagggccggactggaggaac

SEQ ID NO: 330019 - DNA, 325 bp, Homo Sapiens
  misc_feature (278)..(278): n is a, c, g, or t
  misc_feature (305)..(305): n is a, c, g, or t
aagaacatgattaatcattgttccaagtaaatgctagatcattatttcccaggaggcaagttaagcatcaggtgcctgaggggtaagggacagggcttcagtcggctctgatagctgcatggctgtcccaatgagctttccactcagatagtgccagggggaggctctcatcacaggctgggctcactgggcctttatccccaggctccaagggaaacaccgggggcttttttctgccatgagaatcgtgtttcagagtcaaatgatccactttaagntgaaatttgggcagctcagttccagantattctagttttacccgggg

SEQ ID NO: 330020 - DNA, 213 bp, Homo Sapiens
agaaaccattctaaaaaacaaaacaaattccaattttcctttagtatttaacatgccatttcaatcctaagtaactattcttatatctccttgaaatttttgtactaaaaataaattttgtcctattagttaaaaaaaccaacagcaatcttcaaatgtcaatgattaagggtttttgggttacacaaacagtttgaaccactgagttcaata

SEQ ID NO: 330021 - DNA, 358 bp, Homo Sapiens
ttttttgaataaaatatttttattgattgaacctttgaccctctatcttattacatttagaggcctggcatctttcttgtgagacaagcttaaggacacaaaagaaacacaactttgtgataccactcttctgaaggctacttatagtaataacttcatagatgaacagcatgattcaggtacagtggctttaaacatcaaagcacatttctcattatataaattaaaacgggtggctccagtgccactatcaaagcttaagttatatcttttatctagttctctgaatgtactgaaacagtactttattcgtccaataaataaagcattaaaaattgttcttactgaaaatgaagta

SEQ ID NO: 330022 - DNA, 403 bp, Homo Sapiens
agaaagaaatagatttattctcatgtacaaagcggtcacccacgggaccatatacgacagttgcacagagtcctagaaaaacgcatctctctaaaggcaactcagaaaggtaaggcaggtggaccccctcccccaccccacaacgcacacagattgaaacggagaaaaagagagaagccagtggccgggctgacccaagagtcccggccctatggggtctcccaagccccagggcacaggtggatatggccttgaagagagagccctgccagggctgaggccaggtctctcactggctgcaggaatgggtaaggggctcaggccaaggggaacactcagggggcctctgagacactcagggttgggctctctgtgccttagggttgcagaaacattccatagc

SEQ ID NO: 330023 - DNA, 173 bp, Homo Sapiens
  misc_feature (36)..(36): n is a, c, g, or t
  misc_feature (48)..(48): n is a, c, g, or t
ctgtgtcccctcccccagtaaaggcaccaaaagatngactgtcggacngccggaaattagttttaccctatgttccttaaaattttaacaattgaattacctcagtatgtactcttttgtcttcctttcctctcaataaagtgccctatgagattccatcctaccttgttccc

SEQ ID NO: 330024 - DNA, 473 bp, Homo Sapiens
  misc_feature (57)..(57): n is a, c, g, or t
cacccctgagaactgatgagatggcaagggaaatgatgcttatacctgccttaaagnaagttctttagaagttttggtcaacttgatttggaccagctgaaaattggcatggccccttccccctctctgactttaggggccaggtggtccttggggccttccaggaatacaacacttctctttccttttagcacattggaatgcttgctggactctgctctcaccacccacctggcagaggtcttgaataaaagaaaacttcctcataaaactacataaaagcagattgcaaaaaccaaaaaagttaagggagactcctgtgttcatagatgacacagactcttgggtttggaagaacactaaggggtcatgtcatttagtcccttcactgtgtctgactctgatgtgctcattgttctgatgcaggtgctgacagctgcaccgtgcatgtgttcactgtctgctgtgccgaa

SEQ ID NO: 330025 - DNA, 321 bp, Homo Sapiens
  misc_feature (73)..(73): n is a, c, g, or t
tccacacctttatgaaatgccttactgtgtaaacttgaatgtggaacaggattttagcataatggcaggtggnctggcttctgaaattagaatgaaaaagctaaactcaacccaaaggcagccagtaatggctcaaaactggaataggatgtacatctgacaatggctcatatactagatctagaaatacgtggcagtgttcccaaatttagagagcccttttacacatagacagaggttcttacttgactcaaagaagtatgtgttttaggagagtaccttctacattcagtcattatttgagtactttgtgccaagaac

SEQ ID NO: 330026 - DNA, 402 bp, Homo Sapiens
ggctgatttaactctccaggtatgtaatcacatcatatacaggagatatttttgtctcttctttttcagtatttatttccattggggtgtctttatcttttctgtcgttgtttttaaaaactttccagacaatgttaaataataatatttttatgaatgatttcaatgacaatgataatagtaggcatctttatatattctgaatgtagaggaattattgctaatttaaatatggatgctctatgctgttaaccggaattctttttaattctagttctgaaatttttattagggaatgattgttgatttctataaaatacctgtcaagtatgcactaaaattataaggatgcttttcctgcttaggcgtccttgatgtgggtgtaggcatattaattggaac

SEQ ID NO: 330027 - DNA, 405 bp, Homo Sapiens
  misc_feature (222)..(349): n is a, c, g, or t
  misc_feature (352)..(352): n is a, c, g, or t
  misc_feature (366)..(366): n is a, c, g, or t
  misc_feature (379)..(379): n is a, c, g, or t
ataaaatctttagcattatatcttcagtcaaaatggtaaacatcgaaggtatgtactgtgaaagactaacctacatgactttaagaaataacaaatgatatataatgtgtaaccacaaagataaatttcagtctacttagtaacatgaagaaaagcatttttttgagcccaaatatgcagccagggggactaatcaaaacctgcagtgaggccagggtatgnnnnnnnnnnnnnnnnnnnnnnnnnnnnnnnnnnnnnnnnnnnnnnnnnnnnnnnnnnnnnnnnnnnnnnnnnnnnnnnnnnnnnnnnnnnnnnnnnnnnnnnnnnnnnnnnnnnnnnnnnnnnnnnncanacaaacaacctgcngttaggtaaaggnttccaattttgttccaccacattccg

SEQ ID NO: 330028 - DNA, 456 bp, Homo Sapiens
ttaacagatactattttattatttacaaaatacatggtgatcataagagaacattttacaaattacaaatgggaaaagtacagggaaaagtagagacaaatgggttaaataacaaggtaaccatttgtaatgagtctgtttagaataaaatagttcttcacaaaagttagacaaggccatgagtaagtatatcactgtataaaaaatatcagtgacgtcaaaatatacctgtaccaaaaagtagaacagcaacggtagtgcatctaaatgtgtcctaaattaaattacagcacatacagtttcagtgttccacaatacaaccattgctctgaggcagcaatctgtgagacttgattgcctagctcactgaaagagcaaagccccaggactagttaacttccctaccttccataaggccttgttcaggtgactttggaatgtagtgtcaaaaacccc

SEQ ID NO: 330029 - DNA, 420 bp, Homo Sapiens
  misc_feature (18)..(18): n is a, c, g, or t
  misc_feature (29)..(29): n is a, c, g, or t
ggggggttttataatttnccccctttttnccccccttttaccccttaacccttcaccgtatttccagtcctggtcctgaggtttccaaaggtgcccctttaaggattccggccaaggaatatcccagcctttttaaaccatggggaataaaacaagaacaatgtgatagccatagtgtaatggtgcccatagaaataaacaataaaaagaatttaaagagagaccccaggagtcaatttcataaatgccaccattacattacttaggttaagcttttgaatttatctagaaaaatgtcattggctaagacattaacatttatagaggaatgcaaaagtgcaaaattaaagttcctaagaatcaagtccagaaaaatagaaaatgtgtaaaggctgttgttctcagtttggcaaataaaat

SEQ ID NO: 330030 - DNA, 399 bp, Homo Sapiens
  misc_feature (306)..(306): n is a, c, g, or t
atggtcttttttgaaaggtatttgggcttgaaaagcacattgtactttatcagctgtgtacctctgctattgtacaaggaaagcctcattctcttctgtccggataccatccttcaacaccctactcaaatgccgcctcctccaagaagccttcttccctccacttggaagtaaaatctgcttctctactcattcctctctcatgggtcctcatctcatgccatgttctgttctaggctgataacatttacatatgtgactcagtgggtatacctcatggtatttgacacacaggaacgggatcanttttaatgaccctctggctctataagggcaaaaggtattttcaggtcatatttatggtaaaaatcagggcaatccatcactactttctcggat

SEQ ID NO: 330031 - DNA, 671 bp, Homo Sapiens
aaagggtttcaaaatatgggagtaatttttgtttttccatttaatgctaggtttcaaaggaggggaatatgtctatcactgctacataggcattctgtttaaaacccacccagatgccttaatggggctctgtcaagagtgggaaggtccccacagctgtttctcaaagccagtagaccactcagtgtgggcagtggggagcttgtgcttggcaggcctcccacgtcgccatcatttctttttgaacacttgacggcacacctggtcaccacagggtcagctccgggtacagcttgtccccctcaatccactgcttccagccgcggttctccttctcccccttttgcacacacacaaggacatcaccttccccaggtgaccagtgccttaacatgccggttatcccaggctctttgtgtactcgtcaaactctactccaacagtgaaatccacatcatagttgcggaatgtgctagtggtttttgtcttgaagttatcaccatcttgatcaataaccttcgtctgagtgagacgtactgcaatcttgcgggtggcaaaatcaatatccagggccttcatgtagccctcaaagttttcattactctccatctcccaggttccattctggtcccttgtcatggtggtggccactggttcggtgagggtttgtg

SEQ ID NO: 330032 - DNA, 170 bp, Homo Sapiens
aatcttccttttagatttcaatccagtcctagcacttgatctcattgggataatgagaaaagctagccattgaactacttggggcctttaacccaccaaggaagacaaagaaaaacaatgaaatcctttgagtacagtgcttgtccacttgtttacaatgtcctcctttt

SEQ ID NO: 330033 - DNA, 450 bp, Homo Sapiens
  misc_feature (14)..(14): n is a, c, g, or t
  misc_feature (22)..(22): n is a, c, g, or t
  misc_feature (285)..(285): n is a, c, g, or t
cctacctttctccnggaagtcncccattggagctccatcaagactgaccgtgtccttacatcagttccagagaggtccccagcagaccccggagcacagatgggtcagccctactcagttcctcccactgggctccctgttttcagaatggtctgtgtgtggagaagactccctaagtgccctgggaataggtgggctgtgggtgaagcggatgaaggcgatacagagcgaggacgtggcctgaaaccgagagcagcattctcccttccctgcttccatccgttncctggtctgcgtcccagccctggtacgtaaggctgtcccagaatccctgtaaattcacttttctgttaaatgattccagatcattcggttatgtgcaaccaaaagtcctcacccatacgtcatcttacagcattaaagcttcaggcgacttgggtatgttttaaa

SEQ ID NO: 330034 - DNA, 425 bp, Homo Sapiens
  misc_feature (223)..(357): n is a, c, g, or t
  misc_feature (391)..(391): n is a, c, g, or t
  misc_feature (408)..(408): n is a, c, g, or t
ttgcataacgaaagagtaacctagcatgtattatattttacagtgaaccatctaaaattaccttaatattcgtggcaggaacaggcccagaggaaggcaagccagagccttctttgacttgtgagccagaattgtgcaaataaggattagaaaagtattggtagaaacccagttttaagtttgtatgaagttagcaacattgtttcaaaataaatcaaacaannnnnnnnnnnnnnnnnnnnnnnnnnnnnnnnnnnnnnnnnnnnnnnnnnnnnnnnnnnnnnnnnnnnnnnnnnnnnnnnnnnnnnnnnnnnnnnnnnnnnnnnnnnnnnnnnnnnnnnnnnnnnnnnnnnnnnnattaccaaaattttggctggggcatgggttggcnttgcggcctgttagttnccggcttactcaggggg

SEQ ID NO: 330035 - DNA, 408 bp, Homo Sapiens
  misc_feature (239)..(239): n is a, c, g, or t
ttggtgcagacagggttttaccatgttgcccaggctggccttgaactcctgagctcaaatgagtgctaggattatagggcatgagacactgtgtacagccatcattacataatattacatcagtcaattatgtaactaaaaccaaaaagattttaagatctcttttcactcccagggcaaaccaagaacactgataattgagtgaaggaggtcatttttaaggaattaggcttcatagntgaattcacaaatattccaaaagacatcaccctcaggccaattttccaaaagtactatactatggctgcctttcaaataggcggtaatattaaaccgatggattccagtatggaatcctctagggactaggaaccacattaggtcttaaattaaaaccattttgggcaa

SEQ ID NO: 330036 - DNA, 459 bp, Homo Sapiens
  misc_feature (16)..(16): n is a, c, g, or t
  misc_feature (24)..(24): n is a, c, g, or t
  misc_feature (71)..(85): n is a, c, g, or t
  misc_feature (110)..(237): n is a, c, g, or t
attacttaaatacttnaggtcagnagttcgaaaaccacctggcccaatatggtgaaacctcgtctctaccnnnnnnnnnnnnnnntacaaaaattaagcccagcgcagtnnnnnnnnnnnnnnnnnnnnnnnnnnnnnnnnnnnnnnnnnnnnnnnnnnnnnnnnnnnnnnnnnnnnnnnnnnnnnnnnnnnnnnnnnnnnnnnnnnnnnnnnnnnnnnnnnnnnnnnnnnnnnnnnctgtctcaaaaaaattaaatcatgaatccccatcctggaagaggtaggtcccagcatccagccagattttctgcaatagtaatttaaacacacttttttatttccttccctttctgaattaaaaggaacaaaaaactgtctagtccttcattgttctgaaatgggcatgatggaagaaggcgggtctggtaggatagctgtgactgataatgctgtgccgaa

SEQ ID NO: 330037 - DNA, 345 bp, Homo Sapiens
gagaaaaaatgaatattttagccacacctttcccaccgagacggagtcttgttgcatttttcacaaaacaaacgcttttaagaagtgaacgttgcttggctgatcttcatcatttattcaagctgaaaacttggtttttaatttacaaataggattaattactgaaattcgtatctagtgtgaatatttgatgatgacttttggaacaatggacattttgcctaagctatgaaattaattattaatacttctaaactttagccaaaatggtgattttcgcatgtggagattctttactcttttcacatgactttgttctcatagaaaaatgtggcagggccatgg

SEQ ID NO: 330038 - DNA, 481 bp, Homo Sapiens
aaatccttccataggaatgccactgtaaaacaaaataaacctgttgacccaaaatctccctggggtggccttttgtccccaatcccacaatgaacaaaatgaagtggcaaaccttcccacggcccacccacggtgaatgttgcggggaagcatgctggggaaggcagatcactcttccttcaggtcattggggatgatttcatcccaggctgtcccacttggaagtgatccagtgcatcagtcagagagcacggggctgatgggtctttatttaggtacgtcacgtaaggagcaacaaatcgtttccttccagccagatcaaattcttcttcaggaaaggaactgatggcgccttcctctgggatcaccctcggtgtggtagcagtggtcgaaggctcagtggtggttggtggccttgacgtctcaaattcataatcttcatcatatataacgtaggcctcttccgtaggtactgcagtgt

SEQ ID NO: 330039 - DNA, 414 bp, Homo Sapiens
tttacgttttgtatgtttttttatttgctccaggtggggttttgactgtcactttcccacactctggattagttctgatcccaccacaaggagccctcgaattggctaaagtgagaaactgggcctgaagactccgtaccctctgccatcttgccgagggagtctccttttagaaaacaatcaaagggttattgcatgagtctggatgaatcccactctcagctgtccacgggcccgaccacctcatctagccccctttttggcagggagaacctggctcccaagttctcctccttcacttcgttaacaaaccaaggggaagagcccaccgtgagaacgcgccatctgcaagctgtctccctttctccatccttggtgaaaccctttgcgcagaaggcaacgtggaaagctgat

SEQ ID NO: 330040 - DNA, 395 bp, Homo Sapiens
  misc_feature (353)..(353): n is a, c, g, or t
ggcacgagattcaaatagtacaaagatttggcttaatgtgaaattgggtcttctttctaccccagtccccagtcttttagttctgtgttacagaaaagtactatgcgattgttagcaattgtctcatgtagtctttcagaaatattccaagtatataaatagtaatatactttgacatttttatacattgatttcccccttacatatgtttgaaacacttccatatcagtacatgtaatctgactcattgcttgttagtagcttcataatagttatatgaatgtcattataggtcatttccagtattttacttgcttaggtgtttttgggtcagcatcatttgggagttagtntgtaaagttaattttgacaaagggccaagggcttttcagggt

SEQ ID NO: 330041 - DNA, 401 bp, Homo Sapiens
  misc_feature (70)..(106): n is a, c, g, or t
  misc_feature (382)..(382): n is a, c, g, or t
ttgagacggagctcggcactgtcgcagagattacaccactgcaacgagactcgggcccagacgagatctnnnnnnnnnnnnnnnnnnnnnnnnnnnnnnnnnnnnntaaataagtaaatagaacctcctgagctaccctgggcttataaggattcagattactttaggaaattaggcattagcactaggaggggggaagatggctggcaaaacttctagctagcaacctatgtctagcacatgggtaactaaccatagcgagatcctgaacacatatcctctaggtccaggtggagggaacgatgtccaatacctgaaggcagattttcacatgggacggaacttttgtatttccctcttcctggcacgaattcactcatgnttcttgggacgggtttttc

SEQ ID NO: 330042 - DNA, 472 bp, Homo Sapiens
  misc_feature (457)..(457): n is a, c, g, or t
aaaatcactcaaccattcttggagggcttctctgcaatcctccttttcttctctcccctcccctgccttttgtcttttctaaagagtctgaaattccgatttcccatgctctcccggctacattaataagcaaaacctgcttgtgtgtacggttctttactggaaacatgactttttgtttctgtattggttttactgtcatcccagttttctagtttaatatctagcaaaactaaatctgaatgtactcgctttttccgttaagtatgccaagcacctcggttgaaaggcttgactcaaaccagaagtcttgctggaattcgtctctgaacacttgaaaaacagaaaccctgagccgcaacaaacatgcctctgtgtgtcgggattgcctttgtctctgcttccatgtggcttttccttttgtagctatgcttagtgacataatcttccctcaacnaaacctctcctttca

SEQ ID NO: 330043 - DNA, 476 bp, Homo Sapiens
  misc_feature (30)..(30): n is a, c, g, or t
  misc_feature (52)..(52): n is a, c, g, or t
ttgaacactgcttctcatatgggaaagagntggaagggccaaaattggaccntatctagttacctccccatcccttttataagggtcaattaaccccatttaataaaggttaatatggtttggaaagtccccaccccaaatcctcaatattgaaaatgtaatcccccagtgtttggaggtggggccttggtgggtggtgactggattatggggatggttttctcatgaatggtttagtaccatcctcttggtactgtccttgagatagtgagttctcacgagatctggtcctttaaaagcgtatggcacctcccgcctcactgtcttgctcctgctcccaccatgtgagacgcctgctcccccgtgaactcccaccatgactgtaagcttcctgaggcctacccagaaatagatgcccgtgttatgcttcctgtacagtgtgcagaaccatgagctaattaaacatcttttcttta

SEQ ID NO: 330044 - DNA, 429 bp, Homo Sapiens
  misc_feature (327)..(370): n is a, c, g, or t
cactttcccaccctcacctttaaagacagctcccaaaaaactgaagtgccctgaacatgtcacccacattccagcccctattcaaaaatagccccaaaatggatgaagttttcaactttaaattgtatgttctcacaagttttggacatgtctgaagtaaaagctaaggtacagtcactggaccttattttgggtgcacttcaattatgactgtgactttagtggtgggttagtatggtttattgcaatgatgcttttttaagccctttaatacagatgatgggtaccatggatgccagatgaatacatatttcaactagtattttnnnnnnnnnnnnnnnnnnnnnnnnnnnnnnnnnnnnnnnnnnnnttccacaaggatatataacagtaaatgaaccagataaatccctgccaccgaggaactta

SEQ ID NO: 330045 - DNA, 463 bp, Homo Sapiens
ggctaataaattatatttatttacaaaaggtctaattttatataactatgaggttcttttacatcagaataatatataaacagaggtgaaaatctggtaattacaaacacagaaaatagaaaccttgttcccttatttattactcacctttcagaacaagtccttggctcagttgtagaggtggggaagaccaacacctaccgaagtttgcaggcaggagccccaaaaatgtttataaataacacatttaggataccctaaggaacagcagtgaagaatagcatcaaggaatggcttagtttgaatctgatctaattcaccagccactcactgtttcattgtccacgactaggggcagggaggattagccagtatgaatgtcaactttacaagtagggtaattaccatcaaattaacaattaccaatcactagcactgagatggctttgactagatctactga

SEQ ID NO: 330046 - DNA, 736 bp, Homo Sapiens
  misc_feature (532)..(532): n is a, c, g, or t
  misc_feature (534)..(534): n is a, c, g, or t
  misc_feature (583)..(617): n is a, c, g, or t
  misc_feature (654)..(654): n is a, c, g, or t
  misc_feature (703)..(703): n is a, c, g, or t
tcaaggtcaagaaacatcctttaaaaagttaattcccttttctggagcctaagccagatcttatctaggccttgtgttgccatctgttagcattgatttctggaatgtagcagctttctcaaagtttggtcttgctagtcatgaggtcatgtcagtgtcttaggtcactgctgctcaccttccttacccagggagtatactgcataggtttctgaacacctgttttcattattcactgttcctctcactgccaagaatggagggaccctcagttgaagatcaaattgactctgaagaaaaactggagatgtttctcttggagtttggatagagtattcacttgataacatgtttttcccctgccttgctcttcacaagaacatctgggccaggcattaacaattagtaaatttttttgcatatgaacagtatttttctggtcatgtagatgggtgcacatgacactaaacagcattgtttagtgttatccctcttaactggtgggttgtatttggggtggaggctgtagcangngagaagacattcacctctgtactcgagaaactttgtgtaggaatttagnnnnnnnnnnnnnnnnnnnnnnnnnnnnnnnnnnnactacttttactgttagcacaatgctataattgagcnaatctttgtagtttggtgcaggaccaccaagtttgtgtgacccttaccnactttttccatgctcagccataccctgtccggg

SEQ ID NO: 330047 - DNA, 464 bp, Homo Sapiens
  misc_feature (151)..(151): n is a, c, g, or t
  misc_feature (189)..(189): n is a, c, g, or t
ctgttagcacaaaggctataaatggagctaatcttggtaagtttggtgccaggacccaccaagtttgtgtgaccccattaccctactttttcccatgctccagcccattacccctgccccggggcatctgagggcagtaaggaacaggtgncccaaaggaggaatgttggtgccctatgagtatgtttncccagttgtattgaatttcttacttggtgtatttttgacttgtcttagtttctttccttgtggtctatgctattttacttgcgatttgttggatattctccctgtcattaaagagttgtaaaatggaagttagtttctctatgcaaatgctttaatggatgaagctgataggtttagcattgatttttgctggtgtccttcaacaagcatgaaggtgataaatgtgtttccatggctttagactcatttttgaagtcttggattgtgtgaacatt

SEQ ID NO: 330048 - DNA, 271 bp, Homo Sapiens
  misc_feature (248)..(248): n is a, c, g, or t
  misc_feature (255)..(255): n is a, c, g, or t
caagcagtcctgggcaaattatctgaacctcagtttccctctcggttaaatgggaaggactctctggaaggatcagaggtggtgcatggaagactccaggtgcactagggcagtgaagaaatgccagcagcctccatttcaaacctctcctgggctttctccctatacacagatactcaggctcttgtgacctgggccaactcatgcccgtcatcatgccaaactcagcttgggaggggaccactttnttttcgnaagcagcgagggccat

SEQ ID NO: 330049 - DNA, 414 bp, Homo Sapiens
gctgggattacaggcgtgcacacacacccggcgacttcatccactgtctgtccgcttcctgtgtaaggccgaccacccagcccccaaacaacccttaaaatgagacccaaaccaaagacctaacatataagcctcaaatcagtaaacctctcctgaaacaggcagaggaactgcctgcccagaaatactcacaataggctgtgcagattgtaaagagatcaacagcttcacccacgctctgcataaactctggtactggctgtgttctccatagaaggtctcgctgtgttgcctggggctgggagtgcagtggtgttgaacacaggttcactggcagccttggattttcttggggtttaagtgatttttcctggcctcaggattccttgagttaggttgtaggaccacagggtg

SEQ ID NO: 330050 - DNA, 620 bp, Homo Sapiens
  misc_feature (421)..(573): n is a, c, g, or t
ttactattatcacatacaactaacaaaaatggtgctttattttttgtcattcttcccttgtacagtagtatctcacattcagtacttctttagatcctcataagaaatctgggaattaagtattattcccattttctagataatgaggatcagacttagacaggggcagttaggccgcatagctggagagtgagtcacatttgcttggttttgccatgtgacaggtctttcccctatgtcgtctcccttgatcctcacaataatcctggagggtgtgatgactgttctccctttacagatgaggaaggaggctccgtgtgtcatgtgccaaagatcacacagtcggaagcagggtagctggggtttgaagccaggttttccggctccagattcaatcctccttgtgcttcatctactaccnnnnnnnnnnnnnnnnnnnnnnnnnnnnnnnnnnnnnnnnnnnnnnnnnnnnnnnnnnnnnnnnnnnnnnnnnnnnnnnnnnnnnnnnnnnnnnnnnnnnnnnnnnnnnnnnnnnnnnnnnnnnnnnnnnnnnnnnnnnnnnnnnnnnnnnnnattcctggccagttaaagattattccaatttgataacggcattagtt

SEQ ID NO: 330051 - DNA, 416 bp, Homo Sapiens
  misc_feature (68)..(68): n is a, c, g, or t
ccgcggaagttctcagagctgagcttcgtggtggcctgcgagggtggctcaagcagggagcagacgcnaatcttgttggacacggtgccagtgaccacctcgctgccgtacaggtcaaaggtgtggatggggtcggatgctgacttgtagtgatgggtgggcttctgctccagctccttccagacggtcaaggaatggtcagaggaggagctgaccaggacgctgccctccaccgccttgatctgcagaatgtccccctcgtgggctggccagcctcgcagaaccaggcccgtgcgggtgtccaggagcaccatgaagcctgaggagaagccggccacgacactacggccactggggctgatggccagggcacggacaagcccagggttcagcccaccgcccagtcggaactcgtg

SEQ ID NO: 330052 - DNA, 430 bp, Homo Sapiens
  misc_feature (374)..(374): n is a, c, g, or t
  misc_feature (390)..(390): n is a, c, g, or t
ttttaaaatatttatatggatcaactttattgaaagtgaataaacagagataatgtggcaaaaagaaattttcccaatattaaacccttgatgatacttttaaattcactataaggaaaagaatccaccagtagtaggtagctacttatttttgctgagtgtcctctgcttttctgcatgctccacaatcttttcttccacataaagccccttccgctttcgtactgcgttcatgtacttccgggcttggttctcagagtcagccttctccccaaagtggaagtattcctcctcagtaagttgggcccccaggaaggggttcactggggaatgatctcccaatgggctggaatactaggttgtggggctgggcnggggcacttggtcctntttcctggattttcatcaggcaaaaccaaaggttttcagg

SEQ ID NO: 330053 - DNA, 686 bp, Homo Sapiens
aaaatatttatatggatcaactttattgaaagtgaataaacagagataatgtggcaaaaagaaattttcccaatattaaacccttgatgatacttttaaattcactataaggaaaagaatccaccagtagtaggtagctacttatttttgctgagtgtcctctgcttttctgcatgctccacaatcttttcttccacataaagccccttccgctttcgtactgcgttcatgtacttccgggcttggttctcagagtcagccttctccccaaagtgcaagtattcctcctcagtagttggcacccagaaggggtcactgggaatgatctcccaatggctgaatactagttgtgggctggccaggccacttgtcctcttcctgatttcatcagcaaaaccaaagctttcagcaacaggcagcacagccttgatgatgaacatgtctgtcccttctttcatttcttcttgaagtacccgaccttctctctttgacaagacagcatagactcgaccgagaacatcaccagtggccatgatgtcacatgtgtacatagctgccatcaggcgctgaggtttcacttgcagtgcatagcgacatgcttctttcatggtggcaattagctgtcctgagaaaggtccatagcaatcagtgagtggagattctcctttctgtgatgtcctcttctc

SEQ ID NO: 330054 - DNA, 645 bp, Homo Sapiens
atccctagatttggtctcactggctccatacaatcagacaatggcccctagcttcatctcccaaatcactcaacaggtttctcagtcccttggcatccagtggcgtctccatatcccatgctggccccagacatccggaaaagtcgaaagggcaaatgggatccttaaggctcagttaaccaaactcactcttgaagtccaaaaaccatggacctcccttttgcccatagcactggagagcattagagccagtccaaaagcaccctccttcctcagtccatttgagttaatatacggacgccctttcctcttacaaaacaggcccccttctaactctcagctaggagaatacctcccaacagtctccctcatgagctatctcctctgccaacaagccgaccaggccctcccaaaaccccacgaagggttctccaatcccaaatagacttgctctccaattccaaaagactctttaagcagcagtgacacttcaaaaccatcgaggtttagatctcctcactgccgagaaaggcggcctgtgtatctttttagaagaggagtgctgtttctatactaaccagtcaggactagtacaagatgctgctggacgaataaatgaaaaagcttctggccgggtgcaagtgt

SEQ ID NO: 330055 - DNA, 361 bp, Homo Sapiens
  misc_feature (329)..(329): n is a, c, g, or t
  misc_feature (340)..(340): n is a, c, g, or t
ctaccttcatctgttttttgttcattggacttttttccaagccatcatctttcacttctccctcttctgatggattatctgaatgcctaggagatgaaagctcaattccatgctcctctttcagcctgggcactttgttttccttctttacccgaggcttccgcttctttaatttggcctcttccccacctgtcacagcccccttcttctccagaccctttctgagcagcttcaacaagtaatccgctcgggtctgtagctgcttcccctgaggctttttatctgtctccaccggcagaattttgtcagttaaatttaaggtttggggnttgtttttaanttaagggggccgaaaggttta

SEQ ID NO: 330056 - DNA, 420 bp, Homo Sapiens
  misc_feature (218)..(372): n is a, c, g, or t
ccacccatattggagagcatacctgtcgactcacactttctaggtgttataaatgacggtgggatgacttccagttggcactggtagctgtaagtagaacagaaccaactccacatgtctctgcaaatatctccctggatcctaccttgaccttcatccctgagcacaagttctccaaagtcaatatagtcatcctccttatgatcaaggatgaccgnnnnnnnnnnnnnnnnnnnnnnnnnnnnnnnnnnnnnnnnnnnnnnnnnnnnnnnnnnnnnnnnnnnnnnnnnnnnnnnnnnnnnnnnnnnnnnnnnnnnnnnnnnnnnnnnnnnnnnnnnnnnnnnnnnnnnnnnnnnnnnnnnnnnnnnnnnnaagcatatcactcatccctggtgcaacagggatttgaacccaagcact

SEQ ID NO: 330057 - DNA, 473 bp, Homo Sapiens
  misc_feature (403)..(403): n is a, c, g, or t
  misc_feature (412)..(412): n is a, c, g, or t
  misc_feature (419)..(419): n is a, c, g, or t
  misc_feature (424)..(424): n is a, c, g, or t
  misc_feature (442)..(442): n is a, c, g, or t
  misc_feature (463)..(463): n is a, c, g, or t
atcaaatgcagaaaaaaagtctttattctcataataaaaataagtctgttctgtattttacaatatatttcaaatatttccactatgaagcattcattagtcccacatggtcaagaagtatacaaccttttccaaagacagagctgccgggagtgtgtttaggacacacacctcgtacagccgcacttcaccactttctcaacctcgtccacaaaggaggagccgtcagtgcattcgaaagagtatttccgccgcttgctcctcagcgggtccacaggcactgccctcctggcacacccacctctggcactttaatcggggacaccttcttgggttgtttgggcaaggcaggcataggccctggctggcttttggggaataaatctcttatccttttcccctnggacaaggngattttntcggntcacaggtggtcccccgnggtattccactgttgggattnacagtagggg

SEQ ID NO: 330058 - DNA, 499 bp, Homo Sapiens
  misc_feature (127)..(127): n is a, c, g, or t
tcagacatcttatttctagggtgattgagggaggtggaaagcgcaggaggaagccagtgaagaggacaatggaatgctgagtcaatgacattgacttgtgttcctatctgccatcttgggtgtgggntctttatatgtggttaccagatcctttagtttgagggaggtgaggtagagaaataggatgcccagcaggtaggaggccgatgtcagtcctccccgcaaagctgtgtcatttatctgaatggaaatgagaaaataaatatgtactcaataagtcacatttcccagaaatgtgattgagattctcaaaaaatagactcagattcttggctgtctgtttaaccaatcacgatatgggatttgagaaataaaatttagggaattttaagagacatgaaagctactaggtcagggaaaataaaaagcttaaataactatttttattgtccagatcctctactgtaatagattaactatgttccataaatttctagag

SEQ ID NO: 330059 - DNA, 409 bp, Homo Sapiens
  misc_feature (384)..(384): n is a, c, g, or t
ttttgttttcaagcttttcgcctacattttagactaaccctgcttattcctgtgaatcaagcagtgatctcctgcagcttggaagaaaaattaagggatgggtaatataaaatctgaatcaatatattagttctgggcaattattctgcaaattctaccaggtaataaaagtgagtagggtgcccataacccagaggtttcttcgtttaggaaaataaaaccaaggaacttcatagacccccaaagggaatttctatatcttgacagggtaaaagtttagatgggaaattatctaccacaccacacttatgggaaataggctatactcactctattatttggcaatagggattatacagggtaggcaccttctaactggaaatntttaaacagggggtttcccttggcc

SEQ ID NO: 330060 - DNA, 510 bp, Homo Sapiens
  misc_feature (86)..(86): n is a, c, g, or t
  misc_feature (101)..(101): n is a, c, g, or t
ctgcttcagaatccacgtatatggatcaggtcctgctaatttttggacacaccatgcctctccctctcccacatctaccatactgncacgtatctctcccngactttcaaagaggccccaggtgaaaatcaatttggagccacgcaaccagtcccctctcaggctctgggagtcatctgggaagtcatgattcagctccagaggtcactggcctgggaccacagtcacactatatccctcagttacggtgcttgtgggcatggcctctgatgtttagatgacccgagaagcaaactgggaacacaatgactatttgccgctctcatataaaaatatgcagctgggttccaccacattcaaaatgcggtaaaagctggggcagttctttagatatgatgagaccagccccatagccagcttgagccacctaagaaggaatccagcctacctggtgctgaatcctggcctcttatttctactctgctagtttacagaggaagttctcgtgcc

SEQ ID NO: 330061 - DNA, 331 bp, Homo Sapiens
  misc_feature (312)..(312): n is a, c, g, or t
ttgaggagaaggagtttgagattttacatcccaaacatatttcaattctagtgatggctctctgcccactctgccctcattctatcccaggcaatcagtattacttgcccagactactataagagcttcctaattggtcttgatatttcctctgttttgctctctcccccaacatattgttctcaaagagacagagtgagattgtaaaaatataaatcaatcagactatgcctctggatttaaactattaaaagcctacccatttcagttgggaataaaatccaaactctttcactgtgggcttatttaagncaatttgtccctctttggt

SEQ ID NO: 330062 - DNA, 736 bp, Homo Sapiens
tttttcaatgagaaagaaaaattttatttttccatgttggagccattaactccatagttactggagtaactattcaaagactccctttgtggggttctgaagagtggtctaggtcccctcagcagcccggccctgggcccagcaccgccccccccaccgcccgctccccgccgctgtggccggcacccactgtgctggttgatgagcatgcggatggagatgcggctgaggtagaagcggtccaggaagtactggatgttctggttggagacggggtcatcgccgtaggtgtccttgtactcaagcacgccttgtgccatggtgggcaacacgtcgttgtgccggttccggatggtgaccagggcgtcagtgaactggctcagggtgcgatggtcctcgggatccttgtcccaggaactccatgatgtccaggaggctctggacataccagctctgcaccagctgcacggagggtgtgctcagcactcggtcgggaagcaggttgatctctttcatgatgttggccaggcgcacaggcagctcctgcctgaggaaggtgaaggaggttttctcacaggcattgctggatccgaagtccagaaactgcttcatggacagcggggacggggagaacttgctgaagtgctctatgtacttgggcgcccctgccagggacgcattcttcagcagcgcccacacccagccatggctgcggcggccgcgacttgggttgtgg

SEQ ID NO: 330063 - DNA, 636 bp, Homo Sapiens
  misc_feature (615)..(615): n is a, c, g, or t
cttttcatagttaggaaattgaattaaaaataaatagaaaaggaatttttaaatgaatgtctttgttctcagtattggaattaataaaacttttcaaagccaataatttttatttatttgtattaattattcctgggcttgaattaaattcccttgaaaaaatgttttgcaggttaatgaatcccaaaactattttaaaagctttgcgatttttggggtcggcttcacatgttgcggataatgacataacaccttatcttgtcagtagattttatcgtgctcctgaaatcattataggtaaaagctatgactatggtatagatatgtggtctgtaggttgcaccttatacgaactctatactggaaaaattttattccctggcaaaaccaataaccatatgctgaagcttgcaatggatctcaaaggaaagatgccaaataagatgattccgaaaaggtgtgttcaaagatcagcattttgatcaaaatctcaacttcatgtacatagaagttgataaagtaacagagaggggagaaagttactggttatgagcacccatttaatcccaacttaagggacctggttgggctgacttggattggggtgcccagagncttccctggaagacccacgtt

SEQ ID NO: 330064 - DNA, 407 bp, Homo Sapiens
  misc_feature (53)..(53): n is a, c, g, or t
ccccgggccagtgcccctgactgtgtggtgaagcggccccgggagcccaaagnccctttccatcctgtaaaggaccggttccatcaacttcctttggtaggcaatacccataaattccttccttatttccccagatcatcccattgcattcgatatcagtgagaaggctaaaggaaacgaaagatggttttatgtttttgacggaccagtcctacattgatgttttacctgagttcagagattcttaccccattaagtatgtccatgcctttgaaagcaacaattttatttacttcttgacggtccaaagggaaactctagatgctcagacttttcacacaagaataatcaggttctgttccataaactctggattgcattcctacatggaaatgcctctggagtgt

SEQ ID NO: 330065 - DNA, 991 bp, Homo Sapiens
cggggaggcgcggagcgcgcgtgtggtccttgcgccgctgacttctccactggttcctgggcaccgaaagataaacctctcataatgaaggcccccgctgtgcttgcacttggcatcctcgtgctcctgtttaccttggtgcagaggagcaatggggagtgtaaagaggcactagcaaagtccgagatgaatgtgaatatgaagtatcagcttcccaacttcaccgcggaaacacccatccagaatgtcattctacatgagcatcacattttccttggtgccactaactacatttatgttttaaatgaggaagaccttcagaaggttgctgagtacaagactgggcctgtgcttggaacacccagattgtttcccatgtcaggactgcagcagcaaagccaatttatcaggaggtgtttggaaagataacatcaacatggctctagttgtcgacacctactatgatgatcaactcattagctgtggcagcgtcaacagagggacctgccagcgacatgtctttccccacaatcatactgctgacatacagtcggaggttcactgcatattctccccacagatagaagagcccagccagtgtcctgactgtgtggtgagcgccctgggagccaaagtcctttcatctgtaaaggaccggttcatcaacttctttgtaggcaataccataaattcttcttatttcccagatcatccattgcattcgatatcagtgagaaggctaaaggaaacgaaagatggttttatgtttttgacggaccagtcctacattgatgttttacctgagttcagagattcttaccccattaagtatgtccatgcctttgaaagcaacaattttatttacttcttgacggtccaaagggaaactctagatgctcagacttttcacacaagaataatcaggttctgttccataaactctggattgcattcctacatggaaatgcctctggagtgtattctcacaaaa

SEQ ID NO: 330066 - DNA, 448 bp, Homo Sapiens
  misc_feature (19)..(19): n is a, c, g, or t
  misc_feature (35)..(35): n is a, c, g, or t
  misc_feature (41)..(41): n is a, c, g, or t
  misc_feature (122)..(122): n is a, c, g, or t
aaaagccagaaatgaaaangggggttggggaatgntacagncaaagtttactgcgttcccccaaaggataattgccccattcagcaatgccggctcttatgctgtagttctcagaaagcccnagaccctccaaagaattccagctcatccctggaatttaaggccccactgcagaatgttacaacagctggaacacccaaagatcacccatctttcagacctcatatgaagccacagcatgataaacaaattcaataaaattacgaattggcaaactgtttgcaacaaatgttatttcctggataacaagatggataacgtacattctgcaacatatgcgaggaattattgaaaacagatgtaaatgttctcaaactcaagtctttctttggcacaaatctgaatatgttgatttttgcactcttctttacagcagtgcctcaaagtc

SEQ ID NO: 330067 - DNA, 430 bp, Homo Sapiens
agtgaagctctgccttccaagtcagaatacatctgacaaagtgcccaagccactgaaatattactacacctacttattctggcctctgggtgaatacttattaatttattcctaagagccttaaattaatcaaaatggcttgaaagcactaagtacttccaaagcgcttgaaatgataaatgcaactcaatagatagccttcgtcctggtatcttacaaaaagtaaataggatttagcaaggttttctccctttagttaattagttgggagtttattctggcttaccagaggcatagttgagagcacaagctgtcactgacttaggaactttacaaaatgctgcaaaacagcaatgattgtgaaccaactttctgcctgctgtctatttattccttacactgaagattgcttggtttatccttttactga

SEQ ID NO: 330068 - DNA, 304 bp, Homo Sapiens
  misc_feature (114)..(114): n is a, c, g, or t
  misc_feature (140)..(140): n is a, c, g, or t
  misc_feature (249)..(249): n is a, c, g, or t
  misc_feature (261)..(261): n is a, c, g, or t
ctagaatttaaaacatcttaggcatttaagaaatactttaataaataaatatgatgccacaaccatttagaatggttaatcaaaaaagacacagcctttgcctttacataattnataatatattgagggtatatataacncacactacaagaagggactggggatctacaattgtaaagttttgggggatgtgaggaggactctcacttacataaagtgggttaggaaaagggctttcctggaaatggntccatctaatcnggtgtggggcaaatatgtgtggaagggccctaagggcaaaggg

SEQ ID NO: 330069 - DNA, 891 bp, Homo Sapiens
  misc_feature (279)..(279): n is a, c, g, or t
ttttaacagtccagttgcctcgttttatagaaaaacaggcccagggaactactagggcttatccaaatgtacagtttgaggcagagttaggaatggaacccagggcctcctggcgctgtccagagtggagtttcttaggacccctgcaagccagccaagtccaaatctctgggccggggcctggagtccgccctcctcgttacctcctctcctctcggggtgactgaagctcgtggtgcagagctcccagctcctgtcaatgggggcccctgggcttgnaacatatagagacccccatttaggtgaacttggcctgcccccccaagtgccacccttgccccagcctgaggtttcctgcagtgtgacccgcccaccttagccaccaggactttctttctccctttattgcctttctcattctgcccctcacaacaggctcctcagctagggtagctgcagggagggtggctccctcctgctcctcagaaggtgtaggcccctacaaagacggtgagcctcagtacagagctggcccggtagctcatgagggaattcatggtgaccatctccaggtccagcacgtactcccgggggcccgtcaccggccgggcgaggaccagcatggcgctgacgttgttgatttgcctaatgtaaaagtccccctgcgagtttccagcacggatctgaaaggcattgtaggcaccggggtagacggaggtcgcctggatctggaacacgtcagcgggcacgtccgctccgaggtgatggtcatgtagcggtgcacaatggatgaaggctgctctcgacatagagggttggaggccgggcagagacagcggttctcagagacctggatgtagggctccacgcagcggttggtgtcacgcagcg

SEQ ID NO: 330070 - DNA, 513 bp, Homo Sapiens
  misc_feature (20)..(20): n is a, c, g, or t
  misc_feature (73)..(73): n is a, c, g, or t
  misc_feature (111)..(111): n is a, c, g, or t
  misc_feature (116)..(116): n is a, c, g, or t
  misc_feature (139)..(139): n is a, c, g, or t
  misc_feature (197)..(197): n is a, c, g, or t
  misc_feature (203)..(259): n is a, c, g, or t
  misc_feature (276)..(276): n is a, c, g, or t
  misc_feature (322)..(322): n is a, c, g, or t
atttttaaatctcaaaactngtagaatattggcccacccgtggtggctcacacctgtaatccccaggactttngcaaggctaaggtgggagggtaacttgagcccaggagntcaanacccagcctgggcaacatggtgnagacccccaactacaaaaaagctcaaaaaattagcccagactgtggtgacacatgccnagtggnnnnnnnnnnnnnnnnnnnnnnnnnnnnnnnnnnnnnnnnnnnnnnnnnnnnnnnnntgcagtgagctgtgatntggccctgcactacagaatgggtgatgaagtaagacactatctcanaaaaataaaaaggacatgttgatggaacacaattcaaacatgacaggtaaagaaaaacagaaagaaaattccctcctcaaagccttctcagctcctaagtccacctccgtgctggtgatagaagttatctaccactatttataattaatgtttatcacctcaaccccaaatcattttatgaaaatacacac

SEQ ID NO: 330071 - DNA, 208 bp, Homo Sapiens
atagagttgtttgagctccttatatattctggtaattaatcccttgtcagatgggtggtttgcaaatattttctcccattctgtggttgtttcctcactttgtttattgtttcctttgctgtgcagctttttaacttgatgtgatcctatttgtccatttttgctttgcacgcttgtgcttgcagggtattatcaataaatctttgag

SEQ ID NO: 330072 - DNA, 387 bp, Homo Sapiens
  misc_feature (21)..(21): n is a, c, g, or t
  misc_feature (44)..(44): n is a, c, g, or t
  misc_feature (151)..(151): n is a, c, g, or t
  misc_feature (208)..(208): n is a, c, g, or t
  misc_feature (312)..(312): n is a, c, g, or t
  misc_feature (362)..(362): n is a, c, g, or t
  misc_feature (367)..(367): n is a, c, g, or t
tttttgggctcttccaaaggntttattgggcctatttacatctnttgcaaattgtgagaaggcagcaggggccaacccctgggacctcatctctgtctagaatgtgaggtcgcagggatgcttaagtcttcctctggcagagacccgaggngcagagatgattcttctcaccccttctctcagggtcgtggagccccagcaggggttncagggcccagaggctgccccctcagctgaaggcacaaacactgtgggtaggggtgggcagacaacgcatgggactcactcctgggcgggcgccactggccaagntgcacctttttcccctgctcctagcctcctttttccttcccgtcccgggncccanattggcccaggggttgggat

SEQ ID NO: 330073 - DNA, 471 bp, Homo Sapiens
  misc_feature (133)..(148): n is a, c, g, or t
ctgtgtctttgttggattggttgaatactttgtctttgtgctctgaatttctttcttctacttgttcaattctattgctgagactttccagagtatttcacatttctaacagtgtgtctaaagttttctgaannnnnnnnnnnnnnnnctttaagttatctatttccttgaatatttctcccttcatttcttgtaccatattctggatttccttgcattaggctttgcctttctctggtccctctctgattagtttagtaactaacctcctgaattctttttcaggtaaatcagggatttcttcttcatttggagccattgctggtttaaactagtatgatttttttggaggcattgaagagccttgttttgtcatattaccaggggttgggttttctgggttgcttctcatttggggtaggcctctgtcagaggggaaggttctagggggctgaaggcttgttgttcaga

SEQ ID NO: 330074 - DNA, 376 bp, Homo Sapiens
taaaattccattatcttatgaataagcacttgaatcagtttttaaaatatttagtctaagatgattcaaagtagttttattttaatacaggacttttaaatggcagtatttcatttcttgtcaattatgttggtactttccacaaatctataaagaaggataaattgtaccatcattttattataatcctcaagagaaaatgtgtaattcaaaagattaatgtgtattaaaacacattatgtatcttagttacatttctatcagtacttttattaatatttgtgaaagaagacagcttaatagtagttagcttaagtagtttctccaagtacttttgtgctatcaatgagttcttctcaaaaaataattagttagg

SEQ ID NO: 330075 - DNA, 493 bp, Homo Sapiens
  misc_feature (390)..(390): n is a, c, g, or t
  misc_feature (398)..(398): n is a, c, g, or t
  misc_feature (403)..(403): n is a, c, g, or t
  misc_feature (421)..(421): n is a, c, g, or t
  misc_feature (426)..(426): n is a, c, g, or t
aatttcttaataactcctacaacattcccccctgtggagatgccacactaactgctgttagggagttttgggcgacgactccttctggctacttcttgttgcaaaagggcgtcgaatggggaagagcagctagggctcctcctggggtcaatctaagggtcctcagaagaatgatgtgtctatgtgtggttctgtttacagcaccatttggagtttgattgcttctagatgagaagaaacaatttgagttatagtattgtgtatacagggtccaaatatcaatacaagacacataagcaagagagggcttaataaaggggttaaccaattccatgaaggaagactgggatttatttaaaggaggccttgtaggccactcggggatccatnattttggntttgnttttaagtacttgttggntttcntttaaccagggggctttattccgaaggcggctgtttcctttgaaaactgcttcacttaaccccatta

SEQ ID NO: 330076 - DNA, 372 bp, Homo Sapiens
  misc_feature (360)..(360): n is a, c, g, or t
ttttatttttaaaatatattacaacatcacattaaaaacagtagaggaaaacaagcaaacatgatagaattacttttttccaactcaatagtacttagctttacctagaattttcatacagttgatgctaacttcttctgaaccctttctgactagtattttaccttatgtattctttatagtatttccatataatctttaccgagacctattcagagcataacatagacagggcagcacaagcaactgacacctttgttgggtaggtacagtgttttttcaaccagtttatgagagaatgaaaaggaatgaaagtggaaaattttacttaacttaggggttaaggtaggctctaggggnattctcttccgg

SEQ ID NO: 330077 - DNA, 498 bp, Homo Sapiens
  misc_feature (465)..(465): n is a, c, g, or t
  misc_feature (487)..(487): n is a, c, g, or t
taaaatatcaaaagaagtttattaaaatacatattttgttatacataaaacttagaaatatttcaagatttacatacatcaacttttgcaatcttcctgctggtaaaaatacaaaacagcagcataagaaccagttactcatatactcaactatattcatgcatacttaacaaaatgaaaagttctcctaaaaactggcaagatacaaaatgtcaaatctaaaatgatatatatacttacgtttttagcattcttacagattacaaacccttaccaacattaatcttgggcctactttaaagttgagtgatagcatgaactctgaaaagagaatgcatgggttttctcacagctatatggccttggacaagtcacttgtcagttccctcatctacaaaaagggggttaaaaatattcacatcacagaaatgagattaagtagtttaacacattatggctaacatntcattgcttacgtgtttttggnacctacagggg

SEQ ID NO: 330078 - DNA, 401 bp, Homo Sapiens
  misc_feature (295)..(295): n is a, c, g, or t
  misc_feature (331)..(331): n is a, c, g, or t
  misc_feature (391)..(391): n is a, c, g, or t
tgagactgcatagggctcggcgtgggcatcctataaaagcagccatgtgttgaaacaaatgatatgcacagaaagcatacttctgtggctttgttacacgggttttctttcaagaggaagatgactcagccctcccagcttctgcagtctagcttaggagaggtgtttgaaaaggagactcagttccctcttgtttatagggtggttagtggagggctgtcaggtgatgagggggaggttgtgtttcgtgggagatgacagaagactaccaataatctatttgtatactgcttantgaggagtcatctcaccctcacaacataaggctccngaaactgggagagcacagattaaatcccccaaggatttgggaaagcaacattttcccgcnctcttccagt

SEQ ID NO: 330079 - DNA, 326 bp, Homo Sapiens
agaaattttataaacttcttgaaggcaaagttcatattagatactgtatttctcctcttaaccttagggctgtattaggttccaaaaatgcttaatgatgcatcaccacagtaactgcggctatgctatacttccaccaaccaatggataaacccctccaagcattctataaaaagagttttactatctaaaaatgggaataataatactaacatggaatagatgtattcaaaatgtgcaatatgaattcctcacactatacaaggatcttaagagtttggcataccagccaggcacagtggctcacgcctggtaatcccaggcac

SEQ ID NO: 330080 - DNA, 509 bp, Homo Sapiens
  misc_feature (405)..(405): n is a, c, g, or t
  misc_feature (413)..(413): n is a, c, g, or t
  misc_feature (480)..(480): n is a, c, g, or t
gcatccactaggggttttggaatggatcccctgtgagtaaaggggaactacgaggtaaccttttcctgaaagctgtgaaatcagtctgccaagataaataattataactgataataggcttatcagtgtgaccacagtaaataattccattattatatacatcataccacagcgtagttgctcacttacctgtctcttaagggaacctgcatctaattatcttttaatttttagggctgacatatacttgacctataattgttgaattagccaactcacaccaaactgttttctctttccccgagttcatctgggactgtgacataccacagaaatgtgttctgagttttttcttacccattcttaggcctcacacagggatgaaagtaatttggaaataatttntccgggancattattgttactttattcacattttatggaaaattacttcaggttcctcaaacagtaatattattngatccgtacacattatccaaacccttctt

SEQ ID NO: 330081 - DNA, 224 bp, Homo Sapiens
  misc_feature (34)..(34): n is a, c, g, or t
  misc_feature (64)..(64): n is a, c, g, or t
  misc_feature (92)..(92): n is a, c, g, or t
  misc_feature (104)..(104): n is a, c, g, or t
cctgtacacattatccaaacccatccttagaaantacaaaattgccaacattccaatagaacanctttttagtaaacattggaatattggtnccctacttttanttccactggtgggaaaaggccttatgtgttccctatgtagtttatgtccaaaccgactgtaagtggttcttctgtcagcactttaaagaatgatggagggcctggcatggcggctcacac

SEQ ID NO: 330082 - DNA, 532 bp, Homo Sapiens
  misc_feature (41)..(41): n is a, c, g, or t
  misc_feature (48)..(48): n is a, c, g, or t
  misc_feature (127)..(250): n is a, c, g, or t
  misc_feature (369)..(369): n is a, c, g, or t
  misc_feature (424)..(424): n is a, c, g, or t
  misc_feature (430)..(430): n is a, c, g, or t
  misc_feature (444)..(444): n is a, c, g, or t
  misc_feature (497)..(497): n is a, c, g, or t
  misc_feature (507)..(507): n is a, c, g, or t
tgttgcccaggtagtggcacaatcattgctcactgcaaccnccacctnccgggtccaagcgattctcattcaagtgcctaagcctcccaagtagctgggaccacaggatcccacccccatgctcagnnnnnnnnnnnnnnnnnnnnnnnnnnnnnnnnnnnnnnnnnnnnnnnnnnnnnnnnnnnnnnnnnnnnnnnnnnnnnnnnnnnnnnnnnnnnnnnnnnnnnnnnnnnnnnnnnnnnnnnnnnnncacttcccaaacagaacaacatttttttgatgtgggattttaaaatgcctccccttctttcaacattaaggtcccttctacatgcccggggactgtatgtgtgaaataggtcccaactntcaatgagtgtagggcaggtaacacaaacaaaggtttaaggggggtcagtttttntgaggnccatactgttgggncagtatatggaacccgggggtacaaacccacctttttttgaccccaatttgangttgggggtnggtttaattttattctgggggtttc

SEQ ID NO: 330083 - DNA, 418 bp, Homo Sapiens
  misc_feature (275)..(275): n is a, c, g, or t
ttaaaaagatgtcctcactgcacaagtgactacgggctacaggcaaggatgggagacggaggcttcaacacaactcattgcacttagaaccgttactaaccgaaacaccatttgcttgtcaacaatgtacccttgacagcagggagaaacttctttatagtctctgcttcagacaagatttacagctttctccaaggccagaggaattttgtggaccacaagtcttgtttcttgtccaccaggccccaatcctctgggcaccttgtaccccccgnttcctcaggcaatatgctcgggcctaggggttccagagggcagcttgggaaggggaggcaggcttttggggcttcatttcagttcttgttttgccccaaattccaggaggccctggggggaaggtccccgtctggaggttttg

SEQ ID NO: 330084 - DNA, 533 bp, Homo Sapiens
  misc_feature (444)..(444): n is a, c, g, or t
  misc_feature (511)..(511): n is a, c, g, or t
  misc_feature (515)..(515): n is a, c, g, or t
taaatttaaaaagatgtcctcactgcacaagtgactacgggctacaggcaaggatgggagacggaggcttcaacacaactcattgcacttagaaccgttactaaccgaaacaccatttgcttgtcaacaatgtacccttgacagcagggagaaacttctttatagtctctgcttcagacaagatttacagctttctccaaggccagagccaattgtgaccacaagtcttgtttcttgtccaccagacccaatcctctggcaccttgtaccccccgttcctcagcaatatgctcggcctaggttccagaggcagctggaaggaagcagctatgggctcattcagttctgtttgcccaaatccagaagccctaggaaagtcccgtctgagtcttgactcctgacccttgcagtggctggagtcggtactggtgcacacccccaacntctcacggtgtgggtagtgctgtgaattggaaaccgcagataccctggaggcctggtagacagctgnactnccagcactgggcagactg

SEQ ID NO: 330085 - DNA, 767 bp, Homo Sapiens
accaaaaggaatactcccattgaagctctctgtgagaactttccagaggagatggcaacctaccttcgatatgtcaggcgactggacttctttgaaaaacctgattatgagtatttacggaccctcttcacagacctctttgaaaagaaaggctacacctttgactatgcctatgattgggttgggagacctattcctactccagtagggtcagttcacgtagattctggtgcatctgcaataactcgagaaagccacacacatagggatcggccatcacaacagcagcctcttcgaaatcaggtggttagctcaaccaatggagagctgaatgttgatgatcccacgggagcccactccaatgcaccaatcacagctcatgccgaggtggaggtagtggaggaagctaagtgctgctgtttctttaagaggaaaaggaagaagactgctcagcgccacaagtgaccagtgcctcccaggagtcctcaggccctggggactctgactcaattgtacctgcagctcctgccatttctcattggaagggactcctctttgggggagggtggatatccaaactaaaaagaagaaaacagatgcccccagaaggggccagtgcgggcagccagggcctagtgggtcattggccatctccgcctgcctaaggctctgagcaggtcccagagctgctgttcctccactgcttgcccatagggctgcctggttgactctccttcccattgtttacagtgaaggtgtcattcaca

SEQ ID NO: 330086 - DNA, 489 bp, Homo Sapiens
  misc_feature (45)..(45): n is a, c, g, or t
  misc_feature (154)..(154): n is a, c, g, or t
  misc_feature (200)..(200): n is a, c, g, or t
  misc_feature (254)..(254): n is a, c, g, or t
  misc_feature (344)..(344): n is a, c, g, or t
gggtaatcagcaatgcaaaggaatgaacccattggtctcttaccntacctatgacctggaagcccccctgtctggccttctcacctttctggactgaaccaatgtacatcttacacggtattgattgatgtctcatgtctccctaaagtgtatnaaaacccaagctgtgccccgaccaccttgggcccatgttgtcaggnacttcctggggaggcgtcacgggcgcacatcctcaagattggcaaaataaactnttctaaaaaatctgagagctgtctcagattttcagggttcacacatgtaatgtaggatgtcaatgtttataaaacagacattattctatngttctatgggtagacttatgctgcgaattaaccttacactttctcaacaaaataaaaaatgttgatgaggtacaaataatatatctaagcttaaatagtgttacaagttttaatatgcctatttttcaatttttcaatactattt

SEQ ID NO: 330087 - DNA, 449 bp, Homo Sapiens
  misc_feature (49)..(49): n is a, c, g, or t
  misc_feature (67)..(67): n is a, c, g, or t
tagcatgcccatgtctctccctagaggacaaggactgtcactatgttgncacagggaaaggcctgcnaggtcttaaaggtgactggacttcccaaccgatgcccactggacattgatgacatgtcaaaaaatgaacccaggccagtgcaaattcatccccctccatccacccccaacaaataaatgaagacaaaaacttcaaagaagatacactacttaataggaaaacaaaagagtttcatacaagagcacagcattatttattcacaaatctattgccagtagtacccaatgccctactactcttattagatctatatgcatagataaaaacagtaagtcttagtattttaggaagtatagtttttcagaaaaaaagatgtcagggttttattttcccagaaagacagatcacctgaacaagattgaagaagtcattctgtgccgaa

SEQ ID NO: 330088 - DNA, 469 bp, Homo Sapiens
  misc_feature (31)..(31): n is a, c, g, or t
  misc_feature (148)..(148): n is a, c, g, or t
ttcggcacagcaacctgcaggatctgcagtngacggcagcctcggcctgggcaggccaaggcagctggtctaggacacaccttccctgagactcatgacatgagcctggggagacctcatttggtttccattcagaagaccagcgtanccttttgagacttttgggtacatttatcaaaaatgttttccttttgttttaccaggaatgagttcgggctatactctttgaaactgcctttgtgagcaaagtgctttggcaaggcaagggtctccctcagcagggctaggtgcactacagcctctttccccgtgtcccgttggatctgagctgtgtagcacttgttgcattacaaagaaaaagacttctgcaggaaatagggtagagaacaggctgttttagttcagatggcagcttgattctgtgggcaaaaccaagtgtgggtcttttcagcttcagtgttgtttagca

SEQ ID NO: 330089 - DNA, 527 bp, Homo Sapiens
cagcaaaagaacatgaaatgctgctccaagcaggaccctggatagggaccttcattgctgatgggatgacacaaattaactgtacgagaagtctgggagacgctggaaccgatggtggcttcgcatgttcctgtcaacccactgagtcagactgtatctttgcagatgtttctgtcggcgggcgtagtttcgcgtggtgaggtccgaaggatgctgccattttgagtgctgcatatgatgaacttgatccatcaaggcacaaagctcccccgagatacctgtgatacagagggatcagtggttaggaacagctgagtgaactatgtcagccaacgtcaaagtatgtgttttcagggaaagagaaaacaggcactgttctcaacaatatatacttacgattatcacaagcagtgagcacagaaactataaaccagaatggggagattactcttggagggtgaaggtgaagcaataatagcagccaccattcattcattcaacacttagctcctacaatatacagggaa

SEQ ID NO: 330090 - DNA, 713 bp, Homo Sapiens
attccacccccataaaaaaggtgaaaaaagtcctctgtccagatgtgccgtgttagtggtcctgtataaataaaagactgaaaggaaagccaacccaaacccaattaagagactttcctcctaaaggcagagtaatgcctaagggcagtggcagtgacaaaagtggaggaaaaagtctgtgatcatttgggagacagaataggaagtgcttggtcatgagatgtgaaagaagaggggaagtagaaggaaaacagagctgcctccaggctctgctggggaagactgggtgtgtagcagtgccttcctcctggccgagaatgtaggaagagaaataggtaaggaggaaaagatagttttttactctcagtgtcacattaaaatggaactctctggtcaaaaagttgaatataaatctctgtaggctaagtccatttgtgacatcccaacatatgttttcaaaaataacatacacactaaatcaagccattaagcgtaactggggaaatttcctaaaatttacatgctaaaaaatcaccatttttcatttattactttcatggagcaactttgaatctatggttacagcaggtgaggcaccttgtataaaataaagctaatacatgaaataaaaccatttaaaattctattgttctcagagaatggagaaagcaattgaagccatgggtgtggaggtgactgccttgagaagttgt

SEQ ID NO: 330091 - DNA, 347 bp, Homo Sapiens
  misc_feature (111)..(111): n is a, c, g, or t
  misc_feature (335)..(335): n is a, c, g, or t
ctcttccctacaccccagaggcatacagcccagaagccacaaggccaacctcagaaggagcccctaggtccccagcgccacccacagcagggaccagcttcccccacaccnagcctgggccgggcacctcccacaggctgtgcagctggccagagggagaaggggctacaagaagcccaggtctcaacagaggctttggcaaggagctgggagggagacactgttaccaggtctcatgcaacatcagggtagagaaaccagggtctggctaacccagccagaagtcgaaggccaggagttgtggctgggggaggtaatggggtagagccaccccnaagagcacttat

SEQ ID NO: 330092 - DNA, 560 bp, Homo Sapiens
tcatgtgggccaatactagggagtgtaagactcatccatgtccctcatagatttttaaaaccccagatatatacacaatattgaccattgggcctatgtttgcaaaaggcagtcataaaaggaccagggttcctatgttaaaggacagattggacagtattaatgtttcaaggatgaagaataaggacatttattggagaaaaatatcagactttggaaacaaatgaagtgaagtttcagaggcaggattctatccaattaaaacaaaaagatcataattgcctcatgtcattggagtgggttctgttgcattgcaccagactgtgtatcactgctgacattcaagaggagaactggagcacaccaacctgggtattctcttaagtacattactagaccgggagtgaggtgaagcctgatgacaacttggggttcccttatttattgcttgtgatcatttaatttatggaattctaagattctaaggggaaggtcttaattgacaattgtctccttcctactgggacatttctgtacattaaaggtacgggggacttttt

SEQ ID NO: 330093 - DNA, 379 bp, Homo Sapiens
  misc_feature (24)..(24): n is a, c, g, or t
ggaccctgccctcccctccccctntgaagatggagggaaagctggggatttcccccaagggggcgaacgccctagatttagatatatcccatcatgcccggaagtgtcagcaccccccctagattattggcagcctgcatgaccctaccagctcatgattaaactcttgccctggtcctacagaagagatctctgctgggttggcattcctccgcttaaattatcaaagtagatacagtccagttatgtattttggcatattatacttttgcagttaagtaattgggtgtagcatttagattaatcacttaatcatttttaggactccagtcctatcaaggggcaaaaagggcacatagatcacactgaaattcctctt

SEQ ID NO: 330094 - DNA, 862 bp, Homo Sapiens
  misc_feature (842)..(842): n is a, c, g, or t
  misc_feature (844)..(844): n is a, c, g, or t
ttttcggataaattttcttttatttccatactcttttgtgacatgtgtggcacaagtattcaatctcacagggatgttaaaacccacactcgaagggtgtccagtgtgcttaggaaatgtgggtttgcgcaatcacaggccaagcctgggggtcctcggggaagctactcctccaggtcacctgccaggtgggatgcacttccttgggcaatgggtgaccctcccaggacaaggggaaccagcagggactcgatggcaccacacagcagccacctgttctgacaatgtgacacagaccaactaatgccagagcccagggagaagccacagcagagctgcctggggttgggtttcagagcaacaggcagaagtgactgtggcccccgtgggctgtcatccaccggtggctactgtgtcattctggaaaaactatgatgccatgagactctgagaaaccgaatcactgcagagacaaactcataaaaattaaaaccaatccataaaattgtatctagaaactctgtccctggtgccaataagcagcaaagtcaacaaagagtaaaaactaaaacttcaacacattattaaaaagcaaaactggactcaactacaatcacttctggttagtccactagtgaacccaaaagtgacttaaaagtaaaaatcattattagcaagagattaagaacataacttcattgagaggtcaatgttaagagaacagttcattaaaagtttctgtttaaaaagaaaaggaaaggcccaaatagccatttcaaggcagagcaggtgaaaggcctggaacactcctgtgcactcactgtcggctgctgaacagggancnaaggccagcaggatggag

SEQ ID NO: 330095 - DNA, 342 bp, Homo Sapiens
gaaaatccctaaaaattacaaaccaataaagcacctgaaagatcaccgattgcctggacatgaaaatattttaatgggggcagtgatacttacagggggatgtttggggtctagattgtaatgcttcgctcaaaagtcaccaaatttaagtgtgtatcgtttatgtcagttgtgcctcaaagccattttaaaatgactgtcacatatggggtatgtcgctttaaattagcctagggccttctaaagctccagaattcctgggctttgcttttagacatttctagctcttaatgaggagaggtaagctaacagctaggacatgtttcacaatagcctgaagac

SEQ ID NO: 330096 - DNA, 657 bp, Homo Sapiens
  misc_feature (584)..(584): n is a, c, g, or t
ccataaaaatggatttattgccaaactttaagaaaggcgcttcataagcagaagacacagaatgccaccctcctcaaggaggcaagcacggaatgccaccttcctcaagcacgcaagctaggcaggccctgcacgttctcactcctctcccagaagccagcttcctgcctagggcccagcctgctaaaggatggaaattaatagcatttggtcacttgaggtggccccagagctacttgcctacccaccaggccccagggagagtggctgggcctcaacctgtgacctacatgcagggtctctgcacccacagactctgccctcagtccagctgctgcagttagctacttgacacaggagggaactgaggctccaattcctggcagtaaggtggctttggtaaagccccagccagccatgggtgcttggtgggggaaggctgttcctaaggcaagatggcaggggatcacatgactgggcaactgatgtccttcttgctcttgtcctggggcagatggagggaaagccagactgtggcatgggggcccagtttgcacaaggaggctgatgggggctcccgaacnagtgcactgctgctcacctctgctccggccccacgcagcccagagaagacatctgcccctcctgatccttgac

SEQ ID NO: 330097 - DNA, 462 bp, Homo Sapiens
  misc_feature (63)..(63): n is a, c, g, or t
  misc_feature (114)..(114): n is a, c, g, or t
ggaaaagccaaactgtggccatgggggcccctatttgccacaaggaaggctgaatgggggctncccggaaccattgcactgctgctcacctctgctccggcccccacgcagccncagagaagacatctgcccctcctgatccttgactactacctcaagaacaaagtgacagtacaataacgataacgaaggcattgacctgtgcagcaggcctcagtggggttggggaacagggcagaaaggccagggcatgttgctgtgacccccccctttctctctttcagtaaacaaaagtgcacatgcagaaatctgggcaggtctatcggaagctgctctcaccccagaggccccagggagagtggctggacctcgggagccagggcctctgcacctaacagctctgccctcagtccagctgctgcagcagtgatggagactggatgtgcccctctgtgccgaaat

SEQ ID NO: 330098 - DNA, 185 bp, Homo Sapiens
atgtgccaccgcgcctggccagatgtggactctttaaagacatgctctgagtcagaggttcccagccagtgttaggatctctgagagcttacttccttcaatggccccccaggccatggcgtatataatagttacagggagaacaggggctgggcatttcagcaacagggttcaggtacgagcta

SEQ ID NO: 330099 - DNA, 415 bp, Homo Sapiens
  misc_feature (50)..(50): n is a, c, g, or t
aggccacctctcctaaaggggatggtaaggaccactgttgggtaagaccnccttggatcaaccacatgatttcaagttcaagaaaaagttgtattattaagttactaatgcagcaaattatcccagaatttgcttcactatcttcttttatacttaacaaaagacttaaaatataatcaggactgtagtctgcatgctactttggattcaaatctttggcaatttttgcctttgaaatttagaactagtctatggtaacctatatgaggctataatgaggtaagtcatggcaatgtaattgaaatgcggggtatcataattgaatacttgttttacctttcttaataatggcatcaatctcatagagctggtgtgaggattagatgaattaatacatgcaagcccttaccatgcc

SEQ ID NO: 330100 - DNA, 590 bp, Homo Sapiens
  misc_feature (393)..(393): n is a, c, g, or t
  misc_feature (436)..(436): n is a, c, g, or t
  misc_feature (454)..(454): n is a, c, g, or t
  misc_feature (506)..(506): n is a, c, g, or t
  misc_feature (514)..(514): n is a, c, g, or t
  misc_feature (533)..(533): n is a, c, g, or t
  misc_feature (542)..(542): n is a, c, g, or t
  misc_feature (580)..(580): n is a, c, g, or t
gaacacttccttgtttaattatttataccatgaattactagtaattgacactgttaactagtcctgtttttttaaataagagtatttatgacacaaaaaattaaacagtgcagactgatacataaatcaaatgttctttacatgttttccctgttgcggtagtaacacatatgtgtaaacttaattatcacgtttttcttgtgctgtggttgtgtcctgagttcattctctaaaatgctgttcactttagaccaggggaaaatattaaccatacagactctgttttaattcatagctaaatattttcaaaagagtgactttgtaaaaatatgttccaatgggcaaattggattcattgtgatgggatcacttattccaaagacttcctgggcnttaatttggtggccatggcctaccctttagcccggataccacnggatccaatattgggccncgggggaaaaatattccaagccaggaaaggatgtggacaggacctatgggcntggatggnttccagggtttaccccaangctttcctnaacagaagagtggtaaaggggattccaaggcaattccncaggggggcc

SEQ ID NO: 330101 - DNA, 452 bp, Homo Sapiens
  misc_feature (83)..(83): n is a, c, g, or t
  misc_feature (120)..(120): n is a, c, g, or t
  misc_feature (128)..(128): n is a, c, g, or t
ccttttaggaaacaacccaaaaaccacaaacaaaaacccactgccccttgtttgccctgaaagggaaactgcctagctcctanggtttggcccactccgcccactcaagaaacttaagtnaagccaanacttcggccataggggaggctgctgcagcggtcccatgtcccaggaggtaagcggggctgtcttcaaagtgggtcagcggcagggtgtcctcctcgctgaggtggcactcggactctgccttcaggaacggacgctggttatccgggaaagccatggagaagagggcatctgggtcacagacaaatttgtagacgtatcgctctccagccaccttctgcatgatgcccttttcatagtaatagcggagagagcggctcagcttgtcatagttcatggctggccggttcttctggatgccccagcgccgagcaacctcttccagt

SEQ ID NO: 330102 - DNA, 449 bp, Homo Sapiens
  misc_feature (19)..(19): n is a, c, g, or t
  misc_feature (51)..(51): n is a, c, g, or t
  misc_feature (56)..(56): n is a, c, g, or t
  misc_feature (67)..(67): n is a, c, g, or t
cccaccttatgccgtgggnaaagttttcgggcccacggtacggggagaggnacccnggtggggcccnaagcccagttagagtatttagggtagagtattggagagtgccttcagagtattggagtatttttgaaaattcaaaattatacagcaccccaacaaagtaaaattcacaatgttgggcatctactcaaagattacccagacaagcaaagaagcaaaataagatgaaaatcagtaaaaccaacccacactgacagatgccagaattagcagacaaaaacattaaaacagttataactgtttaagatgcttaacaagttgagatatggaaggtataaaaaaggcccaagtcaaacttctagagatgaaaaccacagtgtctgatggaattaacaaaggatgaaattagcagatgattaaatactgagtgagctttggatggaatt

SEQ ID NO: 330103 - DNA, 336 bp, Homo Sapiens
  misc_feature (288)..(288): n is a, c, g, or t
  misc_feature (315)..(315): n is a, c, g, or t
tcttaaaacaaccagtttctttaattagaaagcaacaaacatgcaaatggcaagtgtagaaatttatttgaaccaacattttcactatgatgaaaattattcttcaacattgatccaagctcccacatttgaaggttagggaaaatattgcactttgcattttctagcactcctcatacacggcaaaaagttttgaaagacattctgctagttttgttttatacaatctcccaaattcatgcacacaatcattccaaaccaatgttagggttatcccaaaaaaagggnaaaactccaaaaaccataaccttaaanttgcactaaaggctctggtaa

SEQ ID NO: 330104 - DNA, 465 bp, Homo Sapiens
  misc_feature (291)..(399): n is a, c, g, or t
  misc_feature (402)..(402): n is a, c, g, or t
  misc_feature (420)..(420): n is a, c, g, or t
  misc_feature (425)..(425): n is a, c, g, or t
  misc_feature (431)..(431): n is a, c, g, or t
  misc_feature (445)..(445): n is a, c, g, or t
  misc_feature (453)..(453): n is a, c, g, or t
ctttaatattacctggatttaagtttctgtgttgttgaatattccttaatggagtcgatgaatttgcagagacccctccaagattcttttgtttgattcctttcatgaccatcaccctagaccttcaagtttgctgactagatttgggggttgtgtggtttagaaaggataacaagcttgtcatgggctagaacctgtggtcttcataaatagcttagtaggatatatggctttttctatgaaaggtggagaacatgcattaaaaatgggcaaattctggcctggggcatnnnnnnnnnnnnnnnnnnnnnnnnnnnnnnnnnnnnnnnnnnnnnnnnnnnnnnnnnnnnnnnnnnnnnnnnnnnnnnnnnnnnnnnnnnnnnnnnnnnnnnnnnnnnntcntgctaaaactaccaaaantagcntgggcntggtagcacacccntagtcccngctacttgggga

SEQ ID NO: 330105 - DNA, 402 bp, Homo Sapiens
  misc_feature (365)..(365): n is a, c, g, or t
tatagaaacagtctcacaatgttgcctaggctcggtctcaaactcctggcctcaagcaatccttccgccttggctcccaaagtgctgggattacaggcgtgctactgtgcatggccaggaaaaccttcttctttttaaaatgctctctatataaacaaaaactgtggtggataagtgtggccatacacagaagtctctctagaaaggtaatcctatcaagcgtttttataaaaaaagcaaaagtgatttttaatcagcttcctttttttcaataaaaggctgttttaagggaggtattcagtatttctggtatattcaatggggaacaaacacaggggatctgtactactcatatacaatggacnttaggggaggggtttggcctaaattcttgtgtggggc

SEQ ID NO: 330106 - DNA, 466 bp, Homo Sapiens
  misc_feature (78)..(78): n is a, c, g, or t
  misc_feature (242)..(242): n is a, c, g, or t
  misc_feature (293)..(293): n is a, c, g, or t
  misc_feature (415)..(415): n is a, c, g, or t
ggctgtttctttatacaaaggcagacaacatggacacctcagcatgctgctgcagttcatgggggcccatcccaccgnttctggggagaggaatcggggtgggggcgcccgcagcaggggagagacactacacaggcctgggaccgccaagcacaccagctgcgagctcctgaagggcagacacatgggacacacggacactgaaaccacgagcacggcacagccacagggaggattgggtnggagctggggacagacatcggcagctactgccaactgctgcccttttttgnccacgagttccttgggcgaggagctttgtccgtgttacttaaagagccacgtgactttatctgatggcagaacgtctcgctttctgcatctgtaagctgggccagtacaccgtactccacanggctgccgtgagtacagatgagactgaaacaggggcattgatcaaagtacc

SEQ ID NO: 330107 - DNA, 379 bp, Homo Sapiens
  misc_feature (34)..(34): n is a, c, g, or t
  misc_feature (39)..(39): n is a, c, g, or t
  misc_feature (46)..(46): n is a, c, g, or t
aattcacaggatgtaaactgtgggaaaagaggcntttgnaaaaagntttaagttgtgggtgcaaatctttgcattatattaggcagaacccatttttgaaattgtatgtatgagaacaaatgtgagtacacacacgtgctgagctaccaaaaggatggaagtgtagatatttactatgctataatatttgcagcgtccctgtttccttagaaaaccattcctacccaacttttgctggaggcatcaatcgtagtacctcgcctgccctggccatagggttagaaacaatatgatcaagataagccactcaaattccttcctcaagggcttctgatttggagcagaagtaggggccttgcctttgggtcacagaccttgg

SEQ ID NO: 330108 - DNA, 472 bp, Homo Sapiens
ccttatcaatttttatttaacatttaatcctaacatgtagctatttggtttcaaaaccaaaggcagatggtagaaatggtgatttagaatggtggaagatagactgctataaatgtgttggactaacggtaagcactgatgatgaaaacaaaaggagacagaaaaactattagaactagactcaaaaattgtaaaccttaccatgagggcctctatatatcagtaagtcccctaagcctattgtataatcccagcaaaaacatagtattaaaaattatttacccaagtcaaaagactataaagcatcaaactgaggtaaaatgtgcttattaaggaaggttgtaaaactaattacagattggggtcagaaggaaagtctagttcattttacacaaatatggattgtacagagacattcttggacccaaagatattatttaaaatgaagctcaggccaggcacggtggatcat

SEQ ID NO: 330109 - DNA, 389 bp, Homo Sapiens
ttatcattgtagttatttatttagattgtttttaaatgagatagtgcctttaaatatgacttcatagcccattatcccattaccattaattcatccactcatttgttcattcatgaattcatttagttcaaataatatagaggtggagatggggagaaatcactggggtgggggtggatgtcaggaagtaagcaaatgtaagactgcagctctagtatagaagagatgatgaacataaacaagtcttaggagaggacaggaagaaaaccttccctgtaggcccgtaaaatgtgcttgaatgaagggaggttgggcgctaccagtggaacgtaacaccacagcaaatgtgcgcccacaggtagagggttacatgttcgcctttgtagtta

SEQ ID NO: 330110 - DNA, 302 bp, Homo Sapiens
  misc_feature (210)..(219): n is a, c, g, or t
  misc_feature (271)..(271): n is a, c, g, or t
  misc_feature (289)..(289): n is a, c, g, or t
cattgcgcccggcctcatgatgtataattaactgtgattataaccatgattacaggtcatgtattacatagtgacacactagtaatgtaaaagaaaaataactaaataataatgggcaatcataatgcttccaagatgaatggaccacacccatttttcagttgggggcttgggggagcagggtcaaaggggaaaaattatcaccctaannnnnnnnnnccatatccaagtcattgtgatctgggctcagagggagggaggggggaaaggnacactttaattctctctncaatcgggcaagg

SEQ ID NO: 330111 - DNA, 239 bp, Homo Sapiens
  misc_feature (173)..(173): n is a, c, g, or t
  misc_feature (190)..(190): n is a, c, g, or t
  misc_feature (215)..(215): n is a, c, g, or t
gaataggtgatacatatggtacaaaattcaaaaaaatacaaaaggagatacagtgaaaagtctcccaatcctgtacctatccaccctgtcaccctccccacaaaccaccattggttctaagaatttatcctgcagatgtaatcccataaattaatgtgaaatatgcacaagantattcattacagcattntttataggcaaaagacaggaaacantgggaaacgtctgtcagtgagggg

SEQ ID NO: 330112 - DNA, 459 bp, Homo Sapiens
  misc_feature (22)..(22): n is a, c, g, or t
  misc_feature (33)..(33): n is a, c, g, or t
  misc_feature (37)..(37): n is a, c, g, or t
  misc_feature (251)..(251): n is a, c, g, or t
  misc_feature (314)..(314): n is a, c, g, or t
  misc_feature (376)..(376): n is a, c, g, or t
gatgttttcaccagagattatntttccctcccnctanttgtgaatataccaattaaagtaagacaatccagtaagtaagagggtagctccaaacacagtatgtctccattctagcactctactggctgcttagaatacaccaaccctggaagacctttccaagcgtaaaatcccagtctgcccctatcaaaattgccacagtcacttttactacttgtgttcatagtagactcagcacttctttttcactngacctagtataactgagaaataaataactgtgtgcaaaatattggtatcattaaggacccagngctgcccattttctctttgttctaatagggaagcaattactgataggaaatgtgagattaanaatagggtcctccctgctgctccaaacaaatgcctaaacacagtatgtatctcagtcctctgttcccagagattccacccttg

SEQ ID NO: 330113 - DNA, 414 bp, Homo Sapiens
actggataaaatgttttatttttcaaataaattataatagattttctctctctcaattatttctgtaataattttatctttttattaaaactaaatatatattaaatacatttcaccttttctcaaattacagactatggtataactgtaattgtcattagcaaccaaagtctatttccagaaatttaaacttgatatagagaaaaattccacgtatcaagcgcttcgtacctgacttgggtgctgaggttgaactgttgtattaatgtgttcctggctctagagggccactcctaggcttttaaagcaaagtgggaacccttagggtcaggcttggctgccagagaaatttctggagggggatgacttgggttttgctttacacaggacagttctttcctgggctagggtgga

SEQ ID NO: 330114 - DNA, 518 bp, Homo Sapiens
  misc_feature (16)..(16): n is a, c, g, or t
tctgtaacttggagcnggaagtcatgggggcagagagggaaaggaggtggttacttaaggccccaatctaccaagtcttccccaccacttctcccttgttttccccctcttctactacttatttcaaacttctgggatacaatttcagctaaaacgtttatttctcactcaaaacttatttcccctcaaccctatacccaaagaagaaataaaatcacagatacataacagaagtatttgaggtaccctctcatatatgcaaacaaatgcagactaggcctcaggcagagactaaaggacatctcttggggtgtcctgaagtgatttggacccctgagggcagacacctaagtaggaatcccagtgggaagcaaagccataaggaagcccaggattccttgtgatcaggaagtgggccaggaaggtctgttccagctcacatctcatctgcatgcagcacggaccggatgcgcccactgggtcttggcttccctcccatcttctcaagcagtgtcctt

SEQ ID NO: 330115 - DNA, 566 bp, Homo Sapiens
tctactccaccacctgagacatttaagtgcccacaccaggctcagacacaggtggagacatggtcttggaatagcatggtgcccatttcctcccatgttgggtcctctgccccagtttctccctggggatagggtcatgagtgctgagcgctcccgcctcaccttgatgccgcatatctttctcctgtggttgtacttgccgcattgaggttgccatggaaatcacggtgagtaaattacttaccgagggatgtgccgtgctgcatgacaatgctggagttgagtgaggctgggagagaatatgccgagggggaaaacggcctctgatagtaactcatgggactcacggcacctcctgagtttccattcactgttatctggctctgagttggtgatcttttatcttgtaggtttggtcgaacgcttctaaaaccttttgctgagtctggtgactgagaatcacgccctgcagccaataggtttggagaactttgcactctcttcacagatgttagcgtaacagacatggcggcacgtttgcgagcacacccaccgctgtgttcatt

SEQ ID NO: 330116 - DNA, 611 bp, Homo Sapiens
cttctactcacactcagacatcaagtcccacaccagctcagacacagtggagacatgtcttggatagcatgtgcccatttcctcccatgttggtcctctgccccagtttctccctggggatagggtcatgagtgctgagcgtcccgcctcaccttgatgccgcatatctttctcctgtggttgtacttgccgcattgaggttgccatggaaatcacggtgagtaaattacttaccgagggatgtgccgtgctgcatgacaatgctggagttgagtgaggctgggagagaatatgccgagggggaaaacggcctctgatagtaactcatgggactcacggcacctcctgagtttccattcactgttatctggctctgagttggtgatcttttatcttgtaggtttggtcgaacgcttctaaaaccttttgctgagtctggtgactgagaatcacgccctgcagccaataggtttggagaactttgcactctcttcacagatgttagcgtaacagacatggcggcacgtttgcgagcacacccaccgctgtgttcattttcaccttggagagtttgttattaaagtcttcagttttcctacaggcagctgagt

SEQ ID NO: 330117 - DNA, 522 bp, Homo Sapiens
  misc_feature (19)..(19): n is a, c, g, or t
  misc_feature (28)..(28): n is a, c, g, or t
  misc_feature (39)..(39): n is a, c, g, or t
  misc_feature (50)..(50): n is a, c, g, or t
  misc_feature (74)..(74): n is a, c, g, or t
aaggaaaaagattaggttncgggggccngagcccatggncaaaagacggngaacaagcttgctggcacctcctnacctctcccactcccttctctcactgtgttaccgctttgcaaagaccccgggagctggcggggaacccctgggagtagctagtttgctttttgcgtacacagagaaggctatgtaaacaaaccacagcaggatcgaagggtttttagagaatgtgtttcaaaaccatgcctggtattttcaaccataaaagaagtttcagttgtccttaaatttgtataacggtttaattctgtcttgttcattttgagtatttttaaaaaatatgtcgtagaattccttcgaaaggccttcagacacatgctatgttctgtcttcccaaacccagtctcctctccattttagcccagtgttttctttgaggaccccttaatcttgctttctttagaatttttacccaattggattggaatgcagaggtctccaaactgattaaatatttgaagactt

SEQ ID NO: 330118 - DNA, 369 bp, Homo Sapiens
  misc_feature (132)..(132): n is a, c, g, or t
tcctcaatcctttagattcatacacacagacacatatatcaagcaaacctataaattgcctaaaatgaccaggccagcagtgacctaccttgttatcacgtgtgtaacatctcttgagggctgctttgtaantcatttgtatggtgttgttgtaccagtgtaactgctaagtggtttctctggttccatgtgcatttgtacatgaagttgtgcaatctccacataccagcagtttcaaagaatgacagtttgcatgaggccatcttaatagcaggtagcatgtaaccaacccatctgaattaagccaccattgcagaataaaacatttgacactaagccaggtatttcagtggatgagttgtattttgg

SEQ ID NO: 330119 - DNA, 363 bp, Homo Sapiens
  misc_feature (170)..(170): n is a, c, g, or t
  misc_feature (211)..(211): n is a, c, g, or t
  misc_feature (222)..(223): n is a, c, g, or t
  misc_feature (267)..(267): n is a, c, g, or t
  misc_feature (325)..(325): n is a, c, g, or t
  misc_feature (332)..(332): n is a, c, g, or t
  misc_feature (345)..(345): n is a, c, g, or t
aaacttgttttcagtttggttaatttatattgctttgtttttccattcacttatcttttcttctgcggtgtctgaactgctattaggtccgttcagtgaatttttcatttgagttattttgtttctcatttttagaatttccatttagttccttttcgtagattctattnctctattaagattcactattcccttattttgtccatgtttncctttatattnnaaaacattcataatagtggttttggtctgctaacttcactcttnctgtcatttctgagtcttaaatggattttttcctcccgaatacagaccacattttctngcttctngccgtgcctaggngaattggggcgggctatc

SEQ ID NO: 330120 - DNA, 388 bp, Homo Sapiens
aacctggaaacccccctccatacctggccatagccactgtggcacttatacacttatataggccataataaggaaacaacatttatatagacataataatgaaaacattgagtatgcatataaccaaaaattctgaaataacgacattgagagtgatatgcagagaatggaggtaggggattagtacgggatataagaactaatgtgctcatataccccaatgagaatagacaaaggggatgaatcaagagacaatagtatatggatattatttagaaatatggtgacaaatagcaaaattattgctgctacaaaagctgacttggggtaaggtcatgctggggggactctgatatttgttcatatctgttagtactacttgactttt

SEQ ID NO: 330121 - DNA, 567 bp, Homo Sapiens
  misc_feature (156)..(156): n is a, c, g, or t
  misc_feature (234)..(234): n is a, c, g, or t
  misc_feature (367)..(475): n is a, c, g, or t
  misc_feature (518)..(518): n is a, c, g, or t
  misc_feature (528)..(528): n is a, c, g, or t
  misc_feature (551)..(551): n is a, c, g, or t
gaaatatttttaagctcctctgatgcagcagcaatgcaaattatgacatagtgaatatagaactatgcagtatttaagcctcaacaatccaaatctacaaactttaacaatgcaagtcttactctaatttttaaggatttttgttgggacttacangggttataaatcccctctctggacatcaatgtagagtccatctttcaagcactttaatttttttagctgccaaagggnatgaattacattattgtatgctaatttccctgaaatcaatgccttctatgttcaccacagggatacaagcctgttatgtttgatggggaaagaccactacaatctaatggtggatctaaaataacttttttgnnnnnnnnnnnnnnnnnnnnnnnnnnnnnnnnnnnnnnnnnnnnnnnnnnnnnnnnnnnnnnnnnnnnnnnnnnnnnnnnnnnnnnnnnnnnnnnnnnnnnnnnnnnnngtaaggtccctgttcttcttacaagatccaaaaacttaggccnggtatgggtnggtgcatgtgtgccctgttagtncccagctactttgaag

SEQ ID NO: 330122 - DNA, 435 bp, Homo Sapiens
gccaggccctttatctgagagccaatggggagcctctgagagattgtcagggagcagggaatcttgtgggatccagggctagagcaagatttccagctgttgccccatcatggccaggttcaaggacctcattttctacctgggaacaattgcagtaccaagggttcctatgaagccttgggcatgtgatgatatggatggctggtttaatttttagctcttaattgtcaactgcattgcttgccttggaatgtcgatccctccttttcatcagagagcctttaattgacaattaagtaaaactgccaatcaccacttgtctgcctctgacctgaattagaacctgaggttgtggattaatcccaccaggcttctgacatttacaggacaccagcacttagaggatattaccctgatggttagggtgctctcgtc

SEQ ID NO: 330123 - DNA, 138 bp, Homo Sapiens
tgccactaggtgagcttccacaggaccctgagtggttcggggagttgggccttgggatcctagagccggtctcttgtgggccctttttatacctggccccttctctctcgctgcttctcctcacctgctgtgccgaat

SEQ ID NO: 330124 - DNA, 443 bp, Homo Sapiens
  misc_feature (36)..(36): n is a, c, g, or t
aaaactttatgatccaattatagataaattttctancatttcccagtcactagggttttataagttgatttaaaccatcaaaccagaatcctagcccaagcaggaattatattgaaataagttccacattacagaaaaggttcccataatttggccaaactgcatgcatgtaatgccttatttagtaatggtcactgtatgttagataaggataaaaatatatttgtgaattacttctgaggaaatgctaacttccacagcattgtatttaattataacaataacaggaacattaaatctttatctttgctgtttcacctcaaagtcatagatcatctggctttttaggcaccttcactaaaggcaaaaatctgatttgtagtttttattagcatgtaccttgaaattatttgaccaagaagctcaaagaaaagaagtacgtt

SEQ ID NO: 330125 - DNA, 193 bp, Homo Sapiens
  misc_feature (18)..(18): n is a, c, g, or t
  misc_feature (34)..(34): n is a, c, g, or t
  misc_feature (61)..(61): n is a, c, g, or t
  misc_feature (143)..(143): n is a, c, g, or t
cctccgggaataaatttnccttttaatttccccntgacttttagaaatacacacagttttncccgacttttcaaaaaatttgattaaatggttttatagtataatattgggaccccccataccgttagccccttgtatgtatncccaacactgcccaaagtaaaacattaggtcaggcatggtgcctcaggcc

SEQ ID NO: 330126 - DNA, 266 bp, Homo Sapiens
aaagaaccccacttattcttagttaatactaaaatatatagcaataaattgctgtttattttttctacatctattttgtgtacttgtacacagtgtacattcttttaaattatatcgtgtatatagctttagtattcggttacatgattcacagacccctgaattccaaaatattatggataaacattaccatttatatgctacaaattagtctgattccatctttgaaaatgtcttaaagtataaaataattaatttgctttttt

SEQ ID NO: 330127 - DNA, 318 bp, Homo Sapiens
  misc_feature (32)..(32): n is a, c, g, or t
  misc_feature (36)..(36): n is a, c, g, or t
  misc_feature (65)..(65): n is a, c, g, or t
ttaattaagagaaacctcccattgttggatantctntgattattgcagtctatggcttgcatggntagcttacatgctcactctttcctccagtcttttttttctggaggttggtctgtttccctttcaaaaggtcctcagtggtctctggaggccagaggaaatatcctaaaatacattcattacaaattccatactttaaagtttatttagaccagtcattttcaaagtggccgttggaaccagtttgtgggttaaggattttagtgtagtggcttgtacccaagacttttaaaaaatggaatcaacggccaggca

SEQ ID NO: 330128 - DNA, 563 bp, Homo Sapiens
  misc_feature (441)..(441): n is a, c, g, or t
ttttttcttggtacatgattttataggaagcacatttgtgttcaagtgaaggcagaggcgtccaccccaagtcaccagagcgcaggtgcagagaggaaaagctgtcagctagtgccagcctccaagggccagcgctacccttcaacagctggaggcaccactgtgcgaggctttccacaccggcctccctcaggaacaagacatcctcaccaggcaggggtgaggtatgggctccaggactggcttcagcaggcaccaggctggggcaccagctggggcctgggtacgcccagaaggtcacacagacggttgcgctgctctctcaccactgcaagctccgcgtcccacgagtgtcactgagcacagtcaccacctcgtccagcacatccgcgcccacgacgtcactgtaggtgagcaatgttctcgtacacctggctggcncgtggtcttttcggatcagcgggaaacggtggcagagggagcagacacagctgcaggaggggcctgcctctttacgtcgccggggaactggaccatcccgcagaacactgcgatgcctgaca

SEQ ID NO: 330129 - DNA, 771 bp, Homo Sapiens
  misc_feature (66)..(66): n is a, c, g, or t
  misc_feature (131)..(131): n is a, c, g, or t
acatgcccatcgtcccttttttcacaaaacacaaccttcggctaacccccagaaggaaccaattcnagctcgccttgaaggcccccacacacacagaaaacctccaacaatgtcctcctcagtgactcganggtgccagattattccacagtcatcttggtgccttccaatgggctgagaacaggctcagcagctggcagctctttggggggttcttccttgttcaccagtgtccgggacatgttggtcaaggcttttgttcgaatagaggaagggagagcaggagctgtgtatgcatcattctgaaccactttggtgagagggagggccttggacatggaaagcttggaactgcttagcccagcccatgtggtggaagaaagccgcctgaggctgcaaacttcatctgtttagtaggaaacggaagctataccatcatcatcttcatccaggtccatataaattctgtttggcctggtggttattgacaacattgattctcattccggcaggatggggatgaagtggtgccatggctttctgctgtggaacctggatggttttggtgagcttcagagcaggggtcactgtcccaatgggtgggtttatgaaggcagcaggggaactcctcttcaagctgatcttctcccgggcatcagcaactggcggggcttctggggcaccgtggtctgctgcttgcgagagttcaacatctctctggatcctgcactttccctttgattcgaaatcgggcatctttctgcctgtgcc

SEQ ID NO: 330130 - DNA, 416 bp, Homo Sapiens
  misc_feature (25)..(25): n is a, c, g, or t
  misc_feature (39)..(39): n is a, c, g, or t
  misc_feature (70)..(70): n is a, c, g, or t
  misc_feature (74)..(74): n is a, c, g, or t
aaactgtaccttccacatttgtcgnaaccccccactganggaatgtgaacagtggatgaacaaatttggnctgncgagtcccactggattggctgacggcggctgggacataggagagaaaaatgccgtgggttatttcctaaggtttcctaggttatagcctaacctcatcaggtacctgttagatctggagataaggcagtgatagagacgttggctgggcagcatcctgtgctcctgatgtggactatgtttaacgagagcaagagctgggctgtattgctttgcacagttagcacaagctttgggtagaagcgtttaatgctgctctgatgcgccattttcatatggtctgccaagtagtccctgggttgggctacctcctcacaatggttcctagttaaagggacacatca

SEQ ID NO: 330131 - DNA, 782 bp, Homo Sapiens
  misc_feature (55)..(117): n is a, c, g, or t
  misc_feature (386)..(395): n is a, c, g, or t
gcttctgttttggtcagttttcctctactgaatatgaattacttttccaatatgnnnnnnnnnnnnnnnnnnnnnnnnnnnnnnnnnnnnnnnnnnnnnnnnnnnnnnnnnnnnnnngttaccttgttaaacaaaaaagagacaaagacaagcaggggcatcttactgaaagaacttcctttacatagatttccagccccactccagctctaatgtttaaatccataaactacttgtcttctaacatcaccaggtcagtaagcatcaacccttcctgctgttccagacttagtcatgctggaggaagacatgaaatccagcagcagaggccacccctcaggactgggtgcggtggctcacccctttaaacaagaccctggtggggnnnnnnnnnntctaaccaccgtctaaagctatggaactgattacaagtaaatataatttacaatcatttgattaagaaaatgcactatttacgttgcaaataacacaatacctacagaattatactctcagacttggcagagacctctaagatcatctgaagacaatttccaagaccctgtctttaggatgctttgtaaatattgactggaaacaataacagagatgtcacaccacagaatcttaagtaaacagttcaaaagcctggcttcctgtttatacaattgtaagtcaccttattgctagctacaaggttattcagcattctgatttaatctaagaatttctttattttatgcataataaaagggactacaaagaacagctgaaaagccaga

SEQ ID NO: 330132 - DNA, 717 bp, Homo Sapiens
  misc_feature (530)..(530): n is a, c, g, or t
aagacccagccaaaaagaaaaaattatttgaaattttaaatgataagaaactctttaagcctccagtgttagtatttgtggactgcaaactaggagcagatcttttgagtgaagccgttcagaaaatcacagggctgaaaagcatatctatacattcggagaagtcgcaaatagaaaggaaaaacatattgaagggattacttgaaggagactatgaagttgtagtgagcacaggagtcttgggacgaggcctagacttgatcagtgtcaggctggttgtcaattttgatatgccttcaagtatggatgagtatgtccatcagctgaatattatttgggttgtgcccttctctggaattaatatcaacgcatctcttattgccttgttatacagtctactcaccacaatcaatatgaagtttactccataaacagaggtatggtacaagaggtaacgtgtcatccaaggtgactttcctggcagccaccagtaaactgactccggacagataggactcttttgttgcccnccaaggcatacttacaatgacctcagaggctctagggccacgagtgtgaaaaccaaccaatggataattaagtaaacacagttctcttgttctactgttagtgtgagaacctattttatattttataatgtgttgcacgtgtgatgatataggacaaaattacaaataaagcataagacgagtgaaa

SEQ ID NO: 330133 - DNA, 146 bp, Homo Sapiens
tacactgggagcctgaggtcctcaccttcctctcagtaactacagagaggacgtttccctgtttagggaaagaaaaaacatcttcagatcataggtcctaaaaatacgggcaagctcttaactatttaaaaatgaaattacaggcc

SEQ ID NO: 330134 - DNA, 409 bp, Homo Sapiens
  misc_feature (385)..(385): n is a, c, g, or t
gtgtgagccactgcgcctgatttgaacgtttggattttatagtcaaggtctgctgactctctgtcattggtccacactggttaaaatctggaatgtctgtgtgtggggtacatgagaagtagcctgagtggtaaatgttgactgttatcctgtccctgcactccatatgtggtactcacccctaaggcatcagctttctgccaagggcacaggatgcctcttgataaatattatatgggcagagaagagtgcaggagaaagggtctactttggatagggttttaggggaaagcaactcaaaagaggtgttttcagcctaatgacctgaaaggtaaggaagggagccagaaggcccgggtgcagttttctcacggctgtccatccnagcacttttggggaggctgaggcc

SEQ ID NO: 330135 - DNA, 439 bp, Homo Sapiens
  misc_feature (172)..(395): n is a, c, g, or t
cagcttctttgttccgagtaagctctaatacatgtttgctgtatgaatatctactataggtaaggcgctgatagggcatgctctggtctaagacaaagcccttatttttgggttgctctgtccaacgtaccgaattgaatacaggtcgccaccggcacatgtggatgagcannnnnnnnnnnnnnnnnnnnnnnnnnnnnnnnnnnnnnnnnnnnnnnnnnnnnnnnnnnnnnnnnnnnnnnnnnnnnnnnnnnnnnnnnnnnnnnnnnnnnnnnnnnnnnnnnnnnnnnnnnnnnnnnnnnnnnnnnnnnnnnnnnnnnnnnnnnnnnnnnnnnnnnnnnnnnnnnnnnnnnnnnnnnnnnnnnnnnnnnnnnnnnnnnnnnnnnnnnnnnnnntaataggtattgcttatggagtttacaatttagtgcagtagtac

SEQ ID NO: 330136 - DNA, 452 bp, Homo Sapiens
  misc_feature (13)..(13): n is a, c, g, or t
  misc_feature (53)..(53): n is a, c, g, or t
  misc_feature (59)..(59): n is a, c, g, or t
  misc_feature (357)..(357): n is a, c, g, or t
  misc_feature (360)..(360): n is a, c, g, or t
  misc_feature (367)..(400): n is a, c, g, or t
  misc_feature (441)..(441): n is a, c, g, or t
gttgggaatattncaataccccctttttccaataatggggcccctggaaccgnggttcnaccccggaaatagaaagacttgaacaacattataaggcaaattgacctaaaagacatctatagaactttccacccaacatcagaatacatattcttctcgagtgcatatgaaacatctcccaaaataggtcataagttaaagccataaaacaagccttaataaatataagtagactgaaattcatgcaaagcatgccctctgacccacatgggatgaagttagaaaacaatgaaaagttgggaaactcacaaatatgtggaaatcagacacacttgtaagtgactggctgggtgcagntantcacgcnnnnnnnnnnnnnnnnnnnnnnnnnnnnnnnnnnaggattccttggatcccttgagcccaggaattcaagaccancctgggcaaca

SEQ ID NO: 330137 - DNA, 171 bp, Homo Sapiens
cctctttcaataaaattttattttaagtccttagtgaatatctaagaggaaaatataaagggcttggctttagagttgggaggtcagggaagagggaaaggccccctgggttcacaccatttggaatttcctagtcccttacagatgaaagagggcgtatatctcaaaatt

SEQ ID NO: 330138 - DNA, 575 bp, Homo Sapiens
  misc_feature (30)..(30): n is a, c, g, or t
  misc_feature (266)..(284): n is a, c, g, or t
  misc_feature (420)..(456): n is a, c, g, or t
attcggcacagggatcactgacatggtcangggaggcccacacctcaattcagtaaccacctaatctctcccccaacctgatctctcatcagagctggcagcaacttgggattcctttcctttttcctgcctaacttttcattgaaatgtctagtaggagagtgagaaaagagaacaaaggctgggtcacagtcatagaatgttacagctggaatgggcatggaaatcatccaagttaaacttcttctctgccccccgcccccacnnnnnnnnnnnnnnnnnnnaaccaaacgaacttgtgatccagtgccctattttatagtgtggttttccagggtctgaataaataatcattaaagtttgacacacgcagacacacgcaccaatgatgggatacccccaaatgatttaggaggttannnnnnnnnnnnnnnnnnnnnnnnnnnnnnnnnnnnngttagttagagttaaatgtacctatagcccctgaatacatgctcaggtagagaaagtctccatagtataagtaagtaatatgaatgtggaatcttggaaagtgatatattttgattgga

SEQ ID NO: 330139 - DNA, 586 bp, Homo Sapiens
  misc_feature (172)..(172): n is a, c, g, or t
ttttaatgaaacaatactggaataacattaagtactattatcactttaaaattcaaacaatcttccaaacatcaatacatacacagttagtttaaaatcacagacaaatcggacttgagggtaaaagtgaaatcctcacctcttgcccatgtttgactttgggatggaattncagcaaagctctcccactgcagattgggagaatcaggtatttctcccacatggggggctgccagggaaggaggaccctatagggtggccagcaaggggccactggcggtaggtcaggaagcctgagatctagggttcaatgtgtttataagttctgtgattttcatgacccgggggtggggggttgggttatgatgaactgtgtgaggaaggagagccagttaacttttggggaggtctatgtcatttgtgcaaatcatacggagcatttcattcgttgtggaggtgcgctgagctggcaaaatgcgaattgtaagaacaccttcatttacatgtcgactgctgcttgaaagcagtcacttgctatttcactaaggtttttgaaagcttagtttaacatatgataccataactt

SEQ ID NO: 330140 - DNA, 571 bp, Homo Sapiens
acacttcataaaaccatgtttattcaaaaaaatctattcagaaagtctggaaagcgtaataaatatctgtacagtggccacccatctcaaacatgaattacaaagcaggaacataaaaatgatgtgtaaacataactgctgagccagtgaacaaagtgctgagtcaggagcgaggcagagaagcgtgctcagtagaacgacacagatgctgcagcctccgtcctcagcccctcaagctgcgctgggagtccaccttccgccctctccacaccgctcagggaccggcagcgtccttctccattctcgaatttgcatgacgcttagaaaggtaggggggcagcaaaacgtgtcaggaaatgaacggagtgcaaaatcaaactttggccatgtggcttgagagaatcagtaaagcgttaggtaaaaatcccaagtgcagctttaggataacaccatttaatgaacaatactggataacattaagtactattatcactttaaaattcaaacaatcttccaaacatcaatacatacacagttagtttaaaatcacagacaaatcggacttgagggt

SEQ ID NO: 330141 - DNA, 386 bp, Homo Sapiens
aacattcaatattggtaaactcgcttgaccaacactagaaaagtgcatgaaagaagtcactgtttcctgaattagccttgtagtttcaaaaggtaaatcaagaataaaaatggtttcatggtcaaataaatttgggaagcagtgtatattttattcctatcttagaaaatcacagtgcaccctagaatatcaaaagcctgtgacatcttgaaggagagaatctagttatattttcttcaatccagtattttccaagttaatattatatacctttttcaaaaatttattttttgagggtacctttttaaaacattatttgtgaaactatgtttgaggactatgtttttcagaatgtttgggaagcattgccatatcttcctcatgat

SEQ ID NO: 330142 - DNA, 505 bp, Homo Sapiens
tttgggttgcaagatgtttattaggaataagcacctgtgaaaagaagaggaagaagaggaagcaggcctgggcataggaagtcaaattgtgctgcaggcctgacgaagccctggctggcctgggcctgctgggagtactgtctgtcagtgtccgtcccatgttggattgaaatgaccaggtgtttataccatgcctcactcagacaccagatacaggctgccccaggaagggcgtggtctcaggtgaagtggctctctgcagctgcggccaccctgatggcacttcccatagctggggaagtcctcccttgaagggagttctgggggcagctgtccctatcttccacaccttctcaactctacctcctcttacttcgccagcttgctttcaaccagagaagctgagaagaagcagtcactgtaatttccacactcagccctggctcctactggggaaaacagaggctttgtcccagcttaggaatacactggatctgacagatga

SEQ ID NO: 330143 - DNA, 440 bp, Homo Sapiens
attaaaaaagtgctttttaatttttagccagaatggtcaagttgatgtagattttttttactggaatactcataataatgtctgtctatatgccttaagcaagattattatttaataaaagatggcaggaagttgtaatttatggaaaatttacaattattctttaaaatacttttataaaattataaattgataataatccccccaaactgaagtgaaatacttttaatactacttgaaattaaagtacagttgtttatacaacaatgaataaggacaagatatcaaactgaaaattcaaaaataaacagaagaaatgtaaacagttctaaaatatcagtatttataaatgttgcttagaggaaggctattcaaagcatggtccattaactatttgtgagctgtccagaatgaaagaggcttgtgccagaatgaaaatc

SEQ ID NO: 330144 - DNA, 253 bp, Homo Sapiens
  misc_feature (135)..(135): n is a, c, g, or t
ttgctaacatggcagaaacaaagctgtctccctcagttctcgtggcagccctcattctagtttgacttcctatgaaattacttttcctagttgtcttgaaggtcatgttttgcttaagatgtagctccaccaagnagacagccctatgtggggtttggaggtgagcagtgagaggtggtagccataaggagggaacatcagatctgccggggggcatgggtgggcagagggcatctgggttctttctgagggc

SEQ ID NO: 330145 - DNA, 420 bp, Homo Sapiens
  misc_feature (234)..(358): n is a, c, g, or t
gcgacaagagcaaaactccgtctcaaaatacatacatacatacatacatacctgcatgaatgtcaagtaattgagactgattcagacatccctgttttaaactagaattgtaaactctcagttgacagcttcttagtaaacacatgcacaacaagtatatttagtgtctaaacgttttcctgagatattacagttatcataaatttaaggcttggccgagtgtggtggctcatnnnnnnnnnnnnnnnnnnnnnnnnnnnnnnnnnnnnnnnnnnnnnnnnnnnnnnnnnnnnnnnnnnnnnnnnnnnnnnnnnnnnnnnnnnnnnnnnnnnnnnnnnnnnnnnnnnnnnnnnnnnnngtggcatgtgcctgtagtcccagttactcgggaggctgagacagaagaattgcttgaaccca

SEQ ID NO: 330146 - DNA, 452 bp, Homo Sapiens
aatatacctttatttctcaaactcaaagctttatcaagttctaacacattttgcattgacaagtgattttatctgcatcaagtaaggttagtgaccaccacgaaagaggaatccccagacctcctaggcactaagaaatatttcaaaggctatgcaaatatagaacaaaaagctttcaatttagtctaattggtatctatttttcatctatattaatttggaaataagttgctaccttaggaaaaattacatttttatccattaaaataaaacaccagatagggttgagtttttttaaaaacacccacagatctgtatttggctacttcctctttagtaggatggggcatctcaccttcctatggcaaacacacacaaggttttggcaccaactctcactgagcccaggcaaaactccaagcattttatttagcttacacttcaattatttt

SEQ ID NO: 330147 - DNA, 429 bp, Homo Sapiens
  misc_feature (392)..(392): n is a, c, g, or t
atgtactcatgaatatttattttatactttgggttattatccaatgctatgttgctttgttgctcaacattccagctttggccagtggaagctctttcatttggctcctgtgtccctttgacatatcctcagcgtttcttcactttctgggactgcaagatgctccagtctcagcttgtgtgtttcttgccccaatcccggaatcagtcatttcttcaaagagcctgtgttccttttatcggatgatgatattttagaaaccaagacctgtgtactaagagtgctcattgttgctggggtatttgtgctcctaagtcggcccacattttacacttcactggcactccagggttgctcacctggtaaaaggggggataagtataggtcctttncatggaatttttcttgtggaaaattaaattaggggat

SEQ ID NO: 330148 - DNA, 236 bp, Homo Sapiens
ttagtaaattatcaaaatatcttctatcattatcatctggtgcatcattactcccgcagaacatcaagaacagaaaattcagctgctcatctttggttccccagctcttcacctagacagacctcatggcaggtgccgcaagggcccttgtagctttatatctccttttaccaaatatcctgtcatttagatttagttaaatatgagaaaaacaaggttcacccatcttcattctc

SEQ ID NO: 330149 - DNA, 426 bp, Homo Sapiens
  misc_feature (30)..(30): n is a, c, g, or t
  misc_feature (104)..(104): n is a, c, g, or t
acaatgggaattaaacacgatggggccccnatggttgaaatgctcctcaccctcaaaacttcaatttccatccctgtgaaagcagctattattattatcccccnacgttaatacatatggaaaagagtcaacacgggtgcctcagtggtggagctgggctttgagtccagacagtgtggcccaatcttgcttcttagtcctcattaaaggcacagaaaaggcatgccaagccagccccctcggaccagacctgcctgcatacttgtttcatttggcccacagaaattttaaaatatgagtctcattttgaaattaagatgactcagaaacatccatccagcttttcttgaaaaaatctccacctggccactgtggactgcaattccacagggtcacaactggcaggaggtaggccccttgaagtgg

SEQ ID NO: 330150 - DNA, 726 bp, Homo Sapiens
  misc_feature (424)..(424): n is a, c, g, or t
  misc_feature (435)..(435): n is a, c, g, or t
  misc_feature (599)..(599): n is a, c, g, or t
  misc_feature (605)..(605): n is a, c, g, or t
ttattttgactgtcttgttggctccctgaagaggcttgcagagatgtttttattagcgaaacttgggaattgacatcatgagtaaggtatgcaggctgggctgggcaaagcacatgagaggtaggagatgcgggtcagcgtatctggttgcgctggttctcttggttaatgggccacttggtggttctggctggcggcaagaagactgtcaatcagttgttcagtgttccttcctgaggtgggatactccataaccttggtttcatagttagatttcctaaggccagttccctagaactttaaagtaagaaggcatggttaaagtattatgaagaagcaaccccattccatttctgttctatctctatttccccctgagagatttcaccctctattcttaaggagaaagggctgaagatcatcntattctgaagngacttcctgctgaacagggatgtcgtccctgcctaactttagggggtggggaaatctctcactggctgtcctaaagacctgtagggactggggtgctcctgggatgttatgggttggaattcttgggccatcattagcttgacttggagctattgaaacctganagacanaaactttaccaaaaggttaaaaacacaatacgccaaaagtaatagcaattaaatgaccacttagggtccgaagaaaggtaaaaaccatgtcatactttgtaggtatccactgatggagccc

SEQ ID NO: 330151 - DNA, 428 bp, Homo Sapiens
  misc_feature (13)..(13): n is a, c, g, or t
acccctcctaatnccttaaggaagaaaagggctgaaagaacctcaccttctgaaagcgaacttccctgctgaaacagggatgtcgtccctgccctaactttagggggtgggggaaatctcctcactggctgtccctaaagacctgtagggactggggtgctccctgggatgttatgggttggaattcttgggccatcattagcttgacttggagctattgaaacctgaaagacacaaactttaccaaaaggttaaaaacacaatacgccaaaagtaatagcaattaaatgaccacttagggtccgaagaaaggtaaaaaccatgtcatactttgtaggtatccactgatggagccccagatggtttgagcagtagagtcattacgattatgtagccaggtagcctcttggtgaatctttacttttatt

SEQ ID NO: 330152 - DNA, 410 bp, Homo Sapiens
  misc_feature (351)..(351): n is a, c, g, or t
  misc_feature (366)..(366): n is a, c, g, or t
  misc_feature (378)..(378): n is a, c, g, or t
  misc_feature (398)..(398): n is a, c, g, or t
acattgctggtattgtgttttcagcatattggtagtttataatacagacttcttgttgtcaaagatcttcccgcttaaaaattatattccttttctcacgtgtttattagagaagaacaaatgataaaaattagcattttaatgatatatttatgtgtagaaatagggggagaaaaaaaggccaactgaggtaatctaggtgaaaaagtttgttttcagtttagctacatgggtttaaccagaattaggaaggaggaacttcatttccaaccaaaggaacagggccgcacagccaccattttggggtcttgagcagagagagaaaacaaataggtggtttgtgagaactcnggaattatgtagaanaccagcttttcnacataataaataagccttgncttatttattaa

SEQ ID NO: 330153 - DNA, 443 bp, Homo Sapiens
  misc_feature (219)..(232): n is a, c, g, or t
gtaatacatatttaactcttcagttcaattgaatttattccggtgtaagatgaagacctaactttctgatgaataatcttgcctttcattcccctttgatttgtgaaggcttttttatcatatattaaatttttatgtgaaaatgggatttgttttggggtagtttgtcactttatggtctattaacagtgttatgatattctaattgttatagttatnnnnnnnnnnnnnngtataataaaatagatatactattacttcctcctcctatgtagattttcaaatccaaactccattttatccatccccactgtcaatcaaataaggattttgattgcaactgatctaaacttccaaattaatttgggataaacttcaatacctaggcctcccaaactaagaacttggcctttctggagtctcttgtccctccaggtttgtag

SEQ ID NO: 330154 - DNA, 410 bp, Homo Sapiens
  misc_feature (35)..(35): n is a, c, g, or t
  misc_feature (359)..(359): n is a, c, g, or t
gtacacattagatcaagaaaaatggccatgggagnaagtggatcttctagttttaacactatcttaccgcccgacctattctgtgaatggacagagaaatggggagagatacctagctacaagcttttatgaagttatgctaggacccagagctactggattcttgtcaggtgtgtgtggcccctatttccaggttcctcctgaaggaacctgaagaagctgacctccacagcctcaggccccgagcactccctccctaccctaaggcaggcctcctggggagtggagcccctgtgctgtccccaacagcgctccaatcggactccaaacaggcaccctcttttggcttccccactggncccaggggctgtttttcccctcagagaaatgggatgggaaacggggggagt

SEQ ID NO: 330155 - DNA, 364 bp, Homo Sapiens
  misc_feature (14)..(14): n is a, c, g, or t
ggtaaccatcccanttaccccaagagtgaaatccaagcattcctaaagtgattccatttaagagacctgtaaatacactgaattttaaaaattacaaaatgtaaagtatactactgggcccctatagaatttggcatttttaaagactgatatggtaattcatatttctgcagttgtaacatgaaatgatatattaatcccagaaatatttaaggaaattgttaatagacaaaaaagttaattatgtaatttatctgtactagactgacaactatgtgcaagcataatagccaaaatttgatatttttgttacttcaaactattaggtgtacgttacagagatatacaacagccttcagtttca

SEQ ID NO: 330156 - DNA, 475 bp, Homo Sapiens
  misc_feature (418)..(418): n is a, c, g, or t
  misc_feature (450)..(450): n is a, c, g, or t
taacaaaaatttgttgagcacattttatatttgtcaaatttcttaattgtaaactggaaaatctgctctagctattttaagaagcatggtttattaaacataaagaatctcaagaaaagtcagaaaactgggtttggctgctacacagagcaaccaggagacacacctaaccacaccactaaactgctctgcaaagtactactgtatagccacatggcactggattccagaaactttcctgcaactgcctcagaagaaccagatgcctctgccaccatgccccccgcagatctgatgttcctccttatgggctaccacctcttcactggttcacctccaaaccccacatagggctgtctgcttgggtgggagctaacatcttaaggcaaaatcatgacctttcaagacaactaggganaagtaattttcttagggagttcaaattaggantgagggttgccaggagaattgaggg

SEQ ID NO: 330157 - DNA, 415 bp, Homo Sapiens
gcccactgcccaaccctgttcaggtaaggaatggacacctccctgaatatgtcagagtagattgccagtatcctacaaagtatgttggcaagagatgaaaaatcaacagtaaaatggccttgcatcctaacccttgtgtcagccacaggtcaagaactgcaggtactgctgcccagtatgtccccaggaatggcactgctccaaggattgctgctaatgctgatggtatgaagacaatattgatgccaaacatagtatgagtcagccaggtatacaatccatagaagccagccattttgagggaagcatcaaacacccctctgatagcttcttccacagactggccaataatattagaagaaggacctggctgagatagtggagtcaggcttatcacccacttcactggcttgta

SEQ ID NO: 330158 - DNA, 638 bp, Homo Sapiens
  misc_feature (189)..(229): n is a, c, g, or t
  misc_feature (518)..(518): n is a, c, g, or t
  misc_feature (548)..(548): n is a, c, g, or t
  misc_feature (553)..(553): n is a, c, g, or t
  misc_feature (564)..(564): n is a, c, g, or t
  misc_feature (573)..(573): n is a, c, g, or t
  misc_feature (583)..(583): n is a, c, g, or t
  misc_feature (602)..(602): n is a, c, g, or t
tcttacatttgaatctcagatccattttgaaacttggtttaagataggagtaatgaaatctaattttgttattttccagatggctttccaattatgtcaacctcacttttcaagaaattcatcatggtgctgaggcaactgtatgtccacatagaaaagaataaaattgtacccccgtctcagacctannnnnnnnnnnnnnnnnnnnnnnnnnnnnnnnnnnnnnnnnagctcaggggtacatgtgcagaacgtgcaggtttgtgttacataggtaaatgtgtgccatggtgttttgctgcacagatcataccatcacctgggtattaagccagcatccattagctattcttcctgatgctttccctcccccacacccccgacaggccccagtgtgtgttgttcccccttccttgtgtccgtgtgtttgcatcattcagctcccagttgtaagtgagaacatgtttgggttttctgttcctacattagtttaatgggcttccagttctatccatgtngcctggcaaaggacgtggatctcattgccnttttnatggactgggntagtatttncatgggtgtnaaatgtgggcaacattgtntcttttattccagtctagttcatttatgggggcatt

SEQ ID NO: 330159 - DNA, 396 bp, Homo Sapiens
tcctcaaagagtttgtggcctcataatggataaaaacctacattagggtttatgagccataaacttttatctcttttagcaaaattaaatttcctcccataaattattttcccctactgatagctctcatcagggctataactgtaaaagcagtgcccagaacctgacattaagatcaagtttttccagactctacatctctgaaggccactgctatagctatttttgttagtaacaaagacacagaccaacctaatttctgtaattggcatacatcatggagatttacatcctatgtgattcttatgaatttcacaggctgctgtcagatcacaaacacagtttacaaaagtactaaatgaagcgtgtacacagtccatttcaaattggaatggt

SEQ ID NO: 330160 - DNA, 376 bp, Homo Sapiens
  misc_feature (345)..(345): n is a, c, g, or t
ggttttcatacataaagatcttttgagacattgaggatgagttgactgattaaaattttaaaagatctaatgtttcaaaagaatttgggatcttattaaaaggatcttgaattctttcacattcaaacctagatcagtttgagagggggaaaaaacctggtaatctatgtagtcccctcatactaacttggagctgaataacacttatacttgctggtataaatgccttgtgatacagaaggtagataaagcaggaaataataactgttaaaatactatctaagacagggaagcatccatttgtatttcttgacagttttaaatgccttttttctctccatggantctaggtaggctgaggaaagttaattaggaa

SEQ ID NO: 330161 - DNA, 418 bp, Homo Sapiens
  misc_feature (20)..(20): n is a, c, g, or t
  misc_feature (29)..(29): n is a, c, g, or t
  misc_feature (72)..(72): n is a, c, g, or t
aaccccccacctttaatggncccggacanaaatgcctaacccaagcctccatttaaaaaccaaacaaaattncccgtgtacctttaggataatattatttccatttgtcctgttatcattacaatatattagtaaaagttgccctgtatatcagtattatggaaaaactcaatctttaaatatcagaaaatgaaagatgtattttgtttcctttagtgtagggtatgtaatacccattagcaagcaggcaattcatttgtttaattcaaagattatatttaactctgttgtgacatcagaagccttctttgtcattgtgaatagtcagtggattattttggcctgaatgctgtcatatatgtaacatgttagtaaatcttcctttttacttttctcttttgtatgatgatgatgggtc

SEQ ID NO: 330162 - DNA, 530 bp, Homo Sapiens
  misc_feature (279)..(315): n is a, c, g, or t
ctttagggttataccactatatataaatctgaaacaacctatttagtttgaatatacactatttgtatattccctattaattgctttttctccactacttatattttgagaattcacccttattggtgcatgcagccataatctggcttgttcatagctgtctcccagcacctagtgcagttgggcaaatgggcagggcaccctataaatatcagttgacatacagagtaggccaccacgtcccaatctaactcctggacttttccccttatattgtannnnnnnnnnnnnnnnnnnnnnnnnnnnnnnnnnnnnaatcaagtatttctgaaatgcagtataatccaattaagtctattttaggtattcattggctataacattttccctcatcctttttaccactgaatacagaaactgataagctcatatatttgaaattgttaaaagactcctccccgtgtgtggtggaatttggccgtaggaacacaggactcaccgctgtagaatacctggcagaagcactgaag

SEQ ID NO: 330163 - DNA, 631 bp, Homo Sapiens
  misc_feature (21)..(21): n is a, c, g, or t
  misc_feature (124)..(164): n is a, c, g, or t
ggcatttgttcataaaacctntcccacaaagacttacaggcaggaaaattaggtattaatcaaatcacagaacctcccaaatgctaagtgaggattttaccctttgagcatatcccattaaaannnnnnnnnnnnnnnnnnnnnnnnnnnnnnnnnnnnnnnnntttcaggtgaaacctagtgagataatgtgtatgcagctcttagcacagtgtcccccacataattggtgcataagtttccagctgatgtaagaaaaatacagaaaccccaatctaaatctatctctgaaactctaattataacttaagtttttgttatcattaggcagtgtccccttaatgttgagttcctttgttgtgtaatagtttgatatttgcaattggttttgtacagatagtaaagaaacataccagccagtagaggtttcagtttgagagcattcatcttttttcccttactggaggtaggatggaatcaaaacacacaggccttctgaccaggcctggggagcccagcatggacagaattactattcagtaaagctcctgccccagtgagctgtttttaccccagaccacagcttataggagctgcttttacccacgccgagccctatgctttctcaaaa

SEQ ID NO: 330164 - DNA, 357 bp, Homo Sapiens
  misc_feature (108)..(148): n is a, c, g, or t
  misc_feature (341)..(341): n is a, c, g, or t
gggtttatgtattcttcttacatcagctggaaacttatgcaccaattatgtgggggacactgtgctaagagctgcatacacattatctcactaggtttcacctgaaannnnnnnnnnnnnnnnnnnnnnnnnnnnnnnnnnnnnnnnnttttaatgggatatgctcaaagggtaaaatcctcacttagcatttgggaggttctgtgatttgattaatacctaattttcctgcctgtaagtctttgtgggaaaggttttatgaacaaatgcctaatgtttgctgttgctttgtgttaggctataagctctatgagggcagggcagtggctgctttgtccacnagcatgccttaaatca

SEQ ID NO: 330165 - DNA, 553 bp, Homo Sapiens
  misc_feature (26)..(26): n is a, c, g, or t
  misc_feature (34)..(34): n is a, c, g, or t
  misc_feature (40)..(40): n is a, c, g, or t
  misc_feature (57)..(57): n is a, c, g, or t
  misc_feature (110)..(110): n is a, c, g, or t
  misc_feature (387)..(439): n is a, c, g, or t
tagggtgccaattttcccaacacccngtgctcanttcganccctcctatgtccacanttggaataattcctcacgaattatgttttaatttttccctacatgaaggtacnactcccgggcccatcctgtaagtgaagacatatgcaataattctggccaatgggctaatatgaaagaaataaagtgcttaagcttttgggctgaaacataggagagtagtcatgacaactggcagcccatgtattccagatagtacggctacaagatgttgaagcagctgcatcctgggtccctaagtcgtatgtggatcagagctgccccagcaacctgtaattccagctactcaagaggctgaggcaagaagatcatttgagcccagaatttcannnnnnnnnnnnnnnnnnnnnnnnnnnnnnnnnnnnnnnnnnnnnnnnnnnnnaagccttctctctgaaatctttcctttgtgtggaacgtacttttacttttgaactctaacctgttccttcattgcccttcccagcttggttttcttcctagttttcttctgttc

SEQ ID NO: 330166 - DNA, 394 bp, Homo Sapiens
acttgattagtacagcaaccctatgatacaggaactagtgtccccattttacagaagagaaaactgaagcacagggagcctgctaacttgcccggggtcatccccagcagggaagtgctgggccagggtcttcaggctgaagctctgtctgcctctgggggatgagattcccttccccaccctgctgctcacccttggctgtgaccagaaacctcccaggtctggaaacaccttcaagtgctctgggcaaattctcaaagtttctgatgaccgctgctgcatttctgaaaggctcagataacccccgaggcaggggacaagtaagagtgggtacggtgagactttgaacaaatgtacagaaccatgaaccaaataaaccacttttctttatatt

SEQ ID NO: 330167 - DNA, 470 bp, Homo Sapiens
  misc_feature (24)..(24): n is a, c, g, or t
  misc_feature (40)..(40): n is a, c, g, or t
  misc_feature (61)..(61): n is a, c, g, or t
  misc_feature (76)..(266): n is a, c, g, or t
aaaccccctaagtacctaggtagnaaaagatttatataanggggatttaaatgtatatccngggtttcctcctgcnnnnnnnnnnnnnnnnnnnnnnnnnnnnnnnnnnnnnnnnnnnnnnnnnnnnnnnnnnnnnnnnnnnnnnnnnnnnnnnnnnnnnnnnnnnnnnnnnnnnnnnnnnnnnnnnnnnnnnnnnnnnnnnnnnnnnnnnnnnnnnnnnnnnnnnnnnnnnnnnnnnnnnnnnnnnnnnnnnnnnnnnnnnnnnnaggaaggacaacgtcacccaccaattaagaatcactggtataagtgtacctttgtgctctccaaacctcaatcccctcaaattttgatggtcaacttatcaagaggtgatcagagccaagggtgaggaatcatcaaataataatttgtttacagaaggaaatatctccaggcagtccatctgcttcagaaactaggctaaattt

SEQ ID NO: 330168 - DNA, 394 bp, Homo Sapiens
  misc_feature (333)..(333): n is a, c, g, or t
  misc_feature (344)..(344): n is a, c, g, or t
  misc_feature (354)..(354): n is a, c, g, or t
  misc_feature (364)..(364): n is a, c, g, or t
  misc_feature (377)..(377): n is a, c, g, or t
tttagtgtataccttcaatatttcttgtatgaagtttcagctaaaaatgtactttgtgtatctgtagagtggcttcatattcagagtttatggacatttatgattttatgtcccctccttggttcttatctcctgggagttcagccttatgtgcttctcaaagtgtataacaaaatcaaaggacaatgtcatgtcccttgaatttaattctaacaccaaaccttgggtgttaggaggtcacaaaaaggtccttttttaaaaaaccttgggtgaggaacaggacaataacttgtctttctggggcattcgcggtcagggtcctttaggcccgangggggggtttnctttggccanggtttggggnaaggcttccgggncccctagggggggttgg

SEQ ID NO: 330169 - DNA, 394 bp, Homo Sapiens
  misc_feature (377)..(377): n is a, c, g, or t
ccggattaatgaatttctaattttatataaaattcaattggaaaatagcactacagtattctcttagcagaccacatcttctgtttgctacctaagagataatctacaacctcaagtctctatggttgtgtacaattcatctgagctcatcaggcttactggagagtcaggtttccctctgtgatgcaatatttcataggactaaggcatctttaccatttcccccggatgttcatgggtttcacaccttgggaataggtaggagggccaccaggggtccctctaggcccataggtggtggtttccacattggacatcctcccagtggggataccccaggtcaaccaaacaccaggcaggcaccgggttatggggcnggcaggtttattttagg

SEQ ID NO: 330170 - DNA, 583 bp, Homo Sapiens
  misc_feature (415)..(415): n is a, c, g, or t
  misc_feature (431)..(431): n is a, c, g, or t
  misc_feature (437)..(437): n is a, c, g, or t
  misc_feature (450)..(450): n is a, c, g, or t
  misc_feature (493)..(493): n is a, c, g, or t
  misc_feature (505)..(505): n is a, c, g, or t
  misc_feature (551)..(551): n is a, c, g, or t
  misc_feature (562)..(562): n is a, c, g, or t
ggaaaggtatgaagttttcttttttcccctttacaaaacaggtaaaagaaatccaggaagaattggataaattgagtccacataaaattaaacacactaagaaggtatgctgcaattaaattatgatcaatacttgcttataaatgacatttcccagtgttttgttagtattgtgtagggccctctgcactaatgttattttcagtacttgcagaaacctgttagtgagggagtgagcaccttacatattctgaatatggttgccttctaaggaacaggttctaaaaaatagatttttgttgttgttgctgctggtataaaaaattgggaagtagtaagggaaaagactgccactaggaaaactttaaaactttacaactcccttttactatggaaaaagttttcaccatagganggcactttatacaggnaggtgncaggctataaatnttctttggagttggggtgaatgtttgccagttctgagttgggnataactctctcntcttgtttattacccgtcctgggcatgtctaggtggcggctgcccntcggggggccnttcgggccttcagtgtttgtc

SEQ ID NO: 330171 - DNA, 327 bp, Homo Sapiens
  misc_feature (320)..(320): n is a, c, g, or t
  misc_feature (327)..(327): n is a, c, g, or t
ttcccacagacattgacagtttctggagacaattttgatcggcataacttggggggagggtatactggcagcccagttggcaaaggcccagggatgctgctaaaacaatcttacagtgccacaggtcagcccccagcaaaaccgaagaattatctggtcaaaaaatgtctatagtgctgaggcagagaaaaccctgatatacattaaatcccccttatataatcttttctaccttagtactttaggagtttgcggtactctaaaactatggactggtgagataaacaggtaagaaattagggaatctaggctgggcgtgnatgttgn

SEQ ID NO: 330172 - DNA, 374 bp, Homo Sapiens
  misc_feature (350)..(350): n is a, c, g, or t
tgaattgttccaaaacgttttaattatcatgaatatcataagtcatacaaaaaaataaataataatacaaccaacactcatgcacctgccatcctatagcttaaacatactatatcacatctgactattacctagtctgtctttccccaattagtgatgcctctatagtgagatctataaatgttggttctgtttcttttgtttctgaaactctagaacctgttcagtacatattgaataaaaaagcaacttttcactgaaagagaaggataagcggacatctttcaacagcaggttaatgtatatcactgcctgttcttcttccatccacaagggctgagggagggggntgagggttgactctccaatggggg

SEQ ID NO: 330173 - DNA, 461 bp, Homo Sapiens
  misc_feature (56)..(56): n is a, c, g, or t
  misc_feature (392)..(392): n is a, c, g, or t
  misc_feature (417)..(417): n is a, c, g, or t
catatatggtaatttccttccacaaatccttcaccccaaggtgggattaattttcnggataaatggcagcccttatgtttagatagtccttttataaatgtattagcataataccaaaccataaagaacattacagagagcgagcagtacaattattccaacagacagtcagtataaggaaaaaagtctttcattctcaatcacaatatgattttaattcactagaagaggtacatgattggaaataggtttgctgaggagagtagacaatatacctaaaggagtgagtcagcagcaatgagaaaggaaaaaaaggatggttcaggcataaagagcatgggtcatctcaaattttggacaacaggctttatccacatatatcctttctgaanaatccaaaacaccaacacaaggaantatattgttctaaatttgtttatataacactttgtaattgcatt

SEQ ID NO: 330174 - DNA, 471 bp, Homo Sapiens
  misc_feature (392)..(392): n is a, c, g, or t
  misc_feature (407)..(407): n is a, c, g, or t
  misc_feature (428)..(428): n is a, c, g, or t
  misc_feature (449)..(449): n is a, c, g, or t
tatttcattcattcatttattcaatttttttaaaaaagctattacgttaaactcttaggatgaggacaagccttacaatggtgtgtgagtgtgagtatgtgttcatgcatacactcacatccctgtgtctgagtgttgtgggtgtgtgtgatgtctgtgcatttctatgtggtatgtattcatatgcatgtgtattgggtacactaaatttgggtttgcacagaaaagaataaacagaattgtactgggaatagtctacctagtgcttcctctaaggaacaggcacacagctcattcagttttgctgattttcatcctctggcatccacaggggcacactgagggtctctcctatcaccttgaacatggggggatttggacccccaaccctntccaccgcgttgggnctgacagggcagcaggtgggngctcatcaagggcagtttcgnggggggtttcgggggagacacc

SEQ ID NO: 330175 - DNA, 453 bp, Homo Sapiens
  misc_feature (88)..(88): n is a, c, g, or t
  misc_feature (254)..(254): n is a, c, g, or t
  misc_feature (313)..(313): n is a, c, g, or t
  misc_feature (357)..(357): n is a, c, g, or t
  misc_feature (438)..(438): n is a, c, g, or t
tttctattaaaaactcacattgatttattagaatatgaaaaagattcagtttcttctgtacaggcagcagagtggcagcagctgcggntggcttggtacgtggttgtcgatgtcacccttgcatggtgactcctgcccaaacagcacttgcatggagaggaggatggacagatgggccgaggacccatggcccagtcccctgcaaaaaggggacactctgactattgcacaatcctgggggagtgccccagggnacaaggggaaggagtgtgtgtggggcaaaggtctctgggggcccagggattctgcccantccaccagccccagggggacaggggttcctcaggggaggccttntcccccccaccgccttccacaatggggtttccacagcagggcagggtttgggtacacacaaggggaaaggtttccgggggncaaacccgggttggg

SEQ ID NO: 330176 - DNA, 357 bp, Homo Sapiens
ccacttaccatctttcctgataaagcctctcagcagaagagaagattgaggataaaaataatgcctgtctttaaatatctgcagggccaccaatctaaaagggcagaactaaaaccaatagggactgtgtactttgatggttgaacatgtgagttagcggtacgagccctggttctggcattttctcattgtgtgaaattgtttaagtctttcatcatttacaaatgagggaggtcgaattatttctaaaattatttcagttttaaaattccaaaagtagcaaaggtagttttcaattatatgatttcttgttctaaagtctatcctccagttctacccggcaagtagtaaacgatg

SEQ ID NO: 330177 - DNA, 419 bp, Homo Sapiens
actgccgctgtggaatttcctggggaccagggcacccagagagaccagggagaaaggaaaaaaccccagggatctggcccactgtctcagaacccaggtgacccctttcctgttactagatgcttctcctggaccccccgggcacactcttgctcgcctctggatatcgagttgtatttagtccaggctggggataccagggtcagggacatggcaaactcaccgcaaccttggtggcacttcaaattgtggtcttcaacccccttctacctgctactggtcaattctcagaggcctcagtagctcctttgtgtgcctgtctagccttttagccacattcagtgggcagggaagggtggcgggggtggtgcttaccctgtggagtaaccataaggaaaccagaaccataggaattcgaa

SEQ ID NO: 330178 - DNA, 610 bp, Homo Sapiens
  misc_feature (527)..(527): n is a, c, g, or t
ctaatcacatacatttctcagggtgctcctcttttgaggccctatttccatgagaaggaaattgaggcaaacccagaagttgacagcttagctgggaaccaaagatgatgatatacgggagcccatggaatctcatagctcgagcagcacttttggcaccaacctgcacccaaagagcatctttaaaagttgtcacatacttgctccgggcagctctttcacaccactaccatgctctgtgccagacatgactaattttttaaatctctgacactctcaattagtcatgagctaattctgtaagaatgttagagtaagcacactaaaattatattcttctgcaaagagaaagaagattacctgagaccacttgtcccccctcaaagaaggcaaggtctcagccaaaatctttgaagccttgtgacatcaatagattttctagggtggcatcatgtccttttgatttttctgtatatagtagttcaaatgccaccttctcctctcctttccattgccactgccctggntaggtcctcatcagtgccatcaactcttcaccagggctccctgccaccaatccaaacaaaaccaaacacttcttaaccctggg

SEQ ID NO: 330179 - DNA, 414 bp, Homo Sapiens
  misc_feature (195)..(334): n is a, c, g, or t
  misc_feature (354)..(354): n is a, c, g, or t
  misc_feature (379)..(379): n is a, c, g, or t
tggatgtacaaaaagaagatattttattgaggaagttgcaatgtttttacatacatgcacaatgcttacacaaattcagcttcgtgataatgcactttcatggagtcaaatttgcaaaaatgcataaaatgaattagaactttctaaacatctttatacaatttataccttcagtattaaaaatggactgaggannnnnnnnnnnnnnnnnnnnnnnnnnnnnnnnnnnnnnnnnnnnnnnnnnnnnnnnnnnnnnnnnnnnnnnnnnnnnnnnnnnnnnnnnnnnnnnnnnnnnnnnnnnnnnnnnnnnnnnnnnnnnnnnnnnnnnnnnnnnacttgagcccggggggcggnagggttgggagtgagctgaggattntacccactggcactccagcccggggttgacaaagt

SEQ ID NO: 330180 - DNA, 426 bp, Homo Sapiens
  misc_feature (19)..(19): n is a, c, g, or t
  misc_feature (24)..(24): n is a, c, g, or t
ccccgggtggccggccccnggaanctgcccccgggtggaagactgcccttgggtggtatgaggatagcctaaagagaaaaacagaacagtaaaaggcgcatgtagaggcggtgaataaaatgagacaaaaacacaacattcctaaaacagtacaagtgaccttttacctcaatgtcctaaacaaatcacagttaaaaacaggcagttaaaaaaattcaattaaagtagcaagcagttacaggctattaaacattaaaataactattagagagttcgtgggagtacaaatactaaataatgtgttaagaaagactagctaacatcatagaaatgtttagtttacaattattttcagttaaaaaaatacaaactctttgggggacatgtttccccagaaacctagacaactgagcctattcagcctta

SEQ ID NO: 330181 - DNA, 477 bp, Homo Sapiens
  misc_feature (39)..(39): n is a, c, g, or t
  misc_feature (64)..(64): n is a, c, g, or t
  misc_feature (82)..(82): n is a, c, g, or t
  misc_feature (93)..(93): n is a, c, g, or t
  misc_feature (111)..(111): n is a, c, g, or t
  misc_feature (130)..(130): n is a, c, g, or t
  misc_feature (148)..(148): n is a, c, g, or t
  misc_feature (159)..(159): n is a, c, g, or t
  misc_feature (214)..(214): n is a, c, g, or t
  misc_feature (336)..(336): n is a, c, g, or t
  misc_feature (345)..(345): n is a, c, g, or t
  misc_feature (425)..(425): n is a, c, g, or t
  misc_feature (460)..(460): n is a, c, g, or t
ggcccccactgctaatgggaagaaattctgtcttacaancctccaactgtttttgaagtagaancagcatatggggatggtnatgtttgggtnctgagttttcagagaagnccttataacatgtctaatnggcatcaacatcaaaganggtatgttgtncaccagagagaggaagagaataaccaaggatggctgaatggttagctgtcaatcnagacttgggcacggcgacaccaccactaccatctcatcaccataaaggaccactcagtacacaattatacaggatgacttgggggacgctgcccaaaaacctttgccctcagaaagaaaatnccaaatatncctggttagaatcacaatgattctctagaaagcttcccatagactaatggagggaaatagataccaggaaggcattgganaaatccaaatgtcattcagttggtgagtgaacagnctgtagcatattcatac

SEQ ID NO: 330182 - DNA, 358 bp, Homo Sapiens
  misc_feature (284)..(284): n is a, c, g, or t
  misc_feature (313)..(313): n is a, c, g, or t
atttttagatctgtttattttgttccaaactccttgaggatttaaatgtcccatgtcttgagctctgaaattttgttcgttctagatttaactgtggtgcataagaggctgcatcctactctaaatattaatactgtgctgcttttgccaatcaacattctctccaaaagcacacaagctcacatgtgcacaaccacatgtgtggaaggaagtaaattgatatcccaccatattatgtggacatctgaatggggcagatttgggacctatgaatgtcttccctncatctgggagagaagtggggcgactgccngattcttaaggagccatctggcatcttaaggcaacaaaagggggt

SEQ ID NO: 330183 - DNA, 569 bp, Homo Sapiens
  misc_feature (92)..(92): n is a, c, g, or t
  misc_feature (435)..(435): n is a, c, g, or t
  misc_feature (478)..(478): n is a, c, g, or t
  misc_feature (496)..(496): n is a, c, g, or t
atgagcacccgcccaaccaggtatgtattattcttcccagagcgttaacttttcatattgtggcctccttccaagcccttatacatcctggnagagatgacaggaacccagcagggaagccaaagaccctgggcaacattaaacatttttgcctccaaaaagaaaatttggaaaaggcccatagttaaatcccttgaccatgagcacatcaagaatattatcctcctaaaatcatcctgacctgtaatgttctaattggagaggcagaaataaagagtgaccagaagagataaaaagcaaacacgcccagcccaatgaacagagctgtccacggggaggagagaagagggctgctagagcatggagtgtttcagagggaggaggagacgggcacccccattgccagggatccccctgccaccatctgccaaccantcacacagcccacaccccagctgtcattgcacaccatgagttnttgccccagcaggaagtnattgctgccctgcacttgcctttcagtctaggggaggtttgactgtttcttattttacaggtgggggttggtt

SEQ ID NO: 330184 - DNA, 476 bp, Homo Sapiens
  misc_feature (342)..(342): n is a, c, g, or t
  misc_feature (368)..(368): n is a, c, g, or t
  misc_feature (409)..(409): n is a, c, g, or t
acatccagattctgaaataattttcctactgatgttcagctcacactatctgtacctttttagaagagaaaagaatcttgaattgtatatatttattttgctttacagaaaaaaatggtttcgtaaataatttgcctattttggttaacatagcacatggagataatcatctgaaagttatagggcactgccactgctgaatcagagcatgcccaatatttgaggtggctctgatttcctgggcagctgaactcgggtagtccagtggcctagctggtgaccacatctattcccatccagagacattctctgggcaagtgttctcagctggaaaagtggttnggggatgattcttaccttggtaattnaaattgaaggcttacacatttggggtaatctagtcaaattnaagtattttttccctcttgggcaacttgtgtcagagttactctgggtttgagtcaactttcgctttt

SEQ ID NO: 330185 - DNA, 581 bp, Homo Sapiens
  misc_feature (532)..(532): n is a, c, g, or t
tttgagctggagttttgctcttgttgccaggctcctgagcagctgggattacaggcatgcaccaccatgcctggctaactttgtattttcagtagggtttctccatgttggtcaggctgatcttgaactcctgacctcaggtgatccgcctgcctcagcctctgggattataggcgtgcacttgcgcccagcctccagttttcttttctttagagcagcggttttaaatccttttggcttcaagttctctgaaaatttactatgctctccacaacaagagctcccattttccacagacacagtcaatgtcagtcagcttgtattcagggaggacagggcagaggggatcccagtggcacttcccatgggaaggacagaagagagtggggccccagagatgggaaggaccccagtgtcatcaccaaacaaccatttcagccgttctagcctctaattcccgctttagaacagctggccctggtcgcagtacacaaggaaagagcccagaaccaagctcaagatacctattcanagatcccttgcagccagggtggcagttgagtgcagatttctgcgacccc

SEQ ID NO: 330186 - DNA, 198 bp, Homo Sapiens
  misc_feature (105)..(105): n is a, c, g, or t
  misc_feature (198)..(198): n is a, c, g, or t
atatttgggggaaattccatattgaaagtcctaactgtggctgtttggggtaaaaagtatttgctgcctttgaatccaaatttaagcattaaaagggcttgccancagtataatcatgttaaggagaaaagaatgttgtgcacacttgcattataagccaataagaaatagataacaaggcccaggctcaggtgtcan

SEQ ID NO: 330187 - DNA, 514 bp, Homo Sapiens
  misc_feature (13)..(13): n is a, c, g, or t
  misc_feature (21)..(21): n is a, c, g, or t
  misc_feature (99)..(99): n is a, c, g, or t
  misc_feature (107)..(107): n is a, c, g, or t
  misc_feature (114)..(114): n is a, c, g, or t
  misc_feature (119)..(119): n is a, c, g, or t
  misc_feature (439)..(439): n is a, c, g, or t
caaaaaaaccttncgcccgcntaaattaaacctcagctttaaaaggctggaacctgggcctccccgggttttaaattttgaacttctcccacttctcancccatgtnttgtaantgtantgtttgccttgaggagggacaaaatccaggcccagcattgagcctctttcccccgtgtgtcaactgagattgataattacaagattaaatgatgcttgtctgtgattttagcatctgttcagcccatcattcatttcaagagtattgactgggcttcagggtaggttccatgttagtactggggacgccgtgggtgggagggagactgggtctccaccctcctagagttatagtctaggcctgcggttaagcagatttttgtgcagggaatcaaacccactacactacctgtcagaaaccaagccctgttccaggcactngggaaacttcagaatttaaaggggatgtaccaggtctctgtccttgcggagcattatcgaccagagaaaagagag

SEQ ID NO: 330188 - DNA, 325 bp, Homo Sapiens
atcaaaaagctgttggcatttgctttaaagggtttcagttgttaaaaccaaagatcaattactgtgctttagtggtcaagtaaaaaggctgtttaagacattgacaatcccatgaagtctatttttaaaaagttgcctttgatattcctttgaacataaatttaaagaaaatttaatgcaaagataagttttatgaattattcttatattgctaatttaaaaattgtaagttaacattcagtacattttaactggattaagatttggctcagaactaaatacacctttttttcttattttgctactataagctgacacagtgaat

SEQ ID NO: 330189 - DNA, 178 bp, Homo Sapiens
agccgtcactgtacttttaaaaccttttttctgcctagcttcattttcttattctattgaaatagaatataaatggaataaatattctattgattattacaatgataagctgtcagttctttaggatcaatgacattgttatgtattggactttctttgtcacagtaggagttagtat

SEQ ID NO: 330190 - DNA, 400 bp, Homo Sapiens
atcggtgcaataaataagatgtccatttattaatctgcctgttttcaaaaaattatttagcaacatacagtgagttttctaatgtagaataatgtacagcatgagccaaagatgactgccacgcaccaaaggcaagaggcacggtgtgtcacagatgtgctctctggactgagtcttatctttcttcaaaagaaagacctggaaatagccctgaatgcattcactgttggtgggttttcttttgattttgagctcacttgccctgttttcttaaagacttattatggggacataaaaacaaacaaagtatcgagtttgggagaatccacatcagtgacattgagggctataaaaaaacataaaagactgtgtaagttcctattaaaaacgaagcatttga

SEQ ID NO: 330191 - DNA, 305 bp, Homo Sapiens
  misc_feature (159)..(159): n is a, c, g, or t
  misc_feature (229)..(237): n is a, c, g, or t
  misc_feature (255)..(255): n is a, c, g, or t
gagaatcagttaaaattactctaataactattcccagagagcatggggaattgggctttatattccaccaggtttgaaattaaatggcaataactgcaagtgtaccagggtctagaattaatgtggaaagaagtgtggtacttttacctgggggctttntacatggaacgcctcatgagcctccatacacagcaaaatcgtataggaaaaattcattcttcctatcccnnnnnnnnngaaatggagtctcacttnggtcatccaggctggagtgcaggggcacgattctcgggctcactgcaacc

SEQ ID NO: 330192 - DNA, 173 bp, Homo Sapiens
ccataagggcagatgggaaaaacacacatttcctcctctctagttttctttaggcttttatttattcaccattttgttttccttctcaatatttttgctcttgcataatagcagggcttgttgagcttttctgatttggactgtgtttctaaacactaaaatgagcaaagtga

SEQ ID NO: 330193 - DNA, 580 bp, Homo Sapiens
  misc_feature (47)..(47): n is a, c, g, or t
  misc_feature (61)..(61): n is a, c, g, or t
  misc_feature (66)..(66): n is a, c, g, or t
  misc_feature (79)..(134): n is a, c, g, or t
  misc_feature (199)..(240): n is a, c, g, or t
  misc_feature (406)..(406): n is a, c, g, or t
  misc_feature (455)..(455): n is a, c, g, or t
  misc_feature (559)..(559): n is a, c, g, or t
ctgaaattttcctattttttgtaaaagcctggggtttcaacccatgnctgccccggcctantcctncgaaattccccgnnnnnnnnnnnnnnnnnnnnnnnnnnnnnnnnnnnnnnnnnnnnnnnnnnnnnnnntattacagagctatcacagctggcttaaaaatcagtcctttttactgtaatgagttaatttggtnnnnnnnnnnnnnnnnnnnnnnnnnnnnnnnnnnnnnnnnnncttttgcctgaaagttttcaccagtttcattattatccttgtaatggaagccattagaaacaaatccaactagaagggagaggatgattcatcattaaggaatcaaaaatagtggaagaaaacggtagaggggagggtgcaggctatcaaggtagacagaccaganttgaagtttctgggctttgctgcttacttccaccttgggattccagggnctcctttgggcaaaccagtgtacccatctactgtacagggctaatatgaggggtcaaatgagggcagtatggaagggtacagtgacaaccatatggggaagcanccaatagagtagggtacttcc

SEQ ID NO: 330194 - DNA, 164 bp, Homo Sapiens
ctctttgagtatctttttaatgacttaaacaccagcacggagactcgccatgtaaacggcctcatttctgtgctctgtgctttgggagggacagggacaccatttcccacctcggctgagttaaaacctgtcttgtaaattaataaataatttcctaacacggc

SEQ ID NO: 330195 - DNA, 310 bp, Homo Sapiens
  misc_feature (223)..(223): n is a, c, g, or t
  misc_feature (235)..(235): n is a, c, g, or t
  misc_feature (256)..(256): n is a, c, g, or t
  misc_feature (295)..(295): n is a, c, g, or t
atattaattatcatcagaatgagagcaaaataaatcaccactagtagaaaaacatcaatgatgacataaaacatatctcattttacttgcagaacatccaaatgctgggtgtattctgagccgtctcaccatccaccagattctttagtgtagattccagtttaaccacattcaaactgaaagtattgataaagaccagcaaatagggataaagtttaaaggngggaagggtcantacattgggtttcatattccnactgtatctcaccctggaccatgtgatccccagggtttncacttaatcttccta

SEQ ID NO: 330196 - DNA, 382 bp, Homo Sapiens
tacagtgatttatttttattgaaaatacaaagtaatattaaagaaaagatttaaataaataaagtcattccatatcccgctacactaacacaatgaatttgttttgcagattaccttccacatgcataaagattttacaaagtcacaatcatagtatgcatactattttgtattgtgctcattttacttaccatatcaaacatgtccacgtttctacagtcttccaaataattattttaatggcagtataatacttcactatttttcttatcccactttcttgacatggagtttttttccccaatttttgttattataaagaatggcagacataaatgtcttcatgcatttatcttttttctggaattatttttaagggtaa

SEQ ID NO: 330197 - DNA, 950 bp, Homo Sapiens
  misc_feature (880)..(880): n is a, c, g, or t
  misc_feature (882)..(882): n is a, c, g, or t
ttttagagatttcccttttatacatattgcaacaagttctccataaaacattcatctgaaataaattaaaaagtccttttgccactgcctccaaacataaaaaggagcctgtgccctagccccagcccgggccacccatggccttgattgtccatggaagaaagttaaggattgaggggcccacagcctgagatgagagggccagatccttcctctgaagtctccaacaagaaaggcgaggtgacggcatgagcctgggagatggcagccaactccttgagaaattcagggaaaatgactgcacagtagacagcattcttgactcgaagagcctcaccttgggcgttcaggggccccgccgcggatgagtagaactggagttgaagccccaggggagcccccacttaggccaagtcctgctccgtctcgcccaggctgaaggaccaattgtgccgcctgccgggccctggttggactgtgtgcatgccgcaggagtaactcccccaaggaattctccggctcttcactaggggatcagaacggcgtggggcaggtcctgctgcaggccctcagcccagtccaaacttccacgggcaatgaggtacttcttggcttttggacagcagtgctgggaagtcctcctgggaagccgcaaagttctcaatcttattcttcacagagcccagcacctgcagcagggacttgacactgggctggaagaccatgttggtgttgagcaggaaagagcggagcaggggctgggggtgacaggccagctggccaccagccccgtcagcaggaagttgacatagacggagttctgcagcatgttctcgagtttggcaaagagcacagccatgaaggggccagtgaagggctngnttggcagctggttgagagtccgcaaatgggctgctgaggaaggggccagggggctcagggggacaggt

SEQ ID NO: 330198 - DNA, 407 bp, Homo Sapiens
  misc_feature (301)..(301): n is a, c, g, or t
cttgactccttttgaagtcttattcataaaatgttttctaagaccaatgtctggaagtgtttcccttatgttttcttctagttccatatctgagttttaggtctttaaaccattataattagatttttataaagggtaagaggtgagagtctagttccattcttctgcatatagatattcagtttttacagccccatttattgaaaagattgtcctttcctcagtagatgttcttgaggcctttgtcaaaagtcagttggctatagatatgtgaattaatttataggttctctattctgtnccactggcctctgtgtctgtttttatgccagtatcatgcggtttgggtgactacagcattgtagtatattttgaagtctgggtagtgtggatgtcttcagctttgt

SEQ ID NO: 330199 - DNA, 460 bp, Homo Sapiens
  misc_feature (405)..(405): n is a, c, g, or t
  misc_feature (446)..(446): n is a, c, g, or t
attcggcacagagccacacaaagctctgtcatgtatggagtgatgtgattagatccagttcatgcggtaacctcaccatcttaaagtcatataactggcatataacaacatagtcacaggaatggtgtctcatcaccttaagaggctttagagacaagggtgtggcatgtttggggaccatttcagaaattccatttaccacagtaggacactcacattcccccatctgcaaagtgcatttaccctctcccctgaggtttccagatttcatgtcattaaagcattagttcaacatgaaaaatgtcatgtagaccacatcagattcaaaagtttaaaatcccatctaaaaacatccacaccagggtgtggaatggagggcttccgaggagtgttccatttaagtgncagattccttggacataatttccctttaccttttgttcganctgtggaaactgga

SEQ ID NO: 330200 - DNA, 460 bp, Homo Sapiens
  misc_feature (21)..(21): n is a, c, g, or t
  misc_feature (39)..(39): n is a, c, g, or t
  misc_feature (65)..(65): n is a, c, g, or t
aacttcaatttaactttggcnaaggaacccgcaatgttncgcttttcctcaattaaaacgagggnctttccaaggaatgtgttaaaagtacgtgaagagacgggcctggtgcccggctggtcctgttttcttaaggcggaagttggggaaccgcgtcagcactccggggttcggattccctggaacctggggcagagtctgaaataaagcagcaccggccctgtgtggcgcggacccatgggaagccttgaaaggaaagtctcttcagaaagaaacaatgggttcagtgacttgtacactgaaaagatagatggccagttttaaagttctcctgcgtttaaacacgggcagcagcggggttgacggtacaggcaccaagttctgacataaaagtctttccttaaatcatgtaaaaaaaccgagacgtgcgcactgccaacttacactacctgtgccgaat

SEQ ID NO: 330201 - DNA, 564 bp, Homo Sapiens
  misc_feature (15)..(15): n is a, c, g, or t
  misc_feature (29)..(29): n is a, c, g, or t
  misc_feature (64)..(64): n is a, c, g, or t
tgcatgagatatttnctcacttgttttgnaccctccttcaatttctttcataaagtgttttgtnagttttcattgtagaggtcttttgcttcctttttggaagtatctcccacaagatactgcttggaggcctgcttctcagcctgggatatgggcacagggataattggctgactcgagggctttcccaccagggttggcctgcagactatttctcagtcctggcatgtgagcgcagagctgttcagatagccaaggagcatgtctgtcaggggcagcacacaggtctgttatcgcaggctctaattgtggatacaaagctgttgggcgggactggggcttgtctgtagtgggtggggcactgtgcggctgtttctcaggacctgggtgtgggcacatagctgctccttcaacccagaagcatgttggctgcttggagatatgagggcttctcccgcttggggaagggcattcaccagtttggctggctcgagggtgagttcaccctgggcaggactgttcctctggttctaagtgaggacagtaggagttgccttccttgct

SEQ ID NO: 330202 - DNA, 427 bp, Homo Sapiens
  misc_feature (13)..(13): n is a, c, g, or t
  misc_feature (30)..(30): n is a, c, g, or t
  misc_feature (37)..(37): n is a, c, g, or t
  misc_feature (44)..(44): n is a, c, g, or t
  misc_feature (55)..(55): n is a, c, g, or t
  misc_feature (65)..(65): n is a, c, g, or t
  misc_feature (338)..(338): n is a, c, g, or t
gtttccatccagnaaacctatgttaaaganaggggcncaaacanaaatatatttnccgtgtgtanttttgggaaagatttttgttccaaagcaatagtccaaaatcagatgaccctgtcccataataattatgtgtccttcatccttcctcagaggcccccatgcctcatatgcacgtgtcattgggatacactcttgggggatttggtacactctaatggatgtctaatgttcaacccctcgagaatctgaacttgagtccccagattgtcaaactactggtcagctattgagaattttagaactcaggtctttgatttgaagtagggaacatagtngtctcacacagagtttaggtgctgttagaaagatgggaacaagaggttttttgccaccttatttttatatgggaaattttttttaatga

SEQ ID NO: 330203 - DNA, 573 bp, Homo Sapiens
  misc_feature (20)..(20): n is a, c, g, or t
  misc_feature (299)..(299): n is a, c, g, or t
  misc_feature (449)..(449): n is a, c, g, or t
ggataaccctggttatatgnacaaactaagaatgcccaaatgtgtcccagctcaattctgaagaggaattaaatatacttaaaaggtcccatttcataaatgagattcccaatggccacaattttagagtctaatctggcttcttatatttcaatctgctactcttaaaccaacaaacagtagttacacagttttgattggtgccaaaactaaacaaatcccaggaaggttcattcatataagaatcttcaacacaaattctgcctttatttacaaaatggtctgataaaatatcgccnccccccatacttacaggtctcttccacaacacacttcacacgttgattttagcaatattaatagcaccattcgtatattatttaaaatcaagaagatttcatttcagttactatgttgattcatcatcatttacatccatggatgagatnagtgagtatactgggactatctgctgctccatggtaaggattcctgggtccagcacaaaaggctttgcagttaccagttatgaaaggtatctatggtaagtagatactatgagaattttcgtgc

SEQ ID NO: 330204 - DNA, 646 bp, Homo Sapiens
  misc_feature (14)..(14): n is a, c, g, or t
  misc_feature (481)..(481): n is a, c, g, or t
  misc_feature (515)..(515): n is a, c, g, or t
  misc_feature (558)..(558): n is a, c, g, or t
aaaccctccagttntctcacctgtaagcagctcttttagctgaaacctctcttctccacatccatctcgagacagcggttccagaaagtccccggaagatagctgacagcttctctgggttctgaagttctggggtcccattggtggcaatgaggtacaaggctctcagagggttttcattgaggtatggaggctccccttcaatcatttcgatggccatgatgcccagggaccagatgtcaaccttggcccataggcctttcgtgtcacaacctctggtgcccatcccagtatggggttccctacccatggtgctccgtttgctctgctctggggttatctgtgcacagaatccaaagtcagttagcttgacagagccatccattcccaacagaatattgtcactcttgatgtctctgtgaatgacctggttcgaatgcaagaactccagagcctgcagacactcacggcacacagctgnaatttggccttcatccatgcaagtttctgtcacnacatctgtcaaggagcctccagccaagtattccataacaaccnacagctcatctcccacgaggtaactgtccaagtaattcacaatgtttgggttcttgttttccctcatgaccaggatctcattaataat

SEQ ID NO: 330205 - DNA, 1103 bp, Homo Sapiens
  misc_feature (342)..(342): n is a, c, g, or t
  misc_feature (454)..(454): n is a, c, g, or t
ctctctctcctctaagaaaatgttgcaggaagtttggatcctcttggtttccagcaaaacaagagaataaaacttccatgcaacccgatggcaatacgaaaaaggagttcatattgtttgcagtgacacaagaatctacaaaacacctatattataggtcattcttttcattatactatagttaagttacagactgctacaaaaggacatgccagcgtgaagaggttgaggaaggggtcagaatgaacagaagagtgcacttattctgaggcctgaaaatgagcactgcagttatcctttagttccagcggaatgaaatatgccgagggggttcaccctttnccttcaccaggggcttgtgggaattccctgccagcacgagattgggtagcagcccagcaatatttcacagtaatattgcagacaggtaacattagcacagaaaaatggagcnaaatttccccccacaacgggccccctgacattcatcacacagctgatcatccaagacatatggcttaacttccacccgtttatctatctctccatgctgcagctgtacaaagcgggcactgatagcagctatgtaactctgttgattagagaacgcaactctcccagctccttttgggtattttagctcagggtcggtatcaatcccagcgtaacacacacctccatatagccgatccattatcagtgcaagctccacagctcgtaatggtcgaggaacaccaccaacaaatatagtttttcgtgggtcaagtggctgtgaaccatccatcacaaagtcactgtcactgagattccaaggccgaatctggactggcttatccttgatagtgggacttgatacacaaaggtagagttttccatcttcttcaatgcatgcatcaatgagagcctgcacagagctttcatcttgaaacagcaggaatgcatagcctttaggaggaaaataggatttgctctcagctttatgaggccaatccacaatcagagggccaaagcgacgaaaactagctgtgatctcatcttcatcaatgtctggagcaatccgcctacaaacacctttcgagaatatcgttccacctgtgccgaat

SEQ ID NO: 330206 - DNA, 435 bp, Homo Sapiens
  misc_feature (72)..(72): n is a, c, g, or t
cgtcctttttaatttccaaagaagttttatttccccacttgtaatagcattccacatgcctttcctttacgnaccctcattgtcctatttgagaatggttttcctgagagtgagtttaccattagtagccaagagttgtttgaccctgatgttcccattgtttttacccattccctgtagaaaaagggtgccacaacagaaaaatgaaaatgatgtgtcatggccgtaaaagtatagaaatctttaaaaattttaaaatgtacagtcccttatctatctttcccattccttgccactgatttttgaggaatataataaaaagattggaagagtataatgccatgagaaagaatgatttaggactgtgagggttataacatgccctaggtcagcaaccaagggttgaaatcagttctgttttagggggaaatgggg

SEQ ID NO: 330207 - DNA, 444 bp, Homo Sapiens
ataattttccctaattctgtaattggtattccggttgctcgtgggagccggaagtctggaattcagataactaaggtgtttctgtagttgtctgaattgttaggcatttgtaaaatataaaacagaaacttgttcaagcacaaccacatgctccaaacctaaatatgccagagagattttcgcaatagtcatctcttgtgttaagagtcactccattacaggaaaaagattcagaacgatttccatacaagaatcctcgtttttgtagggaagtttcccaagagccagggccagctgtgctccattattaggttaatgcttgatttgtaccttatttttatttttcatttctgaatttgaaataaaagttatggtaacctaaattaaggacttgggcatagcttgcagtccaattcccacccccatatggaggatgcaagggtt

SEQ ID NO: 330208 - DNA, 258 bp, Homo Sapiens
  misc_feature (84)..(84): n is a, c, g, or t
  misc_feature (91)..(91): n is a, c, g, or t
  misc_feature (98)..(127): n is a, c, g, or t
  misc_feature (211)..(211): n is a, c, g, or t
agccaaatgtggtttcatcaagtgggaagaaagcagcaatttaaaataacttttgggagactgaattgggtaataataaaactncagtctntcgcgcnnnnnnnnnnnnnnnnnnnnnnnnnnnnnncaacttattgaatgtggccagctcactagatgaggaaagaggaaggcattttctgcattcttgcctagttttccttataagcanccactaagttaatagctctgtctttttggtgtttgcactatgtaatg

SEQ ID NO: 330209 - DNA, 512 bp, Homo Sapiens
  misc_feature (433)..(433): n is a, c, g, or t
  misc_feature (449)..(449): n is a, c, g, or t
  misc_feature (474)..(474): n is a, c, g, or t
  misc_feature (498)..(498): n is a, c, g, or t
cgaagtacatgcccaaagcgattgtattgctcatttccctccagcttctagttctaaaatgatcaaggggtagaaggaaggttggaaattattaggaaaaataaggtaaaccactcagggttttggaatgcctaactgttgacaactttgtcagtctacctggaggctctttagacaactgagattcaggtgctgtcttgagcacagccaccaaatccagcagtgctaagggtcattttctgccagggtaagtgggcctagcctccttggccttgccactgaggggcagctgctgcaggattctcaccacagagttccagaggggggtctgcagacctcccatcccatggttttctgctgtacctgggacagggacttccccaagccatggtcgggtcatgaagggagctcacagttttttgagaaaggaaanttctttaacaggttcncgggtttccaacatttttttgcccntttgcagttcaagcacattttggnggggttttacaaag

SEQ ID NO: 330210 - DNA, 531 bp, Homo Sapiens
  misc_feature (480)..(480): n is a, c, g, or t
attggacatttagtgtaatttttaagaatgaatgtaaatactctacactagagccctggaaatagttctgctacaatacaacatgacatacgcattctaaaaattaccacattaagcagaactgcacaatgaaaccacaggtctcacggggaaaatttggttaagggcacaatattctaaaactttgtcagtgacacatctgaaaaaaggaactgaataaaaatgatatagttttataaatgttaaatggttaagaaatacataactactatggtaaatttggcattttatttgaaaaagtcttcaaattaccttgtggaaatgggtttggagagttaggcttttgagcagttgagaagcagtgggaggaaggttatctggaattggatggaaagttggtaacatcaaatgtgtttggtgtgactcagtgcacttgttgagctgagctgtgtgcattttttgtgtattaccacgaagctncaattccagcttggtgccagtttttctacccgggtgtttcctcagttagga

SEQ ID NO: 330211 - DNA, 459 bp, Homo Sapiens
  misc_feature (409)..(409): n is a, c, g, or t
  misc_feature (431)..(431): n is a, c, g, or t
tccatcaaaaacatgatttattaattttaagcaagagtaagcatatgtgatagtggccagcttggggatagaactcttcctggttgatgcacagttcagcacctgttgggtcttggctgttgggatgataattcttttgggtgaggggaacagccgtggtcaaggctgcctgcacccccatccaggcacaggaccctgggcaaagtctcaaaagaggtagtgtttttactttcgcaccaacaatacaacataagtattgggtacaaaagaggagatttccttcccctctacctcaacgggcaaaaggccttccatcttcagaagaggcttgtgaggaccatcggttgatgacctcctagtgaattctggctcccattcagagcacagagaaacccacaaaaggggcccntggtctggtttccccgttgccnatttttgggctcgaggggcaaatttccc

SEQ ID NO: 330212 - DNA, 447 bp, Homo Sapiens
  misc_feature (50)..(50): n is a, c, g, or t
  misc_feature (63)..(63): n is a, c, g, or t
gcaccccacccccactccaacccgtttaaaactaaatggacaactgtcantttattaacaacngtccagaagttggccataatatgaaaagtcaaaatggaaaagtgcttatgcctaaagtgatacgagcccccagtttaatattcatcatacctttgaggtatgtgtttcactgtgtatttctgattttgaggggttttaaatctatactaatctcctaaatcttgacagcataactaccatttttatttccatatttctaattaagctgggtttttgtagggtgtgaaaggaagggttttgaggtgaccttatgtgtcagaaaaatcacatagtgattctagaaaaacttccttttgaagcagctgtgttctccttgaagggattctttgagcgccaggcatgtttaattcacttctgggtttttgtgtgcatgtagctgggtta

SEQ ID NO: 330213 - DNA, 439 bp, Homo Sapiens
  misc_feature (13)..(13): n is a, c, g, or t
ggacagggtcacnccaaattggcctcagaaaaaaacccctttaaaatattttcacagaatttgaaccctttttgttgaataattttaaaatcactgttttgggctgtacttccccttttaaaacaatttttggctcaaggaagtcagtttgtgggctgcccttcttttaaaggacaagcctcagtcttcaaaatgtgcctaactactcgattactcagctaatttggataaaaatatttcccagaatattcacatttgggagccaaagggattcagaaaatagtttcaagcatccatccgctttttacaagaaagcccgaatctgggcacagtggtgggtgcccatggtctcagctactgaggagctaagacagaagcataccttgagcccaggaattcaaatcctgtctgggcaacatagtgagactctatctcttta

SEQ ID NO: 330214 - DNA, 465 bp, Homo Sapiens
  misc_feature (104)..(362): n is a, c, g, or t
  misc_feature (381)..(381): n is a, c, g, or t
  misc_feature (431)..(431): n is a, c, g, or t
aaaaaaaggaagtgaaaggacatgcatgcccggccacagtcagcaagaattctctcttttacattctgggcagaggctctcagtgttcacaactcaacgttttnnnnnnnnnnnnnnnnnnnnnnnnnnnnnnnnnnnnnnnnnnnnnnnnnnnnnnnnnnnnnnnnnnnnnnnnnnnnnnnnnnnnnnnnnnnnnnnnnnnnnnnnnnnnnnnnnnnnnnnnnnnnnnnnnnnnnnnnnnnnnnnnnnnnnnnnnnnnnnnnnnnnnnnnnnnnnnnnnnnnnnnnnnnnnnnnnnnnnnnnnnnnnnnnnnnnnnnnnnnnnnnnnnnnnnnnnnnnnnnnnnnnnnnnnnnnnnnnnnntgcaacccagacatttccnttctattgatcccggggctttagggtaaactcaaccattgtcaaccaggnaatttaaaacggaccctaaccgggggggtccccg

SEQ ID NO: 330215 - DNA, 412 bp, Homo Sapiens
  misc_feature (38)..(38): n is a, c, g, or t
ggggtaaacaaaaaggccacaaagtcctgaaatgtgtntccctttttttgggaaatggcccatgccctgcccccactttagaaatacaaatatccactgggccagcttgaagcagttgggagccctcccaatgagagcaacttgagagaatgatgttgcaagttagtaggagtaagaaatgctgtgttctccctgtcttctcttaggtcacatggcagcctggcctaagtgatcgtgaatggtctataagggaggtagctgggacagggaggggagtttgggctagccaccgtaccacttgtcagcgtgaaaagtaagattgtaattgcctgtttagttttctgcctcatctttgaaagttccaccaagctgggaacctcttgattgtgatgcacaaatgtaagtacatcaa

SEQ ID NO: 330216 - DNA, 377 bp, Homo Sapiens
  misc_feature (356)..(356): n is a, c, g, or t
  misc_feature (363)..(363): n is a, c, g, or t
ttttttaaagaagttcgaaatgtttaatatttcatgcagttaacatgcttcaaagctttaagtctgaagttttagacttatcccaaatccttgctaagaagtcaagaccactatggaattcacactgctttctatagacttccactgacttgcagctaatggtccttacacagcaaagttgggatttctagacgtctccttccaggttcggaaaagcctcactaggcaagtggcaagactgtgaaggacaatgaagggttcaggaattcagtcaaatggggaaacaagatcagggaaacaaggatccaagggacttcatctgtcccgcctggggggaccacttttagggttttttnaaggggngacgggccacccac

SEQ ID NO: 330217 - DNA, 495 bp, Homo Sapiens
ttttctccctctctattcagctgtctccatcccccttttccgcctctctctctgcctttttgggaggcagccctgcagacatggttaaaactcgggcccagcctgactgtggttcccagctccagccctagtcagcttaacttctttgcattatggggcagaagtgggagcttctcccttccttccatcttcctctcttagatcagctggttaagagtccagcctgggtttggctcccagctccagcactagtcaacttaacttctttgcattgttgggcagaagagggggcgtctcctttccttccttcttcctctcttagaccagcttcccttcccttctggggctgccacagcacccggtcagcagaatccttgcctaattcctcttccttctgcaaaccacagggtccccctcatcagaaagaagtccttgaggcgcaccctgtccgagcgtggcctgctgaatgacttcctgaagaagcacaacctcaac

SEQ ID NO: 330218 - DNA, 363 bp, Homo Sapiens
tctgctccaagggcctgccatggatacatacagccagagttacaaaatgtgcatgctgtatttaatttccagcaaatgcatttccttgaattcctactcactgtctcttaaattcaaaataacgtatttaatgtagaaatttggcaaaaaatcaggtaataaaaggattaaaaaataaagacaatattatcagacacagatattgatgttatatttgtattttgtataagcaagaacaattcagaagatctgtattactgacatacctatctacacagtattatcacagcaaccacaaattttaactaagacacataattaatacttcatactccaaagagtattcaagagacttcttataga

SEQ ID NO: 330219 - DNA, 335 bp, Homo Sapiens
  misc_feature (256)..(256): n is a, c, g, or t
tttaacctatccaacaaaatttcaaaaaaggcggcccatacaactagcaaagtcagctatacttcctacgttactatacaactctcccaagtagttttgggagctttgttacatctaaagaagagataccagggagagaagagtgctcagcacattgaactgttatcttggggtaagtcatttactctcccctcctcttcagtttatactgttccaaagatacataatcttatatttagttcctgtatatttgggnagaataatcaaatgaaacatttttcatagatttcaaagccttttcttatttttaaagtattttagaacttttctctgaa

SEQ ID NO: 330220 - DNA, 492 bp, Homo Sapiens
aaccccaaacatttccgccagggtttccttttaaaaggaatggtaaaactcaaactgttccacaatccatgtcaaaacccaaactaccctgaatgcccacggacccttgaatgaatgaacctcagggatggttagcacggtggacttttgcttggccagaacatccctggtctcattgatgcgagctgtgacaaagaagtgcagggacgcttgttccagcagctgacccatgtactcgccggcttggatcagcaccgcctctttcttgaaggacaagggctccagcgtcacgtcgaacgtctccttcttgaattctgccttcgggaccccggtgtagaaggtgatgttggctgagagataagctgtgatggtgtaacggttgtggctgttgttccggaaggtgatggagagcttgaagtcttttcccagcacagcattttccacttcaaagtccatgtcaacgttggaccttgatttcatgacaccttctgt

SEQ ID NO: 330221 - DNA, 490 bp, Homo Sapiens
  misc_feature (47)..(47): n is a, c, g, or t
  misc_feature (89)..(89): n is a, c, g, or t
  misc_feature (455)..(455): n is a, c, g, or t
aaaaccctccgaaaatgtctgggttaccccctggatggcccctgganttaacaagacccaatgaaagaagatgttcccgtgaaaatccnggccccaactcccaccgtgcaagtgggaagaagtgtgccggcccctgggtctctgggcatcggaagctgatagcccagcatgagcagtgactccctgagacatgtgtatggcgagctggacgtgcagattcaaagacgaccttccatgtgaatgcacaggaagctgagatgaaccctggcatttggcctcttgtagtcttggctaaggaaattctaacgcaaaaatagctcttgctttgacttaggtgtgaagacccagacaggactgcagagggccccagagtggagatcccacatatttcaaaaacatgcttttccaaacccaggctattcggcaaggaagttagtttttaatctctccacctnctaatgaagtgctaagcattagcctttaattaaag

SEQ ID NO: 330222 - DNA, 367 bp, Homo Sapiens
  misc_feature (70)..(70): n is a, c, g, or t
gcttggggattaccaggcgtgagcccactgtgcccagcccagggatggtatctttttaaggcagaaaacnttaatagcttttgttccatgaccttaaaaaaaatacccatgagaatcattttaccaagtaatttactttatacaaataattagaaattatgctatcactaaaacatagtttaaatatttttgaaaataacttagtgttgtcataaaatagaattggaaaaggcgggtaaatcaacataattggtaactggcaaaagtttcaagcattctgcctaagaactggagcaagacaaggatgcccgttcttaccactcctattcaatttagtactggaagtcttaaccagagcaatcaggtt

SEQ ID NO: 330223 - DNA, 385 bp, Homo Sapiens
  misc_feature (205)..(205): n is a, c, g, or t
  misc_feature (256)..(256): n is a, c, g, or t
  misc_feature (263)..(263): n is a, c, g, or t
  misc_feature (296)..(296): n is a, c, g, or t
  misc_feature (337)..(337): n is a, c, g, or t
  misc_feature (368)..(368): n is a, c, g, or t
ttccaattgaatatattgcttgatttatttccacaatctttgatacatgtattgtatatccaaacatcaaaaaccataagcagcctgtataatgccttttttattctctgtaaagtttttaatataaatatataaaagagcatcttaaattatttaaataagtcaattattttatatgtggatttggtattagaacatatatctncttttgcacaataaacttttttaagtgtcagaaattatataattatatagngactttngttcacaaggtagttagttgtacgtacctacangatacttgaaaaatatttttgtcgagattgggatgcatttntctcttataggactcttaaaaatgttaacangccaacacatgaacgta

SEQ ID NO: 330224 - DNA, 448 bp, Homo Sapiens
  misc_feature (18)..(18): n is a, c, g, or t
aaggatatatccaaatcncccaaccctccctaccctatgtggaataagatcatttagttaagccagtatctctttttagaacattagaaaataatgactaaatgttgaatataacccctaactaatcattcgcagtttgttagagctttcaagttcttaggtgaaaattcctgtgtctgggatgttggctttctggcttagaagtgctgaaggcccattaatgtatcagacgtcaagttctccttgacacaggtgtaggagccaaccaacacgtctggacttgggttttattaaggccactacttaataatgcagagagaagaaaatgttgcaaaattcaggtaataaagagttaaacgaacaactgtgtgaactgtgaacagtcacacaaggcatatgcagactggccaaaattcctatgtacctttgcactgaatatctttattta

SEQ ID NO: 330225 - DNA, 420 bp, Homo Sapiens
tgggggaggatgactggagtctggagtatcctatcctacatggcctgggaatgtttgttctcatgctctgcctggcagttaattgttcacaagtgtccccataagtaactgtcgagaagattctcacaggagaccacgtgggttgcctgaagaagccagagtgaaggagggttgaaatcaacgcctttagagtcttaggaataaaagttaaaaagccccagagaaatgttgtcctttgtccaccagcttctggatcatctcggcgtgggtgttgtggaagggcagcccatccacctccatgcccacgatgcccgagacgccactccggactttgtgctgcaccaagatgcccagcattttttcttccttaatgaccgacgggagggcctgagtccaggcctgatctccaggtgccctgag

SEQ ID NO: 330226 - DNA, 420 bp, Homo Sapiens
tgggggaggatgactggagtctggagtatcctatcctacatggcctgggaatgtttgttctcatgctctgcctggcagttaattgttcacaagtgtccccataagtaactgtcgagaagattctcacaggagaccacgtgggttgcctgaagaagccagagtgaaggagggttgaaatcaacgcctttagagtcttaggaataaaagttaaaaagccccagagaaatgttgtcctttgtccacggcacctgcactaacccctcccagaaagtgggcatgcagtttcccagggccagggcgagttttccttggctcaccgaagaccagtttttactagcagggttttcgccagaagcagctgaattctccccggatgcagacctgcccgttggtagggactctgctcacacggaacatgga

SEQ ID NO: 330227 - DNA, 111 bp, Homo Sapiens
acagatttgttagatttttaataagaacatggaaatcccaatcagcccttcaacaaaattaaaatacagaaagtgaaattaaaagtattctacattaaatgacttttattt

SEQ ID NO: 330228 - DNA, 417 bp, Homo Sapiens
  misc_feature (259)..(305): n is a, c, g, or t
  misc_feature (335)..(353): n is a, c, g, or t
tctataagcttgaaatagtcatgtgatacttcgacaaacatccatatgccttgcagtttttctcggtcgtgttcctcagggttgaagtagtcccccttagctaccctaactttactttcaatacaaagcacaaaaaagaatacttcaaataaaagtttgcctgcagaaccttggcaaaatgacccattatgagagtttagatgttttaattttatgtgctccccagctactctggagtctgaggtgggaggatcacttnnnnnnnnnnnnnnnnnnnnnnnnnnnnnnnnnnnnnnnnnnnnnnncatgtgacagaggaatgagagccagtctcnnnnnnnnnnnnnnnnnnnctcccataatttattttgtttcttttccccatcctgaaaattccaaaatcatgtttcgcttatg

SEQ ID NO: 330229 - DNA, 264 bp, Homo Sapiens
tagatattgaatatatacaatttatttaataaattaatgtcattcaaaatacagtgccagaacatggtgcagttgaacatgctagtaatgtttgtcatgaagcacctgtgctcatgttagattggcggcgcccactactgctagtggttcctgggattaatgccagagcagcgctagttatctgctcttctgcacagctagtgcagagaattcctgaacagttcaccttactaatcctaacccccacacgcacacaacagggtt

SEQ ID NO: 330230 - DNA, 453 bp, Homo Sapiens
  misc_feature (350)..(350): n is a, c, g, or t
  misc_feature (375)..(375): n is a, c, g, or t
  misc_feature (388)..(388): n is a, c, g, or t
  misc_feature (407)..(407): n is a, c, g, or t
  misc_feature (421)..(421): n is a, c, g, or t
gtacctttttgtcatgctttgagtggaaataaaaactcacaaactggttttttaatagtgactacaaggatttctattgaaagtccatttgttgagatttaagtcctgagagcatataagacttaaaagattgaatgcgatatgaaaattcagagctaatactctttcctttccattgactcgaagatggagagtttcaaataaatatgggaggctcacacagtcaatgacctgggcagaacagcatctgctttttgggggcagctgggatatttaaagatttaataagggattaaatatttaaaggattctaataaaactcatgttgatattgggaggattgtaaaccnttccccaagtaacctgctgaagggngggtaattaaacnctggtggggccaagtaggnctccccgaccatgnggtcccccgggccccaacccccgtgtcttccc

SEQ ID NO: 330231 - DNA, 185 bp, Homo Sapiens
ggtaaagtagtgcccttatttgggatgaaacccactaccttctgtccagaaactcaaaaggaatccattgcctggccatggtaaccctaaagaaaaacaacccagacaagtgccccaacgacacttaaaaaggtgatttattatcttgcccaagtttaggctgggcatggtgactcatgccctct

SEQ ID NO: 330232 - DNA, 383 bp, Homo Sapiens
  misc_feature (208)..(208): n is a, c, g, or t
  misc_feature (328)..(328): n is a, c, g, or t
  misc_feature (342)..(342): n is a, c, g, or t
gttctaaggtaaaatcgtaggacaaaactgaaagtttgacggaattgtagatttgtagcagattgattttacaaaagaaatattgtctgtgaccaagtgggctgaaatttaaagggtattattcagtctttctataaattgaacattaaaaaacacatttatgcaagcccagggatctggacatcattttttcagagaatttatctgncttctcagtagaaaatagtaaaaggttaacaaggcatttcttaaatccgtaccttatgattaaactgattgatatttgatgaattcatttataaaattttattaaaattggctttaggtnttaataccctgccntgcaaagggtaaaggttggggtttccctttttggacccggg

SEQ ID NO: 330233 - DNA, 536 bp, Homo Sapiens
ttgcaatttatatataatagagaagactagaaaatcccccatatttatttcctcttacttcgtactactaaaatttgtatttaggcatttggtttctcagataaacattacattccccagtatatggttctatctggcttggtgacgacatgttgaacattaagatgtgagcagaagtaatacatacacactctttttaatgtctttaattgaatgggatattggcccattttttcttccagtttattacactgaatattgacatgttattttccaatattgagacaatcaatgacaagactttaagagtaacaatgtaaaaattatagaagttgtctgagtttatcaacaatcccctgggattagaaccccctaccagttctaggtcatctaatatatagacattgtgttcagtagaaataaatatatatatttttttaatatactttaagttctagggtacatgtgcacaacatgcaggtttgtttacattgggtatacacgtgccctgttggtttgctgcaccctttaacttt

SEQ ID NO: 330234 - DNA, 452 bp, Homo Sapiens
cgtgagccaccaagcccggccggcagtggtggtttaaaaagcatcccagtaagggcacttatatgcagcaaggatttctcctgctgcttatcatgctatctgtctcactgagatagatagacagtagagaaggaagagaaatatacatagaaccacaatggttggtagctttgatgggattaaaaaaatagattctaaaatagtaaaacataaaatgaatagcagatcttggcaacagagaggaaaaccagtgacatttgtcaaagatagaaaactttttggaggggaggcatttaaatattaactgaaagcataccaatctctacagcttaagtttttgggaggaaggggagacacagactacattcaatcaagccagatctttttgcccttgtcttgcatcatccatgtctatatccctgtataataatcatgaaagtaagccagaaggt

SEQ ID NO: 330235 - DNA, 369 bp, Homo Sapiens
gagagagtagggaaacggctggactttcttggagtcactgtgcttcccaccaactttgatgtggagacccccaagcctttccaaggtaatatatctctgggaaatagggctcccttttacaaatgctggctttatccctctactaaggagctgtgatgggctgctttgggggcctgaggagttaggggagagagggcaaagtgagcttccagtgagacgaaattcattgttgatgtggtgctgcttggaggatgtgaggttttcttaagcaactccttattttgtagcccacccaaaacttttgtaacagaagagagctaaagttaaactgcacccaaagagtccattgttggtgtgttgaaatactta

SEQ ID NO: 330236 - DNA, 389 bp, Homo Sapiens
  misc_feature (31)..(31): n is a, c, g, or t
  misc_feature (203)..(203): n is a, c, g, or t
gcttaattaacttcagaatgtcatatactanttatgaagtactgcttcattaataaacatgcttagcatttactttggaatggaaaaattaaccatttttatgtggttacctttaaaatgttttataggaatatattaataaatatttctttaaaaatttacctttcctatatatcatttaactaccatgaggcaggacaccntggctgggagtccagcaccaactgggatactaactgggctgtgtgggtcgtgggtatatttcctcctctctctctaggcatgtagggttgttcttctaacaaatgagaatatcaggcttaggattaaatcaaaggttgattccatcttgaaaaattgcatgatttaataatgagggaatcttatag

SEQ ID NO: 330237 - DNA, 224 bp, Homo Sapiens
  misc_feature (46)..(47): n is a, c, g, or t
  misc_feature (55)..(55): n is a, c, g, or t
  misc_feature (88)..(88): n is a, c, g, or t
  misc_feature (92)..(92): n is a, c, g, or t
  misc_feature (95)..(98): n is a, c, g, or t
agaaattaccctgatcacataaaagcactgcttctaaagcctctcnntgaggcanagatacagctttagaacatagcattctacttantgtnttnnnnttttaacacattggtgaatctcttggaaatcaatgctacttttatgcaaatgaatatatgtttgtcttaacaaacatatgcaaagcctattttgaaattcctagtagaggtctctgaattctgaat

SEQ ID NO: 330238 - DNA, 966 bp, Homo Sapiens
  misc_feature (809)..(809): n is a, c, g, or t
  misc_feature (929)..(929): n is a, c, g, or t
ctcctgcgcttgttttcctatccctctctctccccgcttccttgctgccttttgtgtccctggttcccgaacagatcagctgtcaattgcaagaggcaaggattgaagcctggaggtcatgcgtctacagtcagtcattcatgccaagaggggactagcaggagtcccttacagaggtcatgccgtcagcccagaggaatgtgtgcaccgctgcggtggccctcaggtccagctctcctcctgtgtgcatggcagagtgtgtggggttcaggggttgggtgtcgaggtgtgatccttggagtgtttcataaagtaatcaatatcgacctccagctcactgggatcctccaggggcccctctacagtcacctcctcgtgctcctgggcggcatcggcgctggacaagtctatctgtcgaaccaccttgcgaatgatcttcttggtgacaatgttgccctggttcatccgtgaattgctcctctgtcacctgcttcccctggaatattctgaaactcattcccttgcaccacttgggtgaaggtgttcttggcctcctgcacctgctcttcttggccttgctgcctccggtccctgtcggcctgggagcttcttacctcgggctgttctgtccacgtgtgctcacttacagacaccaggaccttctcgtactcctgagatccaagcaggctctagcccttcagtcatggtacttgttccctggaatgagtgtggaccttgcgtgacctcctcttgccaggaaccttgtgcagcatcttgcaggtatgagacaatcgagccgtctgcatccnagtcctgcagtctgtcctgactcctctccgtcacctgactcacggtgggggaatgtgtgatttgggcttgccccctctgatggccattcatctgggagggtgacagcgagtagtcgcggncggtgtggccgcctgtctggcttcaagttgcggctcc

SEQ ID NO: 330239 - DNA, 409 bp, Homo Sapiens
aaaaccaaaacccatccccagccacaaaaaagccctcattcactttttgcgtttcgcaggttcttcctgcgcttgttttcttatccctctcttcttccccgcttcttgctgcttttgtgtccttggttccgacagatcagctgtcattgcaagaggcaggattgaagccttggaggtcatgcgtctacagtcagtcattcatgccaagaggggactagcaggagtcccttacagaggtcatgccgtcagcccagaggaatgtgtgcaccgctgcggtggccctcaggtccagctctcctcctgtgtgcatggcagagtgtgtggggttcaggggttgggtgtcgaggtgtgatcctgggagacacaaagagagaaggagtcacttagaatgcaaaagtgcaacgtccag

SEQ ID NO: 330240 - DNA, 442 bp, Homo Sapiens
  misc_feature (12)..(12): n is a, c, g, or t
  misc_feature (32)..(32): n is a, c, g, or t
  misc_feature (48)..(48): n is a, c, g, or t
  misc_feature (60)..(60): n is a, c, g, or t
  misc_feature (72)..(72): n is a, c, g, or t
gaacaaaacggntcgggggttgggggaaattnacagggcaagccttgnaacactgtaccntagctgcccctngagaaagctccctagggaaggtggccagaaaaagcagagagctgaaggagataaagactgaagccatgctgcccatctgggaaggatgttcctaagcgtatgcttggtgtgtgggggccacttggctggagcagcatgaaggtatgggacagtgacctgtacttgtggggaggtgggatcacccaggaacctcaaagaccagagtaaagactttgcttttgccttgcattctcagcgagagaaccagccacgaggggattcccgctgaaagagtaacacaacctgccttttgttttagcacagtgctgtgcagaacttcctgcaacgccgacacgttctacgttctgtgctgtctgcacagtgacggggg

SEQ ID NO: 330241 - DNA, 445 bp, Homo Sapiens
tcactcggacttgctgtttcggcctttcagtggatgtgccaaagggcagggatcttgcctgattctgaatcaattggccagatggagttcactggagaatgaggcaatcaacaaaaaagacaaatgatgccaactggagagagctcgtgtcttctccatgttggaaggacattacaaaatggcaactgtggtgggggcagagatgaagtaagacaaccttacagtcggagtaagatgtgaatacctctacctatacagagacaaaaacacacacatgcagagccatacacacacccaaacagtgaacacagtttttgaaaataatttcctttttgtcctttctctgagcagactgacacattcatcggccaccaccatgcaccatggggctgaaatggaaaacctcgcttaatttccacaaagtattctagctggctgcccagtt

SEQ ID NO: 330242 - DNA, 553 bp, Homo Sapiens
  misc_feature (19)..(19): n is a, c, g, or t
  misc_feature (35)..(35): n is a, c, g, or t
  misc_feature (65)..(65): n is a, c, g, or t
  misc_feature (122)..(122): n is a, c, g, or t
  misc_feature (141)..(141): n is a, c, g, or t
  misc_feature (197)..(197): n is a, c, g, or t
aaccataactacaaaaaanactgaaccccaaaagnccaccaggtctgaaaaacaaatcctaatgntcctgaaaaccatgaaacaagttaattaaaccttggatgccttcaatgcctgtaaangctgaaagaatgtaaacangccccccacctcaaaagggctgtaaccccggaatcaagtgaagacacgaacaagtnaagaatgcctgccctggcaccctggaacacatcgagggcctgagtgttgccctcgcattgcctgtggttcactgaagatgaagaagagcagtggggaaggaggggccctggggagtggcagctgtaagcagtgctggtgctcaaggtgggagaggccagggcagtggttgacactcaccaaagctaacaaccacgggggactcactccatacctggcactgttctaggtactgtgaatttaattctcacaatgaccctgtgaggtcactgttcccatttcacacatgagaaatggcaatgttactagtaactggaagaatcaggtttgattctagagcccacaattttaatctctt

SEQ ID NO: 330243 - DNA, 479 bp, Homo Sapiens
  misc_feature (175)..(175): n is a, c, g, or t
  misc_feature (402)..(402): n is a, c, g, or t
  misc_feature (411)..(411): n is a, c, g, or t
  misc_feature (418)..(418): n is a, c, g, or t
  misc_feature (446)..(446): n is a, c, g, or t
  misc_feature (464)..(464): n is a, c, g, or t
gttaatgagtgtttattgttaataaaaccatagtacatttacagtaagtgacaacaattattgtacagttaaagtatcatacaatattacagcaataaaataatgcctatttctttgtacatccagccaagcagctagtcaaaatattttccagaattgcaagcccctggggttntttcagggtgacctgagtgccaccttctgaaatgcctggggcttttgggtgaataaatagtttttaaggtgcggccagacagctgaagaagttgcacccagacagactgtgcctgatgctgccccagtgtctgggtccataaatatggacagggtttcagggggagcccaggggccctgccagaaattcgaggggcaaggccttgagggggacacaggcagaaaggnctctttctnctggggncctttacctttccatccaatgccctgtnccttttaatctcccaggngtcacagtccccagt

SEQ ID NO: 330244 - DNA, 388 bp, Homo Sapiens
  misc_feature (28)..(28): n is a, c, g, or t
  misc_feature (40)..(40): n is a, c, g, or t
  misc_feature (45)..(45): n is a, c, g, or t
  misc_feature (224)..(224): n is a, c, g, or t
ctcccacaggaatagctgctgaaccccnctccacccaccncctgncatgtgtttaaatagatgaatgccttgggggctggggctgatgacggcatcctatttcaagggccttacgttacagtttttacagcaagacagctagcaggttgtaagacacaactgactttaactggcagcaataccttgttcatttccagggcctagaagatgcttaggcttaaatntgttatattgagtcacgcttacttaatccccattagtctttgtcagaatctagtaatttattatttgtgaacaacaactcttaatttcctactggatgttaataactgtcactctgttctcaaatatacagcttgttgaaatgggctattgtgttaattctgaa

SEQ ID NO: 330245 - DNA, 875 bp, Homo Sapiens
cttttatcaacatagttatagcattgatttattttccaaatcatagttgttaaaaacagtatttacatttcatcaccatcaacttaacattttatgcattcattaggatcatacaaatatatgaaggtgaaagttctgctctgtccccacttctttctgaaaccttctttagccatgtggcctgaaagtagagccatagtccagcttgggagtctagttcccaagttgcctggttctagaagcccagtgtttcttgcttgcatcagatcagaaacacactgggcaacataagaacattcttaacttggctcgactaagaggaaagtctttgcttacttcagggagcttctccaccttccattctttaccaatagggtttaaaagctttgatttggaggccaacttgatttaggggttcccactgggcaaaatagggaacaatatgagcatcaaggacatctgcgaagcactgaaaccacctcgaatgtgattaaacgcatgacttcataatgatacaaaacaaaacacaaaaaggcttttgggcagcaagccctgagagaatggagatcccagctgagatggacagcgatggagcgtatactgtgattcaaacgacatcattacttagatgctgcatgcacataggctaatgtgcccacagatcacacacttccaactcctgccaatcaacaactattgggttgactcagcagtctcccaaacataccacctgctcaaaattcttaagctcaaagctagaattatctctgtgactaatacagcattttcacgtttgacatgatagtaactcaaactaactctttaccacatttacaagttgcagttttcagctttaattttatttttactattta

SEQ ID NO: 330246 - DNA, 898 bp, Homo Sapiens
  misc_feature (631)..(836): n is a, c, g, or t
  misc_feature (869)..(869): n is a, c, g, or t
tcaggaaaaagtatttattttacaccattacaaaaatatttaggcacataattttcatgtttatgtcacctgatttacatacctcaattcctcagtaccttttaacactaaaaatggtcatttggtaaatagactctaaaatgaaaaaatactgtgagaagctaacacctgtagacaaaaatcagttgatcatcagcatgagaaagaaaacatttgtgaaaaaaataatctctaaaaacatttttgtgagacaataaatctaaccagtagatttctttttaaaaagtatttttaaagaacaaagctttaaagacagaaaaggctacaacactgtaaactatatcctcatgccatgaagcagcatcctgaaagtaagacctagaagactggcttagaaaacagtaatggtgccagggactcacaatatatgacaactgagacaggcctggaagcaggggcagcatggggtcaagtgctttcaattcagagaggggaaaaggaacgctggcctttccaggagccatctaaaggtaaaaactgagaaagatttaactgaattgacattctaaaatgtaactatgtttctttaagatagaaaataattttcctggccggacatgtggcacacacnnnnnnnnnnnnnnnnnnnnnnnnnnnnnnnnnnnnnnnnnnnnnnnnnnnnnnnnnnnnnnnnnnnnnnnnnnnnnnnnnnnnnnnnnnnnnnnnnnnnnnnnnnnnnnnnnnnnnnnnnnnnnnnnnnnnnnnnnnnnnnnnnnnnnnnnnnnnnnnnnnnnnnnnnnnnnnnnnnnnnnnnnnnnnnnnnnnnnnnnnnnnnntgtggtgagctgctatgattacgccattacacntcagcctggctggcgacagagcaagacct

SEQ ID NO: 330247 - DNA, 656 bp, Homo Sapiens
  misc_feature (100)..(163): n is a, c, g, or t
tgtgtgagctaccacgcccagcctataaaacctttagagaatccaataatagtaataacatcctaccactgaatgaacgcctacacccagtgagaaagcnnnnnnnnnnnnnnnnnnnnnnnnnnnnnnnnnnnnnnnnnnnnnnnnnnnnnnnnnnnnnnnnaaagataaagaagctggactgccattacagctttccatttcagtaaccttgtattagtaatcaatcataccactatgcatattgcaaatatttacttgctaggtcagcattatgacacaggtcttgactttcctggttttctctttagaagccctatttggaaaacaactgtggttctggcaagtttatttctaaatacaatttgaagtttagtttgcctatagtaggagttggcaaactttttcttaaagggctaaataataaatagtttaggctttatggaccatatagtctctgttgtaacaactaaactctgtccttatagtgccagggcaaccacagacaatctgtaaacaaatggatatgtctgtattgtagtaaaactttgtttacaaaatcaagcaaccatttatgctacagtttgtcaacgcctgttctacagtaacagggggcagaaaaatcaactggcaacatagatttcataaaaccacat

SEQ ID NO: 330248 - DNA, 429 bp, Homo Sapiens
  misc_feature (61)..(61): n is a, c, g, or t
ccactgaaagcccaagtccccccgggaaaggaatgaatgaaaaggggaagttgctggaagnaagagaagaggaaggaagttgaggccatagagaggaaggccctgaaagaaaactttaactgcttgccagtttggccagaggtctctttgagcaggaacaactgcatttagaccagcagttcccatgctctgttttacaggtctgagctttccagtaggtgaaattatgttttgaaactgtgtgccatgtagtaccagctagaataaagccaacattacacattcagttctaccatggttatttcagttctgttccatatctaatgaccaccaaccttgaatatcaatgtgtgcagtccttagggagaccaggacggattcacaatttcaatggggctactggaaagatgcttggctgtttttttactc

SEQ ID NO: 330249 - DNA, 672 bp, Homo Sapiens
  misc_feature (523)..(523): n is a, c, g, or t
  misc_feature (583)..(583): n is a, c, g, or t
  misc_feature (604)..(604): n is a, c, g, or t
  misc_feature (612)..(612): n is a, c, g, or t
  misc_feature (624)..(624): n is a, c, g, or t
  misc_feature (658)..(658): n is a, c, g, or t
ttatttttatggtgactttagctacagcatttcctatacccagagctaaacactggaataatactgacatcatttaatttaacataagcaattatgtttaaggagtaatttgtgtcatgtacatatttaattgattttttttcttctacataattttatttgaacaaatgtagacagtttatatgtcgcctttttctgttcaaatttgcatggcctattaagttggctggagagtgttttatgtggaaatattttcaagataatgttccttaggaagaaaataacattcttgggttgagggaaggaatgccatacactactgtctcttcagatctgaaatactccagtttagagccaggaaatttcacaggtcacaccgatttttagcattaaaaactaaggaatatacttagcacttacttaatcttttcagttttccagtttacgtctcaggaatgaagtgtagtctatggttgacaatggagttttgtgatcctgcttattgtaactgacaactgttttncaactccaagagctaaactattggcagttcatgttaaagttagagttgagggtgttaggntagtgttcagtggagttggcntcttgtgncccgctgttagncctttagggcctgcactaggggccatgtgctgtncaggattccgggac

SEQ ID NO: 330250 - DNA, 563 bp, Homo Sapiens
  misc_feature (13)..(13): n is a, c, g, or t
  misc_feature (45)..(45): n is a, c, g, or t
  misc_feature (89)..(89): n is a, c, g, or t
  misc_feature (97)..(97): n is a, c, g, or t
ctttttacattanatccttcaaaagacttcccgtgttgcccagcnggataacaactcaagctcctagtgtttactccttgcacagcccnaaaccctnggaaactcagcttcgtcctatcagtgacatcacccattgtggccgaggaaccacaaaaccttaaaatacgggcttaaattcagcaaagcgaagaaacattccatattgaaatgggcatgagatatgccttatcagattgtgtgtgtgtgcgcgttttttaaagacagccaattacatcgtatctagtcaaatgagcggattctaaagcagcctgctgggatgttccacttagtctaatgctgttgccactgtacgccacagcaccggacagtgttctttgggacatctctgggaaatgctctggaacatgctccttgatggaaaacactaatttttgaaagaagtagatgtctggaggcaggtctggtgaataaactgaatagtactgccttggaccccagctgaggggtggcagtaagcaatgaggatgggctataaagctgttaactggctaagggccatcctt

SEQ ID NO: 330251 - DNA, 729 bp, Homo Sapiens
  misc_feature (497)..(497): n is a, c, g, or t
gttcttctgatttcaatttttcatttaaagcatcattttcactcttcagatcattgatttgcttctctagcgattcctgcttctcagaaagtaaatcttcaagcgatttcttttctatttcatggcctttcttaatttctgaaagggaggcttcataggccttctttagcaattcaagtttctctgagtggctagcttcaatttccaacttagaggtttcatgcgcagttttaagttgtcaaactgctcttgcaattgcattttgtacttctctgcttcttcaatgtaagtgtcccgaagcttttcatactccctggtgtaaaactctttaagccgattctctcgttctgttttttcagcctggtgctgctggacgaatgcttcatacactgtttgtaactcattcctggctttttctaatttctcacaggtggttgaagcagtgactagctctccccggaggttaacaagttcttgagatagggttttgtgttgtntcagtgcttcctcccgctcagacagcaggtgctgaatcacaactgtcaatgcctcaaacttggtattaccacaggcaagaagctgcttgagctgcaggataaatccactttggttttcacattttgttttatattgcgtcaattcaagtgttttctcagggggcagcgcatcgggagctgtctgtggctggatacataagcttcgaggattcttttgcctgctcttttcaac

SEQ ID NO: 330252 - DNA, 142 bp, Homo Sapiens
agattttaaaaatcaaaatcatgtttccatgcacttgagttctggatcaaatatattatctacagaaaaaatccacaaactcttatcgaaatgttcatataaagtttaaattatttcaggttggcttttctcctttagtttt

SEQ ID NO: 330253 - DNA, 431 bp, Homo Sapiens
  misc_feature (35)..(35): n is a, c, g, or t
gtcttctttaattatattttctacttattaataangcattgaccactcttaaatggcccaaaccaagacaagaactttggacgattacctcacatttgtcctgtaggttcccttaaaacaacccatagagccaagtggtcatggcagaatcagtgccagggagtgactgttctgaggattacaaggaagagcagaagacaaaatttgagattttctatccattaattttttcattctaccttccatttactctgtcagttggtatttattgatttgttaatatttgcttatttcccccttaataaaataaatattgaacttacaattgacccagttgacctgagaattgacctaaaaatcacatagcctttgataactaataatcagtgctattgctctatcagtggctctatgattcttagccagagagt

SEQ ID NO: 330254 - DNA, 822 bp, Homo Sapiens
  misc_feature (115)..(115): n is a, c, g, or t
  misc_feature (118)..(118): n is a, c, g, or t
  misc_feature (150)..(150): n is a, c, g, or t
  misc_feature (153)..(153): n is a, c, g, or t
  misc_feature (162)..(162): n is a, c, g, or t
  misc_feature (166)..(166): n is a, c, g, or t
  misc_feature (173)..(174): n is a, c, g, or t
  misc_feature (177)..(177): n is a, c, g, or t
  misc_feature (179)..(179): n is a, c, g, or t
  misc_feature (182)..(182): n is a, c, g, or t
  misc_feature (186)..(186): n is a, c, g, or t
  misc_feature (189)..(189): n is a, c, g, or t
  misc_feature (192)..(192): n is a, c, g, or t
  misc_feature (194)..(196): n is a, c, g, or t
  misc_feature (204)..(204): n is a, c, g, or t
  misc_feature (209)..(210): n is a, c, g, or t
  misc_feature (216)..(219): n is a, c, g, or t
  misc_feature (222)..(223): n is a, c, g, or t
  misc_feature (228)..(228): n is a, c, g, or t
  misc_feature (234)..(234): n is a, c, g, or t
  misc_feature (240)..(241): n is a, c, g, or t
  misc_feature (245)..(245): n is a, c, g, or t
  misc_feature (248)..(248): n is a, c, g, or t
  misc_feature (258)..(259): n is a, c, g, or t
  misc_feature (261)..(261): n is a, c, g, or t
  misc_feature (266)..(266): n is a, c, g, or t
  misc_feature (268)..(271): n is a, c, g, or t
  misc_feature (277)..(280): n is a, c, g, or t
  misc_feature (282)..(283): n is a, c, g, or t
  misc_feature (285)..(285): n is a, c, g, or t
  misc_feature (291)..(291): n is a, c, g, or t
  misc_feature (293)..(293): n is a, c, g, or t
  misc_feature (296)..(298): n is a, c, g, or t
  misc_feature (334)..(334): n is a, c, g, or t
  misc_feature (343)..(343): n is a, c, g, or t
  misc_feature (358)..(358): n is a, c, g, or t
  misc_feature (591)..(599): n is a, c, g, or t
  misc_feature (656)..(656): n is a, c, g, or t
  misc_feature (796)..(796): n is a, c, g, or t
  misc_feature (800)..(800): n is a, c, g, or t
actctgaacccagagcggggttccttcgcttgactttgatcctggtccttaaatgcctttccccactcccctcccgtgggttcaggggccaagcggctgccatcagagcacgggnagnaccgtctcctggacccctgtgtgccagcctcnttnagacgcagntggnggggggnnttngntantttnagntcnannncagaacanccacnncacaannnngtnnaaacnggcggncacggnngcangcnaccaacggcnncngaccncnnnncccagnnnntnnangaacgngnggnnncgccttctttgtaaattcacacgagatagtccaagngctttccangcgctcagtttggantgataatcctcgtctcccccactctaaaggcctccttgagattttctttggggtctaccacgtcctctgcctgtctccaggtggtacaggagatgtggttcctctccctctcctggctccctagaaccccccacttcccctccctgtagctttagtgaccccgtggtggtgggtgtggggtctgtgcgcgtgctcaggtaagcttgggggctccaggtaagcggtcccgtgtnnnnnnnnngggaagcccgcctcctcgccaggcccccagggagttgccgagccccccccatcccgnttcggtttggacacccgcaaggccggcatcggtaaatgggcacctttttctcttcctctggttgttatttgggggggagcgggctggggcggggcagggtattacggttggttgaggacagccccctaggccaggggctnggtngggggaacggggacttttttgg

SEQ ID NO: 330255 - DNA, 404 bp, Homo Sapiens
  misc_feature (394)..(394): n is a, c, g, or t
tgctgcctaatgtaatacatcacaaagtaaaggcaagagtgggcttggccttccgatgccaaccacagggccccttttgtaactgaataatcctccaagtagccagtgctcctactgtttacagtgtccctcgtgcccaagtctctgtcactttcatcctgttccctccaagttcccagtcccatcccagtagccagctttatgagattttggtatttcttccctacagattaaaaacatacacaactcatcattatgctaaactaccagttgtatctcagagggtctccccttctgcccttgcttcgagtgtgggacttccatgggaaaatatggacatgaaaaagtgtaggacggaaaacatcggtgtggaaatacctggccacaaataccntggtggccta

SEQ ID NO: 330256 - DNA, 484 bp, Homo Sapiens
  misc_feature (316)..(316): n is a, c, g, or t
  misc_feature (367)..(367): n is a, c, g, or t
  misc_feature (410)..(410): n is a, c, g, or t
  misc_feature (424)..(424): n is a, c, g, or t
  misc_feature (455)..(455): n is a, c, g, or t
ccggccccggggctttggctttctgttttttataaaacacctcaagcagcactgcagtctcccatctcctcgtgggctaagcatcaccgcttccacgtgtgttgtgttggttggcagcaaggctgatccagaccccttctgcccccactgccctcatccagggcctctgaccagtagcctgagaggggctttttctaggctttagagcaggggagagctgggaaggggctagaaagctcccgcttgtctgttttctcaggcttcctgtgagcttcagtcctgagaccagagtcaagaggaagtacacgtcccaatnacccgtgtcaggattcactctcaggagctgggtggcaggagaggcaatagnccctgtggcaattgcaggaccagctggagcagggttgcgggtntctccacggtgctnttgccctgcccatggccaccccagacttctnatctccagggaaccccattagcccctttt

SEQ ID NO: 330257 - DNA, 476 bp, Homo Sapiens
ttccagggagtttataaaagtaattttataaaagtaatttccccaaagctgctacaattttagattggcaaatttccacagttttggagtgacaaacatttcccacaatgtcgtggttaaaaaataagaggtagtggggagttaagaatgaaatggtattgtgaatttaatggtctgcaatgtgctcatcaaacacaggctaagctcaaggtgaagactaccaccaccctgaagggtcaaaaggccactgcataaatgtgcagccaacccccgcccgactctaaccaagcactacaggaagagtataggaccagaccaccatgagggaccccggctaaagcaggactgtgctcacctgcctgtggtcagagggaagggggtcaccatatcaccgagccacaaccagctgcctctcctctgactttggatccaagccacccagagagccagtggtctctggcaatccagctttctct

SEQ ID NO: 330258 - DNA, 671 bp, Homo Sapiens
  misc_feature (445)..(445): n is a, c, g, or t
  misc_feature (454)..(454): n is a, c, g, or t
tttttttgagactgcatagggtcggcgtggatttattaatggcttttgaattaactaaataattaatgaacatgggcttaatctctaagtatgcaaatctctaaatgggatatacttgtgatcttcaacttggccttggatatctgtgtgactgatttaacctttgactcagtcttttgcagcgccaaagttattgttgatgaataatttcatttcttgtggatcctatggttgctactaactcttaggaaaatagtaggctctggagaaggagtaaaaaccctacaaatatgtaaagccaggaaggaaaaggagaagcaaggatgttaaatcaatctgagttggaggaacagatctctgtttttctctgaagtgttgtcacacagtctcatgtgctcaactgcttcaggccaagggtgtgtcagcaaggctttcttgcactgcnaccaggganactgacctgaaaccctggattttacctagatcatgagaggtcttagaaaccttttaggccaacctacttatttaacaagtaaggaacctgatggccagagtttaaaagactcatcccaggacatagtgcctacttagtcgtggtgatgtgatttagtcttggacattgagtgctcagtcactgtctcagtgacagcattattgtgcttgagccaaaa

SEQ ID NO: 330259 - DNA, 443 bp, Homo Sapiens
  misc_feature (315)..(315): n is a, c, g, or t
  misc_feature (328)..(328): n is a, c, g, or t
  misc_feature (357)..(357): n is a, c, g, or t
  misc_feature (364)..(364): n is a, c, g, or t
  misc_feature (394)..(394): n is a, c, g, or t
  misc_feature (411)..(411): n is a, c, g, or t
  misc_feature (426)..(426): n is a, c, g, or t
ttaaatcacatttatgccatgtcatcttctataacccattcaatattcatgaggaaatttcaagtgtccccatttgagagatgtgggaactggggctttggggggttaaagtgattcactcacagtcaccaagtcactaagaggtgagatacaggcttgaacacaggtctcccaatttcaaatcctgtgccatcagctacatttaggtgtatctcagaatgtcagagcctgggagaaatggtcagagatgatgttgttgaaaccccttccattacagatgagggaaactgagggctgcagagaacactgtccccnggtactgcagganccggggccgggacccggggtcccaaggantgtagtnggcttccgctcttacatgggttctgggcantgggacctcaaaattgntattattttcaggancacagcacgggaacgtt

SEQ ID NO: 330260 - DNA, 240 bp, Homo Sapiens
  misc_feature (38)..(38): n is a, c, g, or t
  misc_feature (108)..(108): n is a, c, g, or t
  misc_feature (129)..(129): n is a, c, g, or t
ttttttaatgtatccttctttatgaggagaatgctacnccaaaaatgtattaaaggaatattaagtcgtccagagactgtcttgctcccaagaactgtgcaatggaantctttttaccaacattagacncctacactagagttagataacgttttctcacattgagtttagaagatctgccttgtcagggaagccaaggttttgtatgtgagagtttaaatctgatgtgaagctccaaaa

SEQ ID NO: 330261 - DNA, 302 bp, Homo Sapiens
  misc_feature (20)..(20): n is a, c, g, or t
taacatttattggaacatgnacctttatgttaaacatttggccatgtattgtcctaatttaaccttcacaaaaactctaaagtgggagttgtgataattcctcatttcacagatgagagaactggtgccttagggacacttacagggtgcgttcaaggtcataaaactgctaagagagatggagcagaaactggaacctggtctgtttgatcttaattccttaaatcctatattatctggattcccgtattactaacaaagcattgaaaagtacattttaggctggccctggtggctcatac

SEQ ID NO: 330262 - DNA, 485 bp, Homo Sapiens
acaatgtgctggttttgagagtagccaactatggcgtgacagaagacaagttgagtggagaaactctgcgtgtgggggtattgttagcagagagtgaagcaggtaggaaaaagggagcaggcacctcggtggtaggagtctcgccttggttccgaagctgtaggatttgccggagtaaggccttaccttcttcccgggtatcattaaatgcacaacacttttgtgcacaagttgaagcttcatcccacagtttgcacttaaaatagtactgggccagatagcgaaaggcagtgctttcctccaagtgttctactatttccccacaggaatagatatcttgggatatatttgatgtaacactggggcagcctgtttctgactccagtcaactgtttcatgaagctttgccagttttcaccagagccattttctccacatctcccacggcgtaaggcttccaattaacactttttgggttccactag

SEQ ID NO: 330263 - DNA, 134 bp, Homo Sapiens
gtgtgagccaccgtgcctggctaacatactctttctaaatatctatctagcaacatgcattatgattagaaatattaattccctttgatccaggcattctgtttttagcagaataggcacaaccgtttgcataa

SEQ ID NO: 330264 - DNA, 486 bp, Homo Sapiens
  misc_feature (448)..(448): n is a, c, g, or t
  misc_feature (457)..(457): n is a, c, g, or t
cagaaaagttgagattttgttagacaagtgatttgcaactaaaacatggacagtttgagtattatgttatgagattctggatcttacttaaactttatgttttagatgtttttttcactatggccacttatggtagagtctaagttacccatttgacttctgttgacacccaagggatgaaggggctcctcatagctgctgggtaggggaaggaattctgactctgtactaggcttccactgttaccatcttggctgggacaagtggtgagtcccttgctacttctccccacatgacctttactgataatatgggggtagtggtgatggtggccccattactgcagggcagtgaatgaaagtcttcgctctctactcagcctcttctgggacagtaccgtaggagcagggaaagagagggggtgcttcattactgctggggagagggnaaaagtccnctcaatctttgcaggcatgacaggaattt

SEQ ID NO: 330265 - DNA, 484 bp, Homo Sapiens
  misc_feature (335)..(335): n is a, c, g, or t
  misc_feature (345)..(345): n is a, c, g, or t
  misc_feature (413)..(413): n is a, c, g, or t
  misc_feature (430)..(430): n is a, c, g, or t
  misc_feature (436)..(436): n is a, c, g, or t
  misc_feature (441)..(441): n is a, c, g, or t
tgggtatcttttttatttcaaaataagaggggttttaatatttctacacagcattagataatagcccaaacatattattgatccccaaacaagtattttccagatcaattaatagtcattatcaattaatattcatgtctacctgtctgagcaatggattagaaacattataagtttcattttatggaagagaaagcagactaaaagtctagggatatgatcatttggtttctggtttcagttctgacactaacaaggcaatatccttggggcaagttgtttaatctttgggggccttatttttctcaagtaggggaataacgaagctgggatcntcatgctccntttcccatctcttccctaccccccattatttcctaaggttttcttggcccctatttatggccctaggnaaattctaggatcaggngaggtncccgncccattttcaggagtaggaggaggcccgggggctaggctggcg

SEQ ID NO: 330266 - DNA, 372 bp, Homo Sapiens
  misc_feature (14)..(14): n is a, c, g, or t
  misc_feature (23)..(23): n is a, c, g, or t
  misc_feature (42)..(42): n is a, c, g, or t
aattcccaaaaagncaccgtganccacctttccaggtttttntgggtcatttgtaataacctcctttggaaaaatgtcctgtggaagttcctttgcctcatttttgagttgggttgtttttgtcaggtgttccgtccccaccctcatccctcctgagtacccccggacctacaggcacatgcccactatgcccccactaatagaatctattttagaccctaattatattctgtctacctgaaagacaattgaaataaaatgacataaagagaaagataaaacatgccaacactaatcaaattaagctggagtggctatgttaatatcagacaaagcacacttcaaaacaaaacactgggccgggaggctaat

SEQ ID NO: 330267 - DNA, 457 bp, Homo Sapiens
ttaaatatacctctttgaaagataaatttctgctcaaagggacaatattcttgctggatgcgtttctgtaaatgcttcacagtttgaagacaaaggaatgcaacttcccaaaatgtgcccgaggtggaagtacttcctggctagtcggtgtaaacgttgcaaaaccagtctgtgggtctaagagctaatgcgggcatggctgttgggatggaggacctgctgtggcttggtcctggggtatcgaaagagtctggatttttagggctcatactatcctccgtgggtcatgctccaataaattcactgctttgtgggcgcgacccttaggtattctgcattttcagctgtgggagcccttaaagatgccatttggcttgggcttccttggggaaaagaagtcccgctgggtagtcagggttttccagggtaattttggtggccgcctttctggggccat

SEQ ID NO: 330268 - DNA, 432 bp, Homo Sapiens
  misc_feature (388)..(388): n is a, c, g, or t
tcacgttgcacggtgtttctttaatggaaagacagccaccgacctcagaagcagcccctccttgcgctggaccagaaggataaggggagacctagccaccagtgggccagtgggggtgaggggcttctaggaaaaccggtgtctgggactctggcggttgatggtgtcatctgcgcgggatgctgggcctccacctcccaacctcctccgggacagtacaggtttgggggcaaggcctgagcagggcaggctggggagaccgctgtccctggggttttgtgggcaggggctgggtgcaggccggacagacagaaagcagtcccagctcaaggcagaaggccagagggtttggagtgaaagggacaggcgacagtttttcggagagatnggagggaacaggccaccaagctcagaagcgagaaaggtctgagg

SEQ ID NO: 330269 - DNA, 420 bp, Homo Sapiens
  misc_feature (343)..(343): n is a, c, g, or t
gcacggtgtttctttaatggaaagacagccaccgacctcagaagcagcccctccttgcgctggaccagaaggataaggggagacctagccaccagtgggccagtgggggtgaggggcttctaggaaaaccggtgtcatctgcgcgggatgctgggcctccacctcccaacctcctccgggacagtacaggtttgggggcaaggcttgagcagggcaggctggggaagaccgctgtccctggggttttgtgggcaggggctgggtgcaggccggacagacagaaagcagtcccagctcaaggcagaaggccagagggtgtggagtgaaagggacaggcgacagngtttcggagagattggagggaacaggccaccaagctcagaagcgagaaaggtctgaggaagcacaagacacacacac

SEQ ID NO: 330270 - DNA, 526 bp, Homo Sapiens
cttgtgaaatctcctgaccatttatgctatttgtttgtctttttgcaaatcaaaagagcctaatgtcaccttaaagcatcatggtaattaaacttaagaaaggatgagtgattacagtttatttaattcctccctctttagagaacttctagagtacacaggcatagccatacaaatttagtttccaagtaagaatgagagtataccctgagtagtttacataaatttatggggaaaactggatatgtgttggagcagacaatgtttgtggggctaggtgtccagagtcaattctttctctgatgggccttcagcagaacggctttttcctgacataggtgcagcctcatcctatgcgtgctcatcacaggagcatgtttctcctttgttctgggggatgggaatttccttcctttgattcctttctcttcactcctacagccccagtgtttgcttgttcactccccgcgtcccacatcaatgccagtcaactccagcctgggctacaagagggaaattcgtctcc

SEQ ID NO: 330271 - DNA, 465 bp, Homo Sapiens
  misc_feature (374)..(374): n is a, c, g, or t
  misc_feature (396)..(396): n is a, c, g, or t
  misc_feature (422)..(422): n is a, c, g, or t
tttgcatgaaatacccttctctagctgaaaaacttctacttaccttttaagaccctaacatgtccacacaataacagttttctatactcctcgccccagcagtttaatcccagtcatttatgcagacaaagtgtgctgctcactcttccactgtgagcatgcttatttcacatttggttgaacaatcaaattcgtgctaacttaggaaagggatttttcctctgggacattaataataacctcattcctccacacactaatcagagtaggagcctactttcaactgtcattatctgcttatcttgttttactaatggggctgttgggttccttaaggtcttcggggaatggtttctcatttaactctggtaccnggggcaacttggggtaaatccncagggcaaatatttggctcaaagggnagggtaaacggtctaacatagggccatctaaatggtctacaat

SEQ ID NO: 330272 - DNA, 968 bp, Homo Sapiens
  misc_feature (256)..(302): n is a, c, g, or t
attatcattccaattcatattcagccagtgtttattaagagcctactacacgccagacactttacatgctgatcacatttactcctcacaaccatcttgtaagggagacatcatcagtgccatttgaacaaatgaaaaactgaggctcagagagattcaataccttatccaaagctctccagacaataagtgcaaaaacaaggatttgaattcaggactgtttgattccaaatctggaactttctggaacctctgnnnnnnnnnnnnnnnnnnnnnnnnnnnnnnnnnnnnnnnnnnnnnnngcacccatgtccctgaagctgctgcctcctggactcccgccagactgcacctgacagacaaagccaactaggagggaggggagtgagggagaaggtcccacaggtgaccaatgcctggccccttcatgacagcaggggctaggggctttcccacagggactagagagaggtgtggaaggcagggactttcccataatgctccctcctctcagtgcacaagtgtgctatgttgagaaatggggcaaaagaacaaacagtccttgccacagagggagacagcagcagccttatcaaacaagataaggagacccggatgatgtgccttttgaggcccctggtggtggaggaggattgagccaggtgaatgggaaaggaagaaaagatgaacccatcttggagtgttgtactttggttgctggagagccaacagtggagactggagacaaatatttaagtcattccggcaggccccatgtacgtgcctcacaatctaacaccgcccaccttggccagaaaggaaggcttcctatggaggtgctgccctgctcagtctgtcttctcaggctttctccaggacttgcgggtctccaggaagatcttgaccagggacaggaggatgggcacggccataggcaggaagagtgggatgtagatggcaaacttctg

SEQ ID NO: 330273 - DNA, 479 bp, Homo Sapiens
  misc_feature (418)..(418): n is a, c, g, or t
aaattggcattctatatatttgagaaactaatgtataaaaattcaagataattacaattggaaggggaccaataattccactttttaatcgaaaataatctatatactcccaataaactcacagtaaaataagcttcaaaaagccttaagacaccaaaagaggaaaaaaagccagtaattagaacaaaatgtgtaatgtggttaatagtatagatatgcttgcctttagacaattcttatatactcaattcttacatgattgaaagattctgtaataatgctctacctttttataaagaaaaaagtaggtttccaaaagaaaattaaacgtttatgactggagttagcggtagtaaggaattagatgtgagtggttgactgctccttggtgccttccgacattttggcagaaaattcnggtcctccttttagtccatcccaaatgactggaattattagatcccagactctggggtccg

SEQ ID NO: 330274 - DNA, 175 bp, Homo Sapiens
aatttataaagtaaacacgtttaattgactcacagtcccacaggctggggaggcctcatgaaacttacaatcatggtggaaggggaagcaaacacatccttcttcacatggcagcaggaagaagtgccaagcaaagggggaaaattcccttacaaaaccatcagatcttgggcca

SEQ ID NO: 330275 - DNA, 373 bp, Homo Sapiens
ttctggctgcaagggggtgttatgggaacctgcagggtgacccggcaccttgctaactgggcttagagtctaagggcttgggggctgcatctgatacaggttggagtttggggtgggagagtcctaggaagggggccccaagtagaaatgagagaaatcaggaagggatatcgggggcgtccacgggggtgctccgactggccttgcacccgtaccccagctctgcaccccccgtcacgagcagttcaatgcccgtgcagaagttggcttcggaggccaggaacactgccgcagccccgacctcagcgggctggcccatgcggcccagtggctgggccagcatgccctctcggattgtggccctagggtctgg

SEQ ID NO: 330276 - DNA, 366 bp, Homo Sapiens
ccccaagaggggaccatgaggggggaaagccccttttttgccccctcctcccaaaaaataacccttcccacagagacaaactgtcccttcctatcccacttttatccttttaataaatatcaaaaggaaaaagctgcaagggtgcaaagggcctgtgcccagaagaaaacacacacagggaaaccgctttttttaatcaattgtagagaatagtcatttttaatctaaattagagaattgtgatacaatggcagtcctcaaaggcgtaacgagttcatctttctttcaccataggggttatagttggcttgtgctactctggaatcattttactgtttgtttttattatcttaagtgctaattaaa

SEQ ID NO: 330277 - DNA, 517 bp, Homo Sapiens
acctaaatctcaacgaaaaacaatttactgaagccgactcccctccccatctccctctcaacctcaacccacctgcatgcatctcccccagaggaaacactgagggtaggggacaggaggctcaggacgcgccctctgaatcgagtgtttcttcttcacaagtcaccaagagaggacatgagggggaaagtccttttttgcccttctccaaaaaataaccttccacagagacaaactgtccttctatccacttttatcttttaataaatatcaaaaggaaaaagctgcaagggtgcaaagggcctgtgccagaagaaaacacacacagggaaaccgctttttttaatcaattgtagagaatagtcatttttaatctaaattagagaattgtgatacaatggcagtcctcaaaggcgtaacgagttcatctttctttcaccataggggttatagttggcttgtgctactctggaatcattttactgtttgtttttattatcttaagtgctaattaaaa

SEQ ID NO: 330278 - DNA, 544 bp, Homo Sapiens
  misc_feature (285)..(285): n is a, c, g, or t
  misc_feature (288)..(288): n is a, c, g, or t
  misc_feature (471)..(471): n is a, c, g, or t
aaaagttgggaacttttgtggggaaatgttttctcatttccctgattctgaggactctgaactccagctagctggcttctttcctgtgtcaccaatagtgtcttgtatgacttcagcttcaaaactggcttttcttgcggctatagtaatcaaggattctttcatccagcaggtgctgaggcctgtacacatttagcaacactgggttcttcttcgtagttaaaaccaaactgggcccctgaatttaggccacaactttcagcagagaggttaggttcttggctnttncacctggggtagcatgcagcccagtgggtttgtagcattcatttcttttaagcacctgagactcaaccctctccgattgtgctgttgtactcggtcagagatctctcaatcactttttgttttcctaaatgatttccctggcttccacctgtgaaggaatactgactgtggccaggcagcatntgacgtaagtcgtcattctcagaaatgtcatcctcctctagatataatgaactacaggcaccatcatcatctc

SEQ ID NO: 330279 - DNA, 439 bp, Homo Sapiens
  misc_feature (15)..(15): n is a, c, g, or t
  misc_feature (27)..(27): n is a, c, g, or t
  misc_feature (56)..(56): n is a, c, g, or t
  misc_feature (390)..(390): n is a, c, g, or t
  misc_feature (413)..(413): n is a, c, g, or t
gaacaatggaaaaangggcttttaaangaacaccgccctgtacggaaacactgganaatttggttgggtgtccaaatgtgcaatcccaataggcacaggacacagggacacagaaattccatttgcttccataacaatggctgagtttccttaaaatatccccatgcagaacccattataatttctgacataaaatttaaatgggaaaaatttttaaagtgctacaaactctaaatctggaattttgagtagcaaaaagggtaattacataccacaagcaccgaaaggcaacagttgaagagaagtaacatttacttcgcgccaggaaaatgcagtgacctagcattttcctaggtccctcgcttaatcctcggcgttgatctgatcatnatggccattttacagatcaaagnaggggccccaagagactgggtaactt

SEQ ID NO: 330280 - DNA, 513 bp, Homo Sapiens
  misc_feature (380)..(410): n is a, c, g, or t
  misc_feature (455)..(455): n is a, c, g, or t
  misc_feature (463)..(463): n is a, c, g, or t
  misc_feature (472)..(472): n is a, c, g, or t
  misc_feature (495)..(495): n is a, c, g, or t
taggacagatagggagatgaaggtagaatagaaataagtgcctgttaagctagggtatataaagatgtgaaaatgaataaccaggaaagtagaggatgggaggaaagtgtgtgttaaatttctctgtgcctaggtgttttcttacagaggaaatacatttggatataattgaacttgttaagagttactagatttatctgtaaatggtcactgtgctgtaacctctttttctatagattgaagaatgtgtggtatgctctgacaagaaagcagctgttctttttcaaccctgtggccacatgtgtgcttgtggagagtaagtagcctatgcagagttcctcaatattattataaaaatagaaagtgaaacaaaaattatnnnnnnnnnnnnnnnnnnnnnnnnnnnnnnngggataactccataaaaaaggttgatggggccctccgagtacccnttcctatnttcctttcncctgtacctaggaaccgtccagnccggtttcccctcccatg

SEQ ID NO: 330281 - DNA, 532 bp, Homo Sapiens
  misc_feature (13)..(13): n is a, c, g, or t
  misc_feature (22)..(22): n is a, c, g, or t
  misc_feature (34)..(34): n is a, c, g, or t
  misc_feature (45)..(45): n is a, c, g, or t
  misc_feature (76)..(76): n is a, c, g, or t
  misc_feature (85)..(85): n is a, c, g, or t
agtggcccgtctnaaaaaaagnaaaaataagatnaataaataaantaaataaattaaaccattacaaatagtcggnttgcctttngcctatatgtcctattattactttccaaaattcccacaaagggtaaaccctacaggatagagttcctatttaggatagtcccaattgccctgaaataataaacaacccggtatctactaattctagccaaatctaggtaaaatacattagaaggaaattaggaaagtaaaaaataagcactataaaacttgggttctaattgtaacttgaaatttctagtaaactctttggctttcagtttcctcattttaaaatgatgttcattccaattctaaaattctactattctttatctcccccaaccatcgctttccttaatatagatatcatgaaaagtatgttcaataaacactagtctaaatgaactaattctccttaaaatgtcaagaaaaatgaattaagtctgtgatgttaacttatttaagtgtgggtatttcctttagctat

SEQ ID NO: 330282 - DNA, 445 bp, Homo Sapiens
  misc_feature (58)..(58): n is a, c, g, or t
  misc_feature (65)..(65): n is a, c, g, or t
  misc_feature (68)..(68): n is a, c, g, or t
  misc_feature (81)..(253): n is a, c, g, or t
  misc_feature (323)..(323): n is a, c, g, or t
ttcagacgggatctcattttgttgccagaatgcagtggcatcatcatggccactcagnccttganctnccaagctcaaggnnnnnnnnnnnnnnnnnnnnnnnnnnnnnnnnnnnnnnnnnnnnnnnnnnnnnnnnnnnnnnnnnnnnnnnnnnnnnnnnnnnnnnnnnnnnnnnnnnnnnnnnnnnnnnnnnnnnnnnnnnnnnnnnnnnnnnnnnnnnnnnnnnnnnnnnnnnnnnnnnnnnnnnnnnnnnattacaagtgtgagctacggtgcctgggcctgagttcttaaattcctaacataatgtacattttttgagncataatacaatacatgacatcattaaggagattacgtgaacatggactgagaccttttatggtgaaatcttgtgagattcactatgttttatttacgtcttggtaactgctgactaaatgtc

SEQ ID NO: 330283 - DNA, 413 bp, Homo Sapiens
  misc_feature (338)..(338): n is a, c, g, or t
  misc_feature (385)..(385): n is a, c, g, or t
gggccaaatgagatatatttgtaggcttccaaagtgtttatacaaacataagttgtttggtcataggagagaaataacctttctaaaaatatatcagcattgcagtttagtgttaataacattaaagagaaatgagagaatgtagagatgcctgagtgatggagaaaaaagcaggaataatttgggcattaaactaaggctgagatgtattaaaattgagccagtgtgggagaagctggcctagggaccttctctgtaggcatttataggccaaggcaattaacctatatacccacccttggggtaatagggttcttcctctcttattggtacggtgnccacacttcccagtgtagggactgatggataatggaggacattgggnttatgcccctttgaggagtttttgccct

SEQ ID NO: 330284 - DNA, 107 bp, Homo Sapiens
attagaagttgccatgatttttcttggcttttattagcatgtgttaaaatcatattatccaaacactaccagaagaacatgtattgttctgaataaagtgcttaaag

SEQ ID NO: 330285 - DNA, 425 bp, Homo Sapiens
  misc_feature (80)..(80): n is a, c, g, or t
  misc_feature (397)..(397): n is a, c, g, or t
gtttttcttttctacaaaaggcaggtgatgattgttgatctgcaactattgtgttgtgcactccccgaaaggggatagangtaggaagccagggaaggtgctctgaggatgctttctatggagggaataagggctgcaggacactcactggagggagtgtctgggcccttctcctgtcctcctcagccttccctagctcatgtctatggtgttgaagacccattctgtgaacttcttcagcttgtccgaggcgttctggggactcctcctgttagcctcagggttgtcctctcgcaggtgctgcacctccgcctgaaggtgagctttgtcttctttttccttcttcaaatcttcccgaagcatcttcagcataccttccagctgggtccactttagnaagccagagtggggaaagggagtcttta

SEQ ID NO: 330286 - DNA, 763 bp, Homo Sapiens
  misc_feature (34)..(34): n is a, c, g, or t
  misc_feature (40)..(40): n is a, c, g, or t
  misc_feature (48)..(48): n is a, c, g, or t
  misc_feature (205)..(205): n is a, c, g, or t
cccatctgtggagtggctaacacagcccagaatntggatntgaacccnaacttcaacgtgctcccccagagactgaaagaagccggccgttttagagctttgggtttcaagtcctcttggaggagattttccagaaatggccaattttatgtccaaaggtgacttttctaggcaccccaggaaggccaaatttaaagctcccganttgtatcaacttgcattctgttcctatcatcagaagtctcagaattgaacagtaaatggtgcctacttggctccttgtcaaaataagtctgcatggctctcacaacaaggcagacagctgttcgttccgctggaaaggaaaggagatgaactttgttttgcctagcgttttgggaatcgtgaccacaatttaatacaatcaggtgtagtttgtttaaggaattatcaaagatcatacttggctgtcagattggaattgaggtcgataggcagactttgaccatatgctaaccagaatacaatccaattcaaaagtggagttgagaaacacagcattaggagaatttattcaaacatccatgcagagatagtctaatattttaaaaactgatttccaggatcattcgctccattttaaaggaaatgcagttctattttgaatataattcaggacagggccccagctctctgatttatgcaaaaggacataaattcacaaacctgcctgggctatttttatatttcagcaagaggttgtgtgcagctgctgtttctgggc

SEQ ID NO: 330287 - DNA, 452 bp, Homo Sapiens
  misc_feature (26)..(26): n is a, c, g, or t
  misc_feature (162)..(162): n is a, c, g, or t
  misc_feature (393)..(393): n is a, c, g, or t
gttaaaaaggccaaaactttatttangttttatgggaaatataagatgcatgtaaacataaaatacaaaacaaaacccaaatcttacagtctagaagcatgccaagacagagcattttctgcagaccaaagagtcccgtcaaagtgataaaggacacctggnaaagtggcaggccaaggggctggatcccttccccaagggcactgcatttttgtgatgagattaaaaacaaaccaactccactattaaaaatgctaggaaacatgggagatagtttaggcaccaccattgattctgggaaatatttcaggcactcaaatcgacttgcactgaggtttaatgtcctttctccagtttctctgctgagggagggaaagtagggaaacctggggngggaaggggctcctccctggcccccacaggggcccacttaaggagctgggggagggggg

SEQ ID NO: 330288 - DNA, 448 bp, Homo Sapiens
  misc_feature (405)..(405): n is a, c, g, or t
  misc_feature (412)..(412): n is a, c, g, or t
  misc_feature (423)..(423): n is a, c, g, or t
  misc_feature (433)..(433): n is a, c, g, or t
ttaaaaaggcccaaaactttatttagttttcagggaaatataagatgcatgtaaacataaaatacaaaacaaaacccaaatcttacagtctagaagcatgccaagacagagcattttctgcagaccaaagagtcccgtcaaagtgataaaggacacctggaaagtggcaggccaaggggctggtcccttccccaagggcactgcatttttgtgatgagattaaaaacaaaccaactccactattaaaaatgctagaaacatggagatagtttagcaccaccattgattctggaaatatttcagcactcaaatcgactgcactgagtttaatgtcctttctccagtttctctggctggaggagggaaagaaggaaaacctggaaggaagggctcctcctggccccnacaggangcccacttaanagcctggganggggaatttccatga

SEQ ID NO: 330289 - DNA, 555 bp, Homo Sapiens
  misc_feature (293)..(293): n is a, c, g, or t
taattttttcacattgttatttgtttattttgtacaagtgatgtcataagcaaggattttgcctgtgttctagattatctccaataaataaataactatgtacaaatattttgagtttacaaaatagaagaggaaaacctttgtcttacaaaagttacatttctatgatacatttatttccatacactgaggcaggatttcattcctaggcttagctggaaccaaagaccttgcaggaccctgtgtgggcagtgtctaggaggctgtggtacctaggccttttctaccaaagnggcaaagctacacaaagaaaattcctcagtttcttgaaaataagggcctgacttggcctgctacttataactgatctatatttcatgtattccagaaaattggaagcagtctggaatggttgtactcaaattactgagcagacacacccctgcagatcttgttaaatatagattctcatgaactggatggggtggagactaggatctgcatttcaaacagctccatgggcagggcagctccaatactgtcaggggcacattc

SEQ ID NO: 330290 - DNA, 161 bp, Homo Sapiens
tcactcctcatttctttctagccccaaaggtgttgagtcagcaaatcctgcagcctttgtgtgactttgagcatcactttcccctttcagcattaaatatatgacctctctgccttattttagaacttactacatttcaataaaactttttaaaaaatcca

SEQ ID NO: 330291 - DNA, 718 bp, Homo Sapiens
acaggtctcagaaaactaccattttattacttttagcattagatacgtttacaataaagaattatgttaatagagcctaggagttccaattgctagttgagaatcacctcaagaaaaatagaaaatttgtagaaataattattaaattttaaaaatctaagccttttagacttttcaaaataaaaatttaagtatgctgccttcacagtgaatttaatgtgataagattttcattcaaatgacattatttctatttaatgttttaatacagttacgcatgaaatcaaattccaacttcttaaaaaatgtggagtttttttggatcatttgatcatttcctataaaccatgtattccggtctctatattactgagagtgatgttagattcttggtctactgttgaagataccaaacacatgcaccatttgaatgtgttcttgaactaagtcctaaaacaaagtgaagcagtgtgtttttgtagagctcaggtctaggtgctgcccaggtggggtagtgccactcctccagaaggccctggtccttgtgaggcccaacagatgtcatattctttgtttatattcaattcggcattgcccttccggctgggggacacccaccaaatggagataactctgtttgggtaatgggtccagaagactacagtcatatttataaagtattaaaataatacacatctgaacctctaacagagcaaac

SEQ ID NO: 330292 - DNA, 425 bp, Homo Sapiens
  misc_feature (43)..(43): n is a, c, g, or t
agtatgtgataacataccgtgattttccatgaagaaattcttnctgtccttagagttctcccctgctgcttgagatgccagagctgtgttgttgcacacctgcaaaacaaggcacatttccccctttcttctttaaagccaaagagagatcacttgccaaagtgggagcactaaggggtgggtggggaagtgaaatgttaggcgatgaattcctgagcaccttgtttttcttccaaggttcgtagctcctctctgcccttccaagcctgtaacctcggaggactatcttttgttctttatcctttgtcttgtttgagtgggtcagccccagaggaactgataagcaaatggcaagtttttaaaggaagagtggaaagtactgcaaataaaaatccttatttgtttttgtagactttgtaatgcaa

SEQ ID NO: 330293 - DNA, 524 bp, Homo Sapiens
  misc_feature (12)..(12): n is a, c, g, or t
  misc_feature (51)..(51): n is a, c, g, or t
  misc_feature (57)..(57): n is a, c, g, or t
  misc_feature (84)..(84): n is a, c, g, or t
  misc_feature (106)..(106): n is a, c, g, or t
  misc_feature (149)..(149): n is a, c, g, or t
  misc_feature (164)..(203): n is a, c, g, or t
ttaataaaaatnccaaaataaccccggaaatgggtgccgcagcccggtaancccccngctactcgggagaccgaggcgggagantcgccttgaacccggaggccanggttgcagtgagctgagaatgtgcactccacccgggccaacangaacgaaactctgtnnnnnnnnnnnnnnnnnnnnnnnnnnnnnnnnnnnnnnnnagaattttatgattaaatcagtataagtgtaatgaaagtgattatttgatatggtataatgaatgtgttagcatttgcaagatctgcataacttagtgaatcactattttcaaaacaaccaatgcataagagagtccaatgaattgtaatgcaatggagtacaaaagtcatcgatacagtttcaaaatctaccaacctttaagaaattacttgttgattttctcaatcataaaggaatccaccaattatcttaaaaggctattaaaatactcctcttttccatttatatgtttgtgtgaggctaaatcttcttcatctcct

SEQ ID NO: 330294 - DNA, 619 bp, Homo Sapiens
gagaaaaacagtcttcaatacaattgttttatttaacacacatatgtacacaggaacattcagcacacatagagtctattaagtggaatcattaagaaatgtctggagaggcagacattttaattcactcgctgtacacagggagttcaatcatcacattttcatacaggtgtcacgtcatgtcatcttttgcttgtaaattaccaatgaagccacatatgtctctacatatacaaggacaggtccaaatacagtgccagtgaaatcaataaaacattaaaggtgtacgctgggatgacaatgcagagtttacctcagtgctgagaaatctaagctgggatgaagtttgggactgtggctattaaaatagccaaggagagatttatgttaacaagaatgcagatattagtttagtagttagagatgaccgtctaatcatcaaacatcgtccaccccagggttttgcagccatagctttctactggccttggttgcctgtgcagacggaatacgtgaaaggcctacccacgcttgtggcccagggctattgctcctctgggccccctggctttgttctcaaccttcgtggcggggggaggcatccgtgtgtttgcggcag

SEQ ID NO: 330295 - DNA, 494 bp, Homo Sapiens
  misc_feature (37)..(37): n is a, c, g, or t
  misc_feature (71)..(71): n is a, c, g, or t
  misc_feature (365)..(365): n is a, c, g, or t
  misc_feature (367)..(367): n is a, c, g, or t
  misc_feature (406)..(406): n is a, c, g, or t
  misc_feature (443)..(443): n is a, c, g, or t
cccactttgtattaaatcaaatgcatcatcctcaatncccaaacccttttgtttatactctgatatttacntccagtgaattcttcatgtataaagttgtttttcacagccacacacttgtaccacaaatctagggggtattctttcttttagtgtccttaatattgtattactttctaatattcacactttaactttacaaatgagtagaatggaatagctgtgtttcagtacagaacttttttcttatgtttgcttgggccttcctcctctctgttacctatgttgataatctaggatttgttgtctcacatttttcccgatgttcatatgatattcaatgaaataaaatacatgtgacacananaaaagttgttttccagatacccaaatataatggggagtngcgagttagagagacagacattttcatgagctttgcntcacaggctctggttcttggctgaaaggtaccaggccgcctaacagcaccc

SEQ ID NO: 330296 - DNA, 897 bp, Homo Sapiens
  misc_feature (47)..(77): n is a, c, g, or t
  misc_feature (729)..(729): n is a, c, g, or t
cttcaaatatttctaagtataaacctgctatcttgaggtcctggtcnnnnnnnnnnnnnnnnnnnnnnnnnnnnnnnccaccgaggttttagtttgtggttcttccttcatgctttggtacaagtgcttgatgaagaagatgagttgcctgaattggagctgccctcgtcctgccacttgtccagactcctccttcttgcgttcatgaagaagttgctgacagtgctcagctccaaccccagctgctgggaaatggtgatttgcaattctttggatggacgcttattttccttgaatattgcatgtagagttcgacgctggacatctgtgaagaccaacctgggctttttgggtgtgttgcctctatccttcccatgttcttgttctttccttttgcatgcttaatgaacgatttttgtgactccatcaatactcgaatcgctttagccactcctctcacgcacttcagtcgcagaatctgcagcgagcacagaggtcactaggtggcgcgcttcgctcgtttgtttatttaattttccccattgatctgttttagaagacaacaggaaagaaagcaaaaagcacatagtttattgcgttccttcgataacctctctttgggactatgagatcatcaccagatgtgaaaacgaaagcagtgatttcagaaaccgtcgattctgaatatcccatggcggcatatgcaaaggaagatgagaaacacatggngactggaaacatgcagtgtttgacagaaattgcaagatgccctctagacaactcccagcctatatactctgttttgggtcaatttattactttttagtgcagagccctaaaatttgagttacagggcaatctttgaaataggcagggcagggcactgatgtgggagcc

SEQ ID NO: 330297 - DNA, 264 bp, Homo Sapiens
tggtccacagctctgatttttaatgagctcccatttctgaggccaatataaacttcattctatgctgcccatctctgacaggtgggcattaactaccagccccccacggtggtccctgtggagacctggccaaagtgcagctggcggtgtgcatgctgagcaacaccacggccatcacggaggcctgggctgcctggaccataagttcggccaagtgcgccttagtgcactgggtacgtgggggagggcatggcagtgggggaa

SEQ ID NO: 330298 - DNA, 596 bp, Homo Sapiens
agtccctaatccctgctcccagctgggacaagcagaagggtgaagttactccctggtcctaattcattcgcctgcagatcctttgtgaaatgactcccacccctgagtagcccaagtggtaaataactttatcagagtgaagctcttaataattcctatacataaatcagagcatgaaaagtattcattattataattttaagaaacactctccaggtcaccagaaaaaaataaatttttaattcctatttaaaccagcaaactccgcacctagatttagtcctcttacatagctaagaaccaagtcagtatgacaaagatattttctccaaaactttaaatgcaaagagaaaataaatctaatagatgttaaggagattcttacagcttcaggaagactgaatgatataaattttctttccagattcatcacagttcctgttatgtatttgctctcctagtattaaacataacaaaaaagtattggcccacaagtccaggatgaactaaagaaaaaacaggcagcaagggtaaaaagaaatttaatgtattttgcatttccttatattcattttccatttggttttctataagac

SEQ ID NO: 330299 - DNA, 708 bp, Homo Sapiens
  misc_feature (65)..(264): n is a, c, g, or t
taccccaaaccatatcattcagcacaaactgcggtacctgaaatcccagtatcagctcatagtannnnnnnnnnnnnnnnnnnnnnnnnnnnnnnnnnnnnnnnnnnnnnnnnnnnnnnnnnnnnnnnnnnnnnnnnnnnnnnnnnnnnnnnnnnnnnnnnnnnnnnnnnnnnnnnnnnnnnnnnnnnnnnnnnnnnnnnnnnnnnnnnnnnnnnnnnnnnnnnnnnnnnnnnnnnnnnnnnnnnnnnnnnnnnnnnnnnnnnncgttcccacatctatccccactcacaatgatcagaaataagaaacagctttttaaaaagggccactaaaaaatcccaaatatatgtaacacaaacagtccgacttaacaatggtttgacttatggtttttcaactttataatggggcaaaagcaatacacattcagttaaaaactgtacttcaaattttgtactctgatattatcctgggataacgatatgtggtacaatactcttatttgagatattaaacacttcattataaaataggttttgtattagatgattttgcccagctaaaggccaacgttaagtgttcagaacacatttaagataggctaggctaagctgggatgttcagtaggttaggcgtattaaatgtattttcaacttacggtattttcaatttacaatgggtctactggaacataaccctattgtaagt

SEQ ID NO: 330300 - DNA, 578 bp, Homo Sapiens
aattcacatttattttttaaataaatactctgctcttcactttcagactggagggtgaagctggacagtcgggcgggaggcccccccgcccattaggcagcattgagagctctgcggccccaaaacactcccctcaacgatgcctgaaatgcctcctgcacggctgctccttctggcctgacagctgcgcttggctgctgacgacaaaaattccctaactgcagtgtcagagttgggggcagggcccagagtgactccctgggctcctggctgacccccactgaccacagctccctgccagcggcgggccccccctcgagccagagagaactagacgcaggtgatcagcacagccatggcactgggcaccttgatctcctcgaagagcacgcggccccgaggggcctccgcacccgccgccccggccgcagctctcagcaggtcttcggtgtgctgcaagagatgctggttcagctggcggcccagtcgcgcagcgccagaatggccagtatgtggtcccgcctgcagagacatgcgggcactcactgcagacctacacctccgcaacctgtgccgaa

SEQ ID NO: 330301 - DNA, 409 bp, Homo Sapiens
aaatgttaggctcattacaagcttgatacagaaatatttctgaaggatttctaatcagaattgtaaaacaatgtgctatcatgaaatcgcagtcttcacctcatggttcatggaacatttggttagtcccataaaatcctatgcaaaacaaagtagttcaagaatttttaggtgggtagtcacatttataaggtattcctcttactctttgggctttttcagtctgatttatttaaattttcatttagttgttttacttttgggactaaggtgcaatacagtagaaggataacttcgttacatttatgttgtaggaaaactaaggtgctgtctcctcccccttcccttcccacaaaatctgtattccccctattgctgaaatgtaacagacactacaaattttgtattc

SEQ ID NO: 330302 - DNA, 410 bp, Homo Sapiens
  misc_feature (15)..(15): n is a, c, g, or t
  misc_feature (118)..(227): n is a, c, g, or t
  misc_feature (349)..(349): n is a, c, g, or t
ccctgaaaacccccnggccctccaagccaatccctccctgattccagccctccccgaagtagcctaggacctagaggcatgcacccacctatgcctcagcctaatttcctttaatgtnnnnnnnnnnnnnnnnnnnnnnnnnnnnnnnnnnnnnnnnnnnnnnnnnnnnnnnnnnnnnnnnnnnnnnnnnnnnnnnnnnnnnnnnnnnnnnnnnnnnnnnnnnnnnntttgagtgaaatttagaatgcttccttccctttacatcactttattcttctccatttataattgtcttaaatatttatttgtatttgagaaccatatcagttttttttgttcttcaaccatncaaacataatttaggaaacccaaaaggaaaaggagaatattatattgactcattttgcatt

SEQ ID NO: 330303 - DNA, 561 bp, Homo Sapiens
  misc_feature (310)..(310): n is a, c, g, or t
  misc_feature (337)..(337): n is a, c, g, or t
ttttcccctggaaatttagtttatttctatcacaactctgggtagcccctaactcgcatttgttttgagtatcacaagataagcaagcccgaagaaactacaaaaacaactttgcctcttcggtaatgcgcaggcgcctctcgctctgttttccgttggccttaagccccgccccttgtgcgtccttcgaggagggttgcgagccgtgagctcggcggaccactcttccctcagtcttctcgagcacatcgtcgcaaacggggccggaaagcgtggcagccagggcgcaaaggcagtagagcggaggcgnttggttggtggcggccgctggcagttnttaagatgggcggcggcgtttggtggtggcagtggacggggcggctgggccttgtacggaaggcggaggtccaagaattccggagtcggttgttgtcttgtggtcttgtaccctttgtaatataattatcttagtttacctcctctaactcccaaatcttttaggatatcttagaacggtcccatttggtccctgttagttggaaagcatctggtggcttgaat

SEQ ID NO: 330304 - DNA, 786 bp, Homo Sapiens
  misc_feature (555)..(555): n is a, c, g, or t
ttttgctctcaaaccttcatattttaatataaaatattcatacagcatactacacttctgtctgctaactgaatactgttactgatgagctctagacaacagataaagcaaattctctcttccaatatctatgaacagaaaattccaaacactaatgggatgtcgctttagggtagggaaatgtgttccgaaaatctgtcttggagaaagcaggcaaggaaacagcgctttttccatcaccaaatctgatcccacgcctgttggaatcaagcctggagtttatagtgttcgcatttgaaggtctctgggctgcagatcaccccgctgtttgctgtttcctgtgccgcacagtcttctccctctagaagtaagcatttctccagtcttccttttggttgtgacttctctttcttcagttaagagttaaataataattactgttgctctaaagatgagttaaaaaaccccaaagtgcaggctagaatcctgcccatgagggtgtcatgtctcaggaagctggttaatgtctgtcagtttagtatcattcagaattgncccggattctctccaaggagtcagcttgccggatccgctctaactgcacctggagaaacaatggtgagataactacaggtggctcctgcctagattttctgaactttgactggtttagctgagatgtagcagattaactcaccagagtactagtcacttcaaagggagacagcaagaacaattaaaaattttaaaaataattccccaaagctaccgtgtaacggactggga

SEQ ID NO: 330305 - DNA, 351 bp, Homo Sapiens
ttctggggaaacatttatttatctactgtacaaaatatttacatcatcagctgcaactgcctggccctttcacctggcctgacgaatctgcagcagggcttggtctctgccaattttccagaaacatgctgacactctcctaggtattcactcatgtctggtctccttcaaagacgctaaaaggccagaagggtagctggccccccaagtacctgggtcacaaggacataaataaaagaactggccaaaataagaaacactaatagaaaattgcccaagaaataacactctctcatctctttgacatattgtaccttttccccacactggctagtatgaaagcaggattag

SEQ ID NO: 330306 - DNA, 449 bp, Homo Sapiens
  misc_feature (427)..(427): n is a, c, g, or t
ttccctttttcttatgtgaagctttaaaagaattcaataaatccaaaaattcggtcaaacgtaataaatacattttaagttttaaataagtaggactacatcagaactacttatgaaaaagactttaaaaaatatcttagccagtaattttaatgctagaatataagttattattttcactaactgtcagaataaccagttgctaccaaataaggtacagataattttagttttatcgtaagacctgcaaaaagtcaattattttcttgactgccaaaatacagaaataattctatattattaagattgaatcaagctgaaacctcattgcagtccacttatggctggctgccttcccaattcggaaaagtaatgagaattttcagattcacagaatgctagaaaaaactttcctccactgtgttancacattaacagataggaaaatt

SEQ ID NO: 330307 - DNA, 430 bp, Homo Sapiens
  misc_feature (15)..(15): n is a, c, g, or t
  misc_feature (21)..(21): n is a, c, g, or t
  misc_feature (33)..(33): n is a, c, g, or t
gttaacccccctaanaacatnaacaaagtgaanaaataatcctttggggcccttttgccgaaagtaaaaataatgccatgaaacaataaaagtttaatgtgtttgggcaaacacccgcgagcccccttctccccaggacggagctgggcctctgtgcccttttgaagttgttcctttgcctcaatgaagtgttcccacagagaatgggacagaacctgctccctgagcacaagctgagggaggtgaattaaagtgcatttgcattcatgaggaaggatctgctcatccaggtgctctgtcctgtcgccgttagacgctccttggtccctcaaagagatgtcactctcacggccactgcattgcaccacctgtgagatacctttggaattgtggaaagttcagctagaaagttgtttctttttaattagat

SEQ ID NO: 330308 - DNA, 316 bp, Homo Sapiens
  misc_feature (14)..(14): n is a, c, g, or t
  misc_feature (82)..(82): n is a, c, g, or t
  misc_feature (171)..(171): n is a, c, g, or t
  misc_feature (175)..(175): n is a, c, g, or t
  misc_feature (295)..(295): n is a, c, g, or t
gctggctaaaaatnagacaagaaaaaattatttcctctaaaaataggtatattattagccaataacacagcatatttttctnctggttttacagatagctaactgcccttactaaacaacatcaaatttgcagtggcatttttacatatacttaatattattcctgtaganaganacaaaaacgtgtagttggtctacaagaacattaccaaagcaaaccagactgaaaagagcattcatccccttttgctagagtttcaacacatgacacatgactgcattttgcagccaggancccctcaacaccctggatgta

SEQ ID NO: 330309 - DNA, 417 bp, Homo Sapiens
  misc_feature (75)..(75): n is a, c, g, or t
  misc_feature (97)..(97): n is a, c, g, or t
cactggcaacaacaataatactaagataccaagaatgtgcaggcaataataccaggagctgtaaaacgtgagtgntggttttatagaaagacgcacnaaatggcacaactgtgtaacttattgctacttgagttactatccatgttataacatcataaaataatttcagttgggaaggttcaatgaaataatgtctaaagttatttctcatccattctgatcatctttatttaactcagtttttatctctccttcagaaaattctgtaaagacaaagtaacattttgtgagtgcctcctacctgccgggcacatagaaacgtgttttctcctcacaggaactgggcatggagcctagcccgtggtgagcgctcagcaaacatgcacgcagtacacacctcgcttctagtggaaagga

SEQ ID NO: 330310 - DNA, 503 bp, Homo Sapiens
  misc_feature (23)..(23): n is a, c, g, or t
agcctctgaaggcccagggtccnacacccaccttgggagatgacccactgggcctctggacaggagaatgggatttcgatggagaaagctgaagctgaccacctgctagattgaatccagctgcctcccttgaaactctcttcccaatcaaagtggtcccaaggagctgcaggccaagtcctctgctcctatttagcaagaggcaggcggcaattcgggctgatctccccatcacccttcatttaaccgcaaaaaaagtcaccaaccaacttctcagaccccctgggcaatccagggtttcttgtttcctaagctcctatggaacaagcaatcagttctttcttggacttttggttcaattccttctcattcagaggaaatatggttgccgtgtaggcagatgtctcctaggagcgtgtgtgtgtaagagcctgtgtgaaattcagccaggttagcaccaaggcctggctgatggggaacccacaaatgtgccttcaggatgg

SEQ ID NO: 330311 - DNA, 128 bp, Homo Sapiens
  misc_feature (103)..(103): n is a, c, g, or t
atctgatggtattttaactcactgaaaatgcgtaaggtgatagaagcagcctctcaaaaaacaagcaaaaacctatatggcttctgcatatactagaggttcngggtttggtgtgaactttttaatac

SEQ ID NO: 330312 - DNA, 340 bp, Homo Sapiens
  misc_feature (174)..(184): n is a, c, g, or t
  misc_feature (193)..(195): n is a, c, g, or t
  misc_feature (234)..(234): n is a, c, g, or t
  misc_feature (271)..(271): n is a, c, g, or t
  misc_feature (284)..(284): n is a, c, g, or t
  misc_feature (302)..(302): n is a, c, g, or t
  misc_feature (311)..(311): n is a, c, g, or t
  misc_feature (326)..(326): n is a, c, g, or t
cctccttagcagattacctgatgagcacaagggcgatgctaggaaaattcaaaaattccccaaactttgtcatttggaggagagagaaagatgcggatgatgccccacatccaaaagtttcttcaaagtctgtggcaaaataatggtagcaccttcagaatcttaaatagggannnnnnnnnnnccttaaaannntcacatacactgtgagagacaattgtgaggcaccagcgntttcacagtggggaggtaggcaaacgtggggcacccncaggcccgagggntctcgccgcttcccacgncggggctgnctccttcccatccgntcaacctgttgccc

SEQ ID NO: 330313 - DNA, 1036 bp, Homo Sapiens
  misc_feature (261)..(261): n is a, c, g, or t
  misc_feature (366)..(366): n is a, c, g, or t
  misc_feature (851)..(860): n is a, c, g, or t
acgggcctcgtccaagaggagcgcgcggcccgacgtccacagggggtcgtcacagaggatagtgtggcatgtaccgacgacacctaaaagcgggaatgtgtttcactacgagttgagcactagccacacacaactcacatccaacgcactcacgcgcccggaaccacctctcagcgtaaacccccgaattatcctgtgtggattcagagatgacaattactagtcgtgcgaggtacacacaaccccatatccatctacgangagtgatagtcttaactacattatacaaaattatctaaatgtaaggcagtcgagcaaaacacaattcataatattgctatgggttgagtgtgtgatccactccanaattcatgtgaacttaaatccccaatgcaacagtattaagaagtataaggcctttagaaagttattgggcaatgagggtgggccctcatgaatggattacagacttataaaagggcttcaggggaagtatgccccttctgtgaagtaaggacacagtgtttgtcctttccagagagggctgtgccatctgggaagcagagggtaggcctccccagactctcagcccaccagtaccttgatctgggacttcacagcctccagaactatgaaaaataaatgtctatggtttaataagttaccccagcctgcagtattgtgtcatagtggcacagacagttaatcatattttacaaggtgcttctatcttgggtcatgttttagctttgacatacttttattcttgttcacttcccaggactctttcaggactagtagcaggggttgactggtaatatcaaacagaaaaatccaagtatcaaagttgnnnnnnnnnngatatcttaaggacttcagttacattctgcagcctcactcttcaatgacacttatgttgattcctgctcctgagtaaaaaactgagggtagtcaattggctcttcagaagaccatctagtatttgattagcaggcttctgttttccatcagcattttgttaggcacgcaatatgtc

SEQ ID NO: 330314 - DNA, 537 bp, Homo Sapiens
  misc_feature (504)..(504): n is a, c, g, or t
  misc_feature (514)..(514): n is a, c, g, or t
atttttcaaccttatggtgttggtggagtgctcatgtgaagagtgaaactgacttaagaataaaagaaaaagtgggcaaaactaatgctaaacttgagaccattgggcagaaatttgcctgtgtgtgtagagtaattggtcttgagtcaaagtaactatgcttatttttaacatcactgaatattttctaggcgttacactctatatagggcttgtaggaaataaacccgggggtaagccccagaaattggaatatcagtcctaaaggaaagcctatccaaggggcatccctatttctcttttaagagctgctattcggatttagggactggggctgggtttgctgcttattctctccgagggcatagggcagccacacttgaattttgccaagtatggcaggtaattccaacttgtagttcagggtcctccggtattgcctttttaggggagccgtacagaccgtatactttctacagtttgttgaattggaacctttttttngggtactacnctgccaggttagggggggaacgt

SEQ ID NO: 330315 - DNA, 473 bp, Homo Sapiens
agctgtacagactgtatacttctacagttgttgaaatagaaacatttatatgatacatacatctgcaaagttagggagaaaacggtagccctggcagagaagagctagctagtgtatttcaggatagggcccaagggaagctgtcatttctcctactaagtcctcattgtggaaaagcccacaaatgtcccctagtacagtaataaggaaaaaaaggctgagcgtggtggctcacacctgtagtccccaggactttcggaaggattgcttgagccccaggagttgcagatcggcccaggacaatataagaaaaccccatgtattagaaaaaaagaattagccaggcgtgatggtgtgggtctatagtctcagcttgggaggctgaggtggcaggatcgcatatagcccaggagttcgaggctgcagtgagccatgatcgatcactgcaccctagtctgggcaacagagtctct

SEQ ID NO: 330316 - DNA, 485 bp, Homo Sapiens
  misc_feature (392)..(392): n is a, c, g, or t
  misc_feature (399)..(399): n is a, c, g, or t
  misc_feature (421)..(421): n is a, c, g, or t
  misc_feature (429)..(429): n is a, c, g, or t
  misc_feature (436)..(436): n is a, c, g, or t
  misc_feature (463)..(463): n is a, c, g, or t
ttcggcacagcaataccctggaattacttttcctcttttacttactcaagtcctgcaaaagccagttccattatgctggtctcactgacctctttctacatatttctggtaagaatgaattactttctcctgaaatacctctgccatattgtttaaaaattgccatatggtgctggacatgagtatgtgttcacatgtttattatctactctagtctcaatttctaaggtcttgaatataggaaccaatttattcatcaccttattccagacatgatggaactcaggctttattgagaatcaagtgattatagtaggatagtgaccatcctgagtatgttcatgtgttacataacaatgttttgggtcaaccaagggactggcatattgggnggtgggnctcataggttaatttgggagcngaaaattncccatgncttagcccttattcgtggccctggatnttgtagccccatggcatttact

SEQ ID NO: 330317 - DNA, 451 bp, Homo Sapiens
  misc_feature (158)..(158): n is a, c, g, or t
gagaagtgaataataggtttatttgcagtatagataagagaagagttaaccgttactgggtgagaaggaggtaatgcttcagcataggaaggcaccttgacagacaaacaatagactctcagcttattaaatcaagcatagtcacaaacttcacttgnccccaagccaacaacttaactcatttacctgctgtcctagagaatcattaacaaaaccagctggaaaatagagcgaaatgattttacatatctgggacctgccacttaaaactttatgtacagaatgcaggaaaaaaacataagaggcacttccaaatagttcttgatctaatcagtgccatctgtcctgctattaaaaatatctattatggaagaaattgggtattaaatgtgccatcaaagttggggcctcaattctaaaagagtttaggcaaaggtactctagaagtggt

SEQ ID NO: 330318 - DNA, 352 bp, Homo Sapiens
  misc_feature (340)..(340): n is a, c, g, or t
aatttggagggatatggccccagtttgggtgaggggaatggttgggctgaaaaatggagagaaattccttccttgacctgctttgttaagaaatcttattcacctttcctatgtcaagagtatgaatcttggttagttcaatgtggttacaaaacttatatgcccagtccctcccaacatctggacatgcctgtagataaagatcagacttgaacataacagtaatcctgtaatctccctgaagtctcccttggttgtcagtgtaattctaaacctgctggattattattgttattgtcatcattattattggtataactgtgaaggtgaagataattgnaaaaaataataa

SEQ ID NO: 330319 - DNA, 420 bp, Homo Sapiens
gatagactcttatctttcccatgctaaagtgcattctgctccttacatccaagagctaatattgttgtaatatgccattttactttacaagacttttgctgaataggaaaattggagacattttatgcgcataattgtgttttgtttagccagctttcttttctcatttgggtcacacttagttctccataacctatagaatttaaatctcagctttttctggttggggaatctagaaaaaatatataggatgtggcaaattgaggattgtacctaggtcaggcactgactgggcctggatatcatgggagtgtgggggttacggtacaaataggtccaaaggcaggcaaaccaaggatggaaggctttctggggtttcggttccccagtcttttgttacgggattactcccataacaca

SEQ ID NO: 330320 - DNA, 613 bp, Homo Sapiens
tcacgtttccaattgagttttattctagaacaaatggttttacaacaaagctgatcttaaatagtacatttccccgctgataacagcgccatcttccttcgacccccagaccaagggatcaaagctactgctcaattgagtttgacatcagctaccgacttttaaggaatctagaacaaagttctggagccaggccagaagtggtaaaagattcagttagccccttcctctgtgctgtgctgacagggagggagccagtgactggacaatctatgaccccaagtttgtggaacgtggggcttcagctgagggtggggtagtgtgatttcagcagtgtctgtacctccctgacccctgcgctgctttgctctgttgtcacctcccgcacagtgtcgggacactgaccggaagccaaacctgtgcctggtggccacagacaagacacacggatatccgtgaaccttgctgctgtgccctcaccgaggccagcgccccacctgctggaacagccaagccggagcagttctgtctgggccacagctgctcagcctgtggactcaggtgttatcctgaagaagttacaacaaattctcaaagaataaacaatgggctt

SEQ ID NO: 330321 - DNA, 368 bp, Homo Sapiens
  misc_feature (353)..(353): n is a, c, g, or t
caaaggtaaaaggagcttactttaaaacaccaatttcagcttttaatctaatggtactaaaatgcagaaaaaaattcctcaaatttagttgcattaccaacttctaaaatacaatcattcaaagtaaagccaaaatttagctatttggcccatggaaacaagtgattaaacacaaatttgatagttacacatcacagtacatattctcatctcaaaatgcattcctcaattatataaatgtactgttactgatgatgtatgttgtacctagttttcaagtagtttctaaaagacaatactgtaaaaaatcaagtttttataggttattttaccaattaatctggtaatgaggncacggctctttaaaa

SEQ ID NO: 330322 - DNA, 268 bp, Homo Sapiens
  misc_feature (187)..(187): n is a, c, g, or t
  misc_feature (223)..(223): n is a, c, g, or t
  misc_feature (227)..(227): n is a, c, g, or t
cattttatacacaggatcttactctatctcctgggacagattgcagtggtgcaatcacagctcactgtaacctcaaatttctgaagtaaagcagtcatgcctcctatgtctcctgagtaaatatgaccacagttgggcacactaccacacctgtatagtttctttaaaagaatctgtacaaacagantgttgttatgttgcctcggctgggtctcaaactccngggnctcagggcaatcctactgcctcagtctgaaagtgctgggca

SEQ ID NO: 330323 - DNA, 108 bp, Homo Sapiens
ttttttttcaacattaaatgactatttatttttcaggtttaaaagatttcaaaatacatatgtacaagataaataaactacacaaaaattatgtcatcaaatatattt

SEQ ID NO: 330324 - DNA, 437 bp, Homo Sapiens
ttttgacattaaaatcagcataatttatatcctttgaaaggttcaataaaatataacaaccagttagatggcaagtgggcacagagcaaatacacaaaaatcaatactttccatagataccattaaataatcaataggagaggacatttgcaataccaacaacaatcataaataatctaggcataggcataaccaaaattctggagaacctacatgaagaaaaatgtttaatcgtattaaaggacataaattgagagatgtattatgtttcccgtaggaagcttcaatattgtaaaagtggcaattatttgagttgctccgtgaactgtcctctgcattatactaggttgagtgggatttctgtcaatagtatgcaccaagagtcataactaatatatcgtgtaggtcagcagtccccagcctttttggcaccaggg

SEQ ID NO: 330325 - DNA, 830 bp, Homo Sapiens
accttatctgagtatttttgtatttctcatgccattagtcactttaaagaccttgtgaaacatggctccctagtcaggcatttgaagagtgaagagttcaaggggatgctgcccaagccagcatctcataatatttaggaagttgataagcaagttgatttccttatcacattctgtgatgctcaacaggtaggttgcaagtgtttaagaaataggttcagactctgttaaaagcatcttttaaagattcctgcagccaagttggaaaaagaggatgccccatagagaaggttctttgtcccaatatcctacgaaataatgatagccagacatgaactatacccatgaacatcacattccattggttgtagtttttgcaagcataaagagtctgccctaattgttaataagttgaaccttgcagtaaacagacttgattgactagatctggttaaatggttcacatctgaaaatagttgtggtcccatggaaagcctcatctgtctgaatacaggatcattgtattacagtttgtggtgatttgctcagctccaagcagtatagggaggtggcggtttgcagtgcctgggcagtaggtttcttacagaaacaccacctttcccaagctaaataacctactggtggcagtgctctagaaaggacagcgagaaagagaagtgcttggcatttctatcaagcaccgccttgagtgacactacagaccccttccaaacatgctcacggctggtcagctcagggtcaagttctggcttgtctagtgttccagtctctatcctggtgtggctacaccttaagattcctgtctgcaa

SEQ ID NO: 330326 - DNA, 574 bp, Homo Sapiens
  misc_feature (16)..(16): n is a, c, g, or t
  misc_feature (27)..(27): n is a, c, g, or t
  misc_feature (34)..(34): n is a, c, g, or t
  misc_feature (41)..(41): n is a, c, g, or t
  misc_feature (52)..(52): n is a, c, g, or t
  misc_feature (77)..(77): n is a, c, g, or t
  misc_feature (86)..(86): n is a, c, g, or t
  misc_feature (113)..(113): n is a, c, g, or t
agaagggaaaaaaaanaaatgatcaanggaaaanggcaccnaatagggaggnaaaattatagcaacctgttgaaaangtttgaacncttgcactttaaaaatgttaaatgtangccccccgaaccccaatgaacaccatggaggaaagcaggcctcaggtgtgaaggccatgccacccattgtcccaatgtggaaaattccagggatcaggaataagaatgccattaaactgttgttaacactggtctgctgaagctcctgtaggatgtgacctgcccaagagtcaagaaagtcccagcacaacactacagcacccaggtccgcacagcaccatgcacagagcaccactggcttttcacagcttgggttcaacttcctgtttttaaagatacagtagccctttttcagtatcagcatagactttgggggcattttttaaaaaactgccactaagacaaattccttcagctcagcatgcattggcttggcaacatgggtgcacggcccctaagaacctcgcactccagctccagcgtgaggtgctgcctagtgaaccatgacatcgtgtgactct

SEQ ID NO: 330327 - DNA, 605 bp, Homo Sapiens
  misc_feature (162)..(162): n is a, c, g, or t
  misc_feature (255)..(255): n is a, c, g, or t
  misc_feature (296)..(296): n is a, c, g, or t
  misc_feature (432)..(432): n is a, c, g, or t
  misc_feature (447)..(447): n is a, c, g, or t
  misc_feature (511)..(511): n is a, c, g, or t
  misc_feature (521)..(521): n is a, c, g, or t
  misc_feature (528)..(528): n is a, c, g, or t
  misc_feature (539)..(539): n is a, c, g, or t
  misc_feature (562)..(562): n is a, c, g, or t
  misc_feature (578)..(578): n is a, c, g, or t
  misc_feature (587)..(587): n is a, c, g, or t
ctttttataacagtcattgagtctgtttcaaaggaatcttgtggtaagtatttttgcatgatgtactcaaggtatcaagtttaacaattgactttttttcattggaaagtatatgtgattaactagcatggattgcttcttgacctgcttgttttgtgtttngtctttttcttctaatataataaccagggattaatgaaaatcaagttccatcctcagacaagaggtaaagttcacacattcttccccatgtcntgttcagaaaataaacctattcagatataagttaagctaantttagtaatcctataattgtcctctgagagatttaagatggatgggccacttcacagtaagcagccaactcacggggagcacctggggcaaccgctagtgggacttttttgtagtgagtgtgttgatcatagaaantgtaggtataagganataaactttgaggatagagattaacttattttgaggtattatatataggttgtgaagagtggtngttgtcacanttatggnctccgggcccntaatgtccgattcctgtaggcgnagccagccggttttcntctgtcccnttcttttgttgtggtgtc

SEQ ID NO: 330328 - DNA, 515 bp, Homo Sapiens
tttataaattaaattttttattcatttttttgcatcaaaatagtgcttaaaattggaatttatactcacaagacatagctaacatccaaagtagacaattaaaaaatattatttgaaaattatgtacttagtactgaagacttcctaaatttgcacattagctagattgccattagcaccattagagagttgatctttggctaatgattattcaggaaaatttcaaccattacaatcagtgagtataattttatatttcagcaacgatagtgggtcatgttcagcaacagcttcacttacaaattaaagtaagctcacttcagtgttgcactctgatgctgtttttttaccccttctcttgcaaataaccagtgaaataaaaattgcttctaactggcaatcgaaacaagggaggaattatggctagcaactagttgctaatgtctgtgttttttttatttaagaaacattttaaataatagagatggggtctcaccatggtgccaggctgggtt

SEQ ID NO: 330329 - DNA, 478 bp, Homo Sapiens
  misc_feature (42)..(42): n is a, c, g, or t
taaggtaaaggttccttagggtattaataccagcttgtaggnaatcggtaccagccaaccaatggaccataaattataagcccaattatgcatgctgagaaaggaagctgatgaaatacccataacccaaaagctctggtccctttgtccatattaggtccaagttggcctcagtcctaaagtgcctcacaatcacccacccacctcccaaatgctgaaaagatatgagaatgttcttcctcgtctcttggctcttggctatgtgttttgattttcattttttggagacagacatttttaaaatcatatagttaaagggtcttttaaaaaagaaaacattccaatgactgcttgatttcttttagtgcttaaacaaggaaagcagaagtaggcaatattaatattccatcttagcttttaaattgaaataaaagatggaaacaattttgttttctttttcttagagataaatctgctt

SEQ ID NO: 330330 - DNA, 417 bp, Homo Sapiens
  misc_feature (346)..(346): n is a, c, g, or t
atatagatataaaattatcctcacagtaacatagaatctcttggtgctgtcagctgttgggaattgaagattgactttgtgcttccaccctccatccagaaaggcacccttcattccaccagaactttacccagggaagaacacgatcatttcctttttcaccgatgccctctctcagctttctgagtacgtctcttggggtcgctggaggtgatcctaggatctgtctctgagaccaatgtgctgtttcagccccctggcagctaagaattgtatttgactgtcctcacagcggctttttcatagcttttcagctttcagtttttacggggggtttttcctcttnttcccgggggaacccggctgggctggcctcaattgtttaacaggacagggtcccaccaaacccaaacaccg

SEQ ID NO: 330331 - DNA, 447 bp, Homo Sapiens
  misc_feature (416)..(416): n is a, c, g, or t
  misc_feature (431)..(431): n is a, c, g, or t
ttagcttttcaagtttatttaaaaaaagcagaacacacaaaaatacatacaacaccccagataatgtcctttacagaatcccagtatgtacaacagatacagcagagcctgtctgttggaaggtgggaggccctgcagccctgtctccctgcctcctgctctatcgccacacccccactgcagcctacaaggttcctaaggtacttttggaaaatcctaggcctctgaggaacagtttgaaagactactttagaaaatctttcaagactaacgttcaactctatcctaaattataagataaagaggttgatgacaaactgggaaatcagcctcatgcaggaaggaaaacaaacaggggtttaaagcaccctaggggaggaacacaatgtacacaaagcacaagggcactcaggttntgaggccccgttcanatgttgacccgggggg

SEQ ID NO: 330332 - DNA, 310 bp, Homo Sapiens
  misc_feature (191)..(225): n is a, c, g, or t
  misc_feature (300)..(300): n is a, c, g, or t
tgtgaaaaagagagacagccctagcctcccagcctacgtctttctcccatgctggatgcttcctgccctcaaacattggattccaagttcttcagttttggaagtcagactggctgtccttgctcctcagcctgcagatggcctattgtgggactttgtgatcatgtgagttaatacttaataaacacccnnnnnnnnnnnnnnnnnnnnnnnnnnnnnnnnnnntccatcagttctgtccctctagagaaccctgactaatacagtctgtcacactgaccctccactgagctgttaacncttaagctgt

SEQ ID NO: 330333 - DNA, 622 bp, Homo Sapiens
  misc_feature (24)..(24): n is a, c, g, or t
  misc_feature (42)..(42): n is a, c, g, or t
  misc_feature (52)..(52): n is a, c, g, or t
  misc_feature (110)..(110): n is a, c, g, or t
  misc_feature (492)..(492): n is a, c, g, or t
  misc_feature (539)..(539): n is a, c, g, or t
  misc_feature (576)..(576): n is a, c, g, or t
  misc_feature (598)..(598): n is a, c, g, or t
  misc_feature (609)..(609): n is a, c, g, or t
cctggtagagggagcacttttcanccccaccccggattaagngaaaagtaancagcaactgggctggagtacctccgggaaaaaaatttacccccccaacccccattttntcccttaacaatattggtttccctgctgaagcccatgttccacagggttaaaaagaattcctagacagaaatatagctataattaaagcattattcagtctgtgctttgaccccacttcccttgtaactgaaagtcacataacactggatactgaccatttgcatccctggttgttcctatagatagtatttctggccttagattgggatctctgggtgttaggaatcatgaggcttttgtttaagaattgtttaagtaggatcctgaattccaatttaacaggctgagggccatccagtttaaaggaccctcacaggaaggaaccgaatcaggcctaaggaatagtttcttcattttccctgtcctatggggttttacccnggcattcggttggacccgttccaatctggtaacactttcaaccccantcccaaaaccccttaaaaacggtagggccccaaactncttcggggaggtagggttttgngggtttccccnatccccgttcggg

SEQ ID NO: 330334 - DNA, 459 bp, Homo Sapiens
  misc_feature (28)..(28): n is a, c, g, or t
  misc_feature (41)..(41): n is a, c, g, or t
  misc_feature (56)..(56): n is a, c, g, or t
  misc_feature (119)..(119): n is a, c, g, or t
  misc_feature (126)..(126): n is a, c, g, or t
  misc_feature (139)..(139): n is a, c, g, or t
  misc_feature (153)..(153): n is a, c, g, or t
tccccccccgggccaacggggtgaaacncctgccctcaaangtaaaaaaaataatnatgttttaaaaaatattttccaatgtgggagaccaagcctcaaaatggaaattagaccacatncccattnccccggtaaaagnaggggaaaccctgnccttgatagtagtattcaggaaaaaagagttggcagttttatttggcccaaatcccaatatcagctcatggtacagcacaccgggggagggggacgggaggcgagaactaaggctttttaagaatgtgttgatggaagtatgtgcctagatcaaaagaataatccccccggactccagtttaagatcaattactgttggaatattgtgttcctttctagatatcacattttaagcagactttggccaagtagtacagtgtttgcaggagcagtaacaagatggtgataactttgaaaatacttctc

SEQ ID NO: 330335 - DNA, 498 bp, Homo Sapiens
  misc_feature (20)..(20): n is a, c, g, or t
  misc_feature (46)..(46): n is a, c, g, or t
  misc_feature (54)..(54): n is a, c, g, or t
  misc_feature (116)..(116): n is a, c, g, or t
  misc_feature (141)..(166): n is a, c, g, or t
gaggcccaagaattcggccncgagatttattaggacctttcttttnttcctctnttcattaaaaaaattaaaatattcaggactatcagctcctcttttgctttgccttttctttnttatataaaatatcagcaagctgcnnnnnnnnnnnnnnnnnnnnnnnnnntttttttaatggggttggggggaacaaaaaggaaaataattgctgaggtaacttcataccttgaggtagtttacttcgcacacagcattgcctgactacgcccacatgttgcggttgtcttgttgttactgttgttgcaatgttgaaaggaggggaactccacgcatgggcttttccatatgtagagaggccttcctcccttcccagcacacttgatagcattgtccagggtagctaaagtgcattacctggctaatatgcattgtcaatcagtatattaggaggagaggcctaacctcatttaactgatggcttctgtctcccacaagggc

SEQ ID NO: 330336 - DNA, 404 bp, Homo Sapiens
tttttccagccaccgcagggagctccagcagagtcttactgtttcctctccaaccagggctccaagccttagggctctgcccaaagacccagaagacatctttgggacaagtctctaccccaaacactcagtgggtgaatgacgaaagactatggggggcgggggagaaaagtgagagagaaaaagggaatagagtattttcaagtgtaggtgcttatttctggaaaaactaagaccactctaccactcttctaaagggtagggcagaaacctcgtgatgaaatccctttcccatccacccccacccgcagccccgtttgtgtcgtctaaccaagtctccttggtctctgttaagggccagcctgacccctagctgggccgctctcgatgggtaagttagtgag

SEQ ID NO: 330337 - DNA, 172 bp, Homo Sapiens
  misc_feature (41)..(41): n is a, c, g, or t
  misc_feature (71)..(71): n is a, c, g, or t
tactgtgtcccagcagtgaacatttgaatttgcaacccacnttttatcctacttttacaaatgagaaaacntgaggctcaaagccaacaaacaattggcttaaaatcccatgctaagtagcacagactggaccagaacttagatacaaacttgatttaagaagcctctgatc

SEQ ID NO: 330338 - DNA, 261 bp, Homo Sapiens
gaccggctactgcacagaccacgccaaccctgactcatggctgccggcctccccaatgttttcttttagtagtttcgtagttttaggtcttaggtttaagtctttcatccattttgattttattattgtatatggcaagagataggggtctagattcattcttttgcatatggacatccagttttcccatcccatttattgaagagactattctttccccaatatatgttcttgggcacctttgttgataatgaattcatt

SEQ ID NO: 330339 - DNA, 457 bp, Homo Sapiens
  misc_feature (18)..(18): n is a, c, g, or t
  misc_feature (28)..(28): n is a, c, g, or t
  misc_feature (53)..(53): n is a, c, g, or t
  misc_feature (82)..(82): n is a, c, g, or t
  misc_feature (90)..(90): n is a, c, g, or t
caactcctgtaacagggncacgggtccncaacctgtaatccaggccattaagnaattaccctaggaaagcgggccgggccgncggggtgncacgcctgtaaatccccagaaattaaattacttaccctttttttaagtgtgttactctcccacacccccttccctgttttgaaagcagggagaaataatgatgtatacagtatcttctgaactatacaaattacagataagctttaaaggtctctaggaagctactactgtttcaccataagaactccaagtgggccctaaatctcctggtccttgacttcagccactgctaggaaaatgtcaatacacacacactcctatcttaaaaactctgtgcttgagaagaaggatggtttgctttgatattagactagctttccctggcagctgcaactagggaacctaatttttgttaaagctacaagtc

SEQ ID NO: 330340 - DNA, 327 bp, Homo Sapiens
  misc_feature (258)..(258): n is a, c, g, or t
  misc_feature (277)..(277): n is a, c, g, or t
  misc_feature (312)..(312): n is a, c, g, or t
gtagagacaaggtctctctttgttgcctagactggtcttgaactcttgtcttcaatcaatcctcccgcctggggtctcccaaagtgctagggattatagggcgtgggaaaactaaggggaatgggtgtggtagatgggcccttcaggcggaggggtatcacatgagcagggaatagaaaggtactgaatctagataaggcctagcaatcggcttgatttggctggagtcagaggcttttggcaggagagggatgagtngcaaagtgctattgtggcnagggggctaggagttctcaaaagtctaggctaagncctaaaagggatttt

SEQ ID NO: 330341 - DNA, 411 bp, Homo Sapiens
ctgctcatgtaatagtaagattttgttgggtaaggttgagctatggagggctacgcaccattctaacgtcttaactttttttctccctcgccgacaaaccctattttgcccctttgggtatgatattgccccccgttgagagtgtatgcccttttaagaaattattcatgcccagatgttcccagaatccctaattttttgaattttagaaaggcattatggtgcatataacttgtataacacctccagtgaggtttgggatagaaccctgtatagtcaaatattatgaatgtttctgtagcaaaaatatccagttgaaaattaattgagattatatatatagagactataaataatctcatgtgaggttcagattttgccgccaaatgtgttttgagactatatttacta

SEQ ID NO: 330342 - DNA, 435 bp, Homo Sapiens
  misc_feature (362)..(362): n is a, c, g, or t
  misc_feature (373)..(373): n is a, c, g, or t
  misc_feature (405)..(405): n is a, c, g, or t
  misc_feature (417)..(417): n is a, c, g, or t
ttaaaaatacagcttttattctgagacattgaccttcactagagtgggacctgtggccccagcctggctgcagaagcagtcccagggcctgagtgacaccatttccctttcctgaaataggaacaagttattccaaaggagaaaggagagcccagagagatctgtacaggacctctcttgcacatggtgactggaggcagagggtggggagctggagaggagtccagtccctccaacaaatattgagggcttcaaagagctcttcctggacgtttctcttaatctgggatttaaaaggggacagggaggtatcttaggggtccaaggaacataacagggaatggggcaactcttaggaagtnttttgttgttnttgggaagggccctaaacctggggcccttttncctccctgtttntaacctttgggttttcca

SEQ ID NO: 330343 - DNA, 446 bp, Homo Sapiens
  misc_feature (17)..(17): n is a, c, g, or t
  misc_feature (22)..(22): n is a, c, g, or t
  misc_feature (35)..(35): n is a, c, g, or t
  misc_feature (55)..(55): n is a, c, g, or t
  misc_feature (92)..(92): n is a, c, g, or t
  misc_feature (107)..(107): n is a, c, g, or t
gtgctcagggagcaggncctgnccccatcccctgnggaacactcatgaagccaanggaacaactccaaaaggcacagaggccccagctccgncccggagaaggggcncgcggtgttgcccaaacacataaactcctatgttcatgcattattttacttcgcaaaaggcccaaagaataattatcacttgtcatgtcttaggagtaacactcaataagcttacctgtaaaccttggattagtaagacaaatttcaacttgcccctgttatgcacaaccaacatccttttaacataatcatggtttcctctacagactttttatcattacaaagtaattaaaatttttatcatccaatcttatgtttatatattgttgttgttatatatgtttatccaatcttacgtttatatattattgcgatatatgtttacgtattgaaaaaagt

SEQ ID NO: 330344 - DNA, 558 bp, Homo Sapiens
  misc_feature (47)..(47): n is a, c, g, or t
gcctttcttatagggaccaacagttggacaggtatgttagtcaagancctcactacccattgcccattctgactctcctacctttcttttactctcctgctcctttgcacatgatttgggcctgggtgggatgactaatagttattctgtgggaccctaggtgaattccaaggacctctgtagtgggcatgagcaagatattccatcctacatttcctctcacaaactaccaggtgttctttagccactctgtgggaagacagaaatatgcccctcatccctctggatttttctgctgattctcttccctctcccccaagaaaccaaatccccaacttttctgttgcaccgtctcttgtctcctgaccaactcatgctccctttctttctctgcctgtcatctagggatgggagggaaccaggggggacggccgctgttgccattggaaggcaggatatggaaggatggaaaaaaggtggaaggccttcaggagtttaccctcttttggaggccgaaaccttaaaattaaaagttaaacaaggttaggagtttggggt

SEQ ID NO: 330345 - DNA, 445 bp, Homo Sapiens
  misc_feature (435)..(435): n is a, c, g, or t
cagtttattgtatacacacacatttcactggtggttgttttttttaaaaagtctgtacaattgacaagacaatacaaactagctacgatctgctagctacacattaggacattaacatagcccatggtttctgccctaaaacaggcaattgtgctactccaactctctaagagagattttccagctcatgtcgtgtggcccagggtacctcctcttctgtaacttccacctctgggaactggggcccgcaagcccaagctctatcttgtttacttttattttagggttcgggctcaaagaggggtaactctgagggctttcactttttcatctttcatatctggcttcaaggggcacagcgggcgtcccctggggggtccctcccatcctagggatggacagggcaggaggaaggaagggggaggcatgaggttngggtcaggga

SEQ ID NO: 330346 - DNA, 517 bp, Homo Sapiens
  misc_feature (76)..(86): n is a, c, g, or t
gagggtagtttgtagatagatttctcatagatttatttctgcgtcatattatatatagatatatgcatatataccnnnnnnnnnnnaatacaatctatatacccttcccttccccaccaaactcacaaaaggagattaaacccttccagggttgccatcaagcttcccgagatggccagggcaaagaaagaatcatctctcaacatgttaagaaacggctgccattcttaggctctggggttgaagcagcagcattcccaggacccaagggccagagagaggaaaagaaatgactgtagtgtgacaggattctagggatgaacatgtccagtgactcctggcatggcagactggctcccagaattctcagggtgtgagtaaaggtgggggccctatggctcttcagaggctgctcaataggtcaggggtagggtataggaactggggatcaggcatgcagggatggggttgcagaaaaacgcctgtgggttatgctccagacagagcgaccccatca

SEQ ID NO: 330347 - DNA, 248 bp, Homo Sapiens
  misc_feature (51)..(51): n is a, c, g, or t
  misc_feature (135)..(135): n is a, c, g, or t
  misc_feature (214)..(214): n is a, c, g, or t
  misc_feature (231)..(231): n is a, c, g, or t
tttttaaagaatgcacctaatagagtgggtatattaaaaaagatgtaaaanggcaggtaaatgaaaataaaggatagggaaaataaaccatagtcaagggtaacatctatatataggataggaggttcacataantttttcacacagctactacagggcagggctgttttccacccatctgggctcttttttccaaagtcttcaacaaaggggnacacattcggttatggnggtttccccccgggggg

SEQ ID NO: 330348 - DNA, 270 bp, Homo Sapiens
  misc_feature (24)..(24): n is a, c, g, or t
ccccatttgacctttttataaatnccctagaggtcttcattaaacagttatacacttaatattcccacaactactctcagttcctcattcaatgtcctaaggaaatatagatgtatatagtaaaatattttgttgttttacttatttcactctcctcttgtcagtttctagctttactttcatttaccacataccaatatgatagcctactaattttagatggacttatttgtgtttgtgaaacttgatctcggtcttagaaaattttta

SEQ ID NO: 330349 - DNA, 720 bp, Homo Sapiens
  misc_feature (15)..(15): n is a, c, g, or t
  misc_feature (165)..(165): n is a, c, g, or t
  misc_feature (178)..(270): n is a, c, g, or t
  misc_feature (326)..(326): n is a, c, g, or t
  misc_feature (361)..(406): n is a, c, g, or t
  misc_feature (679)..(679): n is a, c, g, or t
agttcggcacagctntgcggcttctcctgaggtaatgattacccccccacccacagctgagtctgtgaggccccatcctttccctacgttttctcccatcttttttcctcttcaatctcccagtcatctggtttgtttgtttctttgttcgtcctgagacggagnttggctctgtcgnnnnnnnnnnnnnnnnnnnnnnnnnnnnnnnnnnnnnnnnnnnnnnnnnnnnnnnnnnnnnnnnnnnnnnnnnnnnnnnnnnnnnnnnnnnnngcatcaccacgcccagctaatttttgtatttttacgtagagacggggtttcaccantgttgcccaggatggtctcgaatctcctcacctcnnnnnnnnnnnnnnnnnnnnnnnnnnnnnnnnnnnnnnnnnnnnnnatgagccaccgcgcccggccccaatcatctgtttttaaacaatcgtttttgagcagatagctattcattccagatttccgtgtacccattctgtttcaggagctcttctaggtaaagctgagatcacaggaacagcaggtgacaggcctagctatagttaggaatacacaagcggtaaaatcgagtccttacagccataccacaaggtacgtccatttggacttacaagaagagcttccttttaaagttcctattttcaggcataaagagggntgtccttttttttgagggattagtttgggaccttgtggcct

SEQ ID NO: 330350 - DNA, 423 bp, Homo Sapiens
  misc_feature (347)..(347): n is a, c, g, or t
  misc_feature (360)..(360): n is a, c, g, or t
  misc_feature (403)..(403): n is a, c, g, or t
gatctcactggaatcaagattaaagttagattttaggttggctaaggaaggtgagcctgtattttcaaaggatatgactcattacctggtcttttttttccccccgagtttccagtttaaggatctgattgatgatagttcctttggttttgaacctttctgcttttgtgttcagtttgtgcttctagaatatagaatttaattgacagttgtactttataaaaaagctcacttggttacttaagatgctatctgcccaatatatagccagtgtctttgtctattagagagtagcattcttgattccattaacgtgccatgtcctttgttttacccattttgaactntgttatgaaattncctaggagggtcttgcattgaaaccattttataacacttgaanattccacaactacttttcag

SEQ ID NO: 330351 - DNA, 382 bp, Homo Sapiens
  misc_feature (20)..(20): n is a, c, g, or t
acctttaataataaaaggcnaaacatgtaggacctatttgggaaattaccagaaaagtaagttttttagtcccccttttaactgaaacagcctatggataacctccaatagtttggcattccaaatgtgaaatgtataggaaaaaattagagttgtactatataaaaaacattttccctgtgtgtcccttcaaagaggtgttaaaacatgactaatgggtaaaacattttatcccactaagatgcactatcacttagctactttatcaccgactgggtcatttaggttgcttctgacttttaagtattataacactaaaatttacgtattcttttgacagtgcacatttctaaatatttctttagataatttttaacttttt

SEQ ID NO: 330352 - DNA, 487 bp, Homo Sapiens
  misc_feature (389)..(405): n is a, c, g, or t
  misc_feature (418)..(418): n is a, c, g, or t
  misc_feature (421)..(421): n is a, c, g, or t
  misc_feature (452)..(452): n is a, c, g, or t
  misc_feature (474)..(474): n is a, c, g, or t
gtatagtcacagaattgtgcaacaatcaccagtatctaattctagaacattttcatcaccctaaaaagaaatcctgtacccattagtagtcactccctgtttcccctactccctcccaaccactagtgtactttctgtctctatgaatttgcctagtctggacatttcataaaaatggaatcataatatggcacagccttttttgtctggcttttttcacttaggcataatgtttgccttctcaagagttacccatattgtaggcattgtgtcaatatttcttttaatgtaatgtaattacaatgtaaatgtaataaggtgtaattaccaatgtaatttacattgttaaaaaatggactgagggcggccctttttttaaacttcccggnnnnnnnnnnnnnnnnnagggagttggtcntcnggtaatttcccaaaatggggggggatttttnttaaaattggggttttttcccnaatttcattaaag

SEQ ID NO: 330353 - DNA, 598 bp, Homo Sapiens
ttaattaataaatagacaaacttcttatatctctgccttctgaccatcaaactgaataattttaattcaacaggtcttattttcatttcctttgaaattttcctaattgccttcctttccaagtttaccataggtgccttgattcctttctggaataacgcaaaaaagaaaagaatggaaaaataaagtaagggtagggaatataaagaggttcctcctgattctaagtatcggagccaaaactgtggtgtagctttcaggaaggggagaggatggcacccatctctccctcaatgccaggacctcccctctctgaggacctactcaccatgctccctccgacagaggccagcacttcagactggttgagggggaagccagcaccacaaagctgcagggagaagaggttgggaacgtgggtctgctttaccagagagtcaaagaaaggctccagggagtcgtcaggctttggcagaaagagacaaggagtgagtcctcatacggccctaaaggcagaggccagcttcctgtctaaactggaaggcaaatttgaaggcttgggggatgctccttgggaaagaccatcttaaggcactga

SEQ ID NO: 330354 - DNA, 420 bp, Homo Sapiens
ggcacgagcccggagaaggtggagggagacgagaagccgccgagagccgactaccctccgggcccagtctgtctgtccgtggtggatctaagcctcatctgtatcctcttgtgatggcgtgaaggaaagccatggcagatttccagcctggtgatgctgtacagaacacaggtggcctgcttccatgcctcctcagcttcaagaaactagaatgaatcgaagcattcctgtggaggttgatgaatcagaaccatacccaagtcagttgctaaaccaatcccagaatattccccggaagaggaatcagaaccacctgctccaaatataaggaacatggcacccaacagcttgtctgcacccacaatgcttcacaattcctccggagacttttctcaagctcactcaaccctgaaacgcttg

SEQ ID NO: 330355 - DNA, 362 bp, Homo Sapiens
  misc_feature (345)..(345): n is a, c, g, or t
ctttaaagtctttattatcccgaatataaaagacagagtcctctaggatataacagagttctttacgtggaaacattatttttttacaagtgaaaaaataaatacctcttggaataaaggcttatatgctaatatgtgccataaaaaagtagagttttaatatttgacaaaatgtctgtgcaaagaaacaaatgcataaacacattactgctacattaagggcaatatgaaaagtatactcaggaaatctcaggtaaaggtgacagtgtagggtttctaggctttacccttaggctaggtattgcacccgataggggtcatctggggctccccgacatcccaggnaaacctgctaggctggc

SEQ ID NO: 330356 - DNA, 142 bp, Homo Sapiens
aacagcgtctttcaaagagcagagagaggttaattttgatgatgtccagtttgcacctttgttgaaaattgaccatatatctgtgagtctgtttctagactctttgttctgctttattaaactacttgtctatttgtacacc

SEQ ID NO: 330357 - DNA, 341 bp, Homo Sapiens
ccccataacacctcttttatttttcagtatattttagaatttatcacattgtactttaagtatttctggctgtcttattaaagaggccaaactttttttgcaggcggtgggagataactcctccttgaggaggacagctaccccataggcagtgtgctcagaatagcctgaactaccatctctgagagtccagaaattcaggaattttgtcttgttcttctttataccttagtagacatttgaggtgtgttcgtttgtttgttttgttttttcatgtaataggttctgaaccaacatttgttgaaaaagtgaatggaagcctgaaatataaataaggcttt

SEQ ID NO: 330358 - DNA, 534 bp, Homo Sapiens
  misc_feature (20)..(20): n is a, c, g, or t
  misc_feature (82)..(82): n is a, c, g, or t
  misc_feature (340)..(340): n is a, c, g, or t
  misc_feature (371)..(459): n is a, c, g, or t
  misc_feature (521)..(521): n is a, c, g, or t
aacctcccagggatgggaanggtagagaggaacctgccgggcatcctaaggggcttgcctctggaagggggtcgggcacccnaaagcccagcctggcccacgagcaagcagacgggccccctggcttcctgcagggcgacgacactgtgtctgactcagggaagggcactcaggtcaggcgggggcgcgaggaagctcacctgcaggctgggccgtgacgacggtgcaggcagggctctaagtggcaagttttacgcagacagccccgtggaaaaaaacaacttactttgcacaatgatattccctgcttttcagagcagttttttaggggttgtttagnagaagtgggtaaaggtttgttttggttttgnnnnnnnnnnnnnnnnnnnnnnnnnnnnnnnnnnnnnnnnnnnnnnnnnnnnnnnnnnnnnnnnnnnnnnnnnnnnnnnnnnnnnnnnnaacaaacaaacaaacaaaaatttcagtgactaaactttaagaaggaatgaagcccacacagnaactctgtatgat

SEQ ID NO: 330359 - DNA, 364 bp, Homo Sapiens
  misc_feature (48)..(48): n is a, c, g, or t
  misc_feature (126)..(126): n is a, c, g, or t
  misc_feature (154)..(202): n is a, c, g, or t
aaagtgtttgcattgtgccagaacctctgtaggtcattacagtccatnaatggtgaacaaagcatggccccttagtgttatgttaccaagccttcatattccttactgaattaaatcctaagtatnttatatgcttgtaactgttgtgaatggnnnnnnnnnnnnnnnnnnnnnnnnnnnnnnnnnnnnnnnnnnnnnnnnnaaattaactcttcatgttttccagttgattattgctgggagaccagaaagttgttcatttcccttcaggcctttctaaagtcaacatttcttgtgccaaaaacatgtcagtctactcctggccagtcacatagaggttttttccagggtatcatggtgctag

SEQ ID NO: 330360 - DNA, 305 bp, Homo Sapiens
  misc_feature (44)..(44): n is a, c, g, or t
cacacacctcaaacccatagcaaatattatgaattgtgttttgntctacaacctgccctttacatttagaataatttttgtataaatgtagttaaagaacctactcatctctttccctagattggatatagagggtttttttgaaaacccttggaacacaatttttatttgctttctttgctacagtagtaccaaagcagtagatttaaattagacggtagtctaatagacataaagtagtagatacgaagtagatttaaattagagattttaaaacagtgtatttttatgtaagtagcttagcc

SEQ ID NO: 330361 - DNA, 191 bp, Homo Sapiens
  misc_feature (168)..(168): n is a, c, g, or t
ctgtttgtttagattcctctttgtgtccctgtgcttttggaggtaaggatgctccttttctctgggtgccagggagagcacctcttacatgacagtcttatgatctacttcaggggaaggtcagaaaatccttcccaggttttatggctgcttctgggggagaaccancagggcaggaagggtcagagtca

SEQ ID NO: 330362 - DNA, 118 bp, Homo Sapiens
aatgaggcataacatgccatatggttaagtgcacaaatccttaagtgtacagtcagtgaatttttggcatgtatgtatgtacctgaagcaagatatagaacttatttacttgtaaata

SEQ ID NO: 330363 - DNA, 436 bp, Homo Sapiens
  misc_feature (31)..(31): n is a, c, g, or t
  misc_feature (158)..(158): n is a, c, g, or t
acaagtggccgggaaccttggggcaacttgnccttaatcaactgggtccacctgaagtcctgaaaaagtcccccagctgaaaatccttgccccttaaagtgccttttgctgcctatttttttgcccccccagttcccacaagatcccaacccaagaantcctgtatcccgggacagtcagattccttctaaatcaggcccaggaaggaggggaaaagagtgagagaatggtattcccagatacttcttcctcctgccccttttcccagcagctctgagaccagatgttggctgctgtacttactccctgaggtagggaatgtgtggtgatcgagtggtctgtgttcctattgctggtggggtgatagggtgggctaaaaaccatgcactctggaatttgttgtattttctcccagtaaagcttttcttctcattag

SEQ ID NO: 330364 - DNA, 360 bp, Homo Sapiens
gaattggcctgataaaaagcctaaatttccctttttaattttcttattttttaaggaagattagaagccagcaagtccctgtgaatttcatttcctcattgcattctccctaaacctcatgcaccttctgattaaaaggaagggtgtagtcttcatcttgaatttcattttgacaaaaaaaattagtttcaatcatttttctttataaatatttgtaaactctttcctctgtgcattggtgccagagtctggctctattacggtcatccacaattgatcttgaaaatatggcagaaatggtatgctggaagccttggagaatatgttttaaaagttcagaccaagttctgttttagtcag

SEQ ID NO: 330365 - DNA, 462 bp, Homo Sapiens
  misc_feature (60)..(119): n is a, c, g, or t
  misc_feature (331)..(331): n is a, c, g, or t
  misc_feature (390)..(390): n is a, c, g, or t
aacagggtctccattaaggttcctccagaactggtctcaaaactcgtggtctccaagtgnnnnnnnnnnnnnnnnnnnnnnnnnnnnnnnnnnnnnnnnnnnnnnnnnnnnnnnnnnnncatatagattagtttctattttaagacctcactttgccctgggaactgaaatttaatcttggtcaatgtcagccaagttccttctttctggaggtttgtctaaattgacaggggctggggtaatggaggaccaagggcacgggaaggagtgtactccatccttgaacaatcatttacaaatgtatctgcaaagtttcttcttcctgtttgcngtttttttctgttagttcctaggcctctgcctaggaaacggaggtcacaggaccaagcngggctatagctgtcttattggggaactccggaatttcttctgtcctaaatccagtggtaccctgtgccgaat

SEQ ID NO: 330366 - DNA, 454 bp, Homo Sapiens
  misc_feature (14)..(14): n is a, c, g, or t
  misc_feature (31)..(31): n is a, c, g, or t
taacaccgtggggntttgcccatgttgcctncaggctaaatctcaaaactccctgggctcaagcaaaacctcccaaacttagggggcacccaggtttttgaagaaaggaaagctttacttagataaccaacaaggaagacaggagtccagctcaaatctgtctccccgcaaattggccttaaggtagtatgtttattaggaaaggtttagggggtagattctggggaaggaaagaggaagtctgaaaagtccttggacgtgcacagttgtctcttcatgcctctttatgggccacatgtgcaaattctggagtagctggaatgaaatgtggaaatttgggctgtgatgtcagcaagctcagtctgcacagactctagttggtcatattagttccagccaatttcagtcagttttgttatcttgcaagtggagagggctttagcaagctgtttct

SEQ ID NO: 330367 - DNA, 399 bp, Homo Sapiens
aatatgcgtttaagtgtattagccaagatatttacccatcctctttaggctatgtatactaatggagatttttaagtcacctaactaaagaactaaagaaacttattttttgtattgaaatgttattggtctttgggtcttataccgaaagtgatttttggctttgctgcagattttaacttttctgtccgcagaaatttaattttgcgtatataaacttactgaaattagacaagtcaaattatacaaatattttcagattgtctcatttttcatatttcttgtctaacaatttatgtgaatattttcaggtcgtctaattttacatatttcatctctaagaattcaagccaaaattctcaaccctagctgagaattggcactacctgtagttaattg

SEQ ID NO: 330368 - DNA, 414 bp, Homo Sapiens
  misc_feature (23)..(23): n is a, c, g, or t
  misc_feature (57)..(57): n is a, c, g, or t
  misc_feature (101)..(214): n is a, c, g, or t
ccatttaacataatttgtcctcnagaaaaacactaacgtatcccgaaaacactgctntttccacttatgctggagatgaaatacatcagtacatacagatnnnnnnnnnnnnnnnnnnnnnnnnnnnnnnnnnnnnnnnnnnnnnnnnnnnnnnnnnnnnnnnnnnnnnnnnnnnnnnnnnnnnnnnnnnnnnnnnnnnnnnnnnnnnnnnnnnattcacaatatatcacgaaatcttggcatgcacagacatttgcacacgtgtaagacatttttagaagtgggagggtgaaagtaggctgcatttttatgttaatactggcagagtgttttctgtagaaatcttagctatgcacaattatactaataatatgtgtggttctgttccctacaccctccctgacccagggtaat

SEQ ID NO: 330369 - DNA, 324 bp, Homo Sapiens
  misc_feature (196)..(196): n is a, c, g, or t
  misc_feature (289)..(289): n is a, c, g, or t
aattatatcattgcaacagtaacacttttaaaaatagcccacaattccatgatcctagttgtcatatgatgactagttttcacttttgaaatgccttacacacaaacctgttttcacagttctaatcaaagtgtttatttaatggaatctactattttcttgacacctcatcaaaagaatttgtccatttcttccngaaacattttaaatgcatgatatttttgctgatttattaaaagttcttaaattcttttcctaataccggactgacggccgggcacaggtgggnaccggctctaatgccaggcactttggggaggccag

SEQ ID NO: 330370 - DNA, 363 bp, Homo Sapiens
ttataaatagtattaagtatagtagaagaaaaagtttttattgatagtattgttaatgtccaaatacaaatgatgagagagatttccacagtgctttcattaatagtgagaaacactgaatgtattatttcagattgttcatttagagtttggagcagagattttatagcccacgtatggcttaactttctcttatgttttcttaggaatatgtgtaaattctccagactaggatattccaatccagtatattgaaaataacttgagagtaattttcttaaagggaaacaaggtgcattatgtataactagtaagcttaccctttactggtcacaaccctttagtcctttgtttaggggtttg

SEQ ID NO: 330371 - DNA, 360 bp, Homo Sapiens
  misc_feature (183)..(183): n is a, c, g, or t
aaaattaaacccgaacaatttacaataccgtggggtaatgtatgattagggaaatgccggacagagcagcaagtgcccaaaggtgttcagggaaatgaaacaagttattatttctggaacataggtcgcaaggtgggaagagatataggatgggaatgttaagccatgaggcagggcccaganccagcagagccttttcagctatgtttaagagtacagactttatttcaggagctatgaggagccttgtaagagctgcaagtagaagagtaacgtgctcaagttagcattttagaccactttggctgcaatatagagaacgaatgggatgaagtgaccctagggagtaggttcactctg

SEQ ID NO: 330372 - DNA, 405 bp, Homo Sapiens
  misc_feature (27)..(27): n is a, c, g, or t
aaagggaaggggtccaaaagtcctcanaaccccaggagggccaggaaaggaggtgtcctggaagcccagtgtgagggccccggacccatgcctgaagtaagtgggaaagctgcagcctgtgcccccagaagcggtgggtcccctggagaaggactgagtactagaccccaggaggctggcccctgggagagatgatgtgcctgcgtggatttcaagggaatgcctgtgtttggacaagaaacatatctgtggtggccagcatggatgaatatcagaggggtcccttggatatcttggttttcataaaactctgggacttttgtgctactctatgaggagaagtgcccttgaaaacaaatgtctatgcagctaatgggataggaccttggtgttagatttgatatt

SEQ ID NO: 330373 - DNA, 793 bp, Homo Sapiens
gtataaccacagacattcgtcactgtgccagatcagggcataattctcttaaggcagctgaggccttcacattagttcttgcctcattcaggcatccagaggtcctctctctttgatactggtgacataaaccagaggggcaagactaggcatagttccttgatgagttcagtggtgcctcaccgtacccttagaaagccagccctgctgtgctaggtcttgtctcacacaaagacatgctccccggggtgggcaccgtggatcatggtattcaggtcttctgctattttaagttctttcttctctaaatatgtgaataatattttaagcatagtgttatttgttctttttccagaagttcccttctggaaaagcatatctttgtataattgtaggaaaaataatcttgacttacttggtccaaagcacattattaactggggattaatttcctagtagtcatctgtcgggagggctgatccaccccgaggcacattaactggcgtgactttcaggacggcggggctgtgggagccactggacacatctgccccccaacccctagcctcttgaattactcaagtccctcagctctgttggcacaaatacgtgctggatgatagaagaaccgtttttcccatggatgaactttttttggcttgaattcttacaaggcctgacttctggatctggagaaagaagacttctttgtgtcccatcttcaaaatgcctcctccacttgttgcagaagcctaaaattcctttagttggggcagaaagcctattattattt

SEQ ID NO: 330374 - DNA, 512 bp, Homo Sapiens
  misc_feature (70)..(70): n is a, c, g, or t
  misc_feature (81)..(81): n is a, c, g, or t
cattggaccccaaatgccctaaggttagggccttaaaaataataattaccaatataaggcccagataatngagcatttacnggcagatgtataccagacataccatgtatataccatatataaattgcatatatagagatatttagtattttacctgttgaaagaattccttatagagtccctttttattcctctttttattaagaactctcggctttagagtcagacagggatgggcctcaaattccctgctgtgcctactgtataaccctggacaaactgccttcaccttttttatccttcagttttcacagcctatagaagtaatacaaaccattaagtgtttttataggacacggtgagatgatgaatgtaagtgtatattatttaacggaaactgaaaaaatcggttactaaaaataatatacatagagctcctataaataaatagaaatatagaaaacacacgctgagccgccgtgcccagccagaacacatatagtctcttaaga

SEQ ID NO: 330375 - DNA, 423 bp, Homo Sapiens
  misc_feature (257)..(257): n is a, c, g, or t
taaagaaattatctcctaagtagattttaatataaattttgaacagttatagaaaataaagatggcctttgggtcaataacagaacataacaaaaacactaaaaatttctgtacataaacacacgcatatcacaagtctagtcagaaagaaatacatagaaaaacaagatagaattttaaaaataatttgcaagggaagttctcaatgcttcagttctaaaatattgtcttcttttagaaaaatttaagactgggantaacagattgtttttcctggcaatgctgtaattactgccaaatttatcagcaaagaggtaaacagcaatgcaatttttccttaagcttgaatacataagggaacaataaagaaacctgattagacctgaactaattaaaagtcacaccagtaattttcaggccagc

SEQ ID NO: 330376 - DNA, 316 bp, Homo Sapiens
  misc_feature (305)..(305): n is a, c, g, or t
ggtttctcttgccctgctttcagcatgcagtttactcttctttccactgtgacccagggatgaaaagggcttggagtgttttctctcttagcaagggcttctctttctctggagtttagttcatttacgttctttgagttctcagctttcttgtatacaaccacccaactaaccaaccaaccacccaacaaaaagtatgatttcattgcttatctaaccttttctccttgttatgcaaagtgtcatatttctgtgttctaactgggagtgggttaaccagttttctttgttctgtgttttgggtngatgttttaac

SEQ ID NO: 330377 - DNA, 395 bp, Homo Sapiens
ttttgtccccctttaaattacccattatgggtaaatcattgtttcccctttaaaacaaaaaacaaatcagtacccctgccctacagaaaagaagagggaacatttatttaaaggatggaaagactgggagttaggcactcccagcctcactgaggggcatttttgcctttgagaagtcctccccaggtatccctggtatagcacaatgtggcaatccgtagtgggaatgaagattaaacaggagagactttgtattagacctgtgagacgagttaggaagccctgcctggcatggggaatgcaaacagggaacattcaataaatcggggaacttgcttttctccccaagacgccagatggggcctacccatcgttctcgtgtaacaaaacgtgta

SEQ ID NO: 330378 - DNA, 493 bp, Homo Sapiens
  misc_feature (94)..(94): n is a, c, g, or t
  misc_feature (438)..(438): n is a, c, g, or t
  misc_feature (459)..(459): n is a, c, g, or t
  misc_feature (468)..(468): n is a, c, g, or t
  misc_feature (478)..(478): n is a, c, g, or t
gttcacaatatctatggagtgagtaatttgttgagtgggcctgggctcagaaggtaggactacatgcagtatagtacagttgtgcagtgcaatncctgaacagtcatacatgataactctggcatagtaagaaagaatgtgggaaaagaaaatagtagctgggctataaagtgctttgcgagccaggttacttgttcttatggagggatgagggtagaagtaaaagagaaggtatcagaattgctgtcaaattttccacattatgtatgcttctgaccacgatggggatgctgatgtcctccccttacccctactactttcccagggttcttcgccacattgccaatttactgtaagtcatatttctcaggtgagctgtagcttaaggaatgtcttgaggaaacactaggacaatgggagagccctcacaggtttttnaggaaggccggtacattgttncagattttncctttgtggnttggtttactgtggg

SEQ ID NO: 330379 - DNA, 522 bp, Homo Sapiens
  misc_feature (87)..(87): n is a, c, g, or t
  misc_feature (467)..(467): n is a, c, g, or t
gctacagtggtgactatgacgacagaaccctagccctcaacactcactgtccaatgtgggcacagccagtatctgagacttccaatngttccttcccctttgacctggtaaaatcaccttcttaagaattttttctaagaaggctacccgtgtgatgagcatgaagatttatggaccaaggacgaacatcactgcattatctatgcaacatgaaaactggaaaggacctaaacgctcagcaatgcggaaatggctagaatgaattacaacagcccagtgatgtactttaaatcatgctttctaaaaaaacggaaaaatgaagtgcagaagcaggatattcaactgtatctacagtatcctcacagctttatttttatctagcggtggctgtgaatctagccagagagaagagacgggaaggaaatgcactggcattacacgctgaaaacatcccaggtggtgcaaantcgctcagctgagaagtcctgcatccgggatacacgtatatagaactctcacaac

SEQ ID NO: 330380 - DNA, 337 bp, Homo Sapiens
  misc_feature (175)..(175): n is a, c, g, or t
  misc_feature (211)..(211): n is a, c, g, or t
  misc_feature (237)..(237): n is a, c, g, or t
  misc_feature (254)..(254): n is a, c, g, or t
attgttcacaaattaaataaaaataaagttatgacttagtaaactacaatacattaacatgagaaaatactatgcagctaaaaaattaagtttatttatcttatgtaaaagaacaggaaagagtttatatatattttaaaacagaaaagaataccaaaatagtataactaaggcntacacataagggaaaatatgtagacagggactagangttaagatgtagaactatgcttagangcatacctgggcacaangtaaaatgtcctttttttccatagttttatttaatattattagtagctctatgcaataaattgttaaaatattgggttgttca

SEQ ID NO: 330381 - DNA, 263 bp, Homo Sapiens
cagggtggctggaacacagggagccaaggggcaagaggtctgggatgtggctggatgggcatgaagagccttctgggtacctagaggtgctgggaaggagtttggatttaatcttggctgtcctgtgacagggattcggaggccatgggggagggctgagcagggagacaggagacaggcaagaggcgctgtgagaagcgtgggctgagtgacctgctccttggtgagtgagaagtcctagaactgagcaccatggcatgcac

SEQ ID NO: 330382 - DNA, 460 bp, Homo Sapiens
  misc_feature (31)..(31): n is a, c, g, or t
  misc_feature (41)..(41): n is a, c, g, or t
  misc_feature (47)..(47): n is a, c, g, or t
  misc_feature (54)..(54): n is a, c, g, or t
  misc_feature (66)..(66): n is a, c, g, or t
  misc_feature (80)..(80): n is a, c, g, or t
  misc_feature (116)..(116): n is a, c, g, or t
  misc_feature (146)..(146): n is a, c, g, or t
gattaaaggattggatgccaaggaaattctngaaattcctngccccntggaatncaaccacaaccntttaaagggatcantacccccaccaatccaattgtgattttatccctggngatacaaggctgtttcaaatattatgtgantctataaacatgacacacccccattagccagaatgaaggaccaaaaattatatgatcatctcgatagatgtagaaaaagcactggacaaaattcaacatattttcatgattaaaaaagaaacctctcaacaaattaagtatacaaggaatgtgcctcaacataataaagactaggtattacaatcccacagctaatatcatacttagtgatataaagctgagagctttcctctaaagttagaaacaaaagaaaggatttgaactctcgcatctatttaatatagttctggaagtcctagccagagaatttagag

SEQ ID NO: 330383 - DNA, 466 bp, Homo Sapiens
tcctgctttttgaaaaatttattttatactcttagaagctaagaactttgccacacatgaaccaaatttagaattaaggttcttccctagtgtatctacttccttttgaaattttataaacaagattttatacacaagaggtagcagaggaaaattccagtctgcttgttccaagctcagaaggtaactgcacacacctcgatgttagcagggaaggtggggcaggacagggtaagtctgatgatacggcactctagttcctaaaactgactgtagttgtcagtgaccgtgtgaggactccagggagaagtcgtgggtgagatgcccgctgggatgcttgttttctttcccagggatgccttcaacgggcagaatcggccatcttaagatcggcctcactaagggagcttcttgaggaacacacagcattattgaggttaatttgtggcaattcctgctcttgttt

SEQ ID NO: 330384 - DNA, 443 bp, Homo Sapiens
  misc_feature (322)..(322): n is a, c, g, or t
  misc_feature (357)..(357): n is a, c, g, or t
  misc_feature (407)..(407): n is a, c, g, or t
  misc_feature (425)..(425): n is a, c, g, or t
aaatttattttatactcttagaagctaagaactttgccacacatgaaccaaatttagaattaaggttcttccctagtgtatctacttccttttgaaattttataaacaagattttatacacaagaggtagcagaggaaaattccagtctgcttgttccaagctcagaagggtaactgcacacacctcgatgttagcagggaaggtgggggcagggacagggtaagtctgatgatacgggcactctaggttcctaaaactgactgtaggttgtcaggtgaccgtgtgagggactccggggggaaggtcgtggggtgaggatgncccgctggggaatgcttgtttttctttcccggggntgccttcaacggggcagaaatcgggcccatcttaaggattcggccttaantaagggggagcttttttngaggaaccacacagcctt

SEQ ID NO: 330385 - DNA, 195 bp, Homo Sapiens
tacaaatatacaacaggaaaacttatagaactcatgtcatattttcagtgaaaagtactgtattactgaactaatattttgaattataagaaggggaagatagtttcatttctagaatagaagacaaactagttgtactctagaatattagagatttatccttcaaactacacacactcactaataattcatttc

SEQ ID NO: 330386 - DNA, 432 bp, Homo Sapiens
tttaagcaatgaaagcacagatttattgaaatgaaagtacactccactcaagagcactggttacagaattttctggggtttaaatacccactacaggtttcccattggttacttggttacactctccataaatgaagacttggccgacgaccactctggtcacaggaggtgaccattcagaggctgaagtgaagttacaaagttagacatgaagacttgggccacgacctgtctgattggttgcaggaggggaccaatcaggggtactttccatttttcatcgggctatgcaggtgtaaaaggagtagcctctgatccttttgttatgtggggtgtgggagaggtgggggttttccttttgattaagttctagggaagtcagtgaatcagccatggattccctgtctccagactctatttattctcctacct

SEQ ID NO: 330387 - DNA, 422 bp, Homo Sapiens
  misc_feature (81)..(81): n is a, c, g, or t
  misc_feature (166)..(166): n is a, c, g, or t
aaaaaacccaggtccaaaaggaagcccagcaaaccccctcctaaaactaaaggaacctaaaaagggaaacttcccagctgncaagctgaaaaactagctccctgccacagggtccgaggggccaaacccaactaatctgaaccggagcgaacatgtacctgtgaantcccgtgttacctggtggcataaaccttggtgtctgacttggtagctgggacagttccaagaaaagttgctctagacagtggttcttccagccactgggttagagggacccgtattctggtgggattttaggggtactgctatggacggctgcatcagcagacaatctaaactagtctcatttaaactccttgctcagatataaaataaccctgccaagatggctcttctcttctatttctttctctctctctctc

SEQ ID NO: 330388 - DNA, 429 bp, Homo Sapiens
ttttttgctgccttggtccaacatacttgactgatgcgtgcccagctcgtcctagttgacatgcaaactgacaaactaatcgctgaatagttctttctcatttctgccaagaggctctttttaatagtatgtgaaataaaaactccatgctgaaggccaaattgacaccagccacaagattacgtctacagtgttgtggaaatcactgcaaagaatgccatctccaaaacactcaccaccagcctggacaaagcacgagagagtacactgaagggaataatcctgccctggcccccaggggaggggaccagattgggacctaataagctcttttctactactcattttctatgataatttttaagttgccacatggcatatggtatttttttttaatctaaagggcagaattttcagtcaattgaagtg

SEQ ID NO: 330389 - DNA, 415 bp, Homo Sapiens
  misc_feature (365)..(365): n is a, c, g, or t
  misc_feature (378)..(378): n is a, c, g, or t
  misc_feature (401)..(401): n is a, c, g, or t
aggatgtcattttcatcagaccttctttctacatattattcatgaagcataatgttgcatttctccaaattttatgcctgaaagggtagtgttgcttcctaaggtatcatgttgtctttgtgctttgtccatctcttccgtggcgacgtttatatctgttcctaaaacagttaatcctgtgaaataaatattgaacataatccagaagaatctctctgtttcccttggggaatgccatatttaattcaccagcagtaatcctttaataactgggcagagcactttattcttctgggtgagctcccctgaatatttaattttttctggattataaaattttcctatattaggtaggccattttttnaattattaacttncttccactatagggggccatttnacctttagggcccc

SEQ ID NO: 330390 - DNA, 306 bp, Homo Sapiens
aagtttattctctggagatgctcaactagagagtttcttgtattcttgaacctcaggcactgctgtaaagaggggatttagttatagtgttatacttaacagtgaaaggtctagccctctgcccctaaatggctttcaaaacagacatctaggcttacactcctggaggattcctttccaagaaattgagaggcccaaacctaaaggacctacagataactggggaagttccccaataaaataacaggcaggagtcccattctgtcatatgcttcaagacccaccagggcaataaccgttgcccac

SEQ ID NO: 330391 - DNA, 497 bp, Homo Sapiens
  misc_feature (18)..(18): n is a, c, g, or t
  misc_feature (50)..(50): n is a, c, g, or t
  misc_feature (56)..(56): n is a, c, g, or t
  misc_feature (105)..(105): n is a, c, g, or t
aacgaacactaaccgggnagagccatactgacaaagggaaaaaagtgtgntgaagnaggagggccacatgttgcctggatttgaaaggataaagagaaaatgganagaaagacaatggggctgtgtgccagcaggtcctgttcgccttaagttttccctaacatcagaatcagggtgcttcacatgcacatgtctttctctgatgctttcttaagattctccttaatgtcatttaaaaaaataagaaagtgatcccttgggaatcattgtacttagttttaaccatgagttaacatttcctttttccaaggaggatgacaccagcatcttgattcaccgtgcagttgaggatgccctggccagtgggaattgaggcgagtcacagaagtacttaccaaatactcacctgctgcttctagtttaatttaattttagacacacactctcacagtgatgctaaactctttacaagatagactccgcagcttcctgcctct

SEQ ID NO: 330392 - DNA, 409 bp, Homo Sapiens
  misc_feature (78)..(78): n is a, c, g, or t
gccaaaaagtccccaaagtcagtgaaccaaacaatagcagctctctcccccatgcctgtgtaacttgggtgatatttnatggacagggagaagttctgtgtacagcaatttcctaatcaagtaagaacaaacggagaaagcaaatccatgaaataggaaaaggcaagcccaccgagctataactcaaaaggcggcagagaaatgttagtgccattatgctgctgagcctcctgctccagtcaaaatgcatccatcagagatgttacagaagctgaaacttggggaaatggctggaagatgtttaagctagagccttgtgacagcgtccctgtggaagagggccctgcaaaccaaaatgggcctgcatctaacctcaaatatcagttgcatgtctcattggattcttttt

SEQ ID NO: 330393 - DNA, 540 bp, Homo Sapiens
  misc_feature (482)..(482): n is a, c, g, or t
  misc_feature (530)..(530): n is a, c, g, or t
cagtccattgtatataaggtgggatgctgagaaaacgtatcgctcattcagagtgcctaccagaaaccaaagcaaatgaaatgaccctaataaatcaaagaatgtggcaggtaccacctgagaagtgcaagtaggtttctggaagatcagaggagatagaaattgcatttggttgagggtagagggaaagatgtcctgaattaagttgcatttgggacttatcaatagggaatagctaggaaattcttttgtaattttcccaaatcattggatattttctctagttcctgattttgtttcccaaaaacaggaataattttcactcctaaatttttttcctccaaacattatttggcctgctgtagtccttaaattcaagcatgatctcaagttataagaaaaagagattaagatgggtgaccttataaaattgatgcaaaaaaagtgacctcctaataaaacttaggaatctctttgtttcntaattgggtattgaataattaatttggatacatattgtgtttggaccnctatatatac

SEQ ID NO: 330394 - DNA, 498 bp, Homo Sapiens
  misc_feature (452)..(452): n is a, c, g, or t
  misc_feature (476)..(476): n is a, c, g, or t
aaatgtgatgttctaccattggttttgagtacgtgaatacttcctgtcctactgtttcccctaccctattctcaccttctctccgcccacatcctcaccaagagattgtgtgggacatgaccttgaaatgctggcgatgatccacactgggatatcatcgctggcgactgcactctcaggagcccaaaatcaggagtgaaattgccacttctagtccccttatttcctatggaaacaacgccttccgcacccctagcacctgccgtcctcactgtaaaggttcatcaggatcgtccaccgtgtatattatacggttcagatcatgttgcttatattgtttgctgcaatgaccatcgttttcactttgctggtaaccacttggattgctggacagcttacagtcaatggaacctggttgatggacttttttttaatgtaggttacaacagtgnacagttatggacagggcttacctnggaagagttggttcatttttga

SEQ ID NO: 330395 - DNA, 621 bp, Homo Sapiens
  misc_feature (516)..(516): n is a, c, g, or t
  misc_feature (538)..(538): n is a, c, g, or t
  misc_feature (551)..(551): n is a, c, g, or t
tggtcagacttcattgttattctgtgacttgctggaggttggcagtggctttgtcaaacacactgagaagatggaagggccagcacttaagagcagaactgtacccttagagaaacggacagaggcgagtggcaaacttcagacggttccaatggtcttgcagtttgaaatgtgatgttctaccattggttttgagtacgtgaatacttcctgtcctactgtttcccctaccctattctcaccttctctccgcccacatcctcaccaagagattgtgtgggacatgaccttgaaatgctggcgatgatccacactgggatatcatcgctggcgactgcactctcaggagcccaaaatcaggagtgaaattgccacttctagtccccttatttcctatgggaaacaacgccttccgcacccctaggcacctgccgtccttcactgttaaaggtttcatcagggttcgtccaccgtgttattatttattacggtttcaggttcatgtttgctttatanttgtttggctggcaatggaccntcgttttttcaanttggctggggtaaccatttggatttgctggacaggtaacagttcaatggaacccgctggtggattttttt

SEQ ID NO: 330396 - DNA, 375 bp, Homo Sapiens
  misc_feature (208)..(208): n is a, c, g, or t
  misc_feature (248)..(248): n is a, c, g, or t
atcctgaggctttgttgagcataaatgattatacgataaaggtatccgttatttttggaactcatttcagttgggatctcctgtatgcagagtgttgcatttagaggtttgagtcccatcttggtttcttgccgtgctgactgtagccttcaccttgacttgaatgaaggtctgtgggttgggaatgtgtgagggagccgctgaggtnttcaggaggtgctgcctggaggtcggtttcttcctgggtnttacgggcaactgctcacacagttgtttctctgtgaacatttccagtgtttaatccaaaatgaaaacccaccaatgcttttgctaacttcagtgccttttataaatcatttttaaatttcctgaact

SEQ ID NO: 330397 - DNA, 416 bp, Homo Sapiens
  misc_feature (65)..(65): n is a, c, g, or t
  misc_feature (318)..(318): n is a, c, g, or t
  misc_feature (320)..(320): n is a, c, g, or t
gtggggaggtgtcaggcatttatttctggagcagaggtgagatggagcaatggcctcagcagcgngaccagttgcgcatgaagtcgacacagaggcttgtgtagtaagtagggtagtcacggaggtggctgacgtgtgcagatgacacgaaatccacagaacgcgccaggacccggcgtgccaggcgtgcctccaccatgcgttctatgtctctggccaggactacttcgtcagccctcgagtagaggtagagctcgggccaagcgagagcccgcgtcctgtaagcctgtcatagaagtgggtgtggaagatgggctntnatggggagcaagcaggacgtggaacaggacgaccaccaggggcaaaggccaccagcagcaacaggcgcacattgggcgggcccggcgctccaggga

SEQ ID NO: 330398 - DNA, 437 bp, Homo Sapiens
  misc_feature (47)..(114): n is a, c, g, or t
  misc_feature (262)..(262): n is a, c, g, or t
  misc_feature (336)..(377): n is a, c, g, or t
  misc_feature (379)..(379): n is a, c, g, or t
  misc_feature (389)..(389): n is a, c, g, or t
  misc_feature (417)..(417): n is a, c, g, or t
aaatctttcacaatagcaacaaaaaacaaaaggtcctcgtgatacannnnnnnnnnnnnnnnnnnnnnnnnnnnnnnnnnnnnnnnnnnnnnnnnnnnnnnnnnnnnnnnnnnnaaattaattttcaattaatatattaggttttagtccactactgtgtattccattattttaaaatttaatagaatgattctaaaagcaattgatagtgtaaacaggaaaagatataacaaaaactctgaaaaggaaaagtaaggagganagatgtagctctattggctggtaaatagcttttaaaacaacgtgtggttgggctgagcacattgtacaggtgannnnnnnnnnnnnnnnnnnnnnnnnnnnnnnnnnnnnnnnnntnacaggctcgnctgagccccgcagtttgaggctgcagtngagctatgattgcactacag

SEQ ID NO: 330399 - DNA, 301 bp, Homo Sapiens
  misc_feature (266)..(266): n is a, c, g, or t
ttacgcacaaccaacaagcgtcccgcccctttttatttgaattcggagaaccagaggcgcctgcagattctggaggggtctcgcctgcccatcgctggcagcccgagatcctggggaggggatgccatactgctagagatgagggaagagagccccaagcaggaaaacattgatttgctgtacactcaaagggcatctcatgccttcagtccaccgccttcactgccacagcccgtgccctcgcgccggctcagactagctcctgngactgcttgtcgctgcaggttgtcgtattcttcca

SEQ ID NO: 330400 - DNA, 482 bp, Homo Sapiens
aggacatctcacagcctggtacttttccagcagtttctgcttctagtcagatgcccaacagcgatgcactattgcagcaggctacacagtttcagacaagagaaactcagtctagagagatattacagtcagatggtacagtggttaatttgtcacaactgactgaggcatcacaacaacagcagcagtcaccacacttggcctttcagcagcatattgactgacaacaacaacaaaaatttatgaagggagcgatccaacttatagaccatgtgccattttaaaagcttctttatagccaagatttcttctcgatatcaaattaagaaatttaacagctatgctttctgaagactgtttccatagagcttccaagtggtagtaaacttttaaatcaggatttggctatgtgctcaactcagaagactgtcattagcaatagcagtaggtaccactgagtgccactgcggactcaagtagac

SEQ ID NO: 330401 - DNA, 430 bp, Homo Sapiens
  misc_feature (30)..(30): n is a, c, g, or t
  misc_feature (36)..(36): n is a, c, g, or t
  misc_feature (64)..(64): n is a, c, g, or t
  misc_feature (114)..(114): n is a, c, g, or t
tcattaatccagaacccatcgtgcgatggnttatanctctggccctcccctggtcaaccccaanccctcttagcctctcctgctagcaccactccaaaattgctgcttcaaaanaggtcaagtcaccccctttcccttactcctcaaccatgacctggtcatgtctggaaagaggatgagatacatggaccaatacatccctatttaaaagggagcttgctttctcactagggactttagactgcctgacacacaggaaatgactagaaaatctgaccagtggagcataactcattgctaaaatggcaggtttggacggctgcgggatgggagagcaggcttcctgaagaggcaggaaggggcagctggatgggaaaacagtgacttttgagtttttccttttagagtatggtgacgtaggccgtttatt

SEQ ID NO: 330402 - DNA, 450 bp, Homo Sapiens
acccaaaaaaacatgtttcaactcctcctcaacacactttccccatgtaaaaactaatttttccagtagtttcaaatccatatgttaataatggtaaactagcaacttttacttttgggtggccttaaatttcctttcacgaaccctttcacgactttccccagaccatcctacaacatgctttgactttctgacttctccttagcatcccctttttgaacaaaccagttattttactttagaacaacaatttaccatacaagatgctttcttatagaccaaggagtctaacatgtacacgagtcagtggctcacacgaaagctgccatggcacaatgaaggtgaaggccagcgtgctatccggctgaggtgggatcccatggcctcttcagtccactgagggtgcaccatctcacctgctgtgctgggtaggcggagcacaaccacctg

SEQ ID NO: 330403 - DNA, 402 bp, Homo Sapiens
tgttcaaaaaggggatgctaaggagaagtcagaaagtcaaagcatgttgtagatggtctgggaaagtcgtgaaagggttccgtgaaaggaaatttaagccaccaaaagtaaaagttgctagttaccattataacatatgattgaaactactgaaaaaatagttttacatggaaagtgtgtgagaagagtgaaacatgtttttggtaaaatatttttaaaaggcaggagaatgtcaaatttcacctagttgagagggttatgtgatttttaaattagataagaataagctcacggtttgaacaagttgtggaaggtttgtaaaaactaatcttgcaaaaaaaattctgtgtgcaaacacgttgactaaatttaaaggggtattttccagttttccataaatta

SEQ ID NO: 330404 - DNA, 479 bp, Homo Sapiens
  misc_feature (24)..(24): n is a, c, g, or t
  misc_feature (42)..(42): n is a, c, g, or t
  misc_feature (49)..(49): n is a, c, g, or t
  misc_feature (75)..(75): n is a, c, g, or t
  misc_feature (81)..(81): n is a, c, g, or t
  misc_feature (141)..(141): n is a, c, g, or t
atcaaacaaaacatttaccaaggncctgcctatttgtcaaancactganaattctaactccggggaacagatgcnaaagtnaagtaaaactgagtgctgaacatcaactcagttttggaagagttggataactacccaccnacccacgtctctgccagagtttcacaaagttttcacattaattacacccactggaccttcacaatcctaatggaaaaactactgttattatcctcacttcatataaactgaggctcaacggtgggaggagcccttgtttcgggcatggaaagcctgaagggataggaactgggttctggtctcaactcagactctcactaacagcacgaccttgaatgagttgaatcctttctgtgggcctcaatgttctcacttatggaatgaggggtaaggctgagtcatctccggagtcccgtctggccctaacaacctagggtcctttaaggatttagttgggg

SEQ ID NO: 330405 - DNA, 355 bp, Homo Sapiens
  misc_feature (60)..(60): n is a, c, g, or t
  misc_feature (72)..(72): n is a, c, g, or t
  misc_feature (75)..(75): n is a, c, g, or t
  misc_feature (77)..(77): n is a, c, g, or t
  misc_feature (284)..(284): n is a, c, g, or t
  misc_feature (287)..(287): n is a, c, g, or t
ttgccccggcccaggggccccatgaaaagatgggagaattatttccacgtgaacatttanaaatatttttgntcncntctcccgggctaattgactataattttcattgcttccggaaggccattcatgaagtttttgaggtgagaatgaaagtagtaaaatctcgaaaggttcagaatcggctgcagaagaaaaagagagccgacccctaatgggacccctagagtgctgctgtaggtgaggtttcaggaatgtcttttgaaatcagaccttatccatgaggnctntgcgccatgttgcactaaaggaagaggaagaaggagattgggacacatacccattgatttgttgtatt

SEQ ID NO: 330406 - DNA, 365 bp, Homo Sapiens
  misc_feature (48)..(48): n is a, c, g, or t
  misc_feature (70)..(70): n is a, c, g, or t
  misc_feature (84)..(84): n is a, c, g, or t
  misc_feature (101)..(101): n is a, c, g, or t
  misc_feature (108)..(108): n is a, c, g, or t
  misc_feature (119)..(119): n is a, c, g, or t
  misc_feature (131)..(194): n is a, c, g, or t
  misc_feature (226)..(226): n is a, c, g, or t
  misc_feature (312)..(312): n is a, c, g, or t
aggaacctaaagaccccttccttgaattcctaaagcagggaaacgcanagctcaccctgtcacatgcagnggatcataagctgnagaattaccctcttccntccccanagcgtcctaanctttttttatgnnnnnnnnnnnnnnnnnnnnnnnnnnnnnnnnnnnnnnnnnnnnnnnnnnnnnnnnnnnnnnnnggcctcgacctccctgggctccagcgtgcgtnctaatctagaaccaaatcctccttccttagatcatcccccaaatcacccaactacaggtgaaatcctgtaatagtttcctccgaanaccctgttgctgagacacctcaacgtctcaacctggtgtgtttgtacgtagag

SEQ ID NO: 330407 - DNA, 403 bp, Homo Sapiens
  misc_feature (348)..(348): n is a, c, g, or t
  misc_feature (365)..(365): n is a, c, g, or t
  misc_feature (384)..(384): n is a, c, g, or t
cctctcaaaacaaatttatttttccttttacatttgtagctttctgaggtgaaaagtaggagatcccagattttttactgttggaatggaaagttacagaccagagcagcctagagcatcttgaatggtgaatcctttctcggaaggttttcaatatattttgcccagatccatcagtgggaatcactgtcagtgacagctatagccttatgaaatgcacttcttaaataataagacttgaaagttgaaattactctttgacccatgggctgcagaacggatgttgtgttagcaggcagggaaccaacattagtcgtcttgtacatctccatcaagacctggttgggngtgaccagggggcattngttagtggggccagaaatngtttgaaaggaatcttttt

SEQ ID NO: 330408 - DNA, 479 bp, Homo Sapiens
  misc_feature (160)..(160): n is a, c, g, or t
ggacactctctagtctaggagtcagaaaccaggggtctttggacactgtgttctattctgcaggcaggagtacccactggaggttttacaactttgacctgcctgccatcaagcagaagtaggaattttgccaggtctgaaaggtaatagtgcaggcccntccaggaacatatgtcaggtaccctctgtgctttttcccaaagtggaaattcccagttctggacacactgaccctttcaaacgtttaccagctaatgggcaagcctcaaggccaactgagaaaggggctgcgagtggtaatataaacaccaaagttctctaaaaatacacaagacctgtaggctatgtgtcttctgtacttcaggtgtgtagtctatttctgacaggttgtgttagtggattttaagaatggagaggagaatttagggtttgctttttctttgaaagcaaaaataaatgttcatattcttctgatacag

SEQ ID NO: 330409 - DNA, 466 bp, Homo Sapiens
  misc_feature (306)..(306): n is a, c, g, or t
gctattgctttattctatttgtgacttttccatatccccttcatgcccagaaaaccagaaaacctttctgctctcagcgtagactgctggaaagcactttcctgtgggcaggagggtttgtcctcagtgctagaaacccttgtgtacccctcctgtagaaactctggcttctcttcttgcctcttaattgcagcagggaaaaaccgccctggcagtggccgtccgcagcaaccatgtcagcctgggtggacatgatcataaaagctgatcgtttctacagatggggagaaggtacggaggcctcanggcttgatctttcctcattgggaaaggggagtgattttgggctccagatgggagctgggcttttgaaccctagggccttgaccaattttggggtccctcagtcttccaaggcagggtgataattcaccaccttgtattgttaccacagttgtttgtgagg

SEQ ID NO: 330410 - DNA, 199 bp, Homo Sapiens
atccaaatcctagcaaaatcttgtcggctctaccttcagcatagacccccaaatccaaacccttctcaccacttctagctcgagctcctgaaccccactagtttccttcattctttgcccacctacagtctattctccacccaacaggcagaataatgcttttaaaaagttggaccagaccaggggaggtggctcatgc

SEQ ID NO: 330411 - DNA, 145 bp, Homo Sapiens
  misc_feature (54)..(54): n is a, c, g, or t
ctatgttaagttaatgtatgaatatatgaatgagtgaaggaaagtgttttgaanccatccatagggaatataataagataaaattacactagaataaaatgaaactgataagaataaatttgatggggctgggcatggtgattca

SEQ ID NO: 330412 - DNA, 352 bp, Homo Sapiens
  misc_feature (77)..(77): n is a, c, g, or t
acccctgccttcctctcccgaacaacccgcgggtcgaaaaggaactgcgcctgccctgtgcccttactgaaatttanttttcgtgtaacccatttaccttttatgtggaaatcgaaaagccttttgataatagtagcaaagcaggaaggactgagtgggaacccacaagcccagttgaaagaaaatacatgacgtacttgagtgctcaggacccacgagctgattcaagttgtacagaatggacacttatagatgtgtggaaaatctgagacaggaaatgaagcctcaccagtaagctgaacaggggagatttaatgcaaacatttgtccctggctgggcactgtggctcat

SEQ ID NO: 330413 - DNA, 368 bp, Homo Sapiens
  misc_feature (43)..(43): n is a, c, g, or t
  misc_feature (188)..(188): n is a, c, g, or t
acaggtgggtcctgaatgccagctcttctcccttttgagcagnagagggcacaagtttgggcatgtcatcctatcatgtcctcagtggtctcctgggactgtactgtgaggggaaagcagagggaaaagggaagattctctcctcgcatggactgaaaatgactgaatttcaggcacccagagagctncaagaggtcaacgtgttctctgagtctcaacagtccatgctattaaaacagcatcatggcttagagggtaataaaatacagttctagagagggaaataggaaacctgctctctagtcctggctctgtaatgaacatctaggggagcatggataaggcacttcccatctccagggttcagt

SEQ ID NO: 330414 - DNA, 469 bp, Homo Sapiens
  misc_feature (437)..(437): n is a, c, g, or t
tcattcataatgatttataacactaaatacttttaccaaatataaagaaatttaaatttctttatgatgctgtctatagtccctcttctggccctcttcatgggctacccttctcaccccaactctgaaactccatcacaagtcctcacactcctcagctcttacaacccctccatcccctctccttcatccctaccacctccaaaaatgaggctcagtttgaaggcagcaggaaggaatcccctgaaatggggcagatccctatcatgggaaggagaggatgttaaggacaggcaccctccaaggctccactgtgggggggagcttaaggcactgcaagggaggtacatcaggaagtgggcagctctgagggacatgttctgggactgggagggacttcacgggggaagggaaggcaggcggaattcccattaggntggtttaccttttttttagtattaaaaatttt

SEQ ID NO: 330415 - DNA, 506 bp, Homo Sapiens
  misc_feature (85)..(85): n is a, c, g, or t
attggaattcgctgcttcccttccccgtgagtcctcccagtccagacatgtcctcaagagctgccacttctggatgtactccttngcagtgcttagctccccacagtgcgagcttggagggtgctgtcttaacatctctaccttccatgatagggatctgcccatttcaggggattcttcctgctgccttcaaactgagcctcatttttggaggtggtagggatgaaggagaggggatggaggggttgtaagagctgaggagtgtgaggacttgtgatggagtttcagagttggggtgagaagggtagcccatgaagagggccagaagagggactatagacagcatcataaagaaatttaaatttctttatatttggtaaaagtatttagtgttataaatcattatgaatgaatgtactaaaagaaagaatataataaaagatcttacttttatttatcatgaaggggaaacaaagttgcttgtgtccaaagtaacattattgcat

SEQ ID NO: 330416 - DNA, 496 bp, Homo Sapiens
  misc_feature (481)..(481): n is a, c, g, or t
ttttttcaggactttggtggttttattttacaaaagctttgaaggttcaagccagggggtgcctggggcccagagacttgggttgtccagaattctggctacaagaggagaaggacaccacccctcctctggaggccatgctctgtgccctcatgagctgagcggagccaccacagtagtgctggtggtggggggcatggggcctgtggggaaggagcccgtgggtgagcccagtaggggtccagggaaaggcatgaggtggctaacaggccctgacagcaccacagggcccaggccttggtagagatgggcagtacctggggggcccagtgtcaggcctgaagccacctccccacaattcccgctaccgctgcccccagccaccaccataaagccaccaagctggtcctttcggctgctccttgtgcctcccagacttggaagccccgtttctttttcccttttccagatgccttgcggnttcgaattctgaata

SEQ ID NO: 330417 - DNA, 349 bp, Homo Sapiens
  misc_feature (333)..(333): n is a, c, g, or t
aacaaaataaataagaatattttattaaattaatgcaggtacaaaaagtgacaatcaaatgcagaattaggtatcatctctgcctatgccatttacgatgaaacatgagacaaaagggataaagtgccttacaaatccaacaccacaaggaggagttaggacttaggaatagactgagtagactatgtgccttgctcagccacaattcttgcctgtaattcacacaaagaacactgtcacaccaattactgtacaaatgcacatgtacaaacaggtaacacaaggagctctgttggggacactgtttcttcagccttgacatgtgggcaaagncaagggtactccttgt

SEQ ID NO: 330418 - DNA, 472 bp, Homo Sapiens
  misc_feature (63)..(63): n is a, c, g, or t
  misc_feature (173)..(173): n is a, c, g, or t
  misc_feature (272)..(272): n is a, c, g, or t
tatgtccatatatatctatatttattttcattcttacaaaacgattattgcaaaacttttacngtctgcagtgattgaaatttcactcaagcattgcagacttgtattttctatattcaatatcctacagcttctttgatagccaaatggcaaagtaaaattgttagacctantccaaggagacacaggtagatgtaaatttgatcccttgtttcctcagtgaggctgataacaatgttgatgaggtttggtttggttttcaacaatcgcanttcttattacccatcattttgtgtgacccatggtagttgaagaggaaacttaaacaaatggaagattgtgatggctcctttaagttttgtaataataatatgctgagataagatgtctttaaggttcaagggttctataatgctgatgtgttctactagtgtgccttccatcaaggagctaatttccttgccttcagtat

SEQ ID NO: 330419 - DNA, 279 bp, Homo Sapiens
tcatattccctttgttactccacaaacaaccagagctgtcacgtgtaaaaatggtgatcctataataattcttatatttaccacactcttagttgcataatcagctcgcttacataatctagaaaaatataatagaaagttcacttcaagcaaaacaatggaattgactgtaaatgggtatgcaaaaacttgagttagataaaatatctttatgacaaagaatggtgagattgactctaataaaatatgttcttttaaaaaatcagtattttataaagt

SEQ ID NO: 330420 - DNA, 730 bp, Homo Sapiens
  misc_feature (536)..(545): n is a, c, g, or t
tcaaatactgagatgtttattgcattttaaaaatatccacactcttaaatatcctgtttcaaattcctcctaaaatcctttacagcacacaacatcaactactgcagtagcgttctcacaatattacacttgaaaataccatttaggaacaatattttaggaaatagagggtttaaggcaagacattcatttggaaaagttaatttctctctatcatccagattgacacgattatttttccacctcttcagtgccttgggatacgcaacatacattcagcaacagggcacgcgtgtgaccctacggacaagtgctgaggttggggagtgcccactggaaatatgggaaatattcttacagtaaggcgtggcccacggggacatgggcatggggagggcttgtttcactccatttcccaatctggtgtacagggaaattccttatctataactgtccatttccccccagttaactgcttttccaacaaactcaaaccccttgaaaaggtgctaagattggtttctgttaacatcaannnnnnnnnncagccctcagagccttcccgatcactgctttagtgatgaatgtctcgaggctatttcttgattctgattgcaaacattgtttgttgtagaaaaactgttctgtcccaaagaattttctccttcatcaaactttttggattgtgagagctgaatgttttcatgtgtattctttcttctttgagttt

SEQ ID NO: 330421 - DNA, 429 bp, Homo Sapiens
  misc_feature (33)..(33): n is a, c, g, or t
  misc_feature (46)..(46): n is a, c, g, or t
  misc_feature (82)..(82): n is a, c, g, or t
  misc_feature (104)..(104): n is a, c, g, or t
gaacaagtgggaacccattactaaatgggcccnactatcaccggtnagccatgttggaagactgcatgctctatagggtggnccatagagagaagatcacgccnaatgggagctgtccactcatggtgtttcttgtggattttcttgtagaatgttgggtggtgaaggagccggtgtgaatagtagaacaagacttcctcgatcagcgtgaagatggccagctccaggaggaaccagtggaaggtgggtagctcacggcggcaggggtctctccaccatttgaggaagggatagaggaagaccaccatggggaaagatatcatgcactggttgaaaagaactgtgcggatagactggcgcagtttcacaggatccacaggttcattcttgccgacctgaattcggtagcgagagatgaagttaggtttt

SEQ ID NO: 330422 - DNA, 523 bp, Homo Sapiens
ctctgcaatgctcagccattttacttgagacataaaaaaagttttaagagtagttgttttgctttttcgatttaaacattcatgagaacggatgggacggtagtgctgtggtgtggacttgtgtctgagtggccatgccggtcctgggtccttcagaccacatactggtacgggtctgccttcccttggtctggcgtggcaaaaggggctggcccagcctagagagaaggggtggccaaaaacggctttcatgttcatccattttgtttttttagcccatcttctctcttcctttttcaattgttctattcccgtctcatctgtgcagatggagtgcacctgggtcccaaacatcactgatgtgaaaatgaggaagagcaggccctcaaagcacagcaggataaggagaatcactgtggtgggtggagagaaggagctgcactttgtccaatcttcttcaaagcaatgcaggaagtggaatcccaccatgatgagggcgtgcaaggaaatgagagctatgtac

SEQ ID NO: 330423 - DNA, 472 bp, Homo Sapiens
  misc_feature (261)..(261): n is a, c, g, or t
  misc_feature (410)..(410): n is a, c, g, or t
  misc_feature (433)..(433): n is a, c, g, or t
tttctctgcaatgctcagccattttacttgagacataaaaaaagttttaagagtagttgttttgctttttcgatttaaacattcatgagaacggatgggacggtagtgctgtggtgtggacttgtgtctgagtggccatgcggtcggggtccttcagaccacatactggtacgggtctgccttcccttggtctggcgtggcaaaggggctggccagcctagagagaaggggtggccaaaaacggctttcatgttcatccanttttgtttttttagcccatcttctctcttcctttttcaattgttctattcccgtctcatctgtgcagatgggagtgcaactgggggtcccaaacatcactggatgtgaaaaatgaggggaagaagcaagggcccttaaaggcacaagcngggataaagggagaattcacttntgggttgggttggaaaagaaaggagttgcaatttttgtt

SEQ ID NO: 330424 - DNA, 388 bp, Homo Sapiens
  misc_feature (37)..(37): n is a, c, g, or t
attattaaaggggtattaaacctgtggaatacttttntcctttaaaaacatttccaatttactttaaatcctaagcccaaaaaatttttctcctttaaaaaaattacttcctcacctccttatgaactctttagcaatcggcccagttactactacagatgaatttgtctttccatcaacttccaatacattcttttgcttaatgacacaatcaagtccttgccatcaacttgccaaaagaattaaaaattaatttaaattaaaagcattttccctgcaataatgataagctgaatacaagatggatgctaggaccactgctttcccccatgcatttagcaatctcacgtaaatgaacctggttttcaaacttctgcagttgataatg

SEQ ID NO: 330425 - DNA, 162 bp, Homo Sapiens
aactagctccaagtataggacaagtccaagtccgtctgtgcttgctccagtccagctactttttctaccctaccagtgtctttgtggacttgagttgattcattcacctattcatatgcaactctgataaactaaccgtgtaaaaataaaacattgccccgg

SEQ ID NO: 330426 - DNA, 289 bp, Homo Sapiens
  misc_feature (60)..(60): n is a, c, g, or t
  misc_feature (78)..(78): n is a, c, g, or t
  misc_feature (82)..(150): n is a, c, g, or t
aaattagctgggtgtggtggcacatacctgtaatcccagctactcgtagaggctgaggcnaagagaatcgcttgcaanccannnnnnnnnnnnnnnnnnnnnnnnnnnnnnnnnnnnnnnnnnnnnnnnnnnnnnnnnnnnnnnnnnnnncactcacgaaagaaataatagaagtgtaaaatgtttacaaagcaggaactggagctgtggtatctgcctgtatccttgagggcattttgctggtgccaagttcatgtgcaggtcacttggagaactcaataatcccagc

SEQ ID NO: 330427 - DNA, 133 bp, Homo Sapiens
ttgactttgtacagttttattatggtgtgcacttacatgtagccactaggatataaaatgtccaaggatatacaccgaaatatgtctctagatagggttcgttttcgaattctttcacaatgaacttgtgttg

SEQ ID NO: 330428 - DNA, 605 bp, Homo Sapiens
  misc_feature (183)..(183): n is a, c, g, or t
  misc_feature (223)..(223): n is a, c, g, or t
  misc_feature (240)..(240): n is a, c, g, or t
catctcggttatctgtcctggggcaagtaatctaagcctcggagcctcaatttcttcatattcacaataacttcaggaatacttggaggcttactcaaggctgcacatgggaaatgtttagcaaggagtagaccacatggtcagtgtgagtctcatctctctaacagccactttctggatggnagaagagcaaacagccttgcaacatagatgacttattgtnttctgagttgcaacttnttagactgaaaatcaatgtgacaataaagacagccactcttggttgtgagctttctatgggctgggcctctgccaacactagcttatatgacctcattgaatatgtattattaccaaagtaccctatggaggccacacagatgtaggtggtgatgaccaggatttgaacctaggtcccaggcctgcctccaaatcctgactcctctatattctacatatgaataataatacctatgaatggtgacattattattattagttttgtggagttgtctgacttctcagactgggtatctagccttttctatcttgatatctccctgaaactttctgatttggctgactgctctctttgggggttatga

SEQ ID NO: 330429 - DNA, 342 bp, Homo Sapiens
  misc_feature (244)..(244): n is a, c, g, or t
  misc_feature (315)..(315): n is a, c, g, or t
  misc_feature (322)..(322): n is a, c, g, or t
gaacaggatatgtctgaaatttcccaagttgagtatttcattgtacccttctcattgagccaagttcttttagctaagctttttaagacattttgttgcacataaaagcagagaatcttgaggctctcacatctcatattcaaattgccatttaaaaatccgttccctttgctccctttgtttttattactttttcccccttgcttgtgacattggtctttccttgaggaaattgactcctggntttactgcactagtggttcacttctctctgcagaagcagccagaggggcacttacttcaggagggtttttnccggctnccggggaaaccgagacggtg

SEQ ID NO: 330430 - DNA, 404 bp, Homo Sapiens
actttttaccaacggtcagtttttacattttatagctgcgtgcgaaaggcttccagatgggagacccatctctcttgtgctccagacttcatcacaggctgctttttatcaaaaaggggaaaactcatgcctttcctttttaaaaaatgcttttttgtatttgtccatacgtcactatacatctgagctttataagcgcccgggaggaacaatgagcttggtggacacatttcattgcagtgttgctccattcctagcttgggaagcttccgcttagaggtcctgggcgcctcggcacagctgccacgggctctcctggggcttatggccggtcacagccttcagtgtgacttccacagtgggcccctgtagccgggcaagcaggagcaggtctctctgcatct

SEQ ID NO: 330431 - DNA, 471 bp, Homo Sapiens
  misc_feature (13)..(13): n is a, c, g, or t
  misc_feature (360)..(360): n is a, c, g, or t
agttcggcacagnattccttctcagcctaaattgtgtatttgaaacaaggtattttctgaacaaggtgtttgagaagtagctattgccatgtaataattacctagcgcttccttcatactctggaagaagaaaatagtgcgttttttttctctcgaggtcataatgtgaatgttgtatgcagtggccatgtcatcagaacaggtgtgccagccccctgcatggaacatgtacatgcttcaggttgtgcggaattaactttctttagataagggataactagcattcatttcagataacagatattcaacctataattgtttttatttaaaacctcttccaccttgaccagggctcctgtnaattaaacagggattccctccagactaggaggatttggctgagtacctgttatttgaatttacttttattagttcatagaacctttcaacaacagtgtgagttagggttat

SEQ ID NO: 330432 - DNA, 587 bp, Homo Sapiens
tttccttagagaacctttaatttatacctcctggatataaatggatttccattggcccttattttaaattggccaaacaacctttggattcgagaatcggccaaaaaggggccattatccctccaaggtgccttccaaatcctttttcatccaataaactcccccattggaattaggagtttattggattggggaaggaattaaggttacttaagtaaggtaactttggcttaaggaaaattatgagaaaaatccacacttagtaataatgagttttagtctgatgttgatataaatctcacgtatgattttactcttattttcaatcatttgaggcctactattaaattcacagacgtagaaacaaacatatcccacataaaaccatttacatttttacttatagttacattaagctgaggaacattttataaaaactttaacttaaacctaaagcatataaaatatataacatatattaatacatgtatacttcatatattatcttactataaactgtttcataatataaacatgaagtgtattaaaggctaccaggacatacactcactgatggcaggaccttt

SEQ ID NO: 330433 - DNA, 385 bp, Homo Sapiens
ggaggcagggcatcctctggggatgatcgaaccgcatctgcctcaggttccttgcagggccgggcaggccagagatgtgtgtttgggagcccagaaagcccttcctgcccaaccctgccatgccctcagtttccctatctgaaccaccttcataaaaacaacttatggctctcagagccagcacatttgtaaaaacctgaaaaatataaagaaaaacgtcactcacatttctcccatgaacattttcctattttatgtatcttttatgtaactgaatcacattgcatatacaattatgtgttccatttttaaacaataagcttcccttgttttaaaagtaataatccatgtttattatgtgttattgcatagaaatttcagacaa

SEQ ID NO: 330434 - DNA, 475 bp, Homo Sapiens
tttttggggtgcgcggcctggctactctggctgcaggcggagggttgaacgtttattcatcacaattaacagcctatacaagcatctctagaacagaggctgtgggtccaaacgggtccctgcagctccaaccctctggcctctccgggcactgccttcacagccgatggagcatggctgggcaggcagacaggacacaggctcagtcacagggtgtcagggggaagctcttctagctggaatgattggaagttggcccagcggctggggctggtctgtcccttcccctcctgggaagttccacctccactgtagttaaggccaccaggatgaaagcagggttaggtccagggacccagtagagccttgggatgcatgaggtgggggtaaatgggcttggcagagaaatggagattgggaaggggcctgattagaatagaaactgatgatgttggttcagcacctgcaagatgag

SEQ ID NO: 330435 - DNA, 349 bp, Homo Sapiens
  misc_feature (325)..(325): n is a, c, g, or t
  misc_feature (338)..(338): n is a, c, g, or t
aggtaataaagctggacctgggactcgtgaggaaggaatgtgcttggggctgttgccatacctgtgcagcattctttcaaaatagtgccttccaatgcttcttccttatgtcccacagacaggatcatcactaagaagcgttcttaaaacggccccatccagtgaggattttccgttatacgaacatacttgaaataattttagaatttactactgtggttctgcccctgcatacccagtgggaatgatgcccttgtatgggtaattaggcacctcccaccccacccctggacaaaaggcacactggggagttttatagcactgntcacatggctagngtctcttcttt

SEQ ID NO: 330436 - DNA, 433 bp, Homo Sapiens
ggtgccttttaaacactctttggaaaccccaaactttaatagttggtgcaacaatccccaaagtagggatgtgcccttaatttttccaaaagtattggttcctcctttttgggaagctttaagttgccttcctaattttagcctactataaataaaaaactacaatgaacatcaacatccttagaagtagctatactttcaagttgacaatacaatgtttgtagcctatgcaataccacagctttccaccactggctttctacctcggcttgaatgaagagaaactaaaaaaaaaggtaagattaaatctaaaggtatggatctggcatattgtctctaaaataactcaatgattggtctttctgctttttataaagtgtatcttctatcccaacactaccctaaattaagcaagaaaaaagaataaaaatag

SEQ ID NO: 330437 - DNA, 293 bp, Homo Sapiens
aaggaaaatcccacttatttgaatatcccacacacaatccagatttggcccccaccattggccaaccacttcctaggttttaaaaatctcatgctctttccactaaaggctctgcctctctctactcacaagactgttgggaatgattaaagtgactttgtagggagtgcctagcccatggtctgcataaccaatcttagctctgcttcccttgacttcagggaatgggacacatccttcatctatgcaagtttctctatcattttatttgcctacaaggtcctagtaaatgc

SEQ ID NO: 330438 - DNA, 448 bp, Homo Sapiens
gaactgaacctgccatttgaaactgaaagggtgaactcccacactggtgcctccttaagctgtccctgaaggagagagcccaagggaaagctcctaaagggctgaaagccgcccaccacgaccacaacaggatgagcccctggaccccaggcacaggaacatgaagaggagcaggtgaagctgtcggaggagcgagagcagagcaggccaatcgctgaatgtagggaggaggatcagctgtatcctatgccctaggaggcttttttcttggtcttcattatcttcacatgttgattgtatctggcaagagggatgttggagagtttcggggaggagtctccagcaggtgtgcctagacagtattctcctcggtctctggatcatttgtaagtgctccttgatgcaaagaaggctgtcaggcactgcttggagaatgtgtgcgtgttta

SEQ ID NO: 330439 - DNA, 521 bp, Homo Sapiens
  misc_feature (398)..(398): n is a, c, g, or t
  misc_feature (422)..(422): n is a, c, g, or t
  misc_feature (450)..(450): n is a, c, g, or t
aaaaataaataaataaattatggctgctttatttaaatataaggtagctagtttttacacctgagataaataataagcttagagtgtatttttcccttgcttttgggggttcagaggagtatgtacaattcttctgggaagccagccttctgaactttttggtactaaatccttattggaaccaagacaaaggaagcaaaattggtctctttagagacaatttgcctaaattttaaaatcttcctacacacatctagacgttcaagtttgcaaatcagtttttagcaagaaaacatttttgctatacaaacattttgctaagtctgcccaaagcccccccaatgcattccttcaacaagatacaatctctggtactttaaagttattttagtcatganattttatatggcagagaggaaaangttaccggagacagaaaaccaatctaangggaaagggaatattatggggattaagctggagcaagcaattctggtgggaaagtccaacctggtcagtgt

SEQ ID NO: 330440 - DNA, 505 bp, Homo Sapiens
  misc_feature (28)..(28): n is a, c, g, or t
  misc_feature (87)..(87): n is a, c, g, or t
  misc_feature (102)..(102): n is a, c, g, or t
ttttaacagatatagcctggtttccaantattttaaaggactgtccaaaatgtgaaagttccaactcccagttgttcccctaaaggnaaggccagtggaatnaacgaagtgcccagcgatggggaaagcaggtcctctgtcccaacatcaggaaagaattttcctaatccatccagaagttgtcccaaggatggaaggggctgtcttgtgaagtaatgggatggctggggcaagggacgagtgacctcctgtgactgtgatgctggtagatcccctcccactcagccctccaactccatgaggccagagacacttacaaagtcttaagcaaaatccactgggaatgtttcttttaaccaaaagaagctttcaaataatagtctgagctctggctaagtgtcaggcactgcgctaggtgctagaaacgaaggcagtaagctagacagggtctgttgtcatggagcttatatgggaggcaacagacaacatgtcagaccatttctga

SEQ ID NO: 330441 - DNA, 360 bp, Homo Sapiens
aacagaaattagtgaatgatgataagtggaaagattcatgtctcaatatacactatatattacactagacttttaaaattaaaaatccataattccctctccataaaaaagggtgtctatattcccagtgatatggttttccagaaatctagtccctatcaatataaatctgggaatttctgccattccagaggatctaagcttctacactaccaatactgcatactaaggtatcaggcaaatgtaggcactcctcctcagtctgatgtccacagtcacacccgggttgatcacagggtaggacccagaaaaggtgggttacagcactcctttcctggcagagccccagatgtgggtctc

SEQ ID NO: 330442 - DNA, 471 bp, Homo Sapiens
attacttagactcccattggtttttttcaatctgaaaatgagtatcttcgaaccaggaatatcttggggtccactgggggctagctgtctagggcactttgctgggaagacttctgagaccacatctgggctctgcaggaaggagtgctgtaaccacctttctgggtctacctgtgatcaacccgggtgtgctgtggacatcagactgaggaggagtgctacatttgctgataccttagtatgcagtattggtagtgtagaagcttagatcctctggaatggcagaaattcccagatttatattgatagggactagatttctggaaaaccatatcactgggaatatagacacccttttttatggagagggaattatggatttttaattttaaaagtctagtgtaatatatagtgtatattgagacatgaatctttccacttatcatcattcactaatttctgttaaaaaaa

SEQ ID NO: 330443 - DNA, 402 bp, Homo Sapiens
aaattcagatgttttattctgtaaagcacatatgcacatacttcaaacacggaaaattaatctggaagtgaatgccataacagatcagctactgaccatcatgcagcaagaggtgaaatggacccactggccctcaggaccccacagtgcctgcaggaagggtgaaaacccagggaagctgaagccctacacgctgccgagggaaaacgcaacagacatgggcacggtgccttcacgacaacgaaacactttacaaatagaattcaaaactgattcaagtcatacagtgaaaggacaaaaggaaaaatggaaagagatcaatatgatccgaaacaatgcgttttaagagtaagttgctgaccttctgcttggccctccagtccgagatgcctgagggtgagc

SEQ ID NO: 330444 - DNA, 461 bp, Homo Sapiens
  misc_feature (20)..(20): n is a, c, g, or t
aaaaattggaaagctagccnaaagttggttcaggaggttttaaagaaaagaagcccatctcccacaatccgttaaaagtgccaaagtgaaagccagccaggtgcctgatgtcagaaagctgccagccaagttaccccagaagatcccagcctaagatcgttgatgaaggaggctacactaaacaatagatttttgtttacaaaaatagtagataaaaccgtctcctactggaagaagataccatctaggatgttcatagctagaggggagaagacaatgtctggcttcaaagcttcaaaggataggctgactttcttgttaggggctaatgtagctggtaacttgaagttgaagccagtgctcatttaccattccaaaaatcctaaggcccttaagaatgatgctaaatctactgtctagtctctagaaatggaaccatgaaggctggatgacagcacctc

SEQ ID NO: 330445 - DNA, 427 bp, Homo Sapiens
  misc_feature (346)..(346): n is a, c, g, or t
attttggaatattttttctgtagcatccacattctgaggtatatatgtgtctgaaacttgggggaaaatatattcttctgatttcactaagaccaaagtttttaaaacttgaatttgccttattaatatgtatatacaagtgtgtaagaaaaacaaaaataggcacttgtatactttttcttccaagtgtttgttgtactgattccaaacctttttttctcagtcatattgatgaggaatgtagggacagggtattttctttgttttaggcagttgggggaaaacagggctgaagggctgtgggttcgttcttaaaagtcatctggcaaattggataaaagagccngggggctaaaattcccttttcttaacatctgttactcttttcactgggcgttacattcaggttaaggtttgcagggccgat

SEQ ID NO: 330446 - DNA, 336 bp, Homo Sapiens
  misc_feature (256)..(256): n is a, c, g, or t
  misc_feature (298)..(298): n is a, c, g, or t
  misc_feature (308)..(308): n is a, c, g, or t
gtataagccactatgtctggccaatatcaccttcttaaacttctactgatgctgacccagtagaaaccattgagacagataaatatgagaggtattattcggaagcaccactgaagtgtccccaaaccactaccaaactacacattcttcttaactgtctttacaaaccaacaaataggaatataatcatcttttgaatatacattaaaaaggtcataggtaccaaatgccaggacagtggggacattctaagggnataatatggcagggggggagggaaggctcattttacactttnccgggggggntttaaggggcaatggaacttttaggttg

SEQ ID NO: 330447 - DNA, 489 bp, Homo Sapiens
cttcactgggacccctctgcccgcttgaccccagctcaagcattagtacacccttggattagcaagtctgtccccagacctctcaccaccatagacaaggtgtcagggaaacgggtagttaatcctgcaagtgctttcccagggattgggttctaagctgcctcccagttgttggaatagccaataagcttaaagctaacttaatgtcagaaaccaatggtagtatacccctatgcagtgtattgccaaaactgattagctagtggacagagatatgcccagagatgcatatgtgtatatttttatgatcttacaaacctgcaaatggaaaaaatgcaagcccattggtggatgtttttgttagagtagactttttttaaacaagacaaaacatttttatatgattataaaagaattcttcaagggctaattacctaaccagcttgtattggccatctggaatatgcattaaatgactttttataggtc

SEQ ID NO: 330448 - DNA, 422 bp, Homo Sapiens
atcatcagcaaatttatattgctgctttggatttacttctggaagccaagacatgctgggcttaaactacccatgagatgcacttctctggtgacagtttacctggtgatatggtttggctgtatccccacccaaatctgctcttgaattgtaatccccataatcccttcatgtctagggagagacctggtgggaggtgactggcacatgggggcagttcccccatgctgttcttgtgatagcaagtgagttctcacaagacctgatggtttttataaggggctctttccccttcgctcctctctctctcacctgctgccatgtaagatgtgccttttcctgttccaccatgattgtaagtttcatgaggcctctccagccattcagaactgtgagtcaattaaacctttcctttataaatt

SEQ ID NO: 330449 - DNA, 352 bp, Homo Sapiens
  misc_feature (119)..(119): n is a, c, g, or t
  misc_feature (268)..(268): n is a, c, g, or t
  misc_feature (335)..(335): n is a, c, g, or t
gtgtgagccactgcgcttggccatgttggtggcattttaaattttttagcatctctttttccccacataatttcttgttctcacttcatacgatatgttgaaaactcttgtgggcatgntgtaaacctgaaaagattttgtcagcttaaatagttttattggcacctttgggcaagatttctgactgtttccatgctttaaaaagcactattttctatctttggccatgtctgtaataaagttctttcattgtctaacacctctaacntattgaagttagagtagtgaggcaaaataagtgaggttcatgcttctcataggggtttaacagactnaggggttctacacattt

SEQ ID NO: 330450 - DNA, 476 bp, Homo Sapiens
tcaagatggcagctttaatcacattggccaagggcctagggttccctctgttcaggcccacttagccacacacccaccctggccatatccagaacacttctaccaggtgggccctgcctgtgtggccactgatgtgggaacctgaggtcacatcagtctgtggactcctgggttaggtgacccttctgccttgaggtctgctggacacctgggcatgggatccagtagtcctgagctcactcttttggccatctccagctgctcctaggggacgtggctcaggcccgctcctggggcagggggttggcggtggcatgaggtgggttggggaggaggacgtgtctccacattgcagctggcttcctcctgggctgaacctccttgtgctttgagactgacaggaagagcagagttgcttcaggtagaggctcggccaggcccttgggcaggataacagcagagaactcaggtgcctc

SEQ ID NO: 330451 - DNA, 459 bp, Homo Sapiens
  misc_feature (193)..(193): n is a, c, g, or t
  misc_feature (222)..(223): n is a, c, g, or t
  misc_feature (285)..(285): n is a, c, g, or t
  misc_feature (289)..(289): n is a, c, g, or t
  misc_feature (300)..(301): n is a, c, g, or t
  misc_feature (305)..(305): n is a, c, g, or t
  misc_feature (445)..(445): n is a, c, g, or t
tccataggtacgaaaaagttaatgatcatttttggaattgatgattttcattttctcattacacctttacacacaacataattctgaataaccagctttatctttttaaattatgtacagacaatcaaattctatacttacttaaaccttactaattaatatcattatacagtagtctctccttatctgtggnttctctttccctgtctcaattacccaggnncaaccttggctggaaaatattaatggaaagtttgagaaataaacaattcataagtatttaanaatnattcattaatnntttngagatgggagtctcactctacccgggctgggagtgcagtgggtgcgatcttaggctcaatgcaacctctggcctcccggggttcaagtgatccctcccaccctaggcctcccgagtaggccaaggaccacaggacggctngccacctggcccgg

SEQ ID NO: 330452 - DNA, 463 bp, Homo Sapiens
  misc_feature (56)..(56): n is a, c, g, or t
gcagtttacattagattattatgtacttcataaattaacagccagctttagaattnataaaacagttattatatttcatgcctactgttggtgttcttcttgttaaaataatgttcctcaacggacacagatacagagcttgtacagaagtaactctgggcacatccagatagtacaaaaagcagtcataaagcagctactcatggaatcgcaactgtgatggccagcgagcacctggcccacaggtggtaggaaaagacaaacgcgggtggaatttaaacaaaaacgtcaatttcccacaaactacacaaatctttaatctgttcaaaacagcacagaatgtcttcctgccatagagaggaagtcaatatgaacttgttataaattgctgtcatttccaaaactctttagttgatgttcagaactagaaaccagcacttggatttcaatctcagttggccga

SEQ ID NO: 330453 - DNA, 402 bp, Homo Sapiens
  misc_feature (182)..(182): n is a, c, g, or t
  misc_feature (248)..(248): n is a, c, g, or t
  misc_feature (318)..(318): n is a, c, g, or t
  misc_feature (346)..(346): n is a, c, g, or t
  misc_feature (367)..(367): n is a, c, g, or t
  misc_feature (384)..(384): n is a, c, g, or t
acagaaagaaaatccatggcatttaattagattgcattttatttagataaatgaaaatttgccccaaacagaactaggaatcaaatattgtcttggactagaggtaattgctaagctggaagttatattgaaaactaaaatttccagcccttgactatctgtagttccaaacatcaaagganaatattggaacaatttatctatgtacagagagaggcaactcatgggtaccataagcaaaataaccngagggggaacatttgatattacaagaagtggtgagagtttacaagtcttgcattgctttctattgtacanggctctgtagtaatgccaaaattaccanaatgtagggcacttgctctgncttctgccgtttacttnaggtttattatgtacttc

SEQ ID NO: 330454 - DNA, 449 bp, Homo Sapiens
  misc_feature (410)..(410): n is a, c, g, or t
taggttgtctcatgatacagacttgtcttcctcaatttagtagttcaactaaataaagaagttttcctaagcagcccagcaaatcattctgcagcagatactatttccagtatttgtagttttggtcattttgaacaaagctgtcagtaaaagctgctgaaattccacggatgggtgtgaggagggcatgcttcataccacatattctgtgataaggagtgggtagggggccatggcatggcatgatgggtgctaccaccctggacgttgatcctgggcagggataattgccacttgggttatataaagggcaggataaggctccctgtttttgtggggtagaagaaatagaaaaccggcaatattgactttaggccagggctttttcactatttatttttctaaataantcccgggctgacggcctagggataaaagtctctgccagc

SEQ ID NO: 330455 - DNA, 469 bp, Homo Sapiens
  misc_feature (390)..(390): n is a, c, g, or t
  misc_feature (398)..(398): n is a, c, g, or t
  misc_feature (449)..(449): n is a, c, g, or t
ccagtccacagcaccttccattttattgttttatttacaaacagggtgaagtcaaagggaaagtcaggggatggagtcagtctgggccatccgaatgtggagtagttcttgggtcaagctctaccatgaaggccacctcttacatatccttttcctgccccttggtaatggccccttgattcctcagggcagcctcagctgttgtacctgaacacttttatgagggcagatggatcctggggtaacaggggtggtacgagggctggggccccctcagttttgtgtaaacctgagttccgatcacacgcatgatttccttcttgtatcttggggtcctgagtattaatgttggcatcgcccacctgaaccatcctcatatacaaagaagantgcttgtncagacatggttcggtacacagggcacacccagatgtttcccatggtttttnggaggtccttagatgtaatc

SEQ ID NO: 330456 - DNA, 432 bp, Homo Sapiens
tagctcccccaaggcaggccatggaggcagagctgctttgggttccaggtaaggagagatgtgtcccaggtggcctttgttgtattgtggggcacagacactgagggagacagggaaaggtctgggagacacaagatggtacccccagaaggccatcctttgtagactagacacacatcccaaagggagggctgtttcctggcttattgaggacttttccatttgggctagaagtaaactgagtcagattttgagagatcagtaattccaaagagcagataaggattctatagtaacacagctgggttcactgcacgggttgatgtcaaattgtgcttttcatgttacattagtggattttacaaggcacagattatttgacatttttgtgatgcttgttatagaccaactgtgacatgacagtattattaa

SEQ ID NO: 330457 - DNA, 316 bp, Homo Sapiens
ttcccttatggctggacttttaaagcttaaaaaaaatccgattgaatataaatgcctaatttcattccttgtgaaatggttgcttcctcctgattccctaattgtgctgtgttcgtgtcttgcactggaattcaacattcccttctccttttgtactgtgttgtgcttgctgtctctcccggacacccttaaagactgtctttttagcaaaaaatttcagtaaagtgttttctgtaatctttttttaaaaggtgagaactaattattgtccatacttgtagcattcttcattaaagtcttgcttctctcaactgaa

SEQ ID NO: 330458 - DNA, 491 bp, Homo Sapiens
  misc_feature (171)..(253): n is a, c, g, or t
tcaattaagtcccaagctaaacatggccctttgtcttctgaagaatatagtaataatagtgtgtatggttatttatggagagctcaccataggccaaacattgagataagcactttatggagtcagctccttcagcactctcaatttacctagttttggggtaagttatcnnnnnnnnnnnnnnnnnnnnnnnnnnnnnnnnnnnnnnnnnnnnnnnnnnnnnnnnnnnnnnnnnnnnnnnnnnnnnnnnnnntcaaaatctcccagtcctgtcctgttctgaagctcacattcaaaacaagactgcaccacggcttcctccccaggttaaagctacgactacagcactgatgtcaaaacaactgagtgattcaatggaggaaaagccaatcagttccattagctgagatcatttcaaaacaaagatataactgtccttgattttccactttgttcctcacttttttggtgttatagagatccagtcaata

SEQ ID NO: 330459 - DNA, 450 bp, Homo Sapiens
tattttatatgaaagcagccttctcttttaatataaaatcatatcaaccaaataaaacctgccaaagctacatcatttaaaatatgtacagtttcacacacaatattacaactttaaggaaaataaaacatacttttcaatatgatacaaagcatgcatctcaaagtcattactttaaaagagagcaacacaggtaaaattcaatgataaacttcacttcttggcagtactatagctggaatgagatctgtggcatgatcagcccaagatggatgcattgagtcttcatagactcattcggacaaaaacacccagaaagaaaggcttttgctaagaacacttcaaaaggtttagaacattgcaatgtaacttgcaccctggcagcacctgttcaccagactgtcagtgcaaactgaaagaaaaacattaaaaggagatcgtgaaatgata

SEQ ID NO: 330460 - DNA, 366 bp, Homo Sapiens
  misc_feature (26)..(26): n is a, c, g, or t
  misc_feature (46)..(104): n is a, c, g, or t
tttcgccatcttggccaggctggctntgaaactcctaaccttgtgnnnnnnnnnnnnnnnnnnnnnnnnnnnnnnnnnnnnnnnnnnnnnnnnnnnnnnnnnnncaggaacgatattaatgaaacatcgtgggcaactctgtacataaactattgataggagagtgaggaacttagttggatagagtttagcaagtaatggaaaagaggatttaaaattggaataacgtctattgtgtgtagggcttgaaagtaaaacagggggcttgatgggcatagcaggttacaaaaccattgtggatttctcaacggagatgttgacaaatgtgggcattaatgagctctgaagtgggataacaacaaattc

SEQ ID NO: 330461 - DNA, 368 bp, Homo Sapiens
  misc_feature (332)..(332): n is a, c, g, or t
  misc_feature (342)..(342): n is a, c, g, or t
  misc_feature (352)..(352): n is a, c, g, or t
gggtgcaagaggtttatttgggagccatcccaggaagcccaagggcggggagtggggaagagagggaagggagagcccccgcaggaagtacatgaatgagtgggttactgctgggggcaactgggactccatcctgctgggcatcctctgagagtttatgtagaatacacttcagaattgtcctgctcaaggacaatgaagctgaggtcctgctccttattgactcagggttgctgctccgggggacattaaccccccaacacttctagcttgcccagtgcactgactgaggcacacagctgtgggcccaccagagaacctctttggggctntgatacaggnaaccatcggngtgcatggggaactct

SEQ ID NO: 330462 - DNA, 398 bp, Homo Sapiens
  misc_feature (359)..(359): n is a, c, g, or t
  misc_feature (381)..(381): n is a, c, g, or t
tgtgtacaaaataatttattatagcattatctaggttggcattattttacagcgagtttttcccgtctcaataagtatgaatctaaatagattagggtgaaaagaaaatgtgtgtctaaataaaatctccctttttgaatgtatatttgtcttaataaagggaagcattaatattacagacatatttacaaggttctgaacatgagtgattccattactgttttctgtacaagataggaacaaaaagctatccacccgcccccaaaaaatactgtttaacaacactatgttttaaggagttaaactaatgagtttcaaatctcattttgccgaggtattaaaatggcattttaatgggncaatggcatgggccattaacancaacattttcattgtaa

SEQ ID NO: 330463 - DNA, 607 bp, Homo Sapiens
  misc_feature (13)..(13): n is a, c, g, or t
  misc_feature (33)..(33): n is a, c, g, or t
  misc_feature (41)..(41): n is a, c, g, or t
  misc_feature (49)..(49): n is a, c, g, or t
  misc_feature (90)..(90): n is a, c, g, or t
  misc_feature (135)..(135): n is a, c, g, or t
ccaaccactcttnacagcttgtgtgtcctgganaccaaggnaatcctgnatgtgaggataaaggatgaccttggctcaaacagatcatgntttttgcaaaaacttacttaaagcatgtgtcttgctgctggtganacaatagagcaacccctcaggtaaagaacagcatgatctaaaagcaagctttggagtcaagaaaggtgtacattcagttctcagttctgcctctcatcaggtgtagccttgggggaagtcattcaaccactttgccttactaccctcatctgtaaaattgggcattagcaatactcatgtacctaaggttcctgtgtggattaaatgaataacatgtgcaaatctgtttttcaaactatcaagcaatgtccacaatggaaagtttagccgtgatgattagtgtgcataggcaaatataaaaacgcatttgggctgggaatgtcaatgagcaaattggaagagagttggtaggttcaagttagagactgaaaatgtttgggaacactgcaaatgcaaatgacaacacagatgctcttataattcacagtgatagtagcaggtgggattcccagccacttggggcgctcgtgcc

SEQ ID NO: 330464 - DNA, 557 bp, Homo Sapiens
  misc_feature (272)..(280): n is a, c, g, or t
  misc_feature (322)..(322): n is a, c, g, or t
  misc_feature (465)..(465): n is a, c, g, or t
  misc_feature (479)..(479): n is a, c, g, or t
  misc_feature (530)..(530): n is a, c, g, or t
taacaaggaggtatcactgagcttattttagctgcaaagtggcatcatattattccatttaatgaaattcacctcaagccctttttgacatattaaatatatgggatatatttaaggcaagagaagtaaggcaatccaaatgagtgcccttttccaatctcagcactgtcttggtggaattggtgacactattcagataaccaactggagaccgacaggatttgccatgcatttgcatcttgctagagtttggtttttatgaaagggcctannnnnnnnnaagttgacatattttgagtggaaacactcaccctaccaaatntacttaagttgcaactctaaaagcataaggacattttcaaattttctcttcttccaactgagaaaatgaatgtgccagggggaccatattatatactttgtaccttgcattacaccatagggaatatatcaccttgtgccaanattccgtcctttgnctttatacctggaatttccccctcaaattttccattaattttgcagggccnaaattttttggggatgggggacccaat

SEQ ID NO: 330465 - DNA, 524 bp, Homo Sapiens
  misc_feature (179)..(179): n is a, c, g, or t
  misc_feature (442)..(442): n is a, c, g, or t
  misc_feature (447)..(447): n is a, c, g, or t
  misc_feature (470)..(470): n is a, c, g, or t
  misc_feature (477)..(477): n is a, c, g, or t
  misc_feature (485)..(485): n is a, c, g, or t
  misc_feature (492)..(492): n is a, c, g, or t
  misc_feature (507)..(507): n is a, c, g, or t
ttcggcacagcgcttagtaattacagcccttgtcaaggcacagttttttgtttcaaagtttgttaacagttattgtggaaaaatcagtacctctattctgttgtagcagctgggtttaaaatctgcagtgagagttttggggacagttttgttcttaagaacaaagcgccttggcaggngaaatgttagatattcaaattagtgatctgggccactgaaagatacccagtaaccagggttggggctggcatccagccactgggaaccacttcaatagggtacaggagctggggactgggagggaggaaatcacttcacaggggttcctgccagcctgcctggatacctacttctctaagggaacaagtagggcaaagggcactttccccatccctggggcccttcagttttccttcattcttgccaaaaggttgggtttttngggtnggtttttcaaacaggtattaggnttcaaantttaaggntgtttcnggggtcagccaattnaaggccattaacttgtt

SEQ ID NO: 330466 - DNA, 330 bp, Homo Sapiens
caagtaggcaaaggcacttcccatccctggccctcagtttccctcatctgcaaaaggttggttttgggtggttttcaaacaggtaatagcttcaaacttaagctgattccaggtcagcaaataaagccaataacatggagaacagctcttggatgtatagtgggtgctgggagttcctccttcctgccacctcctaacccgctccctccctggccaggaggaggcatttctgacatctcctccttctccctaggagcactgaggctgttccagacccatgcagcctaaggaagactccttctgtgctgtgggtgcacccgtctcccccac

SEQ ID NO: 330467 - DNA, 392 bp, Homo Sapiens
  misc_feature (373)..(373): n is a, c, g, or t
ctgagttttacccagactcaaggagttggtaaagggttaatagccagatagtagaaccagtgaggagatgcggccaaagattctttatatctgaaccaagatgtaaaacaagaaatgctttgaggctttctaagcgatcctcctgtctaatttgcacctttgtctggatgcacacttctgaccttgctgccacaacctgtggggttctgatgtgtcccttgatgggtgctgccctcagggactgcaccctgacaagtgttaaggcaacattcctttcttgtggccctggggccaaaaccaatggctggatggacctttattcagctttcctgttttctttcccatacttggcatacaccactggcaaaatgtntttaatggcaatttttgta

SEQ ID NO: 330468 - DNA, 445 bp, Homo Sapiens
  misc_feature (15)..(15): n is a, c, g, or t
  misc_feature (38)..(38): n is a, c, g, or t
aactccgtcctaaantgtccggttactcccaagtaagnaggttcccccagaagggcccttgttttccccctagggctgaatgaaaacttgctcccgacaaaccccaggccaactgggaggcaccctcaggatggaaaaagatgcctggaaggctttgcctggcctttccaggaatgcccgggggaacccacgggggcaaaaaggggaggaaggaaagagattcctaaagacagattgcctgcctggtctgtcccgaccccgggtcacagtgtcagcaaagagaacagcatgattctgacagggttggattttgtttcaccctcggaatgagcagacttcaaacacttgcattttcacggaaatcaacaagagagacagctagcaggacacgaggctcctgccagttctgtgtggaaaggcaccagatggtttgttatgaaacacc

SEQ ID NO: 330469 - DNA, 439 bp, Homo Sapiens
  misc_feature (54)..(246): n is a, c, g, or t
  misc_feature (419)..(419): n is a, c, g, or t
agctcaactgtggcccttgaaccccccaaggctcaaagacatccctcccccatnnnnnnnnnnnnnnnnnnnnnnnnnnnnnnnnnnnnnnnnnnnnnnnnnnnnnnnnnnnnnnnnnnnnnnnnnnnnnnnnnnnnnnnnnnnnnnnnnnnnnnnnnnnnnnnnnnnnnnnnnnnnnnnnnnnnnnnnnnnnnnnnnnnnnnnnnnnnnnnnnnnnnnnnnnnnnnnnnnnnnnnnnnnnnnnnnctcggggaactctataatcaacaagacagaaattcagacattttattcaggttctgcaagtctcttcattttcttctacagagaagtcttgaagaaaatctcacctcaagtcaagaccaaaaaaaagggtcttagacgggctcttaggtacttttttggggggaaatgagggngaaaaacctttggtatgtgg

SEQ ID NO: 330470 - DNA, 403 bp, Homo Sapiens
aggctcctcgcactgtacattttaattttagtagtaatggtatcctctttgggctttcataggactgagtccacagcactagtctagcacggataaacaatgacataagtagctattgggtatgtttctcttctcagaagtctgaaggctcctcaaggaacaatattcctgtcaatctttctatgccaagcacttcacatagtacataagataaacacacacatactctctcactctctaaataatgaatataagtaaatgagtagttgaaaccaatagaattggatgggataatttttctccatgaaggaaaaaattggcttcacctattttagggcttatctctgcccccatgagactgtgctttgacttcttgtgacatggtgggtctttaaaattattt

SEQ ID NO: 330471 - DNA, 502 bp, Homo Sapiens
  misc_feature (54)..(209): n is a, c, g, or t
  misc_feature (328)..(345): n is a, c, g, or t
  misc_feature (378)..(438): n is a, c, g, or t
ccttttttcaaaactccctctaaatgtttgacattattgacccttctttctcannnnnnnnnnnnnnnnnnnnnnnnnnnnnnnnnnnnnnnnnnnnnnnnnnnnnnnnnnnnnnnnnnnnnnnnnnnnnnnnnnnnnnnnnnnnnnnnnnnnnnnnnnnnnnnnnnnnnnnnnnnnnnnnnnnnnnnnnnnnnnnnnnnnnnnnnnnnagttgggcatggtggccacacctgtaatcaaagcagtttgggaagccgagatgagcagatcacttgagtccaggaggtggagactagcccgggcaacatagcaagttcccatctctacnnnnnnnnnnnnnnnnnngaaaacttagctgggcatggtgtggtgcgttcnnnnnnnnnnnnnnnnnnnnnnnnnnnnnnnnnnnnnnnnnnnnnnnnnnnnnnnnnnnnngtttcagtaagctgagattgcaaccactgcgctccagcgtgggtgacagagtgaaatcctgtct

SEQ ID NO: 330472 - DNA, 519 bp, Homo Sapiens
  misc_feature (22)..(22): n is a, c, g, or t
  misc_feature (49)..(49): n is a, c, g, or t
  misc_feature (63)..(63): n is a, c, g, or t
  misc_feature (79)..(79): n is a, c, g, or t
  misc_feature (87)..(87): n is a, c, g, or t
  misc_feature (95)..(95): n is a, c, g, or t
  misc_feature (149)..(149): n is a, c, g, or t
ccaagatcacaaacaccttttncatgccttgaaggttgaaaatccccantttgccttaatganaaacccttcaaacccnggaccctngatatacnggcaaaaggggttctttccctctgctgaaagaaagaaaatggccatccagggcnaaacacataaggtggccagacctccttccttccagggcgatctattactgcaaagctttgcccagtacctaaatgcaatcaccaaaggaaccagctttggttctagttttccaagggcagttaaatgctttgttgtcagacaagcattttcatttcctgcgctcactttacacagaagaccactttgcttttctctgcacaccaccactggcaccctagcatggaagtctgcatcaacatcaataaaggagtcactgttctttaaacattcttgaacaagtaagaggacatctggctgagacataatggctggaaactggatgtcaatgtttacatccgaatttttgaaacccaatctgctacaggatga

SEQ ID NO: 330473 - DNA, 552 bp, Homo Sapiens
  misc_feature (464)..(464): n is a, c, g, or t
  misc_feature (476)..(476): n is a, c, g, or t
ttttacgttttacttagtttattaagctaccttatatcttactttggaaagaatagttgggaaaatgggcattagacgtgatcctttttaaaaaatgaagtggtgacatactgttaatcatcacagagattgtttgtactacattgtatacattcacaatatgctttcagagattcttctggctgggactgaaggattgaagatagtatttgcactcttgccatccaccttttaattttatttacatcttgctcagagttccatgcagaagtttatggaggttccttccatctttcttctatagatttcatcaaacctctcattctgggcaacagtgaagtggtttttccaatcccccacagttccttttctcatgaaggaggaaattgactggtccaagatagatttggaaactgtagaacgatttgtcatgggattttctttcattttctcaaatgacgtcntctggacaattntatctagcactgtttcattcacctttctttccatgaactgcatcacctttcgaattcatgcttttgggtcctcttt

SEQ ID NO: 330474 - DNA, 410 bp, Homo Sapiens
aaagtgctcacctttccgcttctttattttattttctttacaaggactatctctttctcgtttttccttcctgtttctggatggtatactttatcacccttgtaatcatcagagttaacatctgcttggatacagtctgagttttcagggtggacactgatgtgttcatttcccatttcttcttttggtgggcttccaaaactttcagcagtctctttaagagtaagtggctgtaccttacaggtatttgcagctgaactggtagcaccagggaccttgggccaaaactgagtttttgaggcttatcatcttttgtttgtacatctgggatgatgatttattacttctttaggaatgttcctgaaatacatgtaattgcattcagagggtttagaaggctgggatttgta

SEQ ID NO: 330475 - DNA, 386 bp, Homo Sapiens
  misc_feature (250)..(250): n is a, c, g, or t
  misc_feature (319)..(319): n is a, c, g, or t
tgaaaaattttaaaatattgatatggaaatatacacatattggttaaataatttcaacagtccaacagggtgcacagtgaaaataggtctccttcccatcccaggcccccaggggtaactataactgatgaacctcaaagacaaaagctatgatttctcccccacaaaatatttttgtaacagaccccaagtcaaggcctaagggtttgacatttcaaggcaaaattcttaaacctaaaaacagtgggantatggatataaaggcaaaccgttaactggggttacactatcttatttccaaaatcccatggcaattaantaccctaaaggattcaggccatttatgccatcttaaaaatacactggaaccctttcaattctttcct

SEQ ID NO: 330476 - DNA, 477 bp, Homo Sapiens
  misc_feature (54)..(54): n is a, c, g, or t
  misc_feature (60)..(60): n is a, c, g, or t
  misc_feature (80)..(80): n is a, c, g, or t
  misc_feature (93)..(93): n is a, c, g, or t
  misc_feature (110)..(110): n is a, c, g, or t
  misc_feature (125)..(125): n is a, c, g, or t
  misc_feature (160)..(160): n is a, c, g, or t
ggcagcaatccctatcaaaagcacaaaaagtgaaagcaacccccagtacccatnaagggntgaaaggggtaaaacaacangtgtcctatgcanaacaatggaataatgancagcctttaaaaggnaggacgctgtgacatacgcctacacatagatgaanccttcaggacatcacgctaagtgaaacaaaccagtcacaaaagagaaataccatatgtttctgcttatatgagatcctcagtgtaagtttgtagagatggaaattagaatgctggttgcccaggagctggagagaaggggaaatagggagttattgtttaataaatagagattcagttttgcaagatgaaagcatctggagatggatggtgatgaaggttgtgcaacaatgtgaatatacttaatgtccctaactgtgcacctaaaaatagtctaagtggtaaatattactttacgtgtatgttaccacaatttatt

SEQ ID NO: 330477 - DNA, 580 bp, Homo Sapiens
  misc_feature (16)..(16): n is a, c, g, or t
  misc_feature (30)..(30): n is a, c, g, or t
  misc_feature (46)..(46): n is a, c, g, or t
  misc_feature (431)..(431): n is a, c, g, or t
tacacccaagcaggtntgggaggctgcccngctgtagtgctcaccnacattctatgactggaatgctgcaagcctcttccagagggagccctccaggagccagggaaagtcatatccgtggacccattggtaggtttccctctgcaaacttcctgaactgggtggtgatttttctggcgagttaaagtcccagcaggtttctgccgtgggccttcccccaggggggccccacccgggccttccagtgatctggaccccggaagacggattgcctgcctgggtcatgatttcccacatcatgagcgaagttcctttgttttttgtgtgcatgcaaaatattggtttctttaaatttaatatcttttcctaacttttctactaacctagaaggtatgtgtgattattatcttttttattcttatcactgtacnacttgttagtatctgatattaggtattcccaaatagaacataatttattttgttaatgttctctatttcttcttgattatttattagctttggatgttaaaaattagccaaaagtggctctctgcctatgaagtagccattctttgtta

SEQ ID NO: 330478 - DNA, 473 bp, Homo Sapiens
  misc_feature (20)..(20): n is a, c, g, or t
  misc_feature (36)..(36): n is a, c, g, or t
  misc_feature (65)..(65): n is a, c, g, or t
  misc_feature (99)..(99): n is a, c, g, or t
  misc_feature (130)..(130): n is a, c, g, or t
  misc_feature (409)..(409): n is a, c, g, or t
  misc_feature (418)..(418): n is a, c, g, or t
  misc_feature (427)..(427): n is a, c, g, or t
  misc_feature (450)..(450): n is a, c, g, or t
tgtgtttttgaacacccctnctttgaacaccagagnaaaagtctggaaggtggaatgaggagaantcccttttaggcacccgtttgacaactaaaaganaagtcccaatagtcataccggatactttttnataaaactttactaaaagcttagaaggaaaaaactaaacaaacagaaaagtccaaagacattacacattaagccagaaagggcttagagcacagccagcatagcacaaagctggtgagagaaccagcctcaggacttcaaaatggcacagaaaaatctttctcagctcctgaggaacagcatcctgcaaaaggcttgctgcctagagcaggtttctgatgccagtgattctggggcacctggaaataggaagcttctagccattgttttcatgtctagnattttattncatgtttanatgttataatttatttttatttntctccataatctctatttcctat

SEQ ID NO: 330479 - DNA, 405 bp, Homo Sapiens
  misc_feature (30)..(30): n is a, c, g, or t
  misc_feature (36)..(36): n is a, c, g, or t
  misc_feature (340)..(340): n is a, c, g, or t
tccttaaacccctaaaaaacaggggaatangatatnaaagcaaaaccgttaacgggattacactatccttatttccaaaatccccatgccaattaaaataccctaaagaatccaagcccatttatgcccatcctaaaaatacaactgaaacccttcaaatactatctaattctaactatgaattcactggttagaaaaacccacaattcattatatttggtattgttgttccacaccctaagttaacgccaaactaaatatcgaataattcaacttcacaaacacttcttcccttcaataaaggaaaccgtaaaaatacaaagtcctggctgggcgcggnggcacgcctgtaatcccaacactgtgggaggctgaggtgggcggatcacaaggtcaggagttgga

SEQ ID NO: 330480 - DNA, 442 bp, Homo Sapiens
  misc_feature (411)..(411): n is a, c, g, or t
aactgaaaaaccacatttttctacatacagctggggaggtagctgagaacttggcactgcgcacacatactaggttgaaagagagttgaggaaaccagaaggccaagtggatctgctggcaaaccctgaacctgtctcctgcgcttgctctacagttctgaagttgaaaatccttttcatgcctagcatctgcttgagttataaaccccaaggcagccatgtcatagactagtgtttactcttgttttgactttgttttaatgcttcctaagacccaagtgcctcctgctgtttcctcctttgtggtagcctctggccatctgggacctcaatccccagctttcccactttcagcagtcctttggctcttttttgcttcttacctcaaataggccccgggagtgggctttnagtcttccaatatgggaggcatttcaaggtt

SEQ ID NO: 330481 - DNA, 636 bp, Homo Sapiens
  misc_feature (319)..(319): n is a, c, g, or t
aaatcttttgctgtctttgaccaagccaaaagagttacaaccaaattcaaaaagccacccaacccaagatcaaaactggatgagtcaaaaatgtgtgctgttcctccaagaactcattgacatgccagtctctgaccttcctaggatgaggccacagctcccgtagctcatgaacctagactggcattcagtattttaggagtttcattgcatcatctgtccatccatccatccctccattccttcaaccatggaaacaattcacaggcagtcttaatgggtctttttttaaaaggtttgttataggattatctccttnttacttccattctcagttaatccccactcagtgagtcagtgaataagatagtaagccagcatggctggtgagaaaccacaggacagaacaaagtggaccagttggcaggagactctgtagcctgttttgttagcattcaactctgcaccagctgccccccacatgaccctgcacacacttcaggggtgcacatgatgactgctccatgacaggaagaaaatatgagaaattctacttatagttaactttttagcctctaaagttttctactttgtttatattttataaaatataaaataataccctactgtgaatat

SEQ ID NO: 330482 - DNA, 522 bp, Homo Sapiens
  misc_feature (41)..(41): n is a, c, g, or t
  misc_feature (61)..(61): n is a, c, g, or t
  misc_feature (108)..(108): n is a, c, g, or t
cccacctaatttgtgccaattggtaaacacttttccttttnaggaatataggtattaatantacccggtttaattaatagaagatttagaaaatacacgtttttaaantgaataagggaaatatttaatctcttgccaacctgtagataatggcctatgaatgtctgttctatatcttatgaacatctatggcatgatgcttatttctctggataagaaagtttttatgccccaggataagtcctacatagcaggatggagcagtatacatcttaggggtttgtgggaaggaattagagacaatgacagggaaaacaggctgccagatgctttgcaacttttgcctaatttttggaaatgaggtgggaacaggcagaagcaatggggttttgaacattttctctgtttgagcgggaaactcatcttggttcctagggcctatgtatggcaagaaagtttcagagcttcaggcaagcagcaaggagaatccataaggtctgaactgtgacaggaaccaagggc

SEQ ID NO: 330483 - DNA, 372 bp, Homo Sapiens
  misc_feature (69)..(69): n is a, c, g, or t
ctagtccccggtaagaatgtactttgttacatcctgtagggacccaaaccttcccaaggttttaaatgnaaggacctcttgcagagctgatcagcgtattttgagaggaaaaagttgaatagcagaattttaaagggttcaattttaagaacatgaaaaaatgaaaaactgtccagatttgtctcttcatctagcccttgacttgaatataaattctcataactctcagacaagttgggaactatgctatactgtttttatctggaacattctgtgtagcattatttgtataattaactatagttcctagatagcatcccaaagtgataaattcaagagaagtgagactgctggcctagctccagacatcta

SEQ ID NO: 330484 - DNA, 454 bp, Homo Sapiens
  misc_feature (328)..(328): n is a, c, g, or t
  misc_feature (337)..(337): n is a, c, g, or t
  misc_feature (364)..(364): n is a, c, g, or t
  misc_feature (377)..(377): n is a, c, g, or t
  misc_feature (429)..(429): n is a, c, g, or t
cttttcatttccaaataatttcaggcttccaaaaagttggaaaaataggacagagtttgtataaccagttcccctagataacatcttacataacacttttgaagggtgctggcaattattttgtagcatggccctttggtctgtctgatgtttcctcatgatcagattcaggctacacattttgggcaagagtctacagccacatcaccctgaacacacccgatcttgtctgattttgggaagctaagcaaggtcgagcctggttagtacttggacaagagacattttgggcaagaaaaccacagcagtgatgccgagttctcagtgncatgatatncagggctacgagctggcatgcaccatnttctgggtggatngaccgcatagctaggggtgggtgtctactgtgaggttactactgttcccttngggagtcactaaggcatcttcaggg

SEQ ID NO: 330485 - DNA, 543 bp, Homo Sapiens
cccaggctggagtgcagacatgacagacaagagaaatatttagaaggtgaaaccaactggattttgtgtcacgtagatgtggatggtgtgggagagcagtagtctagggttatgtgatggttacttttatgtgttaacttcactgggccatggggtgcagactttcggccaaacactattctgggagtgtccctgagggtatttctggatgagattaaagtttgaattggtaaactgcaagaaggcagattgccttctctaatgtgggtgggccttgtccaatcaatcagttgaagaccggaataggacaaaaaggagggggctcctctggcctgactggtactacttgagctaggtcaagcagtcatttcttgccctcagactggaactacaccatctactctcctgtgtctccagcttgccaactacggatcttgagacttctcagactccatagttatgtgagccaattctttttaactcccccactttacacacacacacatgcacatgcccatgcctactggttctgtttttggatga

SEQ ID NO: 330486 - DNA, 368 bp, Homo Sapiens
  misc_feature (20)..(20): n is a, c, g, or t
  misc_feature (26)..(26): n is a, c, g, or t
  misc_feature (53)..(53): n is a, c, g, or t
  misc_feature (322)..(322): n is a, c, g, or t
aaccgcttcaaaagttaaancaattnaaattgaaatggtgatgggtgcccacnggaatgccttaaatggcagctaaaaaaattataagtctagaataatccacaaagaaactaagtaggcatttgctacaaatcaactggaaactcacaaacacattggggacgggggaatgggagtggttcatggagacaggaaaatccacaacagcttagagtggcagaactctactagtcttctgtatctgcaaagtatatttgaaaacaggttcttcatccagaaggctgtggaggttttcttgacctcctactgggacacacagttnatagcttaaactgaattatgacagtaatttaaatattcctaagaag

SEQ ID NO: 330487 - DNA, 434 bp, Homo Sapiens
  misc_feature (286)..(286): n is a, c, g, or t
gtctttgttggattaggttaattcaaaaaccttgtcattaagctctgaagtcctttcttctgcttgcttgattcaattgccaagacttttcagtgcattttgcatttctataagcatgtcctttatttccagaaactgctatttttttatttatgctatctatttcactgaagattttttcctttgtatcttatatcatttgtttaaatttcattaaattggacttcacctttctctggtacctccttgattaggcttaataattgaccttctgaattctcttttntggcaattcagaggatttcttcttggcttgaatccattgctggtgagcaagggtgatcttttaggggtgttaaagaaccttgttttgtcatattaccagaattgtttttctggttccttctcattaaggtagactatgtcaaagggaa

SEQ ID NO: 330488 - DNA, 529 bp, Homo Sapiens
  misc_feature (329)..(329): n is a, c, g, or t
  misc_feature (367)..(367): n is a, c, g, or t
  misc_feature (457)..(457): n is a, c, g, or t
cacaattggaatgtgctttatttcagggaaatataaagggaaatgaatgctattataacttggtagaacagaagaaatggctacctagctttgctttccaactacaaacataaatgaggatctcagcatttaaggtaaaacatgataagcacaaaaggagagttcactggggactggactccctcatttactctagaaattatgagaaccagcagcaatattcctcaagcatccatctcaacatcaagttcctttgttttatttaccagatgaccgggattcataggatgagtttggctgcaactgtgtcttccactgccattcccaanggacttggaacaccgtggggtcttctcacagtggggcntggtttcactcccttaatcacttctcccagctcagcaaagatctcggcccctgacagcaggacatctccagactccttcagggcagcctnctgggaatccacgtacagcacagcttctttcatgagctcatcatccagttctctccagtcaggtctgctggc

SEQ ID NO: 330489 - DNA, 250 bp, Homo Sapiens
tatatatatatatgtataaacacacccctacagtatgaatttgtgaaggaagacccatctgatttatgtgtataaaacattaggtctgttctaaaactggtagttctttcttttaatcactccctcctattatgcctatatgagaggcttatcatgttcatgttttatgttccatattacacaaggccatttgggattctttgtctttggaaaaattgataaagagtattttattaaaatattcagttgt

SEQ ID NO: 330490 - DNA, 462 bp, Homo Sapiens
  misc_feature (194)..(194): n is a, c, g, or t
  misc_feature (316)..(316): n is a, c, g, or t
  misc_feature (438)..(438): n is a, c, g, or t
cctaagggatattttcaattcaattaaacatatgagttgagtgcctactatgtgcctaccattgggtcaggcacatagcatttcaatttaactgttcgtttcgaggtttgttctttatctgactccctcattcccgcagtccttagcatccaaggaatggaccggagatactacgccatattcccagtggtagnatggccgctgccacctgcccgagggaaagccattcttggacataactggtaggatttgcagctgacacaaagcctccaacttggggacaccattcctgaagagtaaagcggggagacacccntggcattgttttgcttcattttttacggtccccgacttcccttgggtccaacttattccttcatagaggaaggggaacggggtctggccagaactattccagcccccgacacagggctgctncctgttcctgccagcttaaggaaa

SEQ ID NO: 330491 - DNA, 436 bp, Homo Sapiens
ataactaaatgacggggtgctgcccctggaaattacacccagacatctcttttctcgtagacctgggcccctagcttttagacaggatgacaaatcactgacaggtgctgactttacatgcactgtggcctcatgcttcagccattcactgccaggcagtcttctagggcagcaaagagctcagccacacagcccgggccacagtcaggatgagacctggcgttagacctcccctcagcgccgctcaccccccattctgggcatttcaatctccaacaggagatttaaatgaagaaaacacgcacctcacacagctgtaaagggaggaactgggaatttctcccaaatcttgacccttgagttctagaaatggggttctccctggaatgcatgatggcattattctggaaggcaaaaataaagctatttaatatag

SEQ ID NO: 330492 - DNA, 293 bp, Homo Sapiens
  misc_feature (234)..(234): n is a, c, g, or t
  misc_feature (240)..(240): n is a, c, g, or t
  misc_feature (263)..(263): n is a, c, g, or t
  misc_feature (269)..(269): n is a, c, g, or t
tgtgtccaggagagcttttatttgtacggaacagttttaaaaatacagaataaaatagctttatctctactattattcacaacatctggtccaaatattacatatttttaaaatacttaaacgtttaatgaagccatgttagaaaaacaatatgaaaattctttttaaaaactccataaaagaattacacatctcaaaaaacaaccccaccccaaataccctcggtaatcaaantaaaantaaaaaacaaacaaaaccccagnaaggtntatataggccaaagtcagtcacag

SEQ ID NO: 330493 - DNA, 376 bp, Homo Sapiens
  misc_feature (177)..(177): n is a, c, g, or t
  misc_feature (190)..(190): n is a, c, g, or t
  misc_feature (196)..(196): n is a, c, g, or t
  misc_feature (200)..(200): n is a, c, g, or t
gtcattattgtattgggttaatttgaagaccttgtcttcgtgctctgaacttcttacttctacttgttcaattctattgctgagactttccagagcatttcacatctctaaaagtgtgtccacagtttcctgaattttttattgctttttctttaagctatctgtttccttgaatanttctcccttcaantcctgnaacnaaatttgggatttccttgtactgggctttgctttctctggtccctccctaattaagcttaataactaacctcctgaattctttttcaggtaaatcagggatttcttcttggcttggatccattgctggtgggactagtgtgaatttgggggggccgttgaagagccctggtttggg

SEQ ID NO: 330494 - DNA, 569 bp, Homo Sapiens
  misc_feature (511)..(525): n is a, c, g, or t
agatgtagagatagattttattaagacaaattacacattttactatatttttcctttctaaaaccctcaccatcaaagattgatcccacagaatttctaattcaagaacactcatttcataaaacatttcagagatagaaggagagaaaatattaatgctaggcaatagattaaaaggtgtcccctccagggacccggggatgatcagacattccttcctaaatgggcatcctagtcactttcctccacctctccactctcatttatctttccacccaacaataggcatccaagtgtcagcagagggcccagagatggggaggggtgagtcggagggttgaacctccttctggggcctttaccctcctttggtcccaaccttttgtggctatctgtttaggttaataactgccaggcagccggagaggagagcaggaagacacaagtttctctgtggtttcctttccttatttcaggactccccaagcctttacccatcccatcagcacgnnnnnnnnnnnnnnngtgcattttaataatgtaataatctctctataagtctcagtttc

SEQ ID NO: 330495 - DNA, 304 bp, Homo Sapiens
aatgtcttccctcctttttatctgtgtggtccttgagtcatgggggaagtctctactccaatccatacagtataacattactaatcataaaagaataaacacaacaagaaaggaaggaaacatgacaaaggatgttacagaacatcaaaaggcagtaagtacatttctttgtgcctgaatacaactagaaaccacctgcactgggactagtcagctggaaagaacaaatcctctgccttcaatttctaaaactcagttgagatttactttaagagtttccataatttatataaactttgaagag

SEQ ID NO: 330496 - DNA, 766 bp, Homo Sapiens
cagagtccttgattcaactgtttactaatcagaaaggtcggtatagtcggtcctttttctactgctggcaagtgatttttgtatattttattacaaataaaacaatattgcttgacagcatcatctgtcatcttacaaatatacaactacacagtcctaaagtaatagtatgtctctagaactgagcttttcttaaaaacaaacaataactatactattattaagtcctgcaccctaaatctatacagcagctttaatcaatgtggaaatgaaattatgatttattaatttacataaaattactttatacattaaagaataatttttcaaattgttaaaaaaacaaagtctgaagctgtcattattgggattcgtgggacgtggtttgctcttctatcacctgcttcacaatttctgccagttttagtcgatctactttatctgtgaatccacgaccattccagctgaagctctgcagagtatctcttaggagtttgcattcccggttatacttccaagcctcctgcattacttcattcagtttctcatcttcattctctccagcctgggggagaatacactgagcaatcacatctcggagtttttccaaggcaacattggaatcctcggctccattctcatggtcgtggatatagacactgtcctttggcttggtgccaagtaacttcctcttccgcagaatggggttgttcactgagtgcaggggtttgaggctgactttcagatcctggattctcatgttggc

SEQ ID NO: 330497 - DNA, 508 bp, Homo Sapiens
atatttagttatcatacatttatttttaacatagcaccccagtttcacatcatgtatattttccaaagttggagatctttaactatgttcttcacagacctttcaacaagtgtgaaaaagaggcagtaaggttagcttgagtctacaagtcacaatccaaatataggacacctatgtttaaggtcaatatacataatgttcccaatgcttagcaaatgaatgagactctggctgagtaaaatattaacacaacttgttagcacattatcatgaaaagacagaaggcatcaaatatatactttgctgttacactttttactgttcaatgtacttgtagtgaaaaaatatacatttttactttcaaggttaaaatagaccatcagctcattatctctcttagccaatagctatgaagactaaaatggctcttcttgcttctggctcacttgaacatcttatttgtgctgaagacaaaaaggatagcagtgctaaagaaaagggtataccc

SEQ ID NO: 330498 - DNA, 430 bp, Homo Sapiens
  misc_feature (369)..(369): n is a, c, g, or t
  misc_feature (378)..(378): n is a, c, g, or t
cacagatttcttggcccttgactttagattcccatatgcgtctgtttgttttcatgctgctaataaagacatacctgagactgggtaatttataaagcaaagaagtctaattgattcacagttccacatggctggggaggcctcagaatcatggtggaaggcaaaggagaagcaaaggcatgtcttacacggcagcaggcaagaaaaagagcttgtgcaggagaactcccatttataaaaccgttagatctcgtgagacttactaccacaagaacaatatgggtgggaaaccacccccatgattcaattatctccacttgggccccacccttggacacatggggggtttattacaattcaagggtgagntttggggtnggggaacacaggccaaaccatattcaccataggtttatatttcagggggttc

SEQ ID NO: 330499 - DNA, 273 bp, Homo Sapiens
ctaaaattgtttgtccttatgtactcaagtgcccaacaaaccattttgcctagcacagtagcagtaatggagtaagagcaatatgcctggaatatacttgatcaattttgaaaatctttactttatgatattacagttcaaaagcaggttcaaagtttatacttgttttaacagttataatattaataattggcaatgatctaaatagaataaatgcttctttggatgtgcctattaagtcaatactaattttttagtcccacctcctagctg

SEQ ID NO: 330500 - DNA, 517 bp, Homo Sapiens
  misc_feature (503)..(503): n is a, c, g, or t
tgtgacttagaggacagggatggattccaaggttcttcattcattttttaattccagcaaagcacagagtttgtacgtgttcagtctgttgacagtgggtccctcggccaaaaggttaccttgaatctctggatgctgagtctccactcttccaagagtaactgaagatgtcccataataaggggtcgtgaactgaggagatgatatagttactttagaaggaacagtagagttctggggaatttggcacgaggcgcccttggacattactctctggatacaacggagagtgtgccaaggcttagttagtgctacattaaaataaaaaatgtatgtgggcaagggctgtaccaaaataggagtccaccttcagactatgggaattagggtgggcggatttggagaaacttaaaaaaaataactagatttggttaggaaattaccatccatagaatatattgatttatttctttttactttcttaggtaccacatgttttattnaagaacttcttagg

SEQ ID NO: 330501 - DNA, 617 bp, Homo Sapiens
  misc_feature (158)..(158): n is a, c, g, or t
ggcacaggaagtgtgcaaaatgccagatgctacaaacgcaattagatacttaaaaatagcttccttggtggcactgcttgaactctgaactgggccttgtttttacaaacagggtggcgcttttctgctatgctcctgattgtgtgctccgatagagncacggctctgcttctaaggccatcaggcaaaccatcagattgttctagaatcagactaggtgctgatgttttacaacatcattgcagttgcaggcatgaggtttttctctccaggtgcactgtgtaccctcctgcttcttgacctctgatggttttgcagtcaagctgtgtcggcaaaagccctcaaaccgactgagtctgccctgtataaagaagatgaagtgcccacacccctcacccctcactttttaagttctaaatgtattccacataaacttttatttccccagaactcaaacacccacaaagctcagaatttattttacagttttattcaaggaaaaaggtgatgtttttgtactgtggggaggagggggctggatcatattttctgattatagaaacagtacatatttattaccccaaaatttgcaaaattcaaatcaaaatgcaaaatgc

SEQ ID NO: 330502 - DNA, 429 bp, Homo Sapiens
ttttttttagatcaacatctcaaactttataatacactcacatttatacgcaaatttctgtttacaagtacaaaaggcaaagaaacacaaagaagctaagcaactgcatcatcagccacattcaatcgaattaatactgttgtccccagtccgtagttttaatccagaggaaatggtagatgccatttcacacatggactccaccgttagttttagaagttggagactgtgtgtggttccgcagaagtctgggtttctacagagctgaactgagactccatcgtgttccaggccagatcagccagaagaaagtcatccattgctgtctgagtttcgttgctggtgaagaacaagctccccagggtttcaaacccagaactcatggtctgtgtttctgtactgttcaactgaactttgctttctagagca

SEQ ID NO: 330503 - DNA, 323 bp, Homo Sapiens
  misc_feature (126)..(126): n is a, c, g, or t
  misc_feature (280)..(280): n is a, c, g, or t
  misc_feature (300)..(300): n is a, c, g, or t
tgtggagaagctggcctaggaccttctctgtagcatttatagccaagcagttaacctatatacccacccttgggtaaataggttctcctctcttatagtacgtgccacacttccaagtgtagactnatgataatgaagacattggaataatgccctttgagagttttgccttagattgggaaatgcaggtctcaagattctcagacaaaatattttcttctagggaagagtacatttgtaatgttgtttccctgcccaaaaagataatgatatatataantcatgggtatgggattacangacgataatgtattcctacagta

SEQ ID NO: 330504 - DNA, 853 bp, Homo Sapiens
  misc_feature (739)..(739): n is a, c, g, or t
  misc_feature (764)..(764): n is a, c, g, or t
  misc_feature (775)..(775): n is a, c, g, or t
  misc_feature (780)..(780): n is a, c, g, or t
  misc_feature (823)..(823): n is a, c, g, or t
agaccatgagctggcttcaggggaagtgctattcacaggaccatatccaccaccctcttaaattcctaaacaatatcatctaggacttctatttaagttatttaaaataaatcttccttgagagccttgggaggtgatgtcagggttataaatggcacagtgcatttgctgtaggaatgtggtttggcattgttttatacacacagtattttttataccttaatgcttattcttgatggcatctgtcagatattagaattgaaaataagaatcttcccaaaatcctttaatttacctgatgccctcatcaggtcgttaaaaattcaaatggttttaatagctaaaaaactacaaattaagctctaaaacaaacaaactacagaaatgtaaaccttcatttgccaaaggtccttggtggcctgtcccctgccctgggagcagatggccctgaagcccttccctcactgtgcaggccaccgggtgaggctggacggtcacccatggtggcttcactgcaaggagcaggactgccgagctcaagcacggggccttcagcttcccctgtcctctggccacaccgccagcccttggtccttatctgtgtgaggtttacaaataaagcttctgatgtcaaatgtttaaatcgtgccctcagtggacgaggccatgtcctgatgcagaaggctgaagcccaggctctctgtggcgccgctgagaagcagagggctgtcttggggtntcgagccctggagccaagaatggcntggtctaattntttgncccacaatggggggcttggatgtggccaaggattcagtaatcnggggcaccaagggttttttagggttggaaa

SEQ ID NO: 330505 - DNA, 322 bp, Homo Sapiens
  misc_feature (104)..(146): n is a, c, g, or t
  misc_feature (148)..(148): n is a, c, g, or t
  misc_feature (251)..(251): n is a, c, g, or t
  misc_feature (282)..(282): n is a, c, g, or t
  misc_feature (297)..(297): n is a, c, g, or t
tgacactcacgcccagccttaaagctttataatccttccaacccttgatgtcccccactgtagtaaacaatgagtacagaggaagttgtggttgagtatggaannnnnnnnnnnnnnnnnnnnnnnnnnnnnnnnnnnnnnnnnnngncctactcttgggcatttattttaaaaactaattttaaaaaataccgtggcagtttctatctttgcataaaagttaggcaggactgacttctttggcacaatgncagttaccttatggacccaacattggacctncaaaaggttagggantggacctttggcgggggaactgttc

SEQ ID NO: 330506 - DNA, 429 bp, Homo Sapiens
  misc_feature (48)..(48): n is a, c, g, or t
  misc_feature (57)..(57): n is a, c, g, or t
  misc_feature (132)..(132): n is a, c, g, or t
tgatgcaaaaaaccctaacccaaatataagtgaggctacattccggcngcatgaatnaagggattatacaccatgatccaaatgggatttaatccctggaatgttaaaaaatggtttaacataggaaaatcnaattagtgtaatatgcccacattaacaaaatgatggggaaaaactgcataatctttccaattgaccagaaaaagcatttgacataatttaacaccctttcatgataaaaacattgaataaacttggaatagtagggaattacctcaatgtaataaaagccatatatgaaaaacccacagtgaacatgatattcaatggtgaaagactgaaaacttttcttataagaacagggcaaggatacctgcttttaccagttctatttaacagtactagaagtgctgaccagagcaattaggc

SEQ ID NO: 330507 - DNA, 447 bp, Homo Sapiens
aagataccattcttcagcaaaagcaggcagcaacagcagcggtttgcctgtagctgtggtcatggttaactgaggcctggtttcaagggaaccgaggtgaatcagggttaaacggcttgatatgctgccgttctctggatgcaggatgacatgaagaggtcgggagcagtctcttcggcaaagccctgctgcagagagcccgcggtggacaggaagggcgcgggggcgggcaggctgcgtgcccaggccaggctctcagcctggtctttaaggtccatattctgttcctgaggcatccagaaccccagactccttctcataacacaggaacacatcactgggatgctgcacatcacctttgctatttcagatgacgctggaaagtgctgtggacctgaaggtgagtgggcagaaaggggtttgagagtatggacttcctgggcgttc

SEQ ID NO: 330508 - DNA, 391 bp, Homo Sapiens
acaccagtggccaaagagaactgcattcatcatgtggctgttctatagctgtgagctgtggtgactgttatttttcctagtgatagttttcagtgacagcatagattctggtatcatatccaaggaataaacaaacactgtttttggctttttgttttattgttcctgacataaaaataataagctatttttggcatatgcagacttttcacaaagtgattgttttcttgagctctggactacttggtaacattcataagttccttcactttgtagctccctctttccttccctccactccctgcaaaagagagcagaactgatttttcagaggtgatgtttacaacagttcaacacactcgaatgagcacttagaataatgtcaaaaaaa

SEQ ID NO: 330509 - DNA, 429 bp, Homo Sapiens
  misc_feature (408)..(408): n is a, c, g, or t
  misc_feature (411)..(411): n is a, c, g, or t
aatgcagcaggtgcctttaagttgaagccaacctaaagaatttaccattctgaaaatcctagggcccttaaggattatgctaagtctatcctgcttgttttctaaaagtggaacaaaaagcctggatgacagcacatctgtttacagcatggtttactgaatattataactctcgagacctgctccagaaaagttttctttcaaaatattactgctcattgacaatgcatctggtcaagcaagagttctgagggagatgtacaaggagatttatgttgtttttgtgcctgctagcacaacatccattctgcagcccatggatcaaggaatactttcaaccttgaagtcttattattttacaaaatacgtgtcttaaggccctagctgccgatagatagtgattcctcnganggatttaggaaaacacaa

SEQ ID NO: 330510 - DNA, 451 bp, Homo Sapiens
  misc_feature (225)..(225): n is a, c, g, or t
aggcctctcagcctagtttgggtacttctttgtgctttcattacaccctgtgtttcctggccttggatttactatgctattggtagtgcttatcttgtttacccactaaaccaacttggaggtcaacatgattctgtacctggaacacctgacaggtagtggacacttagtaaatactctatgaattcatgtaagtagttatggcatgcagcttttcagtcactncaaacctgaccctccttacactagcgtgcccatagagccctacatttcctacactcagcccaaattctttaaagagatatccatatttttgagcactagtatgttcccaggccttggggatagatatatagctatagtgggatgagacagagtaagtcctgttctcataaagcatgtgttataagagccccttaaaaaaaattgtgaggctcggcatggtggctca

SEQ ID NO: 330511 - DNA, 268 bp, Homo Sapiens
ttcaaatacgcagaagacacatcttgaaaaccaaggttgaagttgttcatttatttgtgaaaagtctacatgtgttgactgcattctaaaatgaggctaaataggaaaggtgccattagctctgagtgattaaagccatcgtaagcagatgccaataatcatgcaaaccaataaggaaagagcttaaaaacagtatttttatttttaaaaaacctcaacattaaggaggaacccttctctgaagcacatcactttcctattaaaaaaa

SEQ ID NO: 330512 - DNA, 327 bp, Homo Sapiens
  misc_feature (15)..(15): n is a, c, g, or t
  misc_feature (23)..(23): n is a, c, g, or t
aattttgaaattaanagcaaaanccaatatgaattagaatctgaaaacccagatttaaagtaaactgcctacttgaattgcctatttttaaacacgtatattttagtacactaaaggtatttgaagggattataaagccacattttggaaattccagtttagtacttgcttagtaaatattttagtcaaattaaaattactataattatttaatgattaataactatttttccattgatgacattttgtgacctttgagataaattttgcctaacttaccatgccctaatgtgagtataaggaaagtgctatcattttataatgatt

SEQ ID NO: 330513 - DNA, 487 bp, Homo Sapiens
ggggaggctctttctgctaaaaacactctttacctggaatgtttaaataaaaatttcataatttatttatgtttatgtatcctaagctctgaaccaaaaacttttgtgatgtaaataaagccctggtaggaataatatgtatatccagaattggtcatcaaaaccctctagtgtaaactaatttatcagattctttctccaaagacaggaatgaacaatttaattttgaaggtggagatggaaagagagaaggaataattttgtttaaaaagtagtacttccatgtacatattatgctactacttgggcagatagggagagattgggagctactcacaaagaattcttctcactttataattttctaggacttgtaatgaaccttataaatgttgtaataatcttcttcttatagtcaaaggcaaatgaatctccccattcacctacacataactcttaattatatcactactttcaataattgctc

SEQ ID NO: 330514 - DNA, 672 bp, Homo Sapiens
  misc_feature (33)..(33): n is a, c, g, or t
ccagtactgatcaccacactggcccacagtgancagaatgaatacccccacagttggagagctttaatttttttgcctcagtgtattcacttgtatgttcattaagaactccaaccccagcaggcagcccccacacaagggtttactatgtgagttgccatgccctattatacatgacactttgtcaattaaagaggaaacccttttaaagcaaagtgaagttaagctggtactttcttcaacatctgatttaccgctgctgttatcttccaaaaggaagtttgttttagaacaatgatggcaagtagtaatcctccctatttcactagtgagggattttaaacacagtcagggcactggggaccagtcaaaaggtctctttcgacagaactatgtattttcggtagtaaaaggaatgtcttactgatgggataactgccaacactggacaatttttcagcctaacagtttagagaatatcattttaaactacccggtataataaaactgtggcacaatagatcaatgcaatgaattctctatagtcagtaaaatgctctcccaaataatgaaatccattaataatgattactgccctggtgcctttgccacaaaagtaatgcccagtgctacgtctcaatggtctctaataaatacatacaagtcccacaa

SEQ ID NO: 330515 - DNA, 409 bp, Homo Sapiens
tccacccaatatccatgggccaaccggccccttttccccaccaaatgccagttttataatggcccaatttggaccaggttataataatttttttgtaaattaaaaatcaccttgttctaaagaatctttttacatttatcacatttgtgttttatctccaaatttaatcattgttgaaaatcttttttattccattttatcttttgggattacagaatgtcatgctagttttcttccattattatacaaagattgaaaggattttggttggctttcttagatcttatatccaactgggatttattattatatgtggcataataagaactattattcttttaaaatgtattaattgtcttttgcttattaaaaaatagtcatggtggacatttctttaaattcaaaaata

SEQ ID NO: 330516 - DNA, 368 bp, Homo Sapiens
gtgtaagccactgtatctcagcactacaatctatttccaaacatttttatcacccacactctgtaaccattaaggaatcactccccatttttccttcctcatcccattttctatccctaatcaatgacccattttttatacatcaagtcagatgacaacttctttgttaagctgaccctgacagaataaatcacctctatagtacttcttaatcctgtacatatattgatggattaaaatttttacctcattctataactggggtttacattctttttgtctggaactatttgaggggcggatccgggtggcacaaacaatatggccaactatgggttaaaaatcctttatatccttcccagctaagg

SEQ ID NO: 330517 - DNA, 592 bp, Homo Sapiens
ttttgtctgtactgcaagttaaaccaattctattattatccttaccttgcctccttctcttagatgcttattattaaaaccataaaactaccttatttacactgatacttcaaaacttgattcaaccacatatgaaaaagaggctaaagggactttcagttgggtgtatcagcccaattctctatcacagcctcctcccctctggttattttgcaagtccattccaggcatagcgatacgtggaacagtcactgtgagaaatgtggcaggggcggcaacagatcctagatctagatgtcatggttcttctgagaagtcagagtagaatcaaacagaaaactatcactacattaaaaatatccctggacgtattagcaaacaaatgcatgcatttattcacggaataaaaatcaaaggtgccacatttgtaaccttatgcttctagcttagctacatgaaataaaaagctatttgaaatcaactacaaatgcaataaagcatagattttccaaataaatcttatttgctgtcaaaccataactcactcataaatcatacaatattttcactttgtaatacaataaaaatgatt

SEQ ID NO: 330518 - DNA, 285 bp, Homo Sapiens
tttttttcattattataagctgaatttttattttactaaattatctatgtcaaaaaaattctgtgcctggcgtggaatttcactccatcaagtgttacaatgattttttcattttcattacaagcaggagaatgaatgtaggacaagtgttaggaaacatggcaataaattagaatataatttacaaaagcaaaaaaattaacagtgtaccacattattactgagtataaaataataagcaacaactaatcacaataatacaaagggtatttcgttctgtgttac

SEQ ID NO: 330519 - DNA, 397 bp, Homo Sapiens
  misc_feature (315)..(315): n is a, c, g, or t
  misc_feature (320)..(320): n is a, c, g, or t
  misc_feature (326)..(326): n is a, c, g, or t
  misc_feature (362)..(362): n is a, c, g, or t
tcagtatttacctccaaattgctaaataacatgcttatattactttattgatttttcagttttaggcgttatttattgcccttctctggcatataaggatttcatttcttccttttcctatccccaccattcgtgttcacccttctcatctccccaagtgtattaagctgttttggggttgctataaaaaaatacctgcagctgggtaatttacaaagaaaagtggtttattttggcttaccgttctggcagactgtacaggaagcatggtgttgctatctgcttctggtgaggcctcagggaaacttcccaatncatgnacagangggcaaagggggaaggccagtcatatcccctggatngaggaggggagccaaggagatggggggaggtgcca

SEQ ID NO: 330520 - DNA, 514 bp, Homo Sapiens
  misc_feature (30)..(30): n is a, c, g, or t
  misc_feature (83)..(83): n is a, c, g, or t
  misc_feature (199)..(199): n is a, c, g, or t
ctgagcgagtgtgaagaaccggggctggcncaactagatgacttgctttggctctgaaactacgaatgtgtaaaagattctgngtttcagtttaaaatgtaggaaaaaaaatctctgaaatacaatgcacaatgaataattagcagtgatatccacagaagaatattccttataaatgctgaaattacatccaagccgnttcaagtcttgggaaactactggatcaaaatgtatgcctggttgacattcagaggctcgcaccagcggagccaggcactacagtctaacacagaaaccatggagaaaaagccttcccagtgctccttcctcttgtcaaatcttgtccactttccaaagtctaataaaaccagtggaagactgtcagtgcctggatgaaaatgtgtgacttggggcaaactgtttcatctctcagtggctgagtttcttcatctataaaataaaaagggataacttgggttttatggaccaacaaaaaaatgaggggcaaaggcgg

SEQ ID NO: 330521 - DNA, 476 bp, Homo Sapiens
  misc_feature (17)..(17): n is a, c, g, or t
  misc_feature (40)..(40): n is a, c, g, or t
  misc_feature (97)..(97): n is a, c, g, or t
  misc_feature (130)..(130): n is a, c, g, or t
cccaggtccagggtaanaaaattgtaagggtccctaaatnagggaactgtaacaattcccccccagggtccaagggttaggaaaactgttagggttnaacacctaggggttgttcaattagggaattgtnagggttcccgcccagaggtccatggaatagggaactgtatggttagttacactaggtgtagtgactaggggactgtagggttactcccaggggtcatgggtaggggactgtaggtttatgcctaggtgtggtgagtaggggattgtagggttatgccagggctcatgggtaggggactgtatggttacgctagtggtcatgaatagggaactgtaggcgtcgtgagtaggagactgtaggattactccgggggtcgtgagtaggggactgtagagttacactaggtgtggtgagtaggggactgtagggttacgctggaggtcgtcggtaggggactgtaggggtc

SEQ ID NO: 330522 - DNA, 426 bp, Homo Sapiens
  misc_feature (289)..(310): n is a, c, g, or t
  misc_feature (331)..(385): n is a, c, g, or t
atctgcagggtacagctgcaggtcatggtaagaaggtgatggtggggaggggtaaggatatcctggagccctataaaatatgtctgctcaggttgagccacggcgcccggctcacagcctctctttcaaacatgcagttcgtttcttgtgtagggtttaatgaaagtgtagctgcccaagctttggaacttagtgcaaaagtttaccattcaggtgtgatattaataattaaatgtttccaggaagccagcagggatggttaaatccacaaaaactctgcttaatatcnnnnnnnnnnnnnnnnnnnnnngagacagagtcttgctctctnnnnnnnnnnnnnnnnnnnnnnnnnnnnnnnnnnnnnnnnnnnnnnnnnnnnnnntggggttcaagtaattttcctacctcggtttcccgagtagc

SEQ ID NO: 330523 - DNA, 444 bp, Homo Sapiens
  misc_feature (408)..(408): n is a, c, g, or t
  misc_feature (424)..(424): n is a, c, g, or t
  misc_feature (432)..(432): n is a, c, g, or t
tctgttatagattttatttgatactgtgaccgagtctacaagttcagacccacatgtaacggatttttgcttcatggttgtcagaggctagtgtgcattatttctgaggattatatccaatgacacgacgcagaaaacacaaattggacggacagacggatggacataatcattaagacaagagactctaaaacgtgccttagtgtccacgtgattgatctaaggcggggacccttctaaggtggggacccgagtgatctaaagcagggtggcttccagccacagggttgccgactgggctgtgtgcactccagggcgccaggggacggggaaccggctttgggaaccaacgcctgccctcccaaggggcggaccttccccatttcccgaccagccttttaagtgttntgcttttcattgaagnaccagggnggcgacaaggtt

SEQ ID NO: 330524 - DNA, 441 bp, Homo Sapiens
ttcagtcggtatggttttattggccatatcaaaagtgagcacaaatcaaataactgcttgatccctctgctaccacccactgagaggagaaaagtcatttagttccaagataaccttggttccaggctagatacagaggggcccttgggacagctgtgtcaccaactctggagcagtctctggaggcaagtccagagcattaacataaaagtgtcccagtcccacagtgccccaggtcccagcacccctgctccaaccctaaccttggatacttttggccctttaacaaatcgccacctctgcttgcaggacttgatcccatgtgtgggctccaaggccttgtctggcccacaccttctttagtgtctctcacttccgtgtcctggcttcctcctggctccagatgagaatgtggtaacccattgcagaggccagcgtgtc

SEQ ID NO: 330525 - DNA, 446 bp, Homo Sapiens
  misc_feature (420)..(420): n is a, c, g, or t
cctgatccattacacagctctggggttccttggtctctgaatctccactgccttgtgttacaagagtgagagccaaggggatagtggtattcacagctgtgccagtttttcctctgttggctgaacttttagaggctgagtaagtcacccctctgtagtctcacatgatgagcccggaacagacagaatgtcatcctgtgagtgaaacttgactcacctatgtgtagttgctctgcacatgagagaaagtgcatgcaaaactagcccttcttgaattaatagcatggataggcagtgtcggttggtcagtgtttgaaggttccccccacatttctgtctcaggagttaaataaaggctatccactcaatgtttctcaaagtatggtttgcagaccacattcactgatttagccaggggtncttatttaaactgcaggtttcctagg

SEQ ID NO: 330526 - DNA, 382 bp, Homo Sapiens
ggaacttggcttcccttcagtgattgctagcttttactgctacattgaaataatagggtcttggcatttgaaatttgattttatggacaaaagggatatgtcaatcaccctagaaaggaagagaaatttatacatgaaattgacataatgagcatacctaacaaatttattctagttaatacattctacttataaaagatatttatagatccttaaatatctaatttgcaattactttttagtgttagtctagcaggtgtatcaatgaaaacttagctgatgtttattaatatcacaaacatgacatttttgctataataatagcaaaatttaacccgttactctttaaccttgtactggaaattctaagcagtgcagcaaa

SEQ ID NO: 330527 - DNA, 505 bp, Homo Sapiens
aagtatcagtgcaacttagtattttatctctagctgagtatgtgtctctccttacctctactatgccctttaaatgttctttgcccacacaatagttaattgtgctaggtataagtctgattctaataataaattgatataatacagtcatcttagtgttaagacttattctcagtaggtaagagttttagaactagttccctgaaaaagctgtatttatgatagtttatgtgcaatctgtcagggcccaggagcatagtctaatctgacccagaatgtctttttgatttgatataggtaaggctcttcggtgatccaagagcaggccctttgggatttctggaaagcaaatcaacctgcacttagagttgcatggacagtgggccaaaagtcgtaacacatgcatcataactccagtccctgttaaagggaactaaagggctttgctttaattggccctcttaagcaaagctaataaaagattaagttgttgggccgggcgtcg

SEQ ID NO: 330528 - DNA, 451 bp, Homo Sapiens
  misc_feature (405)..(405): n is a, c, g, or t
  misc_feature (411)..(411): n is a, c, g, or t
  misc_feature (421)..(421): n is a, c, g, or t
  misc_feature (430)..(430): n is a, c, g, or t
tactgtttatttcacattatctttttcacagatgtatgagattctcaaagatctgtgccaagggaacataacttcaactgtattaataccccacctagccatgggcccactaaacaatctccattaatctctacagtccattgttggaagcttattccaattctctaccagtagccacaggtcttgtatgtttctcccagggctgcttatctctaatcataatgggcctaatacagggatatcctcttttccaaactttcctaacaccaaagtgttctaccaccaggcaaccccacggttgcaggatacagccactgttggttcaaggcctggaagggggcccaatggcaaagggttaaggtatttcccttttctaccccggaggggggttatggtaaaccgggncttttnaatgtatatngggtttttnggggggtttttggttgggaac

SEQ ID NO: 330529 - DNA, 380 bp, Homo Sapiens
gtccccaataattgcaagaagaactcttagatggggaaacaggacagaaataactcacccgccttttggttgatcctcaaacatagcgcgtaccgtaaatgcccacgtgggagagacctcctgcaaagttttcgtttagccccgtcgttttatcccacaatacacaagatataatccatttttatatatcccaaagttgtggcaacagcttctttcttttctgctcaatgcccactttgtttcctagtaattcatgaccactattaattctatcattgtcactgctcctgcttaagatcacttctcaaggatacctcagtaagcaatggataaatcaactttttgttatatgtgccaagtactaagtttcagggttctct

SEQ ID NO: 330530 - DNA, 550 bp, Homo Sapiens
  misc_feature (131)..(131): n is a, c, g, or t
  misc_feature (377)..(377): n is a, c, g, or t
tgaaatttgttctgatgtggacaccaagatgctgtcattactttaataaacaattttagacaatcaattttattcattaaaatcataaggccacaatataattttgaaaagaaatttgccaaatgcagganatatattccaggaagttgatgctcttcccagagtgcacatcttgtgacctttaaccccagtatcttggtaacctggtctacataagtttgtaggacatcctattatttaaaaagtacaaggacgagcatattacacacagatcctcctcctcccaacacacacattcataacagtattttaatctgtctcgaatcgacttgcaaaccctttttgctcttaatgggagttattcattttcactttgnaagggtaatacatgacggctggatgtttaatgtgatggaatggctgccgattaactaggtgctgcaacattctagaccagttcccccatggcctacttcccatctcctggccccgctcagacctgatcctatggaacgtcgcgttgcaggtttgagaccttgcagtgtgatgg

SEQ ID NO: 330531 - DNA, 362 bp, Homo Sapiens
  misc_feature (28)..(28): n is a, c, g, or t
  misc_feature (128)..(128): n is a, c, g, or t
  misc_feature (164)..(174): n is a, c, g, or t
cccatcccaatatacagtttttccattnatatataagaaacctgtgtaacccattaggaagttatataggaagaatattccaatgcccatgaaaaatgttaatgacagccatattcataaagtaaaanaattataaactatacagagtataatgtcattttttnnnnnnnnnnncttatcacacattcctaatgaaggcctataatgagttagacattatggaaaataaacaggctttgaatccatggactgggttcaaataccagctctgccacttaacagatgtaatcagctttcctaaggtaaagtttgtctcccttctaggggacaataacgttctctttgcagggcaatataagagt

SEQ ID NO: 330532 - DNA, 424 bp, Homo Sapiens
ctaattattttatattaaaaatagagatattaatgcttttagatttttctgtttaaactttttgttggttattacgtgaatgttttgggtgtaaatagtgtaaaacctctctcttgtgcttgattccccattcagtaattgaaaatcgtaaacaattctgttaaacagttcaattctgttctattaagtcattagttctgctaattaagatagagaataataatgcataaaatgtcaagagtaaggaataactgctaaggacaacattgaggaatgtttactgtcaggcattcctgaacttgcatcttccttgtaaaattacatttcgtgtttgttttagggatcctgcatacatgttggggacttgcttttcaaaagttcagtaaggtttcaggctttctttccaaaggtccatattggggga

SEQ ID NO: 330533 - DNA, 370 bp, Homo Sapiens
  misc_feature (26)..(26): n is a, c, g, or t
  misc_feature (257)..(257): n is a, c, g, or t
  misc_feature (327)..(327): n is a, c, g, or t
aacttttggaaaccacccgcaggtgncagtggcagccgaaaaggacacatggcgctgtaggtgggtgtgacagagtccgggtcccaggacgcccgaggtgtcagcgcccgaagcttcctcatcgttcatcatgaatggcccatcgtccagggtgaagtcccagaagcctctctgctcaaagggcagggcctgctcagggccagcagagacacgaggcgccacaggggccacatggcggatggacctgcgagaggggnaggccaggcgcaggctgactagttggcgggctggggtggtgggccgtccgcacgtctatctgtccggtgntgccggcggaccgaaagcagctactcactcctgggcagtttgt

SEQ ID NO: 330534 - DNA, 429 bp, Homo Sapiens
  misc_feature (22)..(22): n is a, c, g, or t
  misc_feature (333)..(333): n is a, c, g, or t
  misc_feature (352)..(352): n is a, c, g, or t
  misc_feature (358)..(358): n is a, c, g, or t
  misc_feature (386)..(386): n is a, c, g, or t
  misc_feature (391)..(391): n is a, c, g, or t
  misc_feature (396)..(396): n is a, c, g, or t
accataatcttgattttcgctnatattatttaagtattcaacatgactttttggaagtaactttttaattggactatgttaaattttttgttttgtgggaaattagatacctttaagtctgggttaccttttgcacatttgtttcctgcaggaaccctcttagtcccttgccagacccaaaggagtgatgaatggaagggggggcctctctgtctccatcatggagccgtagtaaagccatttatctctctcagtgacagcaaagagaagggccgtcagagagccagtggctttcccaaggcaggccttttgagcgtgccacttatttctgtncatttgtgggaaagtttgnctgttnctggtctttgagggactagggaagaggnccttntaccntttaagggtacttggaatgagattgaggcatgt

SEQ ID NO: 330535 - DNA, 556 bp, Homo Sapiens
agtgaaggcatggctggcagtgcttggcttttaacccttggataaggctaccaaagctgtgaaagggagcttcagatgacctttccagaccttgaaaagttgactttaggttcctagcctttaaatgtactagttttacttaagatgattctacttggccttcttctattctgttagaatagacagatcacagttttgggttaagttgatttcatggtttacattgagtatatcaatatttttcattggtgaatgaagtaagtactatgactgtgtctcctttccttatatacctctccctctgctgtgttaacaacatctctttcatctgcttgactttctgtgtatttatgacaattatttccctgcctcctatggcctctcaatgccattttcctgagggaaagactctcaggtggtcgttcagcagtgggctgtagtctgagctgatgccttcccagggtctctgccgacttacattctagggcaccctttcaccagcctcctgggctcccttgtgtcttctatggtcacccttgttttctgcatcccactt

SEQ ID NO: 330536 - DNA, 416 bp, Homo Sapiens
ttagcattcctcactttgattacttcaaagtctattattttgttttcaattattctgtttttctggcactggagaaaatcaatttgttttattttctcttattcatgcactcaattatgctcttcgggcacatttaatcactttgatgtttccattttatggcccgtctctaggcacttcagctgcattgctgccaatgggcaagcaggactaatttgcatgtcacaatagacttgaaattctaactcaatttagaaatctttgtgaaatctccctccaaaatgtgcttgggagctgcaaagagggcagaaggaatgttgggcaaaccagggagcctgttaaagaatactttccttttctcaaaagactgtgagctccttcatggacccgaccatgggttgggggaagttccctgt

SEQ ID NO: 330537 - DNA, 493 bp, Homo Sapiens
  misc_feature (446)..(446): n is a, c, g, or t
  misc_feature (460)..(460): n is a, c, g, or t
  misc_feature (474)..(474): n is a, c, g, or t
ttttttttacatttgataaaatcttcccggtagcatttattattccagttacggctgtcatcatttttccaagtaccatcatatgtctttccccattagaagatgtatcaatgcaacagaaagaaactgaaaaaagcaagctggtgttccatctaaaatgtgttttctgtaattatatgcacaaacaaatacaaactaggaaagaaaacggactttgagttagagaactttgacggtaactagggattggtttcaaccaaaacgatgcacgtgaataacagttaaattagtgggatctgcttcccaaatctttttttccggggcacatccggggtatgtctttaacagtcctggatacttcaatggaaaaattgaggtgccaatgatttataggtgaaattaatgttaaatacttcaaaggagtggacaaataagtcagcaggcanaattttatggagtncacttcccttccangggaacttagagagccgga

SEQ ID NO: 330538 - DNA, 271 bp, Homo Sapiens
ttcaggaaaggattctatggaccctgagagggtttggagaagaggtgtgtaagcaagagttcattgcctaccgttttattacacccggcatcgctaatgtggattgccactgttctggagaactttttgaaagatggtttgggaccacaaatacaacgaagatctccccggatcatatagaccattccatttcccattaaggtctcctacttttctacccgccccataaacttcaagagtcactgcaagggcctggcacggtggctcacac

SEQ ID NO: 330539 - DNA, 292 bp, Homo Sapiens
  misc_feature (34)..(34): n is a, c, g, or t
  misc_feature (42)..(42): n is a, c, g, or t
  misc_feature (61)..(61): n is a, c, g, or t
  misc_feature (73)..(73): n is a, c, g, or t
  misc_feature (115)..(115): n is a, c, g, or t
  misc_feature (150)..(150): n is a, c, g, or t
tcactgaacagaacgtcgctgatggagaaatggntcccgcanaaggaacggcctgtacccngcgctccggcanaatcgcgtctcttgtgtctcactcacggaaagaaacaacctnaaggccatcccgtcggtctgcacgtaaccgtgaanacgtgtggccgcgtcccacctgcggctgggtaccctgcacccggcactgtaggagtcacgtgcagcctttctcaggggactgtcattgaaaaggaaacgtttgatgtctgtgtcagctgtctttgtagttaggaaatagatc

SEQ ID NO: 330540 - DNA, 123 bp, Homo Sapiens
ctaggcttttggcctgaaaatagaaccaccatttataatattttggaaaccaaaaagtatctatgacaggttttaatcaacttagaaatttattttgccaggctaaggagaatgcctgggagg

SEQ ID NO: 330541 - DNA, 455 bp, Homo Sapiens
ttcaatagcaaaattagaatattttaatagtaatataatagaataaaggtttgggagtgcaaccaatcttctagaacctgaaggttggcattcattgttcataaactcagctgaaggcagtgccttccaaatgtggttaaattgccatgggaaagaccagggttagttgcagggcatcattttccaagcagaaccatttcaaatgctaaaactggcccctgaggttacattgagcctcccttcctgagtgagatgtttggaaatgaggtggctttgggaaataagcttgtctgtaacagtggtttccacaaagacttcagtctcatgggcattgggactttgtttgggacattgacataaataattttgggcatatcaccatatgagggtttttccagaggtgggcttccagtatgcttctggaggggggtcttccaagaaggggtggcacttaa

SEQ ID NO: 330542 - DNA, 803 bp, Homo Sapiens
  misc_feature (376)..(376): n is a, c, g, or t
  misc_feature (380)..(382): n is a, c, g, or t
  misc_feature (384)..(384): n is a, c, g, or t
  misc_feature (389)..(389): n is a, c, g, or t
  misc_feature (391)..(391): n is a, c, g, or t
  misc_feature (396)..(398): n is a, c, g, or t
  misc_feature (401)..(401): n is a, c, g, or t
  misc_feature (403)..(403): n is a, c, g, or t
  misc_feature (413)..(413): n is a, c, g, or t
  misc_feature (418)..(418): n is a, c, g, or t
  misc_feature (421)..(421): n is a, c, g, or t
  misc_feature (556)..(556): n is a, c, g, or t
aggattcatgatgttacacattttaaagttctttgcaagctatagtaatagttccaggtaaataaatggaataataaattctgtaaaaattataaaaacctagtctgttgataatgggctcttttaggtagagtctagggtaggaaatcaaacattatattcatcatggtacttgaaatatatttaagctgaagctgtacactccatcatgtttttgatatatttttccttggcattacttgaaaggcatgctcatgaaactggatttggatctgtttcatgttttcacttgcgttctctgacccctacttaggagggcaccagggtgcttcctattctaaccgtttgcaaattcaagacttggttggagggccanaacnnngnctggncncaaannnaananaaaacccccnccaanagnagactccctcgctcctgctccagtattttgaccttaatttgaacagttcaatgaactggcaactgaagtcggttttttcccactgaactagacctttcattgttttgccagaggaagatgacctcatagcccggnttctacccattgtgcctaaagtgaaattttagtcctaggacctaaaggaacacaggccaaactttctgtctgagctgcagagtattgaaacttagattgtgagctgggcaggaattcctgtggccctctgtgtggagttgctctcaaggaaaaggagcatttaaatacgtttttgactccaaatttaatttttagtaatatagttcaaatgtcctttaaaatatcttaagtaatcagactgttttct

SEQ ID NO: 330543 - DNA, 437 bp, Homo Sapiens
attcggcacaggattgtttcacagaagccttaccactctctgcttcatctaagaaaaccaataccaaaaacgccactttaatgctcagccctgcgtttgtgtgttttcagatgagttactgttaacaggtaggttcgtgtaggccttgctgggcactctgtacaattagttgcttattacgtatgattactcgcagcgatctattgttccatataaccaaaaagcatgggtttattcattgaaacacggttgacctgaactcgtgccttagggaattaatgccccccttatgggaacctgcctggaattgcacctgcgggtggggagggtccggctgtggaagtcacttgaacaggaacgtcgctggatggggaggaaaggggctccccgcaggaagggaacgggccttttaccctggcggttcccggcacaattcg

SEQ ID NO: 330544 - DNA, 164 bp, Homo Sapiens
caatacccatgggttattttggcagtttctgaatgcataaatggaatagacatattcagtttctggcagaactttcacagtgatttctaacctttagagtgccaactgaaaaatcacatgatttataaatttagaaaggagactttcttttctttagagatagt

SEQ ID NO: 330545 - DNA, 484 bp, Homo Sapiens
acattttaaagatttaagtagatagacaaagcaactagggtgtatcaaagatctctttcatgttgtattagtttgctggggttgctgtaacaaagtaccacaaactgcatggcttgaacaacaaaatgtattctctcagttctggaggctagaagtccaagatgaaaatgtcaacaaggctgtgctccttcggaaggcattagagacactctcctagcttccagtggcttgctggcagtcttttgggtgctccttgtcttgtagacgtaccacccttatctccgtcttcatattcacatgggcattctccctatgtggcatgtttctgtgtctaaatttaccctttttataaagacagcagtcatattgaaaaaaggaacccagtctactcctgtatgatttcatcttaactaattacatctggcagtgatcctgtttccaaatgaagtctcattctgaaggtagtggggggggtagtacttca

SEQ ID NO: 330546 - DNA, 234 bp, Homo Sapiens
  misc_feature (38)..(38): n is a, c, g, or t
  misc_feature (56)..(56): n is a, c, g, or t
  misc_feature (79)..(79): n is a, c, g, or t
agtcccctatggtggaaggtgggggtgagacatacccncccgctgaaacctagagntcaaagatgagatataaaagccncgagaaataaaagaagacaacagaagtattgtaagagtgagctgatggaatcagggtacaaaataagagaaaagtaacattgcagaaacattcaaagtgcaaatatcaactatagctgggggtaatggaagcaagcttgagaaatttgagcaacc

SEQ ID NO: 330547 - DNA, 421 bp, Homo Sapiens
agacgacttgtttgagaccttgttcagcactgtgcaccggggcagcgctctccccctggccatcaagtacatgtttgatttcctagatgagcaggcagacaggcacagcatccatgacacagatgtgcggcacacctgggaaaagcaactgcctccctctgcgcttctgggtgaacgtgattaagaacccccagttcgtgtttgacatccacaagggcagcatcacggacgcctgcctctctgtggtggcccagaccttcatggactcttgttcaacgtcagagcaccggctgggcaaggactccccctccaacaagctgcttctatgccaaggacatccccagcttacaagagctgggtggagagatactacgcagacatcgccaagcttccagccttcagttgaccagggacatgaatg

SEQ ID NO: 330548 - DNA, 637 bp, Homo Sapiens
  misc_feature (178)..(178): n is a, c, g, or t
ttcggcacaggaagtaggcttcgatcctgagaaccttgctgttgctctgaggagatataattctgggagaaagaatcttttataagaacagtacagattgttctcaagagggccatcagagggaagccaaagggttcacagcctcggccccaacaactcaaacatggtcatcatgttnttctatatggttttctccagctagcagtactcccttcccaaaacctgtgactgggcagtgcttttctctctcccatgtctagcctccaaaagttaagtgaaaattagtcaactgcacgtggaagaccccaccactttggggatctctttatttcttttcagccagggacctgtccactccctttgaattaatatgggaagaaattaatacaggatgaactggagagaagggttgagtgtggcatactttctgaaacctggagctgggaattgcggagaagggaaggtctagactagttacatcacatagggattactgtaaatcaagtcatctcaagtctagtgaagacagccaacaggaacaaaacctagcatagggatagaaaataccatgcacgtgtgcagccccacctaattcctgcatccaaggcaggtgttgttaatctagcatagcacttaa

SEQ ID NO: 330549 - DNA, 579 bp, Homo Sapiens
tcagctatcgttagtgtccgtgtattttacgtgtggcccaagacagttcttcttgttccagtgtggcccagggaagccaaaagattggacactcctggaggtgcagcacagtatctaacactacctcaatactttttccaccgaactacgtaagaccagccacagcccagaaaaagaacttcccacaggaaaaggaggaagaggaaaatgtggaggaaatctacgaggaggggattggccaaccgcaagtcagcatgggatgctggacacctggccgtgcgagaaacagaaacgtgagaagttgggagaaaggagcataaagagatgggagaaggcaaaggcagacactgccacttaagcactagtctagtaagactagtacttaataaagtacaagaaaaaagaacggtcattaacatcctaactctctaaagcacaggagcctttttaaagggcttgaggaagtggcagagacaaactccaagaaagcctggaggaggggatcacacagcagctccctgattcactaattcagaggtggtccccagcatcttgttaagcagactgccaacccccagc

SEQ ID NO: 330550 - DNA, 129 bp, Homo Sapiens
ggtaattaacacaagtgaagcttttatatcaaagaactcaattgaggaagcagtggccttagtcgttattggcataattgctttagtttgcttatggatcttaaaacgtttatgactatatctgcaagt

SEQ ID NO: 330551 - DNA, 540 bp, Homo Sapiens
  misc_feature (86)..(110): n is a, c, g, or t
aagaaaataaaaagataagagcagaaatcaatgaagtagaaatagattatattatcagcaaagtcaagagtttgttttgggtgggnnnnnnnnnnnnnnnnnnnnnnnnnataagattgataagtccctaacaaaactgattaaggaaagaaagaacaaccaagcaagttgccaataccaggaatgaaagagtagacgtcagtatagaccttaaaagaataatatgggaatatatgaatgtcaacaaatgtgatagtttggatgaagtgggcaaatttcttgaaaaatagcaaaccaacacaagaggaaataaaatctccaatatctctatatcttcctaatgaaattgaaacagtaatttaaaatcacccagaaagaaaattctagactgtttttactgttacattctaccaaacatttagggaagaaataattttcgactaatcttacacaaactctttcagatagctatgcacccatgatgcatgcctgtagtcccagtaactcaggaggctgatgcagaaggatctcttgagccca

SEQ ID NO: 330552 - DNA, 574 bp, Homo Sapiens
ttttaaattaaaacaatctccattgtattttattaagtgtgggacaaaagacaaaatggcacaaattctttttgttgttataaaaattaaaaatcttggattttataagcttgtacaggttctagaataagaaaaaattaaggtacactgttacaaaatcaataaaagaaaattagttgtgcaaaaggaatcattaagactttctcagggctttgtggaatgctccagtggcctaaagaaccctggtttcttccctgggaacagctgaagaataaagacagcaggaattttgaagttcacctcaagccaaacactataacttcccttatagacaagcacaaaggtcttggacatgggtctggcactatgtcctctctgactgcacccacctcacccctcatcactctccacactccagccactagcctttttcctctattctctaatgtactgagtttattcctacttcttgcagtcgtacttaatattttcattgtctttaatgcagatctttgcatggctggcttcttgtcaatcaaatctccactcaaacatcacctttcagataaatgct

SEQ ID NO: 330553 - DNA, 415 bp, Homo Sapiens
  misc_feature (333)..(333): n is a, c, g, or t
  misc_feature (359)..(359): n is a, c, g, or t
  misc_feature (375)..(375): n is a, c, g, or t
agggaagtgcctgtttatcagctgatacaagatcatctcactgttttacccaccagcatagctaaaattgtgtatctggatgaatgtcaaacacacctttgtcaagagacttggagagagggatgggcgaggtgttgggggacacaggggtgctctagaccctgtgagcactgactctgcccctctctcctcttagctggctccagtgcccagacccaagccccccactgctcaatggacacccccagcccagacccgttgccttcgcctttgcccggggaggaagagaaacctctggccttatctcctcctgttccccgggggccgtcgagnggtttcgttcctgggggagccacctnctcaaatcggacactnaaggcctccctccctcgcaagcggggccgtccccccaagt

SEQ ID NO: 330554 - DNA, 413 bp, Homo Sapiens
  misc_feature (11)..(11): n is a, c, g, or t
  misc_feature (46)..(46): n is a, c, g, or t
  misc_feature (59)..(59): n is a, c, g, or t
  misc_feature (256)..(256): n is a, c, g, or t
  misc_feature (261)..(261): n is a, c, g, or t
ctgtgtttgcnacttaaggggctgacaggccctgtaagagctctgnccggtccctgccnactttgcaagaaggaggtcaactgaaggccctgatatagggacgattccaaggtcaggcagtaagtccgagcgggtgcaggggcttgggagcaagcagaactgaaggagcaaagcttgccccctccactgcacctcctgggatctcttccccctccaagcaccattgggagcaaggtgcatgttaggaaaagaaggnagggncgctcccaaaggcacaaagcaattacggtagaatcccaggcacttgcgcaggtgagtcggtgagcaactttggggcgaggggggactttctggcacacctcccatcatgctctgaggggcgactagcaggtgggtccctttctttcacctcc

SEQ ID NO: 330555 - DNA, 302 bp, Homo Sapiens
gagagttaacagagcccttttgaaagtcacacatgcctcagtaaatgaggaaacactggggttgacatcagtacccaaagctggggtaggaagggcctacctacagagaactggatggagagttagaaaggccctgggcctctgccccattttaaatgaacctcagacaagacctccaaatatctgtcctcaagttgcttcatctacaaagaaaagagaaaacttccccttgtctccatggtacaaaattaatctgagaatgaaatggtattttgtgccaggcatggtggttcacacctgta

SEQ ID NO: 330556 - DNA, 541 bp, Homo Sapiens
  misc_feature (429)..(429): n is a, c, g, or t
  misc_feature (485)..(485): n is a, c, g, or t
  misc_feature (496)..(496): n is a, c, g, or t
cgttttctcagtggtggtggaagttgcctcatcgcaggcagatgttggggctttgtccgaacagctcccctctgccagcttctgtagataagggttaaaaactaatatttatatgacagaagaaaaagatgtcattccgtaaagtaaacatcatcatcttggtcctggctgttgctctcttcttactggttttgcaccataacttcctcagcttgagcagtttgttaaggaatgaggttacagattcaggaattgtagggcctcaacctatagactttgtcccaaatgctctccgacatgcagtagatgggagacaagaggagattcctgtggtcatcgctgcatctgaagacaggcttgggggggccattgcagctataaacagcattcagcacaacactcgctccaatgtgattttcctacattgtnactctccaccatacagcagaccatctccgggtcctggctcaacagtgattccctgnaaaagcctccngttccaaattggccattttgaccctaacttttggaaggaaagtaa

SEQ ID NO: 330557 - DNA, 356 bp, Homo Sapiens
  misc_feature (318)..(318): n is a, c, g, or t
  misc_feature (330)..(330): n is a, c, g, or t
gaggagagcttttctactttattacaaagagaagaagcctttatgtggtcagaaaatacaagattgatctttttttctcttcctatgaaacgctgctgttcaaacagccagagtgaattgtctcagttcacttcttttaagtcccatcacattcacttggggtatgggatgtccttgggctgctgaaaatctgggcccttttaggtgcacaggggcggacaaaggtcccctggaccaggcaggttccaggaatggtcccattttcatatattggcatccatggcacacctcctaaaaatgaggggtacagcagggggnaaaacatttttnccaaatagggtggtcctattatataa

SEQ ID NO: 330558 - DNA, 623 bp, Homo Sapiens
  misc_feature (114)..(232): n is a, c, g, or t
  misc_feature (239)..(239): n is a, c, g, or t
  misc_feature (311)..(311): n is a, c, g, or t
atgtggtgaattacatttcatctgtttttacttatttgttttcaacagggtttcgttgtgttggccaggatgccagtgtatggctgggactacaggggcataccatcacccacnnnnnnnnnnnnnnnnnnnnnnnnnnnnnnnnnnnnnnnnnnnnnnnnnnnnnnnnnnnnnnnnnnnnnnnnnnnnnnnnnnnnnnnnnnnnnnnnnnnnnnnnnnnnnnnnnnnnnnntgacacncacattcagcctcatgtctgtttttaaaataatttttcaactggggagatttcaaacgtgggtctatctttnagcctacaattaggtgcaactgatttttcttgagtttaccgtggtaaataataccagtttctctaattgattcactcatttcacctgacaaagatggaaaggaagctaggggcttaagcaactgctacatagctgggaaaaggatttcgagactgctgccaattttctcacctaatgacttcacttctaaaccttatccaacttaggtggggagttcttccaggtagaagtaagccaactgtgatattaagagcttttatcaaagaggagggaaatatatatttatataaaaatttttacaaaaaattaatc

SEQ ID NO: 330559 - DNA, 1019 bp, Homo Sapiens
  misc_feature (406)..(406): n is a, c, g, or t
tacaagatgttataagtttattctgaatctcattcaattgtgttcaatgtggctcaattctttacaaattaaaattcttgaatatatgttaaaaattaaacaatcttaatgtttcttccttaactagactggatacacgtctgtttaactacgcaaaaggtaatgctggcatggcttactgggaccctaagtgtggcgaagggactctgctccagtgaactggcgagtgtggaacctcctgacaccttctgaggacctcctgcctgcccatgttgctgtggagctcgcactcctcaggcatcccctgatgttgagtgatacaaactctatcaccggaatcgatgctgctgcaatgacaagacttctttctggttttcagattctaaagtttaaaacaacgacaacnaacaggagcgcttgaaagttacggtgcttctccctctccagtgtggactcgctgatgtttggaaagattggacttgctacagaaggtctttccacagtgatgacaccagtagggcttttccccggtgtggattctgtggtgtttattgaagttggagctgtggttgaaggctttcccacactccttacacttatatggcttctctccggtgtggagtctctggtgggagctgaggcccgcatgctgactgaagctcttcccacattcgttacactgataaggcttctccccagtgtggatccgatagtgacgaatgaggctgcctttcccgctgaaagccttgccacaatctttgcactgatatggcgcctcttctgtgtgcattctctgatgtttaagaaggtctgagctctgcccaaaagcttttccacacttacagtcatagggccggtccaccaagtgtgttctgtagtggagggtgaggtttgagctgtggctgaaagctttcccacacttggtgcacacgtaaggtttctccccagtgtgtgttctcctgtgtttggtgagatttgagctattactaaaagctttgccacatttcagcacaaaaaaa

SEQ ID NO: 330560 - DNA, 385 bp, Homo Sapiens
taaaaaagtaaacagagataatgattttgagtaatattttaggaaggggataaggttttacacaagtcaaaagtttaaaactggaaattaaactgtcttcgtgcttgcataaatttgtatatcccggtatacaggcaagtctccctaaaccattgacaaatgtaaattaccacaagggggcagtcaaatcatatatgaggctatgatcaaatcattttttttgggagacagggtctctctcactcttgtgtcccgggctgggagtgcagtggccttaccctagggctcactgcagcccttgaccctccccagctcaagtgctgaggattacagggcatgcggccacccacaccccaggaggagtagggaggcccattcgggtaat

SEQ ID NO: 330561 - DNA, 485 bp, Homo Sapiens
  misc_feature (15)..(15): n is a, c, g, or t
  misc_feature (41)..(41): n is a, c, g, or t
  misc_feature (54)..(54): n is a, c, g, or t
  misc_feature (64)..(64): n is a, c, g, or t
  misc_feature (69)..(69): n is a, c, g, or t
  misc_feature (83)..(83): n is a, c, g, or t
taataaaatagcccngcctagtgaattttccagaattttgnaattttccacccngagcataganaagtngatacaagtttgantcccctaatcctttataagttttccagaaatttaccatcagcaggactaaaaagtggtttttattagactaaagattgctgtataaataggaaggatcttttgaatattgttatcagaatcgatcatatggtatcatactaggagaaattagtctttgctaatttctctgttaattgaaagtctttccagaggtacttatttcagtaaaaatacagatatttggagttcctggttctgtatatcggtgtccagtcatttgttcctaaggcattgttttagcatggtggggaggggaaaggttaagtagctttattactggtacatttttaggtctctgacttggttagttagggtaaaagttcttttctctacttgtaagcatcagggtattgaagctcatg

SEQ ID NO: 330562 - DNA, 466 bp, Homo Sapiens
  misc_feature (25)..(25): n is a, c, g, or t
  misc_feature (30)..(30): n is a, c, g, or t
  misc_feature (44)..(44): n is a, c, g, or t
  misc_feature (81)..(81): n is a, c, g, or t
cccgggttttccccaagtcaccgangttgntaaaaacgaagggncaagtgcccaagcctaaaattaaacccctcactaaanggaaataagcttgcggccgccttaattaaataacattcttcacctgtacatgttatcacactttagttcttagactgctttcatattcaacgtggagatctggaaaggcaacttgactatcttcattttatgattgaagaagctgaggttgagggaggctaaatggcttgtagttacactacaaacactaaaacagcaaaaattagcattggaactagaacatctgatgcatgttcatgactttgtcctcacagtcatatcctcagggtctgtggagtggtgtgtggctgtggccccttagttagaaggccgcagggactgtgggtgttttaggttgtgccggctcttcgtcattttcccttttctctcctgtcccttccttcca

SEQ ID NO: 330563 - DNA, 441 bp, Homo Sapiens
  misc_feature (393)..(393): n is a, c, g, or t
  misc_feature (417)..(417): n is a, c, g, or t
gtccattctttcatgaaatctaggccacctttcctacagggctgaggtctgcttactggctggcagatccagccatttcccgagtatgagactgggagtcggtaggcttggatttctgtctggctctcactcaggaagactgagtgatttcgggcagattactgtccccctggacctcagtatttccttgcaaatgttaagatggccatgtaaatgttaacaagtaattctctcatttctctccagagggctgtgggtgggtttggaggggagaaatggcatctcctttggcctggggacctcctcccctcttttaccctccatgctgcctctcctcaagggcttctggagtccccaagtcaaatgggcaaatggggggaagagaagacaggntatggagtacaagaggcctagatncccctttaggtctgatctggctgg

SEQ ID NO: 330564 - DNA, 821 bp, Homo Sapiens
  misc_feature (45)..(45): n is a, c, g, or t
  misc_feature (523)..(523): n is a, c, g, or t
caatcatttttgacccttttcaagccctcacaacacccctgtganggtagacaaaattccagaaaacacctccccagccctcactggggaaaagatcctagaaaagcagcttaccccctccccaaagccccacagcccaagtccagggcccccaccctattagtacaatttgaaaactttccacaacctcggagagaagatggaccccaacctttgtggcgcagagtggctcttgcccctcttttcagaagccttctaggatgacagtggtcatgtactgaatattgtaggagagcaaggaggtttaaaagctttgaggacatggctcatataggaccccaaaaaggtcctctacaaattgcctggggaaattctgggaattggctgatgcaaagaagaagagaaaaaaggtacatcagaaacagaaacatgctactatcagggcaactgagcttgccaaggggaagaggcatgtcgggggatctgtaagtcatttgtctcctggtactgtcaagtgtgtaantcaccgacaagtgcatggcaagagacagcaacagaaagctctatgtaggctagagtgaaattaaatctattatgtggggctccagtatctgatccttggtaggagcaaaatgctctctaaggagtttccaagatctatgatctaaccctggaggaaaagtgataacccaggtcatttgccagacataatacaaacccagaagggaactctaaactcaaataaaataaaggaaccaataggattttcagagtccagtgactcgacatgattgactggaatagcaactctctccagtgtc

SEQ ID NO: 330565 - DNA, 431 bp, Homo Sapiens
  misc_feature (404)..(404): n is a, c, g, or t
tcacttcccgaggccagaagtccaaagtcagggtgtcagcaggattggttacttcttggggactcctggggagagcctggtccgggctccgggcgaagagtctggtctgtgtccctcgctaagcttctgctggctgttggcagtccttggcgttcttttgctggaagctgcttgactccagtctctgcttccattgtcacatggccattttgcttttgtgcatctgtgtcttaacatggcattcttctctctgtgcctctttgtctcttcttttcttataagaacaccaagtcatattgggattaaggggcccacccctctccagcaatgccctcaatctttaacttaatgacatctgcaatgatcctatttctaaataaagtcacattctgagggtctagggnagggacataaattttggggggggatgc

SEQ ID NO: 330566 - DNA, 452 bp, Homo Sapiens
  misc_feature (252)..(347): n is a, c, g, or t
  misc_feature (435)..(435): n is a, c, g, or t
ttttaatgtgtcatagttgtttattattcattattgttgttaatctcttattgtgcctaatttataaataaaactttatcacaggtatgtatgtataggaaaaaacatactatatatagggttcagtactaaccgacatctctggcatctactgggggtcttgaaacgtatcccccgcgaagaagggaggactactgtatagctccaataacacagcctactttaaattgaaagtcatgtagggtatactgnnnnnnnnnnnnnnnnnnnnnnnnnnnnnnnnnnnnnnnnnnnnnnnnnnnnnnnnnnnnnnnnnnnnnnnnnnnnnnnnnnnnnnnnnnnnnnnnaggttagggtgaggggcatgctgggagagggggtgggggccccttaatcccaattatggactggggggtttctttataagggaaaggnaggaggaccaaaggggg

SEQ ID NO: 330567 - DNA, 442 bp, Homo Sapiens
  misc_feature (27)..(27): n is a, c, g, or t
  misc_feature (46)..(46): n is a, c, g, or t
  misc_feature (89)..(89): n is a, c, g, or t
  misc_feature (171)..(171): n is a, c, g, or t
ccacaatttccgaaccttaatttgggnaaaagcctcccaattcccngttcaacctttccagtggtgccttttccccaagcctaaaaagnaactttatttgaaaccttccatcccacacccttaaatccactgctgtcatcgcaggtgctgtctgttagactatttgttttntaaagtacttgaggtgcagacttcgaccacctcactgtggaggttttcctgtaccacatggggagagggagctctattttcagatccaggggaatctgtagaatcctttggtactgattttggttttggtgacgttgaccgtcctctcaaaggttctgtgaggggcattttcttcttgcggagggtatctggatcaagtgtgtaagagtctgatttagaacgttcccgaggaggatcaagctttgtcttaacaggagcagtacttttttgc

SEQ ID NO: 330568 - DNA, 372 bp, Homo Sapiens
  misc_feature (310)..(310): n is a, c, g, or t
gacttcttattctctttctcacactctttctttttaagaactgcacaggaaccaggacttggaaaaatcatattctgggaagcagctttgatagtagccaaagagatgtcttcccaaaaagccactaaatgttgtaaagttaagggaagaggagacttaggacttcattgtgttatgcatgggacatttcaaaagtgggtctcagttttcccatcctcacatttttcatgcagaggtgggttccttaaggcataggacaataccttgtttttgttgatgctaccccatcttaggatatatctgggtccantgggggtgccaatattaaacatattcagtgcaggatgatatttccaatgaatgtccaatttt

SEQ ID NO: 330569 - DNA, 433 bp, Homo Sapiens
  misc_feature (106)..(360): n is a, c, g, or t
  misc_feature (401)..(401): n is a, c, g, or t
tggcttgagtttttcaaaacaatcaatcctggtttggggaagtttaaatatggcctgtatatgataccattgaattacttgctcatgtactcaggtgcaagtttgnnnnnnnnnnnnnnnnnnnnnnnnnnnnnnnnnnnnnnnnnnnnnnnnnnnnnnnnnnnnnnnnnnnnnnnnnnnnnnnnnnnnnnnnnnnnnnnnnnnnnnnnnnnnnnnnnnnnnnnnnnnnnnnnnnnnnnnnnnnnnnnnnnnnnnnnnnnnnnnnnnnnnnnnnnnnnnnnnnnnnnnnnnnnnnnnnnnnnnnnnnnnnnnnnnnnnnnnnnnnnnnnnnnnnnnnnnnnnnnnnnnnnnnnnnnnnnnaacatgaaaaaacaacttttaataggattaggacatttacntcctctccctttcaaatttggggaaaaaaatc

SEQ ID NO: 330570 - DNA, 437 bp, Homo Sapiens
  misc_feature (20)..(20): n is a, c, g, or t
aacaacattacgccaaatantactacctctaagcttttttagcttgaaacacgcccgtaattccgtgactcctaagactaccaaatacttaaggcaaagttcattaagcattaagcgtaactaacttaacaaactccctagaaaagaatttctggaggtttccactgtagttgagaggaattttctgaacaattgaagaaaaagaacatctgggtcctgagtccagctgcagtgatgacagacggccactagatggcggtgctgccccatcagaaagctcccccgcggctccagcacacagggtcgcgcttggaggccagttcctttaaaccccaggggtcaggtaaataggaagggggtggaggttcgatttcttcacaaaggttaaagtcagtatttcctcaccctcacatgcttcgaatcaatgactagtcact

SEQ ID NO: 330571 - DNA, 816 bp, Homo Sapiens
  misc_feature (682)..(682): n is a, c, g, or t
  misc_feature (745)..(745): n is a, c, g, or t
gaatattcacaaagtgtgcaactattaccactatttaaatctaaaatacttcatcaccctcacgtcccattcccattagcacttactccctattcccctctccccccagtttctggcgtcctattttctgtctttatggatttgcctattcaggacattttgtataattggaatcatacaatatttggcttttgtgtctggtgtctttcacttagcataatgttttcaaggttcatccataatgtaggcatgtatcagaagttcatttctttttatggctgaacaagattccattgtgtgattagattgcattttctttatccgtctgttgatggacgtttggggttgttccactttttggccattgtgaagaatgattctttgaacattgatgtaaaagatttcatgtggatatgtattttcatttctgttggctgtataccttgcagtagaattgctgggttgtacctttaactttctgagtaactgctcaaacacagtaaacacacagttttccagttttgcagcactattttatgttcttaccagcaacctgggaagaatttccactttctccacatcctcgccaacaattgtcattgtctatctttttcattatagtcaccatagtggggtgttaaagtgggtattctcattgtgggtatttgatttggcttgaccntggatgagtaatgggtattggaacaacttttttcaagtgcttattagcccttaaatacctggntgggagaatgtcattcaaataaatctttgcccttttctaagggggtaattgcccattatgttgagtttagg

SEQ ID NO: 330572 - DNA, 310 bp, Homo Sapiens
  misc_feature (293)..(293): n is a, c, g, or t
gtgtgagctacggcacccagcctgtttgttttgaatataatgtaggatgaagaaaaatcaagcctttggtggtccgtgtctctccaaaggttgagtggagaagcgtatggtgagaggcccttggtggcatggacatcaggccacacaagccacagagggcttgtggagatgcttatggctggggaacagactaggaacaaacacgggtgtgggtcaaagctcaatcgctgagcactcggtaactctgcaggaagttaaaacttttcacaaagaccatccatgtgggttgactngggacatacagggcaga

SEQ ID NO: 330573 - DNA, 312 bp, Homo Sapiens
  misc_feature (82)..(82): n is a, c, g, or t
aggtgtcagttcttttatttcttctagtatcatttacttcaagggaatcctcaatgtcaagtattttttaaaattttatccntaaaccctctgggatttcaacctttgatcaaaacactttttgaaatttgtgagaaattagaaaaattataaactatgtggcaaattcagcatatcaaaatgtgtgaaatgcagctaaactgtgtttgcagagaaatctgtaccttaaaccctatgctttaaaaagatcagtgtaaaattaaatacaggtgtacgtttttgtattgtgccagacttcactgtatttcccaa

SEQ ID NO: 330574 - DNA, 381 bp, Homo Sapiens
  misc_feature (253)..(253): n is a, c, g, or t
  misc_feature (270)..(270): n is a, c, g, or t
  misc_feature (279)..(279): n is a, c, g, or t
  misc_feature (322)..(322): n is a, c, g, or t
  misc_feature (327)..(327): n is a, c, g, or t
  misc_feature (332)..(332): n is a, c, g, or t
  misc_feature (358)..(358): n is a, c, g, or t
taagaaacatgcagttatcatttatttcaattcttttctaaacacagacttccaattccaataatgcaagtatagcaaatgcattagtttcttatggctttacctcagcacataaatgaaaataatacagcaaaactgtaacttctgagcaagtaatcacaagatttataaagactaagaaaaggaagccaaacatgtaggtacagctaatgagaccaaatactgttcagattgaaaaagagttgattaaaantacagccgaggggaaantgccaccanttatggatgccaggagtgggttttgttaaggaggttcttgggnggggntctgncggggggtcccgggtttgtcctgacntgggccacctattctgctccggg

SEQ ID NO: 330575 - DNA, 318 bp, Homo Sapiens
  misc_feature (216)..(216): n is a, c, g, or t
  misc_feature (306)..(306): n is a, c, g, or t
cgccactgtgcccagaccccaaatttattattaaaaaattcaaacatacagtaacgttgaaaaaacgtataataatcaccaggacatccataattatattcatcaattattagcattctgacatgttcattttatctaggaaccatttgaaaggcacaggacatggaaggacacttggacccctaaatattttaggcacgtgctttcctaattagngggggacattcttctatacaaccataagggcccttaattaagggggccgtaaggtttatttcccttagtgagggggttaattttaggttnggggattgggcc

SEQ ID NO: 330576 - DNA, 389 bp, Homo Sapiens
  misc_feature (38)..(38): n is a, c, g, or t
  misc_feature (48)..(48): n is a, c, g, or t
  misc_feature (67)..(67): n is a, c, g, or t
  misc_feature (73)..(73): n is a, c, g, or t
  misc_feature (84)..(84): n is a, c, g, or t
  misc_feature (93)..(93): n is a, c, g, or t
  misc_feature (124)..(124): n is a, c, g, or t
gtattaccattaaaatttttggtaaattcccaaaaggncttttttccngtttttgggaggaattatnatattnggttttagttncatttaaangcttgaaaattacctttcttaacaatcattngaatgtcattcattgtcacatgaaatcaggtatttacgtttttttctaatgctaaaatatccaacattgtaattgccctatttttccatttttataagtataaaagcaatgaattttaacactggtatttaaataatacaaaatattatccaaattcataacagcacagtgaagtttcttttgaagactatgtactggaagcatttaggacttaccaatatatactgggataaatcgtttcaataaagtttatcaaatattctgt

SEQ ID NO: 330577 - DNA, 217 bp, Homo Sapiens
cacagtatgatgtagatttcttgatgctaattcagtcttccatggcttgtgttattcctttttaatagtcacttgaaactatggaggaatcagcctctcatttgggtatgctgatggtgaagtcataacctcctttccctattaatactttttgtttctccttataagaatggagacctcagtcgagaccagcctgggcaacatagcaaggccctgt

SEQ ID NO: 330578 - DNA, 967 bp, Homo Sapiens
ttaacctcattattgggatacttaaataacagatttatgctgttgttgtttctactggtcggtgctcgctcactaatatccaatcctagtatgattttcttttacttgtgtctattaacagggttatgtcacaccttgtcaacctcaaaacagatgatactcatcacttgtcttccatcttgctgttctattatcttcctacaaaaatagctaatttgtcagatttcaaagccttgttatttactgatgagcttaccaactggaccttttgtatcttcagtgtgtaattctgaagatgcattctgatacactagtgaactgggggtgacggtgaaggggtggtggaactaagggggtggggcggcgaacataggcaatatgccatttcctcaccatcccatgcttgtcatgtgagacaacagaaaggataaagaatactctattttttattctgaaaagataattatagcaatgataccttccattctgtttatttctggatattttggcttcaacaattctttatatcatattttattcttgaaattggtatgacttctctgttttacagcctgagataaattctcagatatttttttaacagtaaaaatgcaaagccagatttttgaagccaagtattcaagctccaaacactttccattatattcattacagttcttgttttagctggtatgttctttcctctacaagtactgccattatttatgcttcttagctaaacctagacttttcagtagcatgtatgaaagtcaaataatgtcaaatggtaagtttctacttcattttatctcatcagggtatttgttgctctatataccagcatagtatattttctactcccaactgaagcttttcatttttaggactgaacgttaacaataagtctactaattaggttaactgcttagctatgttccagccatgtttttaatgctagctgtgccga

SEQ ID NO: 330579 - DNA, 484 bp, Homo Sapiens
  misc_feature (70)..(70): n is a, c, g, or t
aaggccagctggtgactttaagttgaagcccgtgctccatttacccattcccaaaaacccctagggaccnttaaggaattatgccaaaattatactttgcctgtgcttttataaggggaacaacaaagcctagatgaccagccaccacctgtttaatggccatgattttattggaatattttgaggcccactgttgagaccctcttgcctcacaaaaaaagatttccttttaaaatatcactgtccattgacaatgaaccctagacacctgagagctctgatggaaatgtacaaggagattaatgttttcatacctgccaacacagcatctgttctgcagcctgtggatcaagaagtcatttcaacttatgagtcttattatttaagaaatatatttagttatttagtaaagctatagctgacatactttcttgagatggaatctactcctggtgaagatgctgtgaacatttgaaatgacagg

SEQ ID NO: 330580 - DNA, 443 bp, Homo Sapiens
  misc_feature (47)..(47): n is a, c, g, or t
aaatggaaaaccccctggccttaaccggcatccctcctccgggggcnttaacctggccttcccatggaagtggttcccctcctcaaccccataaccggatatcccccataggctccccttcctgtcattccatgtaaatatttgtaagctttttcctcccttcaaaaggaaactaacatttctcctccctctgcattgtgtgagagagttttagacagtcttcatttaaaaacatgaaaaatgatgttagccttgttttcatttctagcagccttacattgtgtatattttctttctcattcccaaaattctaatctgcattactacccattcaatgccatttacctcaaaatgttgaatgctcctttatctttgttatctggtttctaatccttatcacaactgaaatttctgttttaggtgttattactgggttttctctg

SEQ ID NO: 330581 - DNA, 420 bp, Homo Sapiens
  misc_feature (345)..(345): n is a, c, g, or t
  misc_feature (350)..(350): n is a, c, g, or t
  misc_feature (394)..(394): n is a, c, g, or t
aggctctaatcaactaagcagctaataaactcctgcctcatttcatccagccagagccctgatctcaggggatgatagtgaggaaacgatcctttcacatgcctggctcctgcaaaattgtgctaagaggattttcctcaaacattttagcacaaagcgagttttcctaatccagttagcaaatattcttctatttgaactcattgaccctccttcttctgaagatgtattttaaattggatttgcttcactgacacaaatggaaaacttgataagaaaatcggtggggttttgctgcacccactgctgatatcaaaagactcaactctgtattacagtcaatgnaaagnctctgttctgtaggctacagggtacaagctgagctcccagccancagccctggccaatgtggttcagctt

SEQ ID NO: 330582 - DNA, 365 bp, Homo Sapiens
  misc_feature (309)..(309): n is a, c, g, or t
  misc_feature (320)..(320): n is a, c, g, or t
cccaaattttgaatggggagaggatgtaaatgtctattctattaaaagttgttttttcatgtttttatttgggaaatgttctaatctacagaaagttgaaaaaaagagcacaataaatatccatgaacccttcagcaagatttgccagttgttaaagtttggcctttctttctttttctctatttaaagagatacatacatagaacattttttctgaaccttttggatggcagttgcagatagcagcacctcacccctaaattcttcagcttgcaactcctaaggaataagggcattctcccggcgganccacaataccnaaacttggcacctgagtacatgaggcaggtaatttcaatgggatc

SEQ ID NO: 330583 - DNA, 860 bp, Homo Sapiens
taaaaaaaggtttatagctttttcttttcccatgtcacaatgtccacttcctaagaagggtttaaaatactatgaaaactttctttttggggaaaatatctatttggtgtttgacacatcagtaggtactttaaagacctgaattttatagtagctttaggagttatattttataaaaatcagttatgactttatatttccagacaatagagagttcagtacatcatgctcttgtgcctctgcctgcttttcctgcgttcccaccctgtattccccccgcctttcgggtttccagggcttcgagcttgatcttttgaaagttttattctattaaattattgctgtatcttctggttttctgaaaaagctttagaatggtttcctataccctttgtatcactgcatttttccatatcatctccggttcgatcgcgtccagatggataacggaagcagatgcttctaatcgtcgcatttactggctccagtgcaacacatccatctgaaaacactcggaagtctggtgcttggagagggtccactgcacttgacataaggcatgcgtgctattctaaagtcgaattattcgttatatctgaagaggctattcaagtttaggctagaaggacgtgtaatcgtgctacataaattcgaagtaaaatgcttagataatacttatacgccacgatcgttgtggtattgtgcagcgacttaaagtgtgaatctggccctatatgcgtacctctggaaagcgcgctccctcctttgagccctccgtaaggtttgccgtatcacggtgtcttgaggtgtaggggttccaaagggcgtctcgatccaactggcgtgctttgtcttatggt

SEQ ID NO: 330584 - DNA, 522 bp, Homo Sapiens
  misc_feature (26)..(26): n is a, c, g, or t
  misc_feature (64)..(64): n is a, c, g, or t
caagcggaggtaatcaggcctactgngatataggatgaaaggaatcaaggggaagctccacaangcgacttctttggtcctggcagtgtctctgcatcacctgtgtccttccttttcccgtgccctgccctctgcccccgcttctgctctactttcttgctaatttgcctcctaaaggcttcaaaatactgctaaacacatttcttaaagccttctagacataggacagtttgtgtatgaatcattttatttaagaattagggcaatcttttttgttggaagtagaataaattgtgctccaatttcaggtgcttatgaaaaatacattgtaccacaacctgaatattatgttgtgtaaatccctccagccatctcatttggggcaacttttagataaggaatgaaattacttgtggtataatctataattatttttggcaaatgcatgagtttctcctgcttgaaatataaatgttttattaggtagccacagtatttggcccctgcatgggtgcttaattg

SEQ ID NO: 330585 - DNA, 655 bp, Homo Sapiens
tctcatttagcaaagtttttattcaaaagcttctcagcaccatctagttatcagaaagaatggatatcaccttttcctgcccacccaatccccagttccacaggcagaagttaaaccatttggctagagttccccctaatgattatgactgagaccatgataagattttggttgttctcacccaactgtctctaagcctctactcaaacctgactcaagcagagatgtgcaccccacagttcagaacaggaaggaatcatgtcagatctgatcaacctcccattcttgggctattagaggcacaagaaattaccttgaaaaaatggaattcagtgactgccatctaggaaagacagtgatactgtccagcagcatgcagttccgagagctcaactcttaggccaccctccctccactctactctaggaacaaggagcattaggtctgttttctctccatacacctcaatcgctcgtcctctcgtcttattaaaacacagacacagaaccaaactttttgacagttaaagacaaacaattacatctaattaaaatgctaagagatcctgagctgttagagatgaggagagtagatagtatgacctgatcttcccccctcttttttatgctgaaacagaatactgttaaaggaaatc

SEQ ID NO: 330586 - DNA, 408 bp, Homo Sapiens
  misc_feature (385)..(385): n is a, c, g, or t
  misc_feature (396)..(396): n is a, c, g, or t
aatgtgaaatggttcattaagtttttgttaataggaaagtaaagagcactttccccaaacagcaagaacaaaatcgctttctcttaacacattgatttatttcatttgctaagcacaggaaccatgaaatgcttcatcccattagcacattaaatatgtgcagaagtaaaattacagctgaacagcaccttgtactttgtactcatggtgtgtacatttcagtagggctaggaggaaaaaacgaactgtaggaaaggataattttatgggaattaaattacctgttttgtattgctctgaaggctgtgcatgtaggctgtgggatttcagaggggacttgaactgttgcctgcggctttttcactgggttattcccatcaccctnccccggcccantccccccggggt

SEQ ID NO: 330587 - DNA, 344 bp, Homo Sapiens
  misc_feature (12)..(12): n is a, c, g, or t
  misc_feature (40)..(40): n is a, c, g, or t
  misc_feature (56)..(56): n is a, c, g, or t
  misc_feature (80)..(80): n is a, c, g, or t
  misc_feature (135)..(135): n is a, c, g, or t
  misc_feature (162)..(162): n is a, c, g, or t
agttataatccnaggtaagaataacattttgaatatttgnaaaggtgttgaacacnaataattttggaaagccttttccnacaaaattttgaggaaaggaagaaaaagaagttttggcagaaagataaggaatgnccagaatacactgattaaattcttagnacctataccaaaatattaaaaatttttcctaaagtaaaatttgacattctgtggtttggagagtttaactttaggagtaatttataacagaatcatatatatgaaaaatttttatcttgattttcagtttttgcagagtgctttgaaggtaatacattgctgtctgaaggagtgttgttttg

SEQ ID NO: 330588 - DNA, 448 bp, Homo Sapiens
  misc_feature (20)..(20): n is a, c, g, or t
  misc_feature (31)..(31): n is a, c, g, or t
  misc_feature (49)..(49): n is a, c, g, or t
  misc_feature (55)..(55): n is a, c, g, or t
  misc_feature (67)..(67): n is a, c, g, or t
  misc_feature (72)..(72): n is a, c, g, or t
  misc_feature (85)..(189): n is a, c, g, or t
aagtaaaattttgccaaaantccttaagggncccccaagggtttttggnaaaggntaaatgaaccangggcntcaaacttaaaannnnnnnnnnnnnnnnnnnnnnnnnnnnnnnnnnnnnnnnnnnnnnnnnnnnnnnnnnnnnnnnnnnnnnnnnnnnnnnnnnnnnnnnnnnnnnnnnnnnnnnnnggctgggccatagtggcctactacgtacttgtaatcccaactactcaggaggccaagatgggaggaccacttgaaccaggaattcaagaccagcctgggcaacataccaagacccccctctctacaaaaattgtttttataaagttagccgggtgtggtgggtgtgcatctgcagttctagctactcgggggggcaggaggattgctttagccagagtataaggttacactgtgctatgatcatgccactgtctcttaa

SEQ ID NO: 330589 - DNA, 808 bp, Homo Sapiens
  misc_feature (264)..(264): n is a, c, g, or t
  misc_feature (301)..(301): n is a, c, g, or t
accacctgtttacatgtgtttaatgctttgaattttccaattcctattaacattcattctctcatcaaaccctcacaacatccctgtgaggtaggtcaggcaataagtggtttgcccacagccacaccagtggatagggacggagtaaacccatactgcaggtttcccagcccccaagctgatgcacctttcatttcatgttacacaggatctttgtgccaaccagacacaggagcatcaagagcactaccagaagccttcccntgctctctgagcttgcagaggggacccagaaatgctngggcttgaggcatcaagaccaggggtgcccccttttaggccaagccagggtaaacagaaggaagggcaggagtacttggaagttcaggctcaacagccacccctgccaccaccataggtctcagcctagcatacactgtgttccctacatatcttgacctttgtcaggtgcaagtcttattagtttactgagaggactcagtgcccactcccagacgagaagtcactgcaaggcgtggctagcagcaagattcctgacttccttcccacagtgccttcccattctgttacactctgcagcccaggaaggagggggaaggtgagggctgactgactcagcctgcaagtgcttagagatctgaagctgaaaggccccagcaccattcagctaatgattattattaactctgaacaggctttagcacagcggccagctggcttagggaggatgcctgaatctcccacagtgaggttttcaaaacaagacctggctaggcaccgtgtgtca

SEQ ID NO: 330590 - DNA, 494 bp, Homo Sapiens
  misc_feature (22)..(22): n is a, c, g, or t
  misc_feature (51)..(51): n is a, c, g, or t
  misc_feature (134)..(134): n is a, c, g, or t
  misc_feature (322)..(358): n is a, c, g, or t
  misc_feature (477)..(477): n is a, c, g, or t
aaactcaaaaatgtgccccaanaagaaagtcccccaactgaaggctgtggnccccaactctgcccccggaaaataagctatttgcctgaattcctgggaaggggtggggtgggggtcggaagtgattcaagccnatgccctggacccctgggcttccctctttgcaacacccatggctctccccacacttgttcctggatgcctgccttgttttttaccccaacatgacttgtgtgttttctgtctcaaagttttgcctaaagggataagttgtgggtgcttcattcattcttcttcttcttttgttgagacagggtctccnnnnnnnnnnnnnnnnnnnnnnnnnnnnnnnnnnnnnagtccaagcaattttaagaaggaagaacacagaggattcacactactaacactatccaatctcatgacttactaaaatcaggagagtaaaatattggtataaaaatagatagattaatnggaacagggcagagtac

SEQ ID NO: 330591 - DNA, 747 bp, Homo Sapiens
  misc_feature (39)..(39): n is a, c, g, or t
  misc_feature (81)..(81): n is a, c, g, or t
  misc_feature (369)..(369): n is a, c, g, or t
  misc_feature (577)..(577): n is a, c, g, or t
  misc_feature (584)..(584): n is a, c, g, or t
  misc_feature (593)..(593): n is a, c, g, or t
  misc_feature (620)..(620): n is a, c, g, or t
  misc_feature (650)..(650): n is a, c, g, or t
  misc_feature (712)..(712): n is a, c, g, or t
  misc_feature (726)..(726): n is a, c, g, or t
aagtaagcctcagaggttgaagcaagaactcagagagcnaagcgccgcagcccccagcagcgaggatgacccggggaccgnacggagtcccgcgcggagatccagaacgccgaggactacaacgagatcttccagcccaagaacagcatcagtcggacgccaccccggagaagtgagcccttccctgcacccccagaggacgacgcagccacagcaaaggaggcagcaaagcccagccctgccatggatgtgcagttcccggtgccaaatctggaggtcctgccccggcccccagtggttgcttccacacctgcacccaaggctgagcctgccatcatccctgccacccggaacgagcccatcggtggnaggcctccgacttcctgcccgccgtgaagatcccccagcaggccgagctggtggacgaggatgccatgtcacagatccgcaaaggccacgacaccatgtgtgtggtgctcaccagccgccacaagaacctggacactgtgcgggctgtgtggaccatgggcgacatcaagacgtcggtggactccgctgtggccatcaacgacctgtnggtggtngtggacctnctggaacattgtcaaccagaaagcctncctgtggaaagctgggacctgttgcaacancgtcctgccacagattgagaaggtttttgcagaagcaagttttgaggagttaagttccaganggggttgcaacttncttgaaagttgattctggcag

SEQ ID NO: 330592 - DNA, 629 bp, Homo Sapiens
  misc_feature (517)..(525): n is a, c, g, or t
  misc_feature (529)..(529): n is a, c, g, or t
  misc_feature (577)..(577): n is a, c, g, or t
  misc_feature (586)..(586): n is a, c, g, or t
aaatatatgagtttattataactgatgggtttccctctgaaattatagtgcaacattggttaactatttcctcaaacagattttttttaaaattaagttttacatcaacaggaagagcatattggttttggatgactgactgaattttaatgaatctacagtctttacttgaagtttaggtgttttcagggaagttctgtcttcaccttcttcctggaaacccagatttttattagacatggatttttagatgtaagaaaatattaatttaatttcatcatgttaaggactacttttctatgcatgtgtaaactgcttcaagcacttaacaggcttcttttttgttttatgataccgataattaatatattaagcatgcctttgaaatgcatttttaagatagaaaaggttaatcttttaaggaataacataggacaacttattgctagtattgtattgactggatccattctgatttttattgttattgaataatcaggcaagagctctggtagannnnnnnnngccnttaagaaaaaaatttcagtggaatggaattaacaaacatagggagccntttttaatnttttggggagataggggtctcactctggccatctacgctggga

SEQ ID NO: 330593 - DNA, 505 bp, Homo Sapiens
  misc_feature (61)..(78): n is a, c, g, or t
  misc_feature (123)..(123): n is a, c, g, or t
caaataccccagttttaaagattccagtaaacattgccccaccagccaagtattcagtgtnnnnnnnnnnnnnnnnnngcacgcacccaaccatttaagtttgtcctgaaggtttaaattacntgtatcataccatataagcctgttgttgaacccaggagaccagaggctcaaaagcattgcattctttcttgttttggacattggtacaagagaaatgaaaaatcccaactgcatagaaatctaggaaatgtatagacaaagaaacaaaatacctttcctttcctcccctcccacaccccatgactcccccacacttgagtgtattaagtaggcaagctttactcgtttcagtctgcagaatccaacgtatcattagaaggggggaggggaggtgcgtatctcagtctgtaagtgccttgttgattggcctccatggacgactgcttacagtcctgtgcatagtgtccgcttacaccacaattgtaacatgagacattcccat

SEQ ID NO: 330594 - DNA, 530 bp, Homo Sapiens
tttcttattgttacaagatttcaaaggagggcttctcctcaaattctacactgcggactcccttcccactccacagaagctccgacagcatccacagttgtccatgtgcagcacaacaaatcaagccaggcagatctcccattggcactagttaccaacttcctagagaaacccatcaatctcaaaattcctgctctagcaagtcctggaaaagagactagagcccaaatgccttcactctgccaagggagcttccctttttgtgtgtctgtgcccatggacttcttgaagtagggaagcctgtggaccccttctcactgtgatgttttttaaatgcatgaaaatagaacatgggagtatttcaaagaaaaccaattacattgaaatacaatgaccaaatattttaaaaatgaatttgtgttatagtaatatatgtttctataataatgctttaaataacaatagcagcagatctaaacaattgaaatgtctaaatggtgagcgtaagtcacatgctgagacgtctgcaa

SEQ ID NO: 330595 - DNA, 863 bp, Homo Sapiens
gtgtatgctacaccactgtgatgtgccctgtttcctcagaagagttcccatgtctgtgacaagcttggaggccgagttgcaagctaagatcccaagagaggccatccctgaattgcgacgcgtgtacttcaataagggattgtaaagcagggaggaaacctctgcagctcattctgccactgcaaagctggtgtagccatgctggtgagaaaaatcctgttcaacctgggttctcccagttacggaaaccttttaaagatccacattagccttttagaataaagctgctactttaacagagcacctggcgtgggccaagtgcctgatactcccttacactgaatcatgttatgatttatagaaatacctttcctgtagcttttatagtcattgtttttcaaagacgatataccagccctcacccaggttttaaaaaagcactggtaggcatagaataggtgctcagtatatggtcagtaaatgttctattgattatcaatcagtgaaaaaagaaatctgtttaaaatactgaattttcatctcactcccattgcaaatcaaggagatctcagcagtgaactgggaaaatacaaaagctctgggctaatctataaaaacttacctgaaatattaagggcagtttgcttctagtttggggattgcgctagcccaatgaaggtgatgaagcttttggatttggagggtaaaagctccttcacaccccttccaaaagtcagtcacagaccactgcaacatgccttccctgctggatcattatatacattcagattgtgagtggattgccttggttgacttttaatttattgttttttgttcttataaagatgataatcttaccttgc

SEQ ID NO: 330596 - DNA, 395 bp, Homo Sapiens
taccacagactgactagcttttcggcattgcatatttagaacttcatctcccctccactacttccatacttccagtgccaggtgctgcagggtacgttcatattgcaacacaatccctggtctcacatctctggatgagtcagtgggcagctgaggtgtgcctccaagccattccttcatcacaatggttacagataacaactacacatggaagggactgggaatcacgtaatatatcccactataccccaactgagtatagccccaattggacttccctttggccagattctgagagctgctggtacttttcacatactacccaaggggaaggaagtgtgacagaggggaaattggaggggaaaacatgataggcctttattaaaccaaacttt

SEQ ID NO: 330597 - DNA, 132 bp, Homo Sapiens
  misc_feature (82)..(82): n is a, c, g, or t
tctgctcatttaattatttttatttacacaactttttccatcatcatgatgcaaataagattataaatacacaaacactggnggtacatgcaacacattccacaaagggacaaaaatgtacagcactacaga

SEQ ID NO: 330598 - DNA, 764 bp, Homo Sapiens
ttttacaggctcaaaaatcaagtttaatatcaaaagaagttacacataaaggtttttacatttccgaaaatctgatagttaaaatatcccgtctggtgttgattgtgatacacttaagtgaacccctgaaaacctttattttgaaattgaagtttttgctcagaaactgggcagaacttttcacattctgacagaagataaaacttaagtctaaaaaatattcggtaacttttttctcaaaaacattaagtactttagaatataaagcagaaactcttaccaagcatgtgtacccatcagccacacctcctgtctttgggggaatttggttacttggagctctgtgggtgctatatgaatcctagagacagcaaacttctgctgtacagctaacttacaagggcctgaacccggctgatggcagcaagcctgctacagtcccagaagagtgcgacttcttatatttacatatgaacgcatctgtctttccaaggctaactttgtagcattccactggtaccaaggagccaaatggtgacattctgtctaagaatttgtggttactggcttcgaatgaagttgacgctgtcttgaatgcaccagttttttcttcaggattcaagcactttttaattccaggttcatctgtgtgactgtccttggaattgaaagggatgttgctctctttacaatctgtaaggcgcctgtggtgatcttcactaagcaacaatacaatggttccgccaacatgaagcactctgtga

SEQ ID NO: 330599 - DNA, 365 bp, Homo Sapiens
  misc_feature (25)..(25): n is a, c, g, or t
  misc_feature (202)..(202): n is a, c, g, or t
gggctcctgaaaatccctcacacanaaaaacagcaattccttcttgcgttcttaaagtgaaaggcactgtttccctgtcacactagcaatgttgcgaagtaaatgtcatcctttcctcctccttggccctgccttctacagctagtgcccctgccagttgtttcctcagcacgtctccagcgttcctcttctcttccccgcntggcacggccttacttctggtctcatcatcctatgcctgggctgatgcctttgcttcccagctgcagtcggctggggatgaatgtggggttaaggcaggcattccagatatttatagaattgttcatggttcttttcccattagccatgagttacttgagggt

SEQ ID NO: 330600 - DNA, 403 bp, Homo Sapiens
  misc_feature (68)..(162): n is a, c, g, or t
  misc_feature (387)..(387): n is a, c, g, or t
aacctcaaggcccaaaaattcggcacgaaaagcatttggcaagcacatcccgggtgcccaggcccaannnnnnnnnnnnnnnnnnnnnnnnnnnnnnnnnnnnnnnnnnnnnnnnnnnnnnnnnnnnnnnnnnnnnnnnnnnnnnnnnnnnnnnnnnnnnnncagaagcagaggtgttttaacgggaagacttcaggcttcatcggacggccgggaaggaatcagagcaggggtttcttccgagatggccagtggtcacctgagatggagcagagagcacctgtggcgggcatcttctctagaagccgcctgtgagccctacggaggccctgggcttcgtgccgtaagacagacggtgtcctgcaggcctcccatggagacaccatngtgtggattttaaaaa

SEQ ID NO: 330601 - DNA, 574 bp, Homo Sapiens
gtataacatcaaagatcagcagtctttcaaaagtgggagccagggttctaggccctgctaggttgtatgcagatgaggaaatacagatgcaggtgagcattcttactgtgggaggtggaaagagactgtgccaaatcctgggagtaaagacaatgatttggcaaggaggggtgttagcgtgggaacaggcctttgtagcagccccactcttctggctcttcttgacacccctgccaacttgctaaatgaataacatcaattgggaaccagcttgtcaatgtgaaaaggaaccctgaaaatgctggggtttacacacaaaccccgtgctttcccaccaactggctggcaaattttagttatgtgcttagattgaggcaaaggctgcattcacctctacatctcccacagtgggccctttagtaccttctgtttcaaatgcagcaccaaattaaccatacatttatcagagaatgattatcagggaaataattacattaagcagggaggtgtaactgcaaaatcctttccatctgttcccaatatgcctcaaccagtcagaacttcttagcatctt

SEQ ID NO: 330602 - DNA, 395 bp, Homo Sapiens
  misc_feature (22)..(22): n is a, c, g, or t
ggaatgtcaacccctcaaattnttggttaatacctagatggcttcccatttaccccacccacctattttaagggtcccctttatttttaggttccaaggttccatttgacttgagaaagtgccccttcctgcagccttcattgattttgtttatccttcactattaattgtaacgattaaaaaagaataagagcacgcagaccctctaggagaatattttatcccctgggtgcccctgacacatttatgtagtgatcccacaaatgtgattgttaatttaaatgttattctaatattagtacattcagttgtgatgtaatatgaataaccagaatctatttcttaaaagttttgagtatatttttcaactagatatttgtatagaaagactgaat

SEQ ID NO: 330603 - DNA, 683 bp, Homo Sapiens
agttctgaaatcaatggagttaatttagggaatacaaaccagccatgggggtggagattgcctttgcctcagtgattctcacctgcctctcccttctggcagcaggagtctcccaggttgttcttctccagccagttccaactcaggagacaggtcccaaggccatgggagatctctcctgtggctttgcggccactcatgagagtgtttttgtgtaaagtattttttagaatactgttgacttcttcatgatttaataaccatcctttgcgaagttttatgaggctttaggggaatgtcaaccctcaaatttttgttatactagatgggcttccatttacccaccactgattttgaaggtccctttatttttgaggttcaaggttcatttgacttgagaaagtgcccttctgcagcttcattgattttgtttatcttcactattaattgtaacgattaaaaaagaataagagcacgcagacctctaggagaatattttatccctgggtgcccctgacacatttatgtagtgatcccacaaatgtgattgttaatttaaatgttattctaatattagtacattcagttgtgatgtaatatgaataaccagaatctatttcttaaaagttttgagtatatttttcaactagatatttgtatagaaagcctgaatagtgatgaag

SEQ ID NO: 330604 - DNA, 476 bp, Homo Sapiens
ttgatcacaagtaatatgtttatttttaaaagtaacttactatctatcttgtctttttcgtatcagaaaaggtgctgttaggaaaagaaaacgaaagtacaccaccaagttaaagaaagggaagcttggggtacagattcagctgcctcacgaagactgagctggacgggcgtggagaaggtgcttgtctgtcaaggacgtccccgtaaggggcggtggctgcagcagctgctcgctgggctgtggccagggcaggcttggcccctgggatgagaagagaggcctgcttgtctccaaagtctgtgtgactgctcatccatccgatggctttgatagacaccagtgccagcagtccagaacccacgaacgacccgacgccagagaagaaaaagaacaagcccattatgggcactctgcatggacttgggggcagctgagtatgcaaattccaggcctgcgatacttgcaaagatctc

SEQ ID NO: 330605 - DNA, 274 bp, Homo Sapiens
  misc_feature (230)..(230): n is a, c, g, or t
ggtgtgggccaccatgcctgatcctgagtacatctttttaaacttgtttgaagaaatgggaaatatgcataaaccgcctctgctgcacactggtagagtacggtggttgtcacaaggaaaagcatttgggcgattattcaagttgcatattgatttaggcagcttcttttttcaccgaccaccatttttacttgaaagaatgataggacaaactatgggttttagacttngggcatctgggcagacagtctcttgaaactgtatgaagtgagcc

SEQ ID NO: 330606 - DNA, 294 bp, Homo Sapiens
  misc_feature (58)..(58): n is a, c, g, or t
cagttgtaaaaattgccctagtttgttaagcttcctactgttaggaagtggtagtttntattttattacccttgcagttttattagaaagttatattcttttaatggaaataacccttttaaagaataaatgtgttatctcctatttgttttcatttagtatatattctttaccttaatcttatattatttaattatgagctcttcagaaaggaaattaggatgaagaggatttcatgtatttttcaatatcctggattcagtaaacagcaattttaacttctaggccatataa

SEQ ID NO: 330607 - DNA, 1314 bp, Homo Sapiens
  misc_feature (11)..(11): n is a, c, g, or t
  misc_feature (107)..(116): n is a, c, g, or t
  misc_feature (1066)..(1066): n is a, c, g, or t
  misc_feature (1159)..(1217): n is a, c, g, or t
  misc_feature (1243)..(1268): n is a, c, g, or t
cggatggacancttaagcagtgcatatccccttattaaatttgccactattcttactgccaaaggtatcttcgaaaaaagcccccgccaataaatctgcgtcaattnnnnnnnnnnacttgagcagtgcagactgcggagcactacttgctgaaagtaagtcccagctcactcttctgtcatcagaggcgcacatgagcatcactgctgtggccccgaccgagctgccagggtccaggagagaagcttctgtccccacatggccagacagacagggaagagagccatgaggacggagggcttaggagacgaggctgtgagacagagaggacagaaaagagagggcactgaggaagaagtcgccaggagcacgtcacaggccagagaggcaaaacacagcaggaaacggacagaaaagagcgagcccagctgtcccgcctgggccatgcaggggcgggaggctgcacagcctccgctaaggaatgtcttccccaaatcaaggatagaagcttctcatttatttgggtactttccaaatgtatacaattcaaagtagaaaaataaaaacaaggtaaatcttataaaacacaaatgtttacaccaaaatggtcaaatcctatcatgctggaagataagactgtccacacacgcgcacaaacatccagagtttattgctcttcaccatggaaaaaaagtctcttcccgatgggtatttacaaagcggggagatggagtgtgaaattaaccagtgttgaaatcgtaccacccattcacatcttcaggacagtggcaggaacagcgccgtatgcttgagggtgctgtggtcacagctcgcgggccccggccaccgaggcccagttcccttccaagtagtgggcagctcagtgaggctggatagaaagtctgggcaggcagtgggtaagcaattgaagcaaagaagagaaaggagattttcagagaaccaaagcgcgcccttttgaagggttccatctgtctcacagggaggtttctgaccgacagctgtggggcttccagattgtaccgcactccccatctcagctctgggncagccctggctccactcagctcatcccaggctaccttcccttgctcaaaacccacctcgtggatgtgggaaggtcctcttcttcgagagagtnnnnnnnnnnnnnnnnnnnnnnnnnnnnnnnnnnnnnnnnnnnnnnnnnnnnnnnnnnnaatgcttccctcaaggaataaagttnnnnnnnnnnnnnnnnnnnnnnnnnnggtgagtgggctccggggagtgtttatgtctacatttctaaaagca

SEQ ID NO: 330608 - DNA, 477 bp, Homo Sapiens
  misc_feature (422)..(422): n is a, c, g, or t
  misc_feature (433)..(433): n is a, c, g, or t
  misc_feature (442)..(442): n is a, c, g, or t
  misc_feature (455)..(455): n is a, c, g, or t
acaacactctaggttttaattcaaaggaaaaatatatatataataaactggtttacacccttggtcagactgttgcctggaattctctaccttctctttcacagtccaaagagtttgtctctgttctcttccttcactgctttagcaaagagagggggaacttcaaagaggattccaacagtgaagcagaatcatggggcaaaagtcactatggggccagactgaggttggaccacacaagcactccaagctgggccaatcccaaccgctggtgaagccgcacagcacggagtagccatccacataggcctgggccacatggtactcaagcagaggttttccacagtactctttctcctcacaaacaaaccccagctctcccgggtaaacattttagaaaaaacatccgggttggtgtactnttgtaaaacgntgccatttnttattaattaggnaccaatttgtggttccccttcc

SEQ ID NO: 330609 - DNA, 583 bp, Homo Sapiens
  misc_feature (52)..(63): n is a, c, g, or t
caagccactacactcactccagcctggacgataagagcgaaactccgtctcnnnnnnnnnnnngaatccagagagcttttgtacacagggatgacacatgtgggctggaacaagggtttatgtctaatatcttatcagttcaaaatgaaactccccaattcctacaacacaaatgtgtttaatgatataatcccagttcttcagttctcttgggactctccctgcagttatgtctctgaaaaaggaattttacaagagaataaacaaaccactcaccatcctatttctaaatataaagattcttccaaccagcctgatcttgcaactcagagttaagactggggacgaaatatttggctttaagaaataagagatggcctaaatggatattttggaaaaagttagctattgaagtgttatttaaggtaagggggaaaaaaggacaaactcatgccttctgcaatatccatcctagtggacactgaatagggctattgctttctttccaatactctgggcccacatttcatcatactaaaaagacataattagttttcttacccatgtcaatggatattagata

SEQ ID NO: 330610 - DNA, 464 bp, Homo Sapiens
  misc_feature (22)..(22): n is a, c, g, or t
  misc_feature (44)..(44): n is a, c, g, or t
atctcgctgatcccaatcagcnagtactgcgcacctgccaccancagcgacaagatcggcagcatggtagacgacgttgcccgatggtctgaattaatggttttctctttaacaaggttcagccttttactctccaaaattcctgcagcaaaggccgagcacatgacaaagaacatgcccacggcgatcctcttcagggaggatgggagcaggccatgtcttctcaaaatgggatcgaccagtttgtccttcagagggatgagcaggaggatgagcacagcatcaaacatggtcagccaggctgcagggagcgtgtgaggagtggttgtaatatttgaaatttctggaatcctcaaatgaagactctgtaaaacatatgttgtctgcatttggaaatacactgtccagtaaggtatcaaagccaagaaaacagggacaatcttgaccagagctttcacatcttc

SEQ ID NO: 330611 - DNA, 351 bp, Homo Sapiens
agcagtctcctaaaaaggcgaagtcaagggaaaatcctagcgggagaaaaatccacaaggggtggggggtgtctcagaaatattcttagctgggttcaactttcctcgtttttctaagtttaaaaaatcctctcttactatttttgctcatcaaaatgctgctgctttttcagagacagccttttttgagccattccctatttagtgttttgggtaattggctgttacagtatggaatttgtggcccaaaggcagcgtggtaagttagacactaggtgcacggtgccccattgttatgaagtgtggaaactgagacgctggactagtctgatgtatctgtttcttccacca

SEQ ID NO: 330612 - DNA, 361 bp, Homo Sapiens
  misc_feature (181)..(273): n is a, c, g, or t
gaagaaatttggcagcatcactggaataaatttttgtgtaacttcccaaaattaattccctgaagaatatatctttcatttcaaatataagtacaagtatattttataaaggaagcagctagataacttttgctaaagtaacgtttaaggaaatacagggctgggtacagtggcttacacnnnnnnnnnnnnnnnnnnnnnnnnnnnnnnnnnnnnnnnnnnnnnnnnnnnnnnnnnnnnnnnnnnnnnnnnnnnnnnnnnnnnnnnnnnnnntaaataaataaatagaatagaataagctaggtatggtgatgccagctacttggtatgtagtcccagctacttgggatgctgatgtggg

SEQ ID NO: 330613 - DNA, 107 bp, Homo Sapiens
ggggtgcttccttttctgttaaccatgtgctttggtgtctgaatcccggtgggtgagggtccctgccctacctagtagctgtctcaaggagtgtacatgcccctggg

SEQ ID NO: 330614 - DNA, 390 bp, Homo Sapiens
ggctctcacacacacgtgcgtgattggttagttcgcctgtgcatatacccacctatgcccacagggaggtgtttgggggacacatgtcagagacgggcaccaacagctggccagctgaccttggcatgggagtttctgaacagtggtggagtccccacaataatggcttttagccttacccacatcctgtgcctcagtttacccctcttgtataatagagagagccttggagagactgaggacacaggagacacaggtggttgagtgttctgagatctgcagactgggaggcattatgcctgtaaaatgtaaagttaacaaaggcagaaactggtggtgggaagtggaggaggtccttaaaaagaaagatgggactgggcctggtcgtca

SEQ ID NO: 330615 - DNA, 389 bp, Homo Sapiens
  misc_feature (127)..(127): n is a, c, g, or t
  misc_feature (178)..(178): n is a, c, g, or t
  misc_feature (318)..(318): n is a, c, g, or t
  misc_feature (323)..(323): n is a, c, g, or t
  misc_feature (368)..(368): n is a, c, g, or t
tcataatagccattctaacaggtgtgagttaaagggtctgtagtactcttgcagtgtctttgctgatattctgtgtttgttttcctgttctttatttcatttatttccactctagtctttattattncttcattatttaggagtgttatttaatttccatatatttgtgatttttccnttctttttttggtctgtattgagttcctacttttaattccattgtggttggaaaacacactttgacttaatcattttaaatttattgaggttcattttatagccctaacatatttgcctgctggagggatgttccattanaaccntaagtatgttacattctgggccagggcacggtggccgcacgtctntaaatcccagtcagtttgggg

SEQ ID NO: 330616 - DNA, 346 bp, Homo Sapiens
  misc_feature (32)..(32): n is a, c, g, or t
  misc_feature (69)..(69): n is a, c, g, or t
  misc_feature (104)..(104): n is a, c, g, or t
acttaagggaatgtgtcaagtcaccccagatnataaggggcatactgagatatgaaccccctgtttganatggttgtctcatagtagatacagctatagttccnagagtcctctgctccaacagtgtggagaaggaagtcagctgagttccctgagacactccgaaactgtaagggaacatgggctccctcctgcaagagggcgaacctcatgccctggaaagtcccttggcagcgcaggatcacactcttcccaggaaacaccacagggatcggctgtgccaggagagtgggtttggggtagaattctgtcaccacgagctccacagggtcgctgggctcagacc

SEQ ID NO: 330617 - DNA, 409 bp, Homo Sapiens
  misc_feature (352)..(352): n is a, c, g, or t
  misc_feature (379)..(379): n is a, c, g, or t
ttaagtttgtaaacagaatttattagctcatataacaaaaaaagtccagaggtaaggccaatctcaagcaaggcttgatcctgtacttaaacaatttcaccaaggacttgatctctttctgcctctcaactctcccttcagtggtgtcagcttcacgtgattcctggtcatgatcccaaggcccaaggtggtcatcataaagacccagggaatactactacctttttcacattcaacaggggaattaaaacagcttctacccagcattcccataagtcttgaaattccctctgggcttcattgtcttaactcacaagatcatacctaacccagtcaccataggtgggaaagntgggagggtgtcattgggttaggtccnggggcatggtattccacccctgggggaggg

SEQ ID NO: 330618 - DNA, 555 bp, Homo Sapiens
tcattagtaagtagaagtaccataaagtatctgaaactccagtggtgattactggaatgggtgaagagtgaatagggcagggtggtgaagtaggaggaagacaatccttggcattagactctcctggctcctcacttgttagccgtgccatcctttggaggttacttcatttctctaaaggtggctttctcaactgcaaaatagccacctcttacgccctaccccgtgaggtgctgtagatcctcagcctgttgaagggttgatatgggcctggcacagagtgagccctgtggatgcctctgtatccctgtctctcttcacctgcacatgtaggcttatccaaaatgaggactagaggtaataaaattgcaccatgttgggattcctgctcaatgagtaaattttagccgctcttgtcccaaaaacagcaaaatgggtaattatgtgagataatggatatgttaatttgctttttcatagtaactattttactatctatatgtatcccataacgtcatattgtgtaccttaatatacacaatacactttatttaa

SEQ ID NO: 330619 - DNA, 904 bp, Homo Sapiens
agctcccccgcctgggaggcgttacccccggcccagaggcccaccgaggccgtgatgccctaccgcgaaaccaaagcccggaaacttttttgaaatctccaagggggggttcccgcccgggtgcacccattttctcccttttacccatttatccattccaccagctctgccagataccctaaacaagattacgcatgccagtataggatcctctacgcaccaccttgggtagattatcatccctatctctcgcttgtaatgtaccgtagatattaagatcaccctccattagactgtatacaatcatgctaccactaccgaacgacattttcaggtaataatgttgtcattaattcactgacaaatatgaaaggcaaggagaacactagaaacattttggacactttttatcatgcaagtataactaaatctattcagttaaagcttttttttgccttccacaaaccgtttttatctataatatttttcatatgcacttgggagctaattactgaaagaaacctcatggtgaaggttttgcaaattaaacaaacatcctgcaatgcatctgggctttgaatcttgatgcatgcacagtttttgaggtggttttgtttttgggttttctaagttcagaagaaagccctgtacatagtggaacaaattatgttccttcaacaaatcagcgtttcttgaaggaatgggcaaagcaggtgatacaaagtttccaaaagatgggccttccccaggtcacacatgtggtcagtgggcttccaagggttccatctgaaatgctgcaacaggacctggaaagagcgaacgctggctttgccagccctcgagccccggcttctcctcttgagtctcctgtttctgcccctcagatgaaagcagaatgagactg

SEQ ID NO: 330620 - DNA, 421 bp, Homo Sapiens
  misc_feature (313)..(313): n is a, c, g, or t
  misc_feature (370)..(370): n is a, c, g, or t
  misc_feature (379)..(379): n is a, c, g, or t
ttctgacttttgggggggcttatttttctggcttattttgcttagataacgttctcaaggttcatccacactgtaaggtgcattagaatttccttccttttgaaggctgaagagtattccattgtatgtattatactcattttgaaatttaattttactgcacaaagtaaatagaagtcttcacattaattcatcatcctataaactaatcaaactgcttgccattttactggctagccctggggacaaatgaagagtcgactcaccaatttttaatcatgttacatgtaggaactttggaggctaccacggncacttaggattggaatacttgttttgctaggcaggtcaagtcactaaagtgggatgnatttatccnctggaatccaccatccaggaggcatgctgacttgggggcaca

SEQ ID NO: 330621 - DNA, 342 bp, Homo Sapiens
  misc_feature (249)..(249): n is a, c, g, or t
  misc_feature (308)..(308): n is a, c, g, or t
tactgcacctggcctggttttttaaagtgatataaataatagattttcatagtagaaaaaagtgaaggcctgtattagcaaaagaataaaatataaatcacctctgctctcactaccaagtgataatcattgttaatagtatggggatatacttttcttctaggagtgcttttggattttaggaaaaagggggagtttgggtctacttaaaatctgcctttacaaaaaattgggagcagtgtttttgantaactttttcacatcacttgtatgtgtgtcccttcattttttaggaggtggtttgtgangtggggttcagcagtctaattttccccccatatt

SEQ ID NO: 330622 - DNA, 387 bp, Homo Sapiens
  misc_feature (34)..(34): n is a, c, g, or t
  misc_feature (42)..(42): n is a, c, g, or t
  misc_feature (55)..(58): n is a, c, g, or t
  misc_feature (66)..(67): n is a, c, g, or t
  misc_feature (78)..(78): n is a, c, g, or t
  misc_feature (166)..(166): n is a, c, g, or t
  misc_feature (202)..(202): n is a, c, g, or t
  misc_feature (282)..(282): n is a, c, g, or t
ccccccagggcccaaaggaaggaagaaaggccanccccaagntttaaaaaggtannnntaatgtgnncttaaacaccnttttaaatgagccctgacaccctgtgtttccagcatttggagacatccccccatgttaatccttttaagtgtataattacctgatacntttttgtttgtttgtttaacctaagttgtgtttaancttatgtgcagtctttataatgtatgtatgttattacagtttcaactatcatattttctttgattacatttataatttgntcttgctctgattataatgccagtgaatgttgctgaactctttgtatatgcaaattgcaagatttaaaccattctgatgcaaggataaacctttactttgactac

SEQ ID NO: 330623 - DNA, 420 bp, Homo Sapiens
  misc_feature (182)..(202): n is a, c, g, or t
  misc_feature (357)..(357): n is a, c, g, or t
  misc_feature (370)..(370): n is a, c, g, or t
aagtaagatttgactgggatacacatcatgtgatttggtggtacacactgagggagctcacatgagcttggaagcaaaataaattgaaatagcacttactaaacaactttgttgctagcactgtgcagggtccttcacatagttctcttatctagtcctcctaacaacctgatagccaccannnnnnnnnnnnnnnnnnnnnaacagagaactatccagaaaagatgaacaacttgttcaagggtcacaaaaatgggcaagtgaggggagcctaggattaggatcagagggtctaattcccaaggggtatgtttgtggatattgtgaaatatatatttgcttcttcatctccatttncctaaaggccctngggattctccggaaattgtaagggatggtcatttggtatgggtaaccgga

SEQ ID NO: 330624 - DNA, 1011 bp, Homo Sapiens
  misc_feature (824)..(824): n is a, c, g, or t
tattttttttatttgccatttattgttctgcaaagacacctcatgagcaccaggtggcgatgtcctttcacggagcaacaccaaagacttcaaaaacattccagttacaaacagaacaattcacttaggacattcacctgcctctcccagaacccccaatctaatgccggggaccacagagaaggaaaggggtcaggggtcctttcttgtaccagtgagccttcccccagttttctcatgcacacaacagtgccaataccaagacgaagtacttttgacccaagtataaaaccacagagaagaccaaaatgtacaaaaatgggaagagaatgaaaacacaaaggcacacgcagccacaaatacacaattaaccttttaggggatgagcatctgacgaggtttgtctccaatccaatttgtcatccctgggagactctgggaagggaggaaactagggctgctggtgctaagaccatgaaagggaaggcatggaatcccctacttgggccaggagagcagagcagagcttctagtgggaaaaacatctgtgtcaaaggtagtagatgcaacagggctcagctggcagggttctcactgaaatctagactgcaacctttcccaggttggcacaagacaaagggcagaggaatgctcccccgccttgccgggcacagtgttagaaaggaaattcaagatccctactgcccagaaagccacacaagaacagcacgaggatgaggtaagccctactgggcatctgcagagaggacaagaaagggggcacagacacaatcaaaagcccaggggaaaaggcttgaaggtantgaagtcgacctctccaagtggtcattgcacaggcacagcggctccctttccatcttgagtcttcttccttctgctcctggccacccccttccccacctataccttcttctccctgatgtggggaaactgatctctccccagtgcctaattccattttgaaagtctgtcttcttttcttccccacct

SEQ ID NO: 330625 - DNA, 504 bp, Homo Sapiens
tttgcaaagcaaaactatattttattaataaagtcaatggtaacatttgcttacgtattagaaatagccctgtgaaattttagctgcaaaagggaatcgtttaaaaagcactgctcaactccaagtttgacttacagacaaggtaacagccaccaaatgaaatccctcttctcctttacagctgctccttggacagagggaggcccgtcatctgggtctgaaggaggctcccaagactctgacacagaacactaaactccagggtgttctaggacagtgacaggcaagggttgttctcaatcatctcctgtctgacacgggacatccgagctaagctaatggagcaaggggcgaacaatggcctctccagcagctcctcctccttgggaccaggctcccgaccacggagcatttcagtcaaggtctagggatttgagggtggaaggagagaatttcatcactggggaggaactccctcacagaccccccagggccactcagctt

SEQ ID NO: 330626 - DNA, 506 bp, Homo Sapiens
  misc_feature (77)..(77): n is a, c, g, or t
  misc_feature (104)..(104): n is a, c, g, or t
  misc_feature (332)..(332): n is a, c, g, or t
  misc_feature (438)..(438): n is a, c, g, or t
tgtaggtaggagaagcaatggggtaccaaacacactgtaattcagccacttaacagctcacaatcactgtgtttttncttgcatacatgattaaaatgtctttncacaaaataaaagctatcctcggttctaaacagtttaacaatccctaaagggcctacaagagcatgcaataagtacttgcatttcttgacagtaattgtttccttgtataaggattcctttcatgataggcacattgaaatgaggttctccccctttgtttaaacactaatcaaacaaattctatacattacttttctcttgtaggaggtctgggccaagcatcttgnggttaatatggtaccctctatgaatgtttcctattttcatgcatgcttatgtttaaattagataggccaatttaattagtcttttaatcctgcagaacagtgatgnaagaccctcatgctgggctgatgtcatcctattcagagtctcatatcacatttccttacatgttcttt

SEQ ID NO: 330627 - DNA, 103 bp, Homo Sapiens
agggaagaaagagacagtatttgaagagacaatggctcagaattttctagaactgacaaataatactaatccaaagattcaagaagcccagtgaaacccacgg

SEQ ID NO: 330628 - DNA, 654 bp, Homo Sapiens
  misc_feature (19)..(19): n is a, c, g, or t
  misc_feature (118)..(118): n is a, c, g, or t
tcatatttcaagtgttttnattctgagcagtaggtacaaaaaataatgacatagttgtgtctaattctgtatagttcagcaccctccacaggctgtcaatctctgatttgatctactnttaccagatttaacagatccttgaatttactttactgtatatacttccttcttgctcacattgggaatcaaactaatgctggaaacatgcatcttcagacttcattgaggaattccagattgagacacgctgggatgtggaatgagtccatggttaagagaagatggattaaatggaaacaaaacaggaaacatgtgcttggcatctaatagcagttgctgagggtcattccgctcttgtagttgtgccttggattgttcgtataaaggccactgttacccgttcttcaaattcattcaggggagtataaaggtttaaaattttgacaatctgctgggtgctgagggaggtacacagggagcagatagcctctgcgtcctcctgggttttcttctttaattgcaggagctgggctgcttggatcagaggttccatggtctgaactgctccactctggtgaaggtttcttccccgaagccactcctcaagctgacttatattgtacctgagttgcatgcctgtgctccaagagcaga

SEQ ID NO: 330629 - DNA, 419 bp, Homo Sapiens
  misc_feature (310)..(310): n is a, c, g, or t
  misc_feature (324)..(324): n is a, c, g, or t
  misc_feature (404)..(404): n is a, c, g, or t
ttttcatatttcaagtgtttttattctgagcagtaggtacaaaaaataatgacatagttgtgtctaattctgtatagttcagcaccctccacaggctgtcaatctctgatttgatctacttttaccagatttaacagatccttgaatttactttactgtatatacttccttcttgctcacattgggaaatcaaactaatgctgggaaacatgcatcttcagacttcattgaggaattccagattgaggacacggctggggatgtgggattgaggtccatgggttaggaggaaggatgggattaaatgggnaaccaaaacagggnaaccatgtgcttgggcatcctaataggcagttgcttgagggggtccattcccgctcttgtaggttgtgcccggggggttnttccgtataaagggc

SEQ ID NO: 330630 - DNA, 429 bp, Homo Sapiens
acccatagccatgatctccacattaaacaacctaattatcctaaggaaaaattaacttggcaaggtagcatccactgttggttattaactaatattaataattgtcacattcatttaaaatgttggcacaagattcagtctccttctctatcccaagtaattccatgagtctggcttcagggagcatataagatattcaaccaacaacctagccttacagttctctgacctccttaaaaaataaataaatcaccaatgacctttagctccatttcactttgacacacaagctcccagggccacatcctgaactttatcatccatcacctagaagtgcttcatttctgaaataaaattcaaatgtctcatcctatgataacagtcttttactccgccagtcaccttccctttcttgcactccacctattt

SEQ ID NO: 330631 - DNA, 478 bp, Homo Sapiens
taacccgaggagccaatttaggaggggttagggttactcccctgcattgtgccggcgcccgtactgcttggcggcctaaatgtgctgcgttcacgggcgaaatggacactgccctccttcggctgggcttggtgctgctgccatcaagacagaccttagggtcaaacaagagccctaggtcagagatgtaaatagccagctgagccctggctttccccttgacttccccaccctcatgggtaaagtgaacttattaatcccaaactgttttcacatgtatactgtcaatctatcatatcaggtaatacacaaaaagtatctgtcatttatttaaagaaaattgtttctttaaaaataatgtttttgacttattatctagccttgccatcttctcttcaacctcaatttcctatttttaagatctctgttgtttaaatcttttcctgaaagtttcatttattttggtcccatattcctc

SEQ ID NO: 330632 - DNA, 646 bp, Homo Sapiens
cagcagccggagcagatttgtatttagtgtttctgagccgagcagacctcctgtgaatttcctgcttactctgttacacaaacaaattaaagaacaaaaagagaaagaagtaaaaagtgcataaaggttgcagtacaatcatcttacaaggatcccagagtatgtactttataagagcatttaacaattaagattgcccttttgcttttcaagagaagtaattacagcaactaggctaagtaaaaccggaagttcagcacccggaatctcggagctcgctggacaggcgtctccagagcctccaaaaggtgtgagctgcttgtaatagggcaggaggcgggagtaggagtcagtcttgaccaagacaaacactattcatttgttgtgtctacaatagagaaaaacacttaacaactttactccctaaggccagagaacgtagtaggttatggcgccccctgcaacggaatacttaagctgccatttacaataatgacataataatcttacttcataacctgatatgacaaaacctttaacaaggaatgaggtccagcgcctgcatttgtggcatgacactgtatacgactgtgtagacatgtgtatattgagattttcttaagggctttacatcttggttcttcca

SEQ ID NO: 330633 - DNA, 481 bp, Homo Sapiens
  misc_feature (15)..(15): n is a, c, g, or t
  misc_feature (40)..(40): n is a, c, g, or t
  misc_feature (55)..(55): n is a, c, g, or t
  misc_feature (67)..(67): n is a, c, g, or t
  misc_feature (72)..(72): n is a, c, g, or t
  misc_feature (97)..(97): n is a, c, g, or t
  misc_feature (339)..(362): n is a, c, g, or t
  misc_feature (463)..(463): n is a, c, g, or t
aacttcaaatccacnaccccccaacaaaacatttaatgantaaaatgtgcctgantttccagacccnccccncccatgaacggccttttattttaanttaacaggttttacccgtggaactttaatttctcctcacttcctggcccagtgttgccctggaagcctgttctgaacactgtgatgatgatggagcgtgtttatttacttggccaatcatcaccataagcctgttttatttttattttcttaatcacttgtagattagttctcgtcaacattgtgagtcttattgaataataaagtaatggagtcttgaattggggttgattacccttgggnnnnnnnnnnnnnnnnnnnnnnnnagaaagtcttgctccatcactcaggctgaagtggtggctcgatcttggcttactgcagcctctgccttccaggtggctgggactacaggcatgcaccacanacgccgagctgtgccgaa

SEQ ID NO: 330634 - DNA, 511 bp, Homo Sapiens
  misc_feature (16)..(16): n is a, c, g, or t
aagcgagcgaagaggngcctgctcaacattgctcatatcaagccagtcttgatcttctagctctactgccatttcttccaaatacacacaacggctagggatgccattcccgcttttcaagctgggatcactgttgtcccagagtaaataaggaagatcctttggatcatgtgattgatgttgaagttgctcacatatttcctgctgtgatcggaatgagcggctaatctcagccacagagtaatcgaattcatcccgggctctctgacacgctattatccgagtcatctggggctagctggggagttcatcagattgttgcttcagctgctctttttgggattgccgcaaactgtttgggcatcagccaggggagccaaaaaggagcaggcaaagggggttacttgaggtgttgttgttattctcctggtctgtcatttcactttaaggtatcctccatccagacctagtgggagcagcagagcctgaagtgccagcagcgacgacacga

SEQ ID NO: 330635 - DNA, 434 bp, Homo Sapiens
  misc_feature (120)..(120): n is a, c, g, or t
  misc_feature (387)..(387): n is a, c, g, or t
  misc_feature (403)..(403): n is a, c, g, or t
  misc_feature (413)..(413): n is a, c, g, or t
  misc_feature (424)..(424): n is a, c, g, or t
agggaagtaagcttctgttcagcacctgaaccctagaaaaagagccagtttgctacgatgaaggtgacatttctctggtcatttatttgagagttcgaagtcaaagtcgaggggcaccgnctttggttcatgtctaggagccctctgtcagaatccttgaagccctttaatggtctaactggcatctcttgtatcaagaagtacctttaaggtagaccttttcagggtgccctcaggaaagggccctgctcatgtttttttcctgtccccttagaccaaccccaggtgtccactgcaggggttcttgcctgttcccaaactttttccattccaggaacaaaggagaagccactttccccaggacgcaagactctcccctccattgtncggggacagcgtttgnccttttagtnggggaggttcntttacagctt

SEQ ID NO: 330636 - DNA, 448 bp, Homo Sapiens
gagctttcatatttattttgagatatataatttcaaaatatatatagtatataaacagacattcattaaaaaacaaacgaggaaaacgatgttaacataatttcagtaccctctctgaggtcagctttgaactcattcatactctgacaagctgagaatcactgtgcattctcaagcatagcacgctccacagttttaggctgcatcccccagatctgcatcacagccttcttgtagcattcttctgttggtcgatagtgagcagctaaccacagtcagaagacattggttctattgggatgagcactttattctttatttttggtctaaatgtacttaacttgagtaagtggtataaggtcctttcattagtctagatcaccagtgtatcaggagggtagtgtggggatgacagttgaggattctgaagttgactacaagggtttga

SEQ ID NO: 330637 - DNA, 331 bp, Homo Sapiens
  misc_feature (105)..(195): n is a, c, g, or t
tttactgtttccattaagtgtgcttgtgccccaaaatatttaccttgtataatatcctgtaacttgccttaaataccttccagcaaagtccagccatatttaccnnnnnnnnnnnnnnnnnnnnnnnnnnnnnnnnnnnnnnnnnnnnnnnnnnnnnnnnnnnnnnnnnnnnnnnnnnnnnnnnnnnnnnnnnnntattgttatttaaatctaaatgttataaaacaagaatttatattctagggttgatcagctagtatttaatcaaaaaggccacactcccatagcagctactctaagctgtagtagctaataaaaaatattaatgttg

SEQ ID NO: 330638 - DNA, 400 bp, Homo Sapiens
  misc_feature (186)..(186): n is a, c, g, or t
  misc_feature (283)..(283): n is a, c, g, or t
ttctggtcattgagcagtttattaccatcaacctgtccccagctttccagcacaacagccagcccacactctagacacgccttcactccagtccattctggcacctagcctcagtcttcaccctcctccctcctccacacactccttcccccagccctccaaggcagcaccagggcctgagggcancacctcagctgggggaggggagggaagacagtgagacagacagaagctgggggaaagaggagccaggggttggccccaagcttctgtaggccaccantccagggaaggagggaaagggggcagggctgaggctggggctggggttgccagggtgatgacagttcacgtggtttcagggcaggaggctttttttccagggaggtttcagggaagc

SEQ ID NO: 330639 - DNA, 385 bp, Homo Sapiens
  misc_feature (326)..(326): n is a, c, g, or t
  misc_feature (367)..(367): n is a, c, g, or t
ttattttgttttgacagcagggattatatgacacatttctttatgatctattttcctcctaggaaacaagatagcaaaagatatctagtgatactttctcaatgtagatgtaattaaattgactgctttgattaaaaggagaagagtcctcagttgggggaacagggaaggtcataggcttcagtatagactcttcaggtgggcatcagttcaccacttctaaggaatgttgtaaatgttctacaaagtttacacaaagtaaccatcccctgacctgggcaggctctatacttttaactgcttgttgcggaatccggggctgtccnggggatgctgtttcctacctgctccaacatagggtttcttncccttacgggttctttta

SEQ ID NO: 330640 - DNA, 197 bp, Homo Sapiens
ccccggtaattacatttaagtatatttacttttaaatacactgaccattccatcccagtttaattacattttattaaacattttccctccttaatgcctaaagaagcttatggttataatagtagacagaagaccttgatatcactgagagaaaagcacttttaagaagtaaaatttggccggacgtggtggctcat

SEQ ID NO: 330641 - DNA, 263 bp, Homo Sapiens
  misc_feature (16)..(16): n is a, c, g, or t
taaaccttcccctaanggttatgggaccattttaataaatgtaaacatttgaattggcccccggccccctgaacaattcccccctcctagttatggccatatcccctccctgttgcccacatttccttgttttaaaacctcagtttccttgttttcccagttgttgcctatgtataacaccccatcttgaaagagagtatataggaagttattcagataacttttgtagtagtgatattcaactatagcagtaccttaactca

SEQ ID NO: 330642 - DNA, 398 bp, Homo Sapiens
  misc_feature (50)..(50): n is a, c, g, or t
atcccagtcttctctgtttattcttctcaactacaccatgctgctttgcngtttggtttgacaaacatttccccacaattagatgcatgatgaccaagggaggaaagaaaattttcacagggtatttaaaaagctcagggaacaaaaagatcagtgcaaatcagtaaggctaacacctgaaaatgactctgcacaggtgaggaagtgggagcagaagagggaggggctggttcagggaacaggatttaatatgtcagtgaagaccctgcctctctctgtaacaagatgcctaaagaaggaatagtgggtgcttccagcccagcttccctcttgttttggggaacaacagtcatttctccggaaacctcactttgccaaggggcaggccctttccaaaa

SEQ ID NO: 330643 - DNA, 408 bp, Homo Sapiens
  misc_feature (203)..(203): n is a, c, g, or t
  misc_feature (270)..(270): n is a, c, g, or t
  misc_feature (285)..(285): n is a, c, g, or t
  misc_feature (316)..(316): n is a, c, g, or t
  misc_feature (336)..(336): n is a, c, g, or t
caaactgtcattaaattttatcattaaataagtagcaaaaggtagatactatatagcaaccttctgtgcccatggatgcaaatgaatgaattgtctttaggcttgaatttcatctggctactcaactaggggaatcatctgctcaagaaagactgatacagagagccctgcttgtctaagctgctcagggacactgggctgantcagtcagggccgtgctggtacctgctgctgctgctctctgctcagaggcatacagtgaacatcccnttgttccctttaaancagtgattctggtctcatggtgggctcacanggaggcatggattgctgcangctctgccttggtatcacactctggctttttcccaaaagaagacgccaaggccttgggccaattttggcaaa

SEQ ID NO: 330644 - DNA, 737 bp, Homo Sapiens
ttttcaaactgtcattaaattttatcattaaataagtagcaaaaggtagatactatatagcaaccttctgtgcccatggatgcaaatgaatgaattgtctttaggcttgaatttcatctggctactcaactaggggaatcatctgctcaagaaagactgatacagagagccctgctgtctaagctgctcagggacactgggctgattcagtcagggccgtgctggtacctgctgctgctgctctctgctcagaggcatacagtgaacatccctttgttccttttagaccagtgattctgttctcatggtggctcacagggaggcatggattgctgcaggctctgcctggtatcacactctgcttttccaaagagacgccaggcctgggccattttgcgaagtttagtgaggttgggtttaatctgtttttcctgttccaagtggtctatgtcagctaacggcagcatagaaggtctcccgtgagcacactggaatggcagctggcatgaggacagagcttcaataaggcggcaactttcctgtaagctcaggccatcattaaacttaatggccccatggcaggcttgggatgccaacaccttctggacagtcagtggcaatgtcccttggattgctccggtggtctggagtagctccagttgttctcggataaattcctttagctctcaccccatctctcttcttctgtgtgtagccaaagttcgctgtgccgaaat

SEQ ID NO: 330645 - DNA, 394 bp, Homo Sapiens
  misc_feature (31)..(31): n is a, c, g, or t
  misc_feature (38)..(38): n is a, c, g, or t
  misc_feature (44)..(44): n is a, c, g, or t
  misc_feature (58)..(58): n is a, c, g, or t
  misc_feature (63)..(63): n is a, c, g, or t
  misc_feature (68)..(68): n is a, c, g, or t
  misc_feature (90)..(90): n is a, c, g, or t
acaaactggcctaaccaggggggatccatantaaaacngacaancagtttcctaaaangttanccccngaaagggaatggaatagagtanttttagctgtaagaacctacccagtctgttttttccctttgaaaaaaactaatgtttgagatttgtgtcttttcatctgaagcagttactccattaatagtaaagatgcctcgggaaagtcagtgaaccagaatcgtgctcttgaccactgagggtgctagactggctttgtgcatcttatttcctaagaatatcagtttttattatgaccttgattataaatacctatatataggagtaggattttctctcacccaaccctactttaatcattatcacttaagtgtaaacctccacctccccc

SEQ ID NO: 330646 - DNA, 946 bp, Homo Sapiens
ttttaatgtttgggtaaaaatatattttcccccgctttatgtcttggcactagtgatatatgcatagattatctgttcaccactctcctaccttaacagatgccaaattaccaagcatgttgctaagtgatcactttcatatttgaaaaaatgatatgcttcacatcaatacaattactttagtttaaaaaagacaaatgtctaacatgcagcttacatatatgacaattctgcattaacaatgaaagtagattacacgacagttttagaaaacacattggttattttcaaacagcaaaatgacaaggatctacaactacagtttaaggcatatcagcatattttaaaattaagaaatagacaaagttctaatgctgttcacagcttttcaatttatttaaaaaattcccttcatacctacatacaaactagactttgtaggtcttaattcccactaaagaatgtgtcctgtcagtggaaccaggacttttcgaagctgagacctgacaattccagactcttgcaaatggcaaagcaaaggggtgggaatggacagtttttgtaggaccacacagagacagcaaggacgtgggtcggtaacagctgaaaaacctcacccaatagtttgtatgtgaaacagtcatggaaatgtcaagaaagcaaggaaaccaagtctgttcatttgaggtgcacaagatgtggattgtgtgtgttactgctggtgagtcacaaagcagagaaggaagataagtaatctgtgcccactgttacattaaataattcccattgttgaaatgccctttttggagaaaaccttaaccaattaataaagagcctaagttgggaaaacacaatctgaactgccaataaattctcatcaatgcttttccatcacattctacagtacatgtgttatggagatctaaagttcagaagaagcaaaaag

SEQ ID NO: 330647 - DNA, 318 bp, Homo Sapiens
  misc_feature (11)..(11): n is a, c, g, or t
  misc_feature (30)..(30): n is a, c, g, or t
cgtccaaaaanagaacctgtgcttaatacnaactattgctccaagctgcccatggtgagctattacagggctttatatatatatttgcttacccgtgaaaatatcttttatgttacatatacacatgtatatttcttcatcattcatataaaaacattgtttctcttaattattgaattctggaattaaaaaaatcttgaatattctatatcctgttatgttttatcattttattttaagcaaggaagaagtatgataaaaacaagtatttggggaaggttatttggcagcagggtatttcatggtgctagctctcta

SEQ ID NO: 330648 - DNA, 463 bp, Homo Sapiens
  misc_feature (21)..(21): n is a, c, g, or t
aaggcactgtgtacccttaanagttacagcctttaaaagaggtttatacctgaatatggtttggctgtctccccaacccaaacctcatcttgaattgcagctcccataatccccatgtgtccatgggagggacccatcaggaggtaactgaatcataggggcaggtttttcctgcactgttcctcatgacagtgagtaagtctccccaatatctgatggttttataaagggcagttcccctgcacatgatctcttgcctgctgacatgtaagagatgactttgcttctccttcgccttctgccatgactatgaggcctccccagtcatgtgaaccgtgagtgcattaaacctctttttcttaataaattactcagtctcgggtatatctgtattaacagtgtgaaaatgaactaatacaatatctttctccatttttaatgtgatatttgtgaacatcttaca

SEQ ID NO: 330649 - DNA, 663 bp, Homo Sapiens
  misc_feature (256)..(256): n is a, c, g, or t
  misc_feature (305)..(305): n is a, c, g, or t
  misc_feature (648)..(648): n is a, c, g, or t
gtaatctgtatgattgaaggattgagaggagtattctgcatctttttaaatggcaaaataaactgttcaggtatccactgttaaggtagaggggaatgtggtgttgcaagaagaaaattgccctgctagcacagatatgagaagacaacaactcccagagcatgcagtcagcaccattactttcccttaactccccaaggtgccctccttgcatttatctttctctcctacattgatcttcactggagaataaaanttagagacagtgaggaattgcatgtgatttgtactgggttccttggatnccacgcccctccttcctagccctgttcctcccgggctggctccatgtggccttaataaacagagggtggggggctgatgaagacatgcagagaagacttgactgcagtctgtggtgtgggctggcctgggtacaagtcagcagaggcacattccttcagttggcaatgttatgagcataataacttccttaagtgatacaggttgtagtcttgtagcctaagttctacagagcttctttaaaatgttttctaagcatgttcagcaatggcagtttactattagtaatataaatcatagaccagtcacaatgttgtttctttttaatattcccaattttcttanactaagtctctgacc

SEQ ID NO: 330650 - DNA, 231 bp, Homo Sapiens
catgccccagctaaagttcatgttttaacccataaaaataggtaatgctttagtacacatgtatgtaaataaaaatttagatattgccaaaatgaaattaagaatcttaaacaaggaccagctaagacctgcggggacatggtttcgcaaataattggaaacattaagtcatgtaaaagtagttggaaaagtatttttataatgttgaatgagtttattattactctgtgg

SEQ ID NO: 330651 - DNA, 138 bp, Homo Sapiens
  misc_feature (45)..(53): n is a, c, g, or t
ttaatgaaaaattatgaaatttatgttactgcataatggtttgannnnnnnnnaaagggattgataaatacgctttctaatttctcagttttaatatcgattattctaaatatggagagagagaatccacagggacat

SEQ ID NO: 330652 - DNA, 733 bp, Homo Sapiens
tctcaggcaagtatttattccaagcaaacacgtgggcgtggacagctatctcagagcctacgtcactcagcagagtcacacatttcaaagcaggtcacacaagtccctcatgaacagtcttccagcttcagcccttctcttgccacctctgtggtctgagctgggggagggggagggcctccgagttcccagacaaaacacaggtacctaagggcttcagctgtaggccttgggaacttggaaaagatcagcaatgtccagcagggctttgcggatgtggtttccaaagcgctgggcgttcgtctctgagcttgagaacttgctggagatgtggaagaagatcgtgttctcgcctgcaatcatgtaggaaactccatagccatcatctgctacagggccaaagccacctccagcgccccaggtgaattggggtgctgctctgggtcgaacatgcggatctgggattgggggatctggctggtggagagacgccagggttccgagagcacctcagcaaggaaaggagagctgactcctaggtacttggagaccaagtaaaggcagaagaggtgcctgtcgatccctgccccggtcatggccaggcggtacatattctggtgcttcttagcagccttctggaagagatcgtcgcaggtctgcttttgtgtgggacccctccatcatggcctgcacaaaggctgtggactcgctggtacaggaacgcacagtctca

SEQ ID NO: 330653 - DNA, 490 bp, Homo Sapiens
  misc_feature (36)..(36): n is a, c, g, or t
  misc_feature (52)..(52): n is a, c, g, or t
  misc_feature (95)..(95): n is a, c, g, or t
  misc_feature (175)..(175): n is a, c, g, or t
  misc_feature (189)..(189): n is a, c, g, or t
acccaaccccaacatccaaaaaaggtctgtgctgangaggattaattaaaanaggaaaggaaagccctctttggcagttgaagataaagaggaanggcatctgtgtccctgcctcgtccccgggccaatggaatgtcctcggtgtaaaacccgattgtaatattccatctactgnagacaggggaaaancgccttagggctggaggtgggacatgcgggcagcaatactgctctttaaggcattgagatgtttatgtatatgcacatcaaaagcacagcacttttttctctaacttgtttatgatgcagagacatttgttcacatgttttcctgcagaccctctccccactattaccctattgtcctgccacatcccgctctcccagaaatgcccgataatgatcgataaatactgagggaactcagaggctggtgccggcgcgggtcctccgtatgctgcacgcgggtcccctgcgcccacttttcctt

SEQ ID NO: 330654 - DNA, 445 bp, Homo Sapiens
ctaaaaataggactgttttaatatcaatatgtcatcaaataatccatttaagcagcagattaccaggcaaaaccaagaaacatcaatagataggagtgtaagacactgtgtagccctgcacttctctgaaacagcagatcagatttcccagtgaggacatttgcctttagagtagagttaggtgcatttgaaggctataggagctcttcagagtcatgatggtagtaattactcagtaactgctttagtgatttaaagcagagcttctcaaacatgaatgaatcacctggggcatcttgttaaatgaaggattctgggtccaacaggtctgggggtgggggcctaaaattatggcatttctgacaagtccccgggggaagtctatgggggctgggcccagggtccacactcggaataggaaggttctaaagaaatacagcattgt

SEQ ID NO: 330655 - DNA, 343 bp, Homo Sapiens
atctttcataccacatttttactgtgtctttttgtttagataggtttagatacacaaacacttactgttgtgttacaactgtctacagtactcagtatagtaacatgctgtacagatttgtagcctaggagcaataggctatatcatatagcctgggtgtgtagtaagttataccatcagtctatgatgtttgcccaatgagaaaatcatgacacatttctcagaatgtatcctgggtcgttaacggacacatgactgggtgtctatacaaagacatgaatgttcatatagttttatttgtgatagccccagaaaggaaaaggaaactcaaatgtcaatcaac

SEQ ID NO: 330656 - DNA, 425 bp, Homo Sapiens
gggagacacaaattaaacgggaaccgcggctgtcatccggggcagatttccctaaagaggtgcctatctgtcctaaacagcaagaaacatttattgtaactcatggctatggtgccttcccagattttcgggaagtaaaaggcccatgattggtgtcccccaaggcacagaaatccttatttcggaggaaaagctacacacccagccagggtggctgagaaccctgccctgaagaacaaatccaactttccctcagccacacctcaaagaatatgaacataaacagagcctcactccctacatcccccagcgaaggccacagctcaaacctgcacagtcctgaggccctgcatgttctgcctgaccctgtgtttatgtattggccacgtgcagaaatcctgcaatcaatgagagatacatttgag

SEQ ID NO: 330657 - DNA, 327 bp, Homo Sapiens
gtccaacgctgggtgctcccccagagcttcttgcctcaccgcttctgctgagggaggaatgaatactatgtcctcccagagctttgggagcttgtagcaagcagcctccccagcgcaaaatctcttggaaacctctaactgtgtctgaaacattagtgcaaatgttgcatcctatttcccatatgtccgcatgttttagaaaaaaaccctcaatttcctaaatatgcaagaaaaatcggtattgtaggacaatgtgactttttaaaaaatgttatttaaaaatcttccccacctccttttctgccctccaagactgccaaatacttg

SEQ ID NO: 330658 - DNA, 419 bp, Homo Sapiens
  misc_feature (21)..(21): n is a, c, g, or t
  misc_feature (91)..(91): n is a, c, g, or t
agcccatctccttcccccctnaacaaacgtgccatgtctacccccatacatttcccagccaacttcgctttcattccagataggagagttnccgccctgggcagggctctttcccctgcactctttccatctctggaagatatcaaattccattgcttctgtctgatttggaatgaaccgaaactcagacacaagctctggtgtgtgttctggaagctcgcactcacaccaagtccgcttgtagacagagagcagctaattccacagctgtttcataagggcatttcaattttccagaaagaatgtcatgcctgagttgtaaaacaaacaggtaccttgtaaactcctcacgaaggttgtttggttctgaagaatagtatttaactcgaaagtgtaaagcatacagcactgtgccgaat

SEQ ID NO: 330659 - DNA, 477 bp, Homo Sapiens
  misc_feature (39)..(39): n is a, c, g, or t
  misc_feature (128)..(128): n is a, c, g, or t
  misc_feature (154)..(154): n is a, c, g, or t
acctcccctcaatacaaaaaaatgtaacaaaaacattancctcctaacctaggataaaacgtaatatttgtccatccacagtttgaacattgagccaactgtgtgttttgaaattaatagaattgganagatgattttaaaaaacagcttgtgnacacatcagtcgtctccaggtaacttcggtcatggacgcagagtgattctgtgcacttaaggtttccagagggctttctatccttgggaaagccattaggggtactccacggggatcctcaggcttgggtttggaaggagatccttgcgttcctttaaagttatgaaccacacacattcccagaaacagggccactgcagtgcccaggatgaaaccagcaatcacgtccgagcagtggttccgatactcagagacccggttgaggcctgtcaggaaggctgtgcagagagttccgaggcacagcaccggcttggccagtcgac

SEQ ID NO: 330660 - DNA, 431 bp, Homo Sapiens
  misc_feature (203)..(203): n is a, c, g, or t
  misc_feature (346)..(346): n is a, c, g, or t
  misc_feature (351)..(351): n is a, c, g, or t
  misc_feature (360)..(360): n is a, c, g, or t
  misc_feature (374)..(374): n is a, c, g, or t
  misc_feature (416)..(416): n is a, c, g, or t
catgagcttcataccctgatatttggacaaaaaggtgcttattgttcaccctggctgcaggaattcattacaagaacatgggcagcagttcccatggatccctgcaataatggggtatggaaaatagttattattgagtggaaaggctgaaattcaccaacattaaccaaaatttatcatcctctttatcaaactccttcccnttggatgcttcccagtgtttaactagactccgagaattccaaaatagttacttcagacaagtttttgacagttcaatagttttctcagtgggaggaacaagatttctgtagctttttaagtctaccaacctcttatggacatncattncttggcttngacttattgtctgnattgattttttttgaggataggagtctcactctgtttagggntgggagttacagtag

SEQ ID NO: 330661 - DNA, 904 bp, Homo Sapiens
ggcacgaggggctgttttataaaactttggtgtatatctttctaaagaatatatctagcatatcacatgaaattatctgttcttatctaagcctgagggtctgagactttcatgtttgccagtttcatgaaaagaacacaccagctttctctagaacggaaagatttttcttccaaagtaaatagaatagggaaaatgtgattattttatcgtgaaacatcagcttctacatatttctgggggaaaaacagtgtgcaacatttaaagagattctaactcaagttgtctggaatgttttatttagtaaagggagtaatttctgctggaaaatgtgtgggatgaataattgtgcttatctgttccctaggttctaagctccaaactcatgccaacagctgatgatgacatggccagaagctgtgccaaatccttctgtgaaaacttcctcaaagctggcggtttgaggttagagtttcaatgtaatgttacatgagttgccgaaaatgaatatagttattttagttaattcccctgcaaagtcttgcttattcctacaaggtatcatatgactcattgtgagagtattataagaaggatgatgttcagcccttaaatatttaatcatttatactctgatattgaaacgtaggagcagccttccctcggagtggggaattcagagatgagcagagtgactgtccttggccagcagtgaataggatgctgcgacaatgtcgagattctggacaaggtatttggaaattttccttgtggggggggagcaaacggttattatgcggggtccgtcccacagtgggggttcgaatcccggcagcgtcaaaaaggtgcatccatcaggcccgggatgcaccttggttacatctgctggtccgccacggatcgt

SEQ ID NO: 330662 - DNA, 660 bp, Homo Sapiens
  misc_feature (223)..(248): n is a, c, g, or t
tattacagacaggtattgcagctgggttactgaaaataaaccccaggtccaccccaatccctcaaacgagccacagctgtggttaacaatgattcatttgcattttattatttcaccaagagaagaaacagaagttgtctggctttcttcacaccaaccaataatttcgcattttaaagtttgggatgtttttcataatgagctgaatcaaaaatctatttgnnnnnnnnnnnnnnnnnnnnnnnnnngattcaggttgtttgcacgtaaaacatcaattggtaagtttcttttgtctttgcttccattttgctggaaaaagtttgaccaagcttgcatgctaatttgtccttagttgcaagtattataggcaattttgtactttgcctaatgaaaggataacccttcttcgacaatcagaactcaacagtgattcagaagcaacatcctacccttaatactgtcagtttcgagtcatcaacatgaaaatccttgataaggttgagaagatgtcgcgaggaatcaattaattgatgtgccaagagttcagcagactattttgctttaagtttatttttgcacattgattgattaattagaatcacagctatttttctgtgtctgagtgatcatgtatgacattgactctcgaactgtcat

SEQ ID NO: 330663 - DNA, 366 bp, Homo Sapiens
  misc_feature (15)..(15): n is a, c, g, or t
  misc_feature (127)..(144): n is a, c, g, or t
cttttcatccaagangtgtctttatttccgtttgtttcccaaagatcaggttaggtaaaacaaattagttccatctcattatttgaagacagggaggtgtatgcagatggaggggaactgacctctnnnnnnnnnnnnnnnnnngcctgtgagggagctggggctatagagatggtaggctaaggggttaaacccttagagccaccagacaatgtcacttgaaaacacaaggtatgaaatataaataatagtcagctactttccttcaatccatttctaaggcagttgtgtgatccgatccaatttataaatcgattgggctaacctaattcacccttctctgctgccgctgccaccgcctatggc

SEQ ID NO: 330664 - DNA, 424 bp, Homo Sapiens
  misc_feature (12)..(12): n is a, c, g, or t
  misc_feature (308)..(308): n is a, c, g, or t
  misc_feature (316)..(316): n is a, c, g, or t
  misc_feature (380)..(380): n is a, c, g, or t
actgggagagantattgtacaataacgtctacaaaattactacttttcagcctggaatcacgtttgtgatcttctttggaacttatcaatgcaaagcttcataataacggaatgttttcctattgttgcttggattgccttaatctcttaccataactttttcatcccccaacatttaaagtttttgtatactaaaaagtaatagctatttatttaatttaaaatattttaccagctttgaagttacagtgtgtggatatctaaagatatcaatctaagctctaatctatacaggcagaagtgctggntgcttgtngaaagcagggacctgggaaatagactggggttcaagtcctaagtcaacccccactagctcaggncagataagttggattaatcactcccatggcttcaggttttcctc

SEQ ID NO: 330665 - DNA, 508 bp, Homo Sapiens
ttattagatgccagggtgaactttattttcttataaactataatgagaatgagagaaacatatagcactgaagtgctgtgtttccactttattaaatcatcacagtaaatcagaattaaagagtaaaagaggttaactggagagtcgggtggctgccatcagtggagatgtgtgctttctcggtgtggctgcctgggccgcggtgtgtcctggtgcacacacgtctgcaaggtgttcccaccacctaggaaggaacctagatgtggagcattaggaaaattaaataacaagagacagcaaaataagaatcaaatgacacgctataacttaatttaccatatttatcaaattttttccttatttacatgtactaaacattgtagacctgaaaacataaggaaacattcacttcatgtgtatgtcatatggacagactgagtgcaactaaaacgatggttgtttcatgttgaatttccctcggatgcagacgctgcccttcagtagatat

SEQ ID NO: 330666 - DNA, 538 bp, Homo Sapiens
  misc_feature (502)..(502): n is a, c, g, or t
atagacatgccccactgaaacccaactcccaatgctgatcacactaggaatattaaattatcaaaattaaaaataatttcctcacctagcacaagatactatacaatattacaaacacagacacatgaaaaaaatcaggcagtagggaaatgtacaacagctttggtgttatacaaaataacttccacaaacaactaacagtgaagcataaagttcatgttttcttaccacaggacactccactgctggatttctacttgtttcctttaacgttcttggtaaggtctgaatagccaagaaagaaagaatgtacagttcccttagtgagagctgctagggacatcatgaactgcgttccacaagggcgtcactgaaaagtcttgcctgcggcactactgctctgtgggcacgtttcctgtcgaggatcacaggcagggtccaaaataaaggtggacaactagggtttaataaatttaatatacattttggtttaaagggtggnaccatggcacattctggttttaattcccggggtttt

SEQ ID NO: 330667 - DNA, 477 bp, Homo Sapiens
tgacacccaacctggccaatactgcctttttgaagagaccaggccaggtggcttgcagagtatatgatgcatatttaatgaacacatatttgtccctagtgtccataggtttcttactaaatatccactcagcatttactgagcaatttggaagtcatagacttaggcagtggggactgaggtgggtaaatcaccttcaggttactgaaggaggtatatcaagcatgcgaaacaattagaatgcaaaggttttgtgccataaaagacctgtgttgacactgaggagggcacagaagtatccctaatttggaaaacctaatagcttctttttgtatagttaccttagagtagcaacttttccccctataaatatttaacacaatttaaaaatcatctaagtaacaaagtatgtttgacttacattttggaaataccggcagaaaaactgagcttagtttcttggagtagcttcttgat

SEQ ID NO: 330668 - DNA, 287 bp, Homo Sapiens
  misc_feature (171)..(187): n is a, c, g, or t
cctatattttatctctctgtcttccatatcatcttctgttattgttttcatctctatgccacttctttgtattctgacactttcctcagatttgtcctttatgttaatgatttagtttctttaacttttttcccctgaaagtaatgtatgttcattgaaggcaaatttagnnnnnnnnnnnnnnnnntcacctattaatccaatactgtttatgctttgtaggtactttttaagacttttttcaacaaaatgtgttttgtataatatttcgttttataaccggcaaa

SEQ ID NO: 330669 - DNA, 313 bp, Homo Sapiens
  misc_feature (124)..(124): n is a, c, g, or t
aatagaggccatggggccctcactgtgttgccccccggccggtctgaaaccttttgggcctcaagcgatccctccccaaaacgcctgggattacagtcatgagcccaccgtgcccagccctaantccctgacttcctctatacagagtcttcacttgataggcactcgtctgtagtaactcagtttgaatatctttagaaaatgtttagaatttatttgtaacaagatggtaaggaataagattatcccatatgcatttctgtagagcagaatttgatagcttagtgttcaatctttttgaaaataaatgttt

SEQ ID NO: 330670 - DNA, 400 bp, Homo Sapiens
  misc_feature (126)..(126): n is a, c, g, or t
  misc_feature (385)..(385): n is a, c, g, or t
gagacaagatctcactgtgttgcagtggtgggatcatagcttactgcagcctcaaactcctgggctcaagtgatctttctgcttcagcctcctgaataactcacaacacccagctatttatttttnctttttgtagagatggagtctctctatgctgtacaggttgatctcgaactgggcctcaggtgatcctcctgtctcagcctcccaaagcccttgattacagggcatgagccaccatgccctaggaatgatctttttaaggatataaggttcaggatcactcctctttcaaaattttaaattaatattctttctggtattttggtttgacacagggggctcactttgtcatcgggggtgggagtgtagggggactcaaatnggggctcattgtagg

SEQ ID NO: 330671 - DNA, 622 bp, Homo Sapiens
gacctgttatttattgtgcacccattgcttggggcctagccctaggccctggcggacgacccaaacatggcctccaagggcaaccttactttgtggaggtgcaagccccagagctggttacaagcatgggaagggaggagggtggcctagcaggaaggctggggaggcagtgtgtcagccggcacagccaggcgggtagcagaggccccctcttggcgggcagcctacttgcacacttggctgaacagagacaatggtggctggtccctccggcccagcctccttcctacaggcagagccccaagtccatgagtctccggaacctccctcagagaacaagcccagcttgggaggcagccagagggcaggatgaggggatttcccaggggagagcagcagagaccctctgagctgccagagatggggaaggagtccaggcaccccacaggaaggaaggtttaaggcatgtgtagaaaggagcacagaaaagtctcccgagcctgcctagcctcgcctggtcgccagcctccgtcccatccctcacaactctcctgagctgtggttcctgccaggcagacccctaagggaaactgtcgccaccttttacctctctatcctctcc

SEQ ID NO: 330672 - DNA, 447 bp, Homo Sapiens
  misc_feature (23)..(23): n is a, c, g, or t
aggggaaaccaaagtccctgganaaataaccccggcctaacttttacctaccctcccagttttacttaaaatacagtggcattatgttaaatatataactgtgccatagttaatttgtctgtgaaaaccacttaacacattatcctacataatcatcctgccatacttttaaatttgatgtaagcttgcatctctatttcctttgacaattcctgccaattcaggggtaacgttaactattaacatcagattaggtggcatgttgttaaagtatcttcattaatctgatctgtactccaaaactgctcatggattacagatctgcattggagcataggccttttcagatgtatttgtttcatggacactttgtaggagttaactgccttaggctaaatgctcagatgttcagattctgctaaaatgttaagcctcctactatagaca

SEQ ID NO: 330673 - DNA, 543 bp, Homo Sapiens
  misc_feature (319)..(319): n is a, c, g, or t
  misc_feature (494)..(494): n is a, c, g, or t
  misc_feature (500)..(500): n is a, c, g, or t
acacacatatttctagttgtagcaacatcatttgttgaaaagaccatcctttcttcctgaattcccttggcagaatcaactggtcataaatgtagtggtttatttctcggctttccattctgttcccttgatttatgtgtctgttgcctattgtggttacttgtaactttatgaataagttttgaaattggggtagtgtacagtctccatttttgttcctctttttcaaaataatgttggggttttgactatcctagggtcctttgcatttccatgtacgttttagggatcagccctgttggatttctgcagaatgggntttttgaatccctgatattttttcattcagaggtccttgtgacctctcacagagggcctgaaatgggctcactgctctttagaggttataataagcgaaggcctgctgtacaccaatgcttgatgtattagcgttcttccaggtttggcatgttgggtttaacagctagtggganacgcancaaggccagctccgggacggtaaagatgacccttgagtgcttc

SEQ ID NO: 330674 - DNA, 392 bp, Homo Sapiens
  misc_feature (174)..(338): n is a, c, g, or t
  misc_feature (368)..(368): n is a, c, g, or t
ttaaattaatagatcaaaagctgctcgcattacagagacaaccaatagtatgaaaaaaccagcatgctatcaccaaaatccaaactaagaaaaactctacaaggtaaacaacacaacttcttcaacaaatatattgtaagagggcagagagatgctgatgaaccaataggtgannnnnnnnnnnnnnnnnnnnnnnnnnnnnnnnnnnnnnnnnnnnnnnnnnnnnnnnnnnnnnnnnnnnnnnnnnnnnnnnnnnnnnnnnnnnnnnnnnnnnnnnnnnnnnnnnnnnnnnnnnnnnnnnnnnnnnnnnnnnnnnnnnnnnnnnnnnnnnnnnnnnngggccacaacaattgaaggaaatttagggntgtgtattcggcttaactggcaat

SEQ ID NO: 330675 - DNA, 376 bp, Homo Sapiens
ataactttactcatgacctcttttggaagtctgtctggaaaacatgaggcactaacacattacttggaattatcaaccatactgaaaatactctttcctgactatggtttatctacaaagagatgtgctctttgagggaaaaagttcaatttcatctttgtacttcccgcttagcctagcaaagtaaaacccaagaaaggattgctgtagaaaacaagtccttataaaacccacctccaaaacctccaaatccatctcttcttccctacccccggcaatgacggtgggctcacttacttattaggctggcagccgggggttcctgcctggcctcctaactcgtctctgtggacttgtcttggcccggcttaaccta

SEQ ID NO: 330676 - DNA, 519 bp, Homo Sapiens
  misc_feature (257)..(257): n is a, c, g, or t
ggcttttataattcttaacttgtatttagaaattttgtatctgatgtataagatcagatcataagcctaaagtagcctaaagtatcagcttcaaaatccacatgcctgatggtttccttccaaatgctgcctctgtgggtaggaagcacactctgattccactgagcctgtctctgcacggaacgaacacaaagttcggtagtcacaggacacccttgccgtgctgcataatgatgtctcactctgtccccaaggtngctttaccaagccacatcactgacgtattcattgtagttgactcagaaccactagggcacttctgtgattcacagcagtcccatgcaggaagctttaccttcagggaaagctgctgggttgagactgggaggggagtgtgactgcctgtgcatgaagtgctgaggtgagttcttggcctgtggtctgtgcttgtatacattattattatcatttaatgtatgtattttcttatgaagttaattatttgcccaatttttcttt

SEQ ID NO: 330677 - DNA, 205 bp, Homo Sapiens
ggaatgactacacctcaacgaaggttatagattagtgaggactgatgagtacaaaccagactcacacatccatcctcatcctcactcccccaccccccgggctacaatattacatatatgtcccctactcctgagggatggaaaagaggatgggtaggataagttcaaactgctttaatggctaacaaaattcacctttattcct

SEQ ID NO: 330678 - DNA, 439 bp, Homo Sapiens
  misc_feature (23)..(23): n is a, c, g, or t
  misc_feature (31)..(31): n is a, c, g, or t
  misc_feature (37)..(37): n is a, c, g, or t
  misc_feature (92)..(200): n is a, c, g, or t
tatatataatatggaatatatanattttttnaaccancaaaaaaatctttttttgggttttcttgagatgaggtcttggctgcattgctcannnnnnnnnnnnnnnnnnnnnnnnnnnnnnnnnnnnnnnnnnnnnnnnnnnnnnnnnnnnnnnnnnnnnnnnnnnnnnnnnnnnnnnnnnnnnnnnnnnnnnnnnnnnnagttgtagccttcagattgacaaaaaagcaaattgagtcttaatttttacagttctcaattatttatccatggagtattattgattataaattctctcttcaaattactgttatcctatttcatattactgttgtgattattgactctatgtaattaaaacttcattattagtaaaaatgggatttttacttactgtaattcagctagggccagggtattgaagctcatgtgctagctc

SEQ ID NO: 330679 - DNA, 442 bp, Homo Sapiens
  misc_feature (374)..(374): n is a, c, g, or t
  misc_feature (423)..(423): n is a, c, g, or t
agtcctgaagaccttcctctggagcctcagtaaatttacttaatctaactgggtccaggtgctgaggtgattacccttatcttgtctcctgctaaatcatggaggtttggggagttccttcagacccccaatcaacttgtttgtggaggcctggggagtctcttcagaccccccagtaaaacttacttaatcgtgctttaaggttcaggaaagtcctaggcaaaactcttgggcttttgttacatcccagcctttgtataaggtcactggcttttaatatttaacttaaccactcagtcagtactgaaacagttgtgatggaagcctatgttagtgagtcctgggcctgccgcaatccccactgttcaatttgncgcatggattttctattcatgcttgtatatttgttttatcatgagaatngtaggggagatgggggcat

SEQ ID NO: 330680 - DNA, 455 bp, Homo Sapiens
  misc_feature (27)..(27): n is a, c, g, or t
ttttcctccatgatcccccccttcccnaaaacctaaaagggttgttttctcctgggaaacaaaaggaatttaaaaacacttttaaaaataaacaaatgaaaatccctaatgcgaacactcaagaaacaagatggtgggcttgaaggggcccgaggggtgggaaggcaaaatgccttcgaattgaaggagctgggtgccgccttttgggaaagccgagtggagacagaagcatcgggacaggaagccctgctggagaaggctcagttccttccttgctgttccctgggggaccagggacagcacggcccctgcatttctacttctcagggccgaagacccgacctctgaccctccacccactccggtgacctgcacgctaagttgggtggtctctgactaaaacagcttaagccaagaattgggactcgactcccaggagacctagggagaattcc

SEQ ID NO: 330681 - DNA, 491 bp, Homo Sapiens
  misc_feature (27)..(27): n is a, c, g, or t
agtagagacagggttttgccatgttgncaggctggtcttgaactcctgacctcaggtgatcacccgccttggctcccaaagtgctggcattacaggcctgagcaccgcacccagccgtaattgatattttttaaaagaattatatactaaaacttcttcatttctcacaaattagtttaggcctgcctttaataagcagttcaaacccaagattcaaggaatagggattctgaaagagaggtttttgttaaggcgcattttaatatctttctttctaatttgaatttcactcaaatgagcactttaaatatggaatccaaaatgcctattttaatattaggaagtaacataaacatattgtagatgactattggaaaaagctctagttaaaaattttatggataatggattgggatagcattaagatattatggccattggttaaggtgagtaatataaaagggaagttttagccaagcttacagagaata

SEQ ID NO: 330682 - DNA, 618 bp, Homo Sapiens
aggtggaagtccccaccaaagggaacaacagcaaaagggccactgtgttggttacccagaaaacccaaggcaaagccataaacacccagtgccccgtggatggacgaatattcaaggtcacatttacatgcccaaccctcagcactggatacattattataatctatgtgaaattgagcaattccagaaccaggatagtaggagcccttctccacagtaaccaggcaatgcttattttgtttttcttgaataatttcctttattccagaagctccttgcttcatcaaattccagcttcgtatacatccatctagacgagggttaatcggtttaatgagttcactttccactttccgagggaatcctgcaaagtatactttggtttccagcaatccattttccggcttaaaaaggggtccaggtttatttatatccatcacagcttctttagctattttaatgctaatactatgttctaattcttccacagacaccatattccatagaccattattaataacatcacctccagttgtgattttggatgtatgttcattcttaagctgaacttcaatctttccaccacgaagtgcaatcaggagccacgctgagtgattc

SEQ ID NO: 330683 - DNA, 657 bp, Homo Sapiens
gccattatctattgcttatttattcaggggtggaaatattacttatatagagacatagagatgtgtaaaaatgaaacattgggaaaaaaatacaatttttcaatttcatatgaaactcaaagtataagttttggccaatatggaatgtacctacatttgtttatattagggctctaaaatccatttaaaaattgtttttctgtttttaaaaaagaaatagctgacccaccatgcaagttcgctatatatcttgcttgctcaaaatgagcattttcaggggagggctgttttttctggcccaagtctactatgattccttagaagtcgtactggccccaattgaagaaagggtttcccatgaaagagtctgacggcggcatctggatgaggggtggtccgggtaatgggaagtgagtagagaagaaggagctaagagcccaaatccttatgaaggatgacattcagttgttaaattttaaggggtatccaatggctttttccaggcactcaactaaagagcctgcggaaagaaaatccctctctacttctacaaatttgatgtagatggatttgggggaaactccgggatccacaatacagttctgagacaaaaacccgttaataccaacccaatctttgctgaaggttttggtattc

SEQ ID NO: 330684 - DNA, 293 bp, Homo Sapiens
  misc_feature (153)..(162): n is a, c, g, or t
atatttgggattttccacattttcccccctacccttgggagtttttgccagtaaacctcaggatcaaaatagaatgtatccttcaggccctgcccgttgccaggtttaaatggcggatgaatttcctcttcctatacagtttcctggaggggnnnnnnnnnngagacttagacatattttaattataaagaaatatttcaagcaagttttcattctatacttacattccagtctatcgttgagaaaaatgaatgtcttttaatttcttcaactccatctggtcctgcacctat

SEQ ID NO: 330685 - DNA, 394 bp, Homo Sapiens
  misc_feature (368)..(368): n is a, c, g, or t
  misc_feature (375)..(375): n is a, c, g, or t
gctgttgctgaataggtttgtattcatgggaattcagtgggacaacatccagagaggaaacaggtacatgaggaagattccactccacaagatacagaacccacttctcatcctgtgctactgacattcaggttcgagaatgtattgttgcttccaaaagtaaccctcaaatgttcgaatcacaagcaacacattgctgcaagataaaaggcacatgtctgtaagacagaggtttcgaagatagttacaaaactgtccaccagcttctgtccatagtgccttcccaaagctttcataaaactgggccatggaattatggcaaggacacacgggcaaaacacttctttcacagcatccctttgcaaatngggtttngagggggaagggcttgtta

SEQ ID NO: 330686 - DNA, 415 bp, Homo Sapiens
aaacgatttgtgtttcctctagctgtgtttttgctagaggaagtaaattaaaacaagtggggcactcccttaggacgttttgcatgagcactgcacaccagcaagccgagtgaggtgattaaaggtggaagaaaacaaactccatagacttgagtacataaaattaatccctttacaccagaaaacactgaaataaaactttatggccactgatagatatttatcgattagaccagccccaaaatgtaatcttagcttctttaatctgatcaactgtgcctttagactaaagtatctctaagatgtgcttagagaaaaatttctttgcttgccaacatttttaaggactgacatcttttggtagcccaacgatatttctgttgtggctaaactgtggtacaggtacctgccccct

SEQ ID NO: 330687 - DNA, 423 bp, Homo Sapiens
cactactaagtccaactcactcataatcaccaaagggattccagcatgattctggtgtcatttttctggctttattttctagtacttcaccacatattcaatatgtactggacttaatgaactacttattgtccctataatgggccatgttctttcactttattcttttaaacatgtttgttccttttcatttgcctctggaaaacacctacttatccttcaatgctcagctcaaagatcctctcaagacagtatccggctctgctcctttcatctgaaatgactcacatagttttcgcccgtgaaatccataaagtaaatcagccacaaggtggcggcataatgccaggtaattaacggttcgaagcatgacacctgtggtttcagtttataacctagcattgatctgaaattccatcttaa

SEQ ID NO: 330688 - DNA, 648 bp, Homo Sapiens
caacagggagctacctggagccccaaacttcctctccttcccccaaagtgcaaccaggagccgacagaccaatttctcggctccctaccccttggcttggcaaacaccacaccctaatcccccaggagcctctgaagggaaggcctcgcccttagctccccagtttcccggaggccttcctcctcagacagccaggtatttgtcgaaagctggctattgctttgattcaggaacagcctctctcagcctctgtctgtctgtctttggccacagaggaaaatggaccacagaaccaactagagcatccccctcccagtgttctctgggttttaaatggggtcttttctgcccaatagtgaggcataaacaaggatagctcccaactgcctccagaaggagggggtcaggaaaaaggaaaaaagattgataaggactgggaggaggggaggaaagtagaaaagggctataaaactccctgtccttaaaaatggctctctcctaaccagacccctcacaggagctgagtccacaacccaaactgcaaaaggcaaccagacccgagaggggattaaagccatttggggtgtaactggcagatgcagcttcaaagtcagtcagtgaatcaaaccattttggttatgtgtttca

SEQ ID NO: 330689 - DNA, 743 bp, Homo Sapiens
  misc_feature (202)..(231): n is a, c, g, or t
  misc_feature (516)..(529): n is a, c, g, or t
  misc_feature (625)..(625): n is a, c, g, or t
  misc_feature (645)..(645): n is a, c, g, or t
  misc_feature (676)..(676): n is a, c, g, or t
  misc_feature (726)..(726): n is a, c, g, or t
aaaaaaggttgtggttctctctctgtgatccagtgtgcacataaacctttctctgatctttcactgccatcctctggattatgtcttctgacctgtccattttgacccattaactggaaagttgaaaaactacattaactggaaagttgaaaaactacattactttggagaataaaaccgaaagttcgtgtataccttcttnnnnnnnnnnnnnnnnnnnnnnnnnnnnnncaatagaattgcaaagatagcagttaaaattttaatctgaaaataacctttgaatctcgggctaggttatgtccatatttgaagtggtcagtgatggtttgaacattttttgcaggatgagttaaaatgcactggattatatttgggatttttgtttttggaattgtctgttttaatcacagccttaattcacaattggcaaaggcagtttactcaaaggactgggctaaatattctgtaattatgcatttttgataggaaaatgaaatttttgcaaacagacannnnnnnnnnnnnnggctgggagtgcagtggggcctggtcttgggctcactgcagcgttgaccaccggggctcaagtgatactcccgcctcagccacccagtagctggcnctacgggcacacgcacctgncccgctaatttttttgtatttttggtagagntggggtttgcctgctgcccgggtggttcactcctcagctcagcatctgcngcgtggcctcccaagtt

SEQ ID NO: 330690 - DNA, 323 bp, Homo Sapiens
  misc_feature (72)..(81): n is a, c, g, or t
  misc_feature (278)..(278): n is a, c, g, or t
  misc_feature (297)..(297): n is a, c, g, or t
cttaggtgatcctcccacctcagcctcctgagtagctaggactacaggcatgcgtcaccacatctggctaannnnnnnnnngagacagagttttgctctcgttgcccaagcttgagtgtaatggcatggtcttggctcactgcactcagctcacctctgctcccaagttcaagcgattctcctggcctcagcctctcaagtaggctgaggattacagggcacccgccaccatatccgggctaggtttttttgtatttttaggtaggagattggggttnccaccatgttgggccgggntgggttttcaaacacccgattttcag

SEQ ID NO: 330691 - DNA, 533 bp, Homo Sapiens
  misc_feature (20)..(20): n is a, c, g, or t
  misc_feature (30)..(30): n is a, c, g, or t
  misc_feature (36)..(36): n is a, c, g, or t
  misc_feature (41)..(41): n is a, c, g, or t
  misc_feature (46)..(46): n is a, c, g, or t
  misc_feature (51)..(51): n is a, c, g, or t
  misc_feature (58)..(58): n is a, c, g, or t
  misc_feature (86)..(86): n is a, c, g, or t
  misc_feature (109)..(109): n is a, c, g, or t
  misc_feature (126)..(126): n is a, c, g, or t
  misc_feature (165)..(182): n is a, c, g, or t
  misc_feature (491)..(491): n is a, c, g, or t
ccacacgggaaaacgccctngacttgaatnccgaanttaantacgncctcnacctatnggaaattttgcccctcgagccccaaaantcggccacgaggattgccttgantgccgggagttccaagncccagtcctaggccaacatagtgagacccctgccctgtnnnnnnnnnnnnnnnnnntagttggatatggtggccatgtgtcctgtaagtcccccagcccactctggaggcctaaggtgggaggatcagtagagccccaggaggtcaaggcctgcagtgggcccatgatcatgtcactgctctcccaacctgggcgacatcccagaccctgtctcaaagaaaaaagcagaagaaaaatgttcagacaaggttttgtaaaggtttgtagcatttatatttctacaagtatcaaagcttaaaattacactgaacttttggaataccttgtatctccataaaatgccctctttttaaaagtagttaacncgcagagctgtgctctatatgctttgattaccgcagtttctt

SEQ ID NO: 330692 - DNA, 504 bp, Homo Sapiens
cactttggataaaattcaacataagatttggagacgacaaataaaccaaactatagcactagatctttaaaaatcatttttaaaaaaagtataaagatttttttgagccatccaaaagaaatctggaaaatagttgggtcattgtccttccattagagctggcccactccctatgaatgagatgcccactggtgacacactctggtggaaagagcccctggcttgtgagcccaaaagtcaatgttaatacctctgtcagcttgtacaaggcaaccgaacttttcagggcctcagttttctgatggatataataaaaagatttagatgggcttattctaaattacctaaatcaatgccttgattatttttaagagttgaagtatctcaaacaaactggcttttgtctcaaaataaatgatcctgaactgaaagaaatcatgcagcaaacctatggcatttcaatgtttttagttttacttttgaggtggtggtatttttttgtcc

SEQ ID NO: 330693 - DNA, 469 bp, Homo Sapiens
  misc_feature (32)..(32): n is a, c, g, or t
  misc_feature (46)..(46): n is a, c, g, or t
  misc_feature (65)..(65): n is a, c, g, or t
  misc_feature (455)..(455): n is a, c, g, or t
caaataatcctccccagtttaaacaataaaantcctctccccaaangctggggcccaatcaaagncaacaatcctgtaatgaagcctcaacccctgtcctgaacccctaagctgggggcctgccttgccttggttaaggcaaggaaattggggtgggggtgggggctcagggaaagggtctggaccctgaagacttctgcttacaggagggtgctgggaaaaccctgccttgggctggggaatcccctctttcccacctttggggaacagggtggggagggggtaagtgggaccctgctgcctggagggctcaggtctgagcagcagggagccctcagcgcccactccagcagacctattgggaatttactacctgaagacaaattataggtctagggtcttctttgtgattttgggggagtcgaggcattggggggtgagaggtatggtctaanggtcacaagtctgg

SEQ ID NO: 330694 - DNA, 330 bp, Homo Sapiens
attccttaaaaagttaaaaaggaagggatacagattctcagtaactaaaacaatctcgtgtgcccttgaggggaaagtccttgatgtttttaagaatgtcactttattgttttttaactgaatgatatagaggtatacaattttcaaactgtttgccattttaatcaagcaatttgaaaattaaaatgtttttgtcaggcattaccaaatggcacagaatgtgataggccagcctggttttggggtcctttctctactggttgatatgcataaaaccttctaaaaatcaagaatattgccagagagcaacaggaataaagaagctaagta

SEQ ID NO: 330695 - DNA, 462 bp, Homo Sapiens
  misc_feature (386)..(386): n is a, c, g, or t
  misc_feature (419)..(419): n is a, c, g, or t
  misc_feature (450)..(450): n is a, c, g, or t
atttatcctttcaccctctctaaccccaaacccctgttatggctacctcacttttagtgacatgaactacagaaaaactctgctaaagtagtcaaactcctctatatcaagttgggaggttcaccaaatagttcactttcatcttcaaagacgatactactaatcatgccattgcttttctgtgctgaactatctgggggttgattctaatacgtaattttaataggcaactgctctcactgtgccattcacacaaatggcatcaaaataacctaacattgtgcttgccgggaaaaggcgtatatatatccctaacaacacacggcattggggaattatggcacggcatccataaaggctccagggttgacagggggaccttattnaaccacctatttttaaccagggttggttccatntttgggggcatttggtcccccggggggcccntttttccttggg

SEQ ID NO: 330696 - DNA, 373 bp, Homo Sapiens
  misc_feature (334)..(334): n is a, c, g, or t
aattttttttccagtccagtctttttatatcaattagatatgtactttttttattgaaatataattcacataccacacaattcactggtttcaattgtaccactcagtggcttttactatattcacagagctgtgccaccaaccattgccacagtacaatttcacacatcttccccagcctctcagagaaacctccatcccttttagctgtcaccctttcagctgtcaccccttaacttccctcatctcctccatctccagcccggggaaaccaagaatctactttgtgcttgtatgggatttgcctgttctgggacatttcatataaatcgantcatataatatgtggggggtttttttgggtaaccagttt

SEQ ID NO: 330697 - DNA, 405 bp, Homo Sapiens
  misc_feature (191)..(191): n is a, c, g, or t
  misc_feature (359)..(359): n is a, c, g, or t
  misc_feature (372)..(372): n is a, c, g, or t
  misc_feature (381)..(381): n is a, c, g, or t
caccaacagcaataggaatagtttgccattttccttaattgtggagagaaagagctactgaaatgtctgtgactgtaagctttccttggcctagtgctgttagcagagcactgttggctcatgagtgaacatactcatttttaaatgagtctaaaatgaatacatcagtagttgggtgcctttaaggccancttgactaaatgttgtgggcatttttatttgatagtctcaatctggcagtatccagtatgggtccccaactacttcacatgtgggcttttaaaattcggcattaggttaaaaataaaacttccctttctcaggtcacacccgtcacattttaaggcgcttggggaggncacatgtggggcngataggggnactgtattttggggcaatgttggg

SEQ ID NO: 330698 - DNA, 607 bp, Homo Sapiens
  misc_feature (37)..(37): n is a, c, g, or t
  misc_feature (79)..(79): n is a, c, g, or t
ggaaaatgtgataaggccggagcttgtgtgctgggcnagaaatcacctgctgcatcctgtgctccgcaggctgggccgnagcctctgcctgcaggtttctatgctgtttcttagcacagaatccagcctagccttagccgcagtctaggccctgcttggactaggactccttgcttgaccccatctctggttcctgccctggctcctgcaccagccccagctcctgcctacatccaggcagaaatataggcaggggctcttggaagacgttccgtgctgtgacctccgagccctcctggtgggaagacagctggaaaggctgggaggagaagggaggggctgggggttcccaggagccatgcgtggcctgcagagtccattccatcatgatgctgtgcccgctatgggctgtgtccatgaccagaggctggagtgggggtgtgttagagcccctcaccgggacttgctgtgcggatgggcctgggcctccttcctacaggggctcctctgtgggtgaggggccctctggaatggcatcccatgagcttgtggcctctatctgctaccatctgtgttttatctgagtaaagttaccttacttctggaa

SEQ ID NO: 330699 - DNA, 457 bp, Homo Sapiens
  misc_feature (376)..(376): n is a, c, g, or t
  misc_feature (379)..(379): n is a, c, g, or t
  misc_feature (416)..(416): n is a, c, g, or t
  misc_feature (426)..(426): n is a, c, g, or t
  misc_feature (446)..(446): n is a, c, g, or t
cttttacatagttttaatctttttcttgctcaattcccttgactatttcacaatggaaataaaaaagaagttcttaggaccaaatcttctataaccttattacacaattgggttatttctattattttttaaatatatggaaaataatcttcataagttccctttctcccaaatagtatattgtaaatattcttatacaattaaagatgggtcagaaaaagaattctacaagaagtaaccctaaatgaaccctagtctacataacaaaagatgtacaatggtcagagatggcctgactgagggtgtcgggtaatttgggtaatgctgggttcacaaggaaatgatgggttctaaggggggctgcagggctgggagnagnaggtaccaggacacccctctctgtgggaggcccactnttctaggtanatgatccagctgggtgttancccctatgggg

SEQ ID NO: 330700 - DNA, 679 bp, Homo Sapiens
ggagttatttaaggcaaagaataaagtgaaaatcctggggtattttcaatattaagccactcaaaacattgtactgttacaatgcaagtttactgtgaactgacttttttttagatagcaatagctatttaggtttttttcccttatgatctcttcaggtcctcattgagatatagtttaggatctgtcagaagcaagccagtttgcatggaagtcattgtttcaggttcactgtgaccagatgtggtcttcctttaaattggtgttaattggaaaaagtaacacttttagaattaagaaaagctctgaatccattttctcctcgaagcaattgtgattggtctcacctcacccccactgatgtgcatgtgggaaggttctgcctttctgcatttaagtgacagcggagagctgtcctacatcccccaccctttcaggctgttttacagacactgagctgtgggactgattcacgggcatcattgaaaactgtctgagatactgcttttatcactagttgaagttggatagataacatttggtgctttaagtagttcatgtaaaatcttcatacatttcacgagtgcacttttagaaaaacaataatgtgacctgatgatgtcattctgagtttctcaactgctcagaagaaccgtggagctcttaaatttgaaattat

SEQ ID NO: 330701 - DNA, 367 bp, Homo Sapiens
ttttttaaatcttgtatgtgaaaaatgaacagcaaatgacaagagaaaatgagaccatctaatggctactgaaagggccaaaatgaacctgcagtggacactgaaagtgggggcctttgaagtaaagagtgggaagagtgacactgaatttgaccaactgtactcaggaatgaaaacaattacctcagcatttcttttcagttcctcagcttcagcttctgtgtactccatatcaaaaacatcctcatttccagagttcctgggtcagaacccaatggcatccacaaaggagttgttaaactctgaagaatacaaagacaaaatcttataaaagttcttggaatagaatggacgtggtggctcacac

SEQ ID NO: 330702 - DNA, 455 bp, Homo Sapiens
  misc_feature (400)..(400): n is a, c, g, or t
  misc_feature (415)..(415): n is a, c, g, or t
aacatagaaattgccttttgttcatttgaaaagtaagtatgttgtatctgaaaaagggctctgctctgctctccctcgcttccttgtaaccaatctccaaacgaatctctcctggcaccgcccccttccttatatagggtcactgtccccggggccacctctgcctccaccctgctgtcaccactgccctgggccaaggcacccaggtactcccagaaagcgcgagagccagcaataaggccccactcagccttgaggactggtgggtcacaacttccctgtcagagttcgcctgctggggttgaagggggcaatgggattgtcattgtttgaaattgtttgggttcaggttattagggtgggaatttgggaagtagaaagtgatttgaccatgttggcntccttgggtaggttnctgtaaattaacaattgggaacagaggggcataacccccg

SEQ ID NO: 330703 - DNA, 647 bp, Homo Sapiens
  misc_feature (415)..(415): n is a, c, g, or t
  misc_feature (434)..(435): n is a, c, g, or t
  misc_feature (438)..(438): n is a, c, g, or t
  misc_feature (543)..(543): n is a, c, g, or t
  misc_feature (555)..(555): n is a, c, g, or t
  misc_feature (605)..(605): n is a, c, g, or t
  misc_feature (628)..(628): n is a, c, g, or t
acttcccccttatttatacgtctgcatttccttccgagcttcacatctttctaaaatgcagcttggttttaaaataaaagaacattcattttgtgattctaaacaagcttcagtaaataccaccagtatagtactggtgaatttctcagcataaaatcgacatacctaaaaagttaataaaattcagctcttttccaatttcattgttatgcctattgaagtattaattgccaggtttgatttttagtgaagcttgggagtccatactttgagcagaccaagtgaagggaagaacagaaagaaactcaggagtagagtaatatcacttctcacttacaccactttcaggcacatccaaagagttcctagatacttggaaaatgtctgaaaatttttaagtaaaatactaaacttntcagtgtttagctcaactnnttnttcatttggaagtttctctccatccgaggacttaagccagttttggatttgtaagccctgagtacaatacacttcctggaggcatcctcactgctgttgaagcanaggatatgcatngggtggaaggacggcttcgaacctggggactcattatgccttgagaacanatagattgttacagccttgggtngctgcgtaatcacaagttc

SEQ ID NO: 330704 - DNA, 531 bp, Homo Sapiens
  misc_feature (51)..(51): n is a, c, g, or t
  misc_feature (80)..(80): n is a, c, g, or t
  misc_feature (130)..(130): n is a, c, g, or t
ttaatagggttcggcaagttcccactgtggcttgctgccctacatccacanttggaagaaaaagactggaatttcggttnagagattagtggaaatgaaaatgtaattttaaaatccctatccaaattcnacaaacccccacatggacccccaggttaagaatacttgtgagtgagaagggggccccatattcagagaggctggtcaggctctgttgtttgctggaacacagtaagctgtcttctgctgtagggaaaaatgagcagattgaacctaagcattaaaataaaaaaatgagcagggaaagtgtgttttccagagcaagaatgatgcccaggaacaaagcaagtcagacaggatagagtccacagtaccagagagaaagacacagattgatgtgcagctgcctgagtctacttttgaattacagattttaatccttcatgaaaccaaacaatacctccagttcttggtgtagaaacactcctatgtctttataatgttattttctcatgtaagctagtttaagta

SEQ ID NO: 330705 - DNA, 498 bp, Homo Sapiens
  misc_feature (366)..(366): n is a, c, g, or t
  misc_feature (449)..(449): n is a, c, g, or t
  misc_feature (456)..(456): n is a, c, g, or t
gccgggttccgtgcctggggatgctcgattcccagacaccatagagagtgttcctgggtttgagaaggtcgtattttgagatctcaactgtaggggactccttgacttagtccagtgctttcctcttggccaagatcctgagagcatttccttcctctctgtgcctctgtgtcagcgttgagggtactgaggctcaaggctgtcctgctccacgtcatgcggtttgtcccaggggctgttggctgagccccagtgctctgaccagggtttgagcagcaggattagatagggaggcaggggacattgcctctttcggggttcaggacagaaagtcgaagtcgccgtcttcccagggtgtgcggaagncctggggactttccttttggagtgcaaacaggaggctgcttggcctttcccagcattgaagggagaggacatgggggcttctntttcctnttgttctgagttgggaaaggagttttgagggttgggcccgca

SEQ ID NO: 330706 - DNA, 436 bp, Homo Sapiens
  misc_feature (91)..(91): n is a, c, g, or t
  misc_feature (313)..(313): n is a, c, g, or t
  misc_feature (319)..(319): n is a, c, g, or t
  misc_feature (333)..(333): n is a, c, g, or t
  misc_feature (361)..(361): n is a, c, g, or t
ccatttgttaaacacttatcaagcaacaagcaactactctctacatagtggtagatatgctgtgtgggagatgcagagttgaacaataggngatctttgcctttgaaaaaacagtccagtggtaggggtaagattcccgggaagaactagtctcagaggcacagataaattcttcctttgttcagcttgtcttttctcaatttcctcctccattctcttctacaacctcctccttcactcactcccactcccctaaaaccttaaacttccttaaaccaggctaagtttttgaaggcaaactcatattttaggntttctnatataatagctttnctatataaatgggaatttttctgtgggntactgtccactctggggaaatttttcggcattcaaaggaggttcttggattattttttaaaggcggctcttggtt

SEQ ID NO: 330707 - DNA, 611 bp, Homo Sapiens
  misc_feature (509)..(509): n is a, c, g, or t
  misc_feature (515)..(515): n is a, c, g, or t
  misc_feature (534)..(534): n is a, c, g, or t
  misc_feature (541)..(541): n is a, c, g, or t
  misc_feature (551)..(551): n is a, c, g, or t
attcacattcaccaatcagattcatttttatcatctcctattcctcatgagaaatacatttttttataaccttttaccttgaattcaaatccatttttcctctgaagcacctgaggtgaggtgggtatctcctcttgtcctaatcttatccacatgccatgatatggtttgtctgtgtccctacccaaatctcatcttgaatcatagctcctgtaatccccatgtgttgtgggaagaacctggtgggaggtaattgaatcagaggggtgggtttttcccatgctgttcttgtgataatgaataagtttcatgagatctgatggttttataaaggcgagttcccctgcaaaatgctctctttcctgccaccatgtaagatgtgactttgcttctcctttgcttccaccatgattgtgagtcctccccagccatgtggaactgtgagtcaattaaacctctttcctttataaattgcccagtttcaagaatgtctttattagcagtgtganaatggnccaatacgaatgggaatgnaggagtngaaacatttntccagagagcttggttaaatatctaatctgaattttgattaggtctatcaagtttttctt

SEQ ID NO: 330708 - DNA, 510 bp, Homo Sapiens
gaaaacgttttgtttcagccatgcctaaagcctggcatcatttgagttggcaaaagcatctcttcctgaaagaagagagcatccaggagtaaagctagaaacttcttccaaaggcctcttctcagcacggtggcacctcaggaactctgggggagagcctgctttcaggcccatacctcaagcgccttgatgaggaggagagaatgaagcctaggagttttgaatgtgtttttgagcagaggttaagagtcagtggttttgattttagtcccaatggattccctgttaaattattcttcctatgacagatgactccgaagcaggttctgaaagttcctttaaaaaaccttcattactattttaaggacaattatcagtcaacacttggaatttcttagcttttaaacttttcagcctcctttcacttagaaatgttggcacaccagttaacttccgagtagtgcagtatgttatatgtcacactactgactttatttaatttccagctcc

SEQ ID NO: 330709 - DNA, 279 bp, Homo Sapiens
gcggtcaggtctccctagcaatgcagaactctgagtcaactaaacctctttcctttataaattacccagtctcgagaatttcttcatagcagtgtgagaacagactaatacaacatactattgagttatcactgtatatcttatggttttatacaatttagaataatttatttttagccatgacatatgtaactataaatatgaatgtgtatttttctttgtctgtttatcattgtaactagttccagggttcttttttagggagcaacttcctttgtt

SEQ ID NO: 330710 - DNA, 401 bp, Homo Sapiens
ttataaattcccttaccttttattcatcctattcatttcaaagtgacttagagcatactgttcaataaacgtgatacaagtgtttggtacataatcacccacaagctggtactctgcaggtctgttagcatggttagtactgaaccagaggtaagagctagtcactgcactacacacgtgacaaaagtcttcttgaatccccacagtgtcactcaaactagggcttggctctttatctgcccactccaccacctgccctacaaaggggttggatccacttatcctacccaacggtctgaacttcttcctcctctctgctgcgggaagttgcccaccttccctacctgcccactgcctgaatgtgtgcttggaaggtatactacatataccagtaccaccat

SEQ ID NO: 330711 - DNA, 311 bp, Homo Sapiens
  misc_feature (22)..(22): n is a, c, g, or t
aaaaaaattagcccccagcctnggtggcacacgccctgtaatccccagctacctcagatggctgaggcaggagaactacttgaacccgggaggtcaaagctgcagtcagcccaagatcttgcccactgtactccagcctgaagagcgagactctgtctcaataatataataatagttattatttaattgcaacatgaagttggaagccattttctgttacttctttaaggagctaaatcttttatatttttgttttctctccccttgcgtttcatattttagcttatgatctaaatatatattttgtatat

SEQ ID NO: 330712 - DNA, 412 bp, Homo Sapiens
  misc_feature (12)..(12): n is a, c, g, or t
aaatagggggangccaggcccttgttccggggctcaagctttcccccgtttgttgttccgtctttggactttgccgtgtggggccttctgacaatgacctccttaatcctttatgtcgtggaatgtgtcaatcctgactttatattttttgggtcttgtatcacagttcaaatggcctccccagaacaagatgatcttttctatactttaatgggttgatgaactttagacccggacaggcatttgaagacagtcatgaatttaagtataaatattagaaataggccaggcatgatagctcacacctgtaatcctagcattttggagaaccaaggtgggcaaatcccttgagctcaggtgtttgaaaccagcctagaccacacaccaagaccctgtatttacccacccaaaa

SEQ ID NO: 330713 - DNA, 471 bp, Homo Sapiens
  misc_feature (17)..(17): n is a, c, g, or t
  misc_feature (25)..(25): n is a, c, g, or t
  misc_feature (43)..(43): n is a, c, g, or t
  misc_feature (268)..(268): n is a, c, g, or t
ccccgttttggtccccncactgggntggggatgggcgttgggntgtcctttgccatacctctctccaccctctctggagaagtgggcgcctgccggactgtggagacgtaaatgtaaactgtgactctaccctcgacccctgtttcttatttttcttctctggctaaaaatttttaattggatgtgtttgggggccggggggatggaagtgacttggagaatgtgtttgggatgaaataactatctccccttcctctgttcccccaanctggggagtctccccaggctgcttttcctaggaataccagtcacatagtttttatttttgtgtctgtgaaagtgccaagaacccctccccacatttgtagatccatgaccctttttataagctgtgtgtgtcctctgtattattgttattaactattttttagcatttgcctgtaagttattaaagactgataactgtaaaat

SEQ ID NO: 330714 - DNA, 355 bp, Homo Sapiens
  misc_feature (248)..(248): n is a, c, g, or t
  misc_feature (255)..(255): n is a, c, g, or t
  misc_feature (265)..(265): n is a, c, g, or t
tttttggcgaggcagtctcaaaaaacagaaacaaattcaacattcttgatttttaaacattcctcattaacggaaaggtcttcattaagaatgttcattaacatcaggaaaaaagaaatctctcaaaccttcaaccaataaatctaatagttaatggcagaacactagaaacacttgtgtcaaagaacaaggcaaagatgctataatcattcctattacttaaaactgctctagtgaaggctgaggcngggagantgggcgtgancctgagggggcgcctttggcagtggggcccggggttgcgccactggcacttccagcctgggggttacaggggcggggacttttgttttcc

SEQ ID NO: 330715 - DNA, 497 bp, Homo Sapiens
  misc_feature (81)..(81): n is a, c, g, or t
aaaattccacagttatgttccctgaaatgtccgactccacaatttcctgcctaaactgggcccttaattgaaaccctggtnctggtcctgccaacttgtaattgtccgtttaataacgtccgttagggtgttccacctgccagctggaaacagatcaacctagggagaagaggagaaaaatgttatcccatcacctgaccaccccaggactcacccaagagccccactatgtgcctagcactacactaaggtaggggtgaggatggggagggcttcaaaagaggtcttagaaatggtctattgaggactagtaactggctaggagggcaaaaataacagtagaaaaacagttctggctggggtgggctgatctcacaaaactggtggaaaaggtaaagcttaagctaaggaggagcagggtctgataaagcactgagaaacggtagggaataggggaaaagatcacagcacagagagctgggagaggccctgtgccg

SEQ ID NO: 330716 - DNA, 440 bp, Homo Sapiens
tttttttcatcattcaaacttttttatttacaataatatttaacagtctttatgggcttaaatgtagtagatatcacctgtgcatcaagcattacacttcattcctttaagatgtgcttcatcctcactcaagctgcttgccaccctccgatttctggtccagtctactcttgttactcttcaccatgtagatgaagtaggcaagggtctctttttcattcacaggtatgttcctgaagtgtcgactcacagtttctgctaactgggccttattgaagcctggtctggtctgcaacttgtagtgtcgtttataacgtcgtagggtgttcacctgcagctgggaacagatcaacctagggagaagagggagaaaaatgtttatccatcaccctgaccacccaggactcaccaagagcccactatgtgcctagcactacact

SEQ ID NO: 330717 - DNA, 489 bp, Homo Sapiens
  misc_feature (433)..(433): n is a, c, g, or t
tcctcgtcagaccccactgaatatatacaggagttccaatatctaactctgtcctacaatttaacctggagagacttaaatgtcatcctaacttctaccctctccccagatgaacgggaaagagttttttctctagcccaatctcatgtggacaactaccggcttcatgagccaggcctcccggtaaggcattagagcagttcccctgaagaggatcccccagtggaacctatcaggcagattccccagggtatagcctcagtgagattacacgatttcttgccctagttgaagggctttaaaaggcagcataggaaatctgttaattatggacggaacctgaagaaaccacccaaggaaaggttgaaaacgcagccagttcatggctcacttagcagcaatcctgagacctttacagccttggacgcagagnggccagaaggccgtcttgttctcaatatgcgttttatcactcagtccacccatttg

SEQ ID NO: 330718 - DNA, 368 bp, Homo Sapiens
  misc_feature (311)..(311): n is a, c, g, or t
  misc_feature (354)..(354): n is a, c, g, or t
ttttataacgccataaaagtatacttttattattatgcttaaaggaaaaagtagaaatgatttgcttgggctccttgaccctattcaaaaatggaaatatacaacaatacgtttctatcctatgcctgctgaggggatttttcatactcttttcagcatgcacaataatctttgggtggtgggactgattttctaattttctaaaatggacatgcgttattttaaaaacgaggcaatcttttaaggatttaagtatcaaaatcactaacatttctcagtaggatgcaaaactgatgaagtttaaatcaatnggataaacatgatttattactttgtctattaaagtagtttcancacaattggaagtt

SEQ ID NO: 330719 - DNA, 603 bp, Homo Sapiens
cttttggtttcgtatccaagctgggtgtgatatccgaggactgaagactatctttagaaaaaagaaatttctaaaaaaatttaatttgtcaataaagactcgcaggcagtggctagagcacattttgatttttgtttttcctctgcgggctctctgcttcctccgcgccccgcgtccccggcgggcgggagcgccacggtgcgtttacctgactgtggggtcccatcatgctgctaggattgtgaggtggaggctgtgcgtgcggcgagggctgtgaccccggaggaccctgtgaggccagacagtagaggcaggttatagatcacagcacatggagaagcgcagaagcagcttaaaagaacaaaaattaaaccaaaacgaagggtgggcggcgggcgtgcgggggggtgggctctggttggtgggaggtggtggagctgctgctttggtcgccggctcaacggtgtaaaacggcgagcgggagcgagagaagctgataaatacattcacagggggttgaaagaacaaaaaatgaagcacctctgtcaaagcacacgggagtacagtcctggacacagcctacccttggagcggagtttgcca

SEQ ID NO: 330720 - DNA, 233 bp, Homo Sapiens
gggaagggatccacatttggttgtgggtgctgccagttttgctttattctaaattttgtaccaaagcaactttagaataatcagaatatttcgatctaactgcttagaactataaatagcattctaaatttgagtaaatacaattttttaggttactcaagaaccagcattagtaatttctagtaaaattgtttcaaaatctacagggtacaatgattacaaattaatcttct

SEQ ID NO: 330721 - DNA, 351 bp, Homo Sapiens
  misc_feature (71)..(71): n is a, c, g, or t
tccaggctcgttcatttgtgcaacccattggttcaccccattcatttcaaaacatctgctgaagattctantctgctcaaccacttgaagcacaaagctacacagaaccctggtccctgccccgagtcagagcacactgctgccctggcagggaaccccactgtcacacacccaggctgaacatgccggaacactgcacgtgtgattccatgccccgcagaggccctggggactcactaagatgtgagcggaagcaacagagtcgagggaaaactcaagactgagatgggattcggtgagaggagggggttctgtgtgagaggagggcgttccgtgagaggagggggttcc

SEQ ID NO: 330722 - DNA, 1078 bp, Homo Sapiens
catcttagtttttatttcttttataacatatttgctttaaaattttcttacaaaatttattaaaaagacatacaaacaacatatgggagatgagaataagattcctctaatacaaaggcattagggtaaataatatttcaggtgctagacagcaggcatggcacatttattcaccaagaccagaatccctgggggtaatcgcttccgttttttccagcccactattattagttgtgagaagtaatttgcttgacttgctttcattctctgactccagttttgcagcctcctcccaagttagttgctagtccgttcccaagggtttctggaagctttagtgttaacactcaactcaggagggccatagtcccaacaaacaactgtggtatgaagatccaaatgctgctgaggtccacagagaacggcgccaggatgctggccaggcgacacaccatgctgccgcttcccacagccagcgatcttacaatggttggatacagctcagctgtataaagataaatgaggccaaatgctgccccgatggcaaattttccaaccatagctgtcaccacacccaaaatataatgtttctgggggatcaccataacgacaccacaggccagtgcactgcagaaaagagagtaggccaggactgttctcctcccgaccttgtcccatggcgatgcacacgaaggtgtaggcgggaatttccactacacccaggaggaagaggtttaagtattcattgcctcctaagttaacagaattcaaggaaaacgagtagaatcccaaacttccagtgaaccagattagccaaacggtaagtgtccttttcgtaatgctccagttataaaacagatatgataggttgtgcttctgaacttcagtggggctattactaacaggaccttgtaggtccagtgataaaagttctgacagtttacaggagcttgccctgttccacttggccatgatgtcaactattttttgtgcttcttcatatcgtccctctgagagaagccaaaaaggtgtctctgggagcacccaacagcacaggataaaggggacagtcactgtg

SEQ ID NO: 330723 - DNA, 432 bp, Homo Sapiens
cacattctttgttgacgtgacactaacggccaataatatgcttcttaattatcaaattatagtttcccaattgggaaactaattgggggtgggttacaaaacatttgatccttgtaaatacattgtacagaatatttattttttctcaaaatgcattttaactactacattggctgtgccaaatgagtcctctttgaatagaaagtgaacccaggggcaatgacagccattcttgtcttaggggattatgggatcggggtatggaattgtggcacacgcagccccaacaacggggcagtgggtcctctgtggctcctagggcatccagcacaggttctgggcagggcacccctgctggggtttggggggctggtctgtggcatgaatcctgggactgtggatggggaacagcccagtggcagttttaaactt

SEQ ID NO: 330724 - DNA, 480 bp, Homo Sapiens
  misc_feature (18)..(18): n is a, c, g, or t
  misc_feature (34)..(34): n is a, c, g, or t
  misc_feature (40)..(40): n is a, c, g, or t
gaatttccctcttgaaanaagagattggtgttgnacttanggtgagatatactaatggccttgaagaggccagtttccaacttgaaaaagaagatgccaggttgagcaaatcggaagaggacttccaaagaagctgatgagctctcccgtggacttactttgaacaatgttggaagaatctggctggctagtctgaactggagtggcttgagaactctgggcttccttattctcaaagttctttttgtttgcaaccctttttttagtaacctgcagaggtataaactgattgtgcacaccccctggtattcccccagccatgggcatggtcccagaatataaagtatgatggaagggcttcccaggaactggcaccgatggtccccatggcattgagccaaagagatgagacgacgaaggcattatattagcagtaggtgggggaaaggctggaggaatggttccaggtggtacagctga

SEQ ID NO: 330725 - DNA, 440 bp, Homo Sapiens
  misc_feature (394)..(394): n is a, c, g, or t
  misc_feature (419)..(419): n is a, c, g, or t
ttttttcagaaaaaagagactaatttatttgttttataaaatagaatgagcgcttagtttagataatcaagaggtgacagcttcaggtatcatcttcaccaagaataaatttgtagtgtttcatattcatttaaaggaatcaggaagaaaaattcatttaatttctgctgcctgcccagtcacttcaaaaattcttaagggaagctaaaataaaaataccttggattctggttactttttaaagtaaaaatttccagatgcctcaaaaggcagtgagttcaatttgggtgtcttgtgttctgggcaaagaacagttaagtttacaggcactggcaggtcacagttttcaaatgctgtgaccaattatttgagggttataatctggcgggctccnttttccaaatttgtgggggttaacnccgtccattcggatattggcc

SEQ ID NO: 330726 - DNA, 240 bp, Homo Sapiens
  misc_feature (139)..(200): n is a, c, g, or t
aatattttctatctacagttggttgaatcctgcagatgcagaatggcatgatacggagggctgattgtactctggcccacagcaggtgctcaaatatttgctgcatgaattaataagggaaaatagtaaggagactgannnnnnnnnnnnnnnnnnnnnnnnnnnnnnnnnnnnnnnnnnnnnnnnnnnnnnnnnnnnnngtcacgaagaatgatgatgccaatgaggctgggtgtggtg

SEQ ID NO: 330727 - DNA, 447 bp, Homo Sapiens
  misc_feature (419)..(419): n is a, c, g, or t
gtcggtttaattttcctttcctctacctgcattcccaagtaatggaaaggaggagaggtttgaatcttatcagatgctattgtcagtcccgcgttggcaacctctgtctgagaaatgtgtaacggtcaattaatttgtctctcgtttctgcagcacacaaaatatcaacataatgaacgatataacagtctgaaaacttgtctctaactggttgcagagcttgagctatgaaagtctgacaaatagttgaattattaagcattccctgaggcaatactttccactgaaacctggtgggctggttctttattatttagggctgggtataggtaaaaggcaaatttttcaaaatcctcttttgccagagggatggtaaaaaaggcaatccttcagatcaattataattaaaagggggaccnggctgggagaggggcaaccgggatggtt

SEQ ID NO: 330728 - DNA, 348 bp, Homo Sapiens
  misc_feature (22)..(22): n is a, c, g, or t
acccaggctcaagcgcagtggncaccaacatagctcactgcagcctcgacctaccgggctcaagggattctcctgccttattcctgtactaaattattttttgtgctagcttggatatgacgtactgaaaaggcctctacttagatttgactacatattaatactgtagcaactggagtttactctttacagtaaataaaatattaaagttaaaagaataattacatattttgagcttgggataggattcaggaaaaggcaccactcacataaaagggatgaaaagggacccctggtcgttttacaaacacctttaggtgctggctgctatcttggatccaataacta

SEQ ID NO: 330729 - DNA, 485 bp, Homo Sapiens
ttttaacacttaaaaagcaggctttattcaaatgcaaaattgcatgttacagggtaacctttcagtaagaagccaggaagaggagctcatcatgggttggattagtaaaggactagttataaaagaagtggtggggttgagggaggcctgagatgaaatttaaagaatatgtagaatctaggtaagtggataaaagttctgggggcaggggaaaggagagcatttcattgtgaatcaaggaatttctccacctgttttaactcttccatatgacatcaaagagatgtcacttgcagctagcatttcagtgatgttttcttactaataatatcgtgataaaagaaacattgactataagaaataggaatgggtctcgataaaaggaaacagcaaaacccccaaactaaaaaacagcgcaggctatttctctcttctctccttttgcttggcactcatgagatgctaggtgtggaagtcagccaact

SEQ ID NO: 330730 - DNA, 434 bp, Homo Sapiens
  misc_feature (385)..(385): n is a, c, g, or t
  misc_feature (408)..(408): n is a, c, g, or t
acgagccactgcacccgacctaaaacctgtacttattctaatgaccttggtggcttcccagtgccctgcaggatcagctgggggtggctgggctgggtttacctctgtcctgtggtctctgaactgatactgagcagtgtagctgctcttgagacttggaataagctaggaggaaaagagaaatattgggacatatttttaacatgcttttaaacatccctgaaacataacacagatatatgctgtaagtccacagcaacacccgaaggcccaacctctacagtggggtaacttgttctggaatgcctgtgctgggtacgagggaaaatgactgggagagaggagccgggaaaagcccagttgcacactttaccttgaattttcntcagacagttttttaagtgaggngttggggtatttgatttgcccttagg

SEQ ID NO: 330731 - DNA, 426 bp, Homo Sapiens
  misc_feature (18)..(18): n is a, c, g, or t
  misc_feature (106)..(106): n is a, c, g, or t
caatcccttgggcccccnaggggtctcacccaccccaggtcctatcgacctttaacccaggttaatcaccttaaccttcggagttgcccttcccacaaacacctangggaattgggacatctgggctaatagtaagccttatccttcccttagtgctgtcacccactctcctaaatttcagtcccccatattgataaaccattcaacatcctacctagctcactggcctttcccaaacttgcactccattacccactaggaacttgtcattacctgaaacatctccacatcagaaaagtcaaacatatcaaatgtaatgattataatgtatcaaatacaagttatgcagatctaatgcatggcatggtgactgatacaactgaaatttactaatagagtagaacttaaatgtcctgatcacagaca

SEQ ID NO: 330732 - DNA, 462 bp, Homo Sapiens
  misc_feature (31)..(31): n is a, c, g, or t
  misc_feature (52)..(52): n is a, c, g, or t
  misc_feature (76)..(76): n is a, c, g, or t
  misc_feature (97)..(97): n is a, c, g, or t
  misc_feature (111)..(111): n is a, c, g, or t
ttttccatgggtgcttagaaaaaatattctnctgtggggtgccatgtcctcngggtgtaaattagaccagtgggcnacagcttttctccctgagganccgggctgggagancctattcctactgggcctctgtgagacccagggtgggaggaggattgtgattttgcccttggcgcctggctggagtagaatgaatattactgcaagtgttttctgatgttaggccatccttctcttggtactttggctagcggagttgggcttttctcggctttttctggggtcgggtggtgggctgctctggtcctgttggctgttccaggttggaggcttctgcagcacattgtcagggatctatgggggaagtaaggaagcttggaagccaccacccgtttctcatgtcttgagggcccaggcagcccacctccttttccctcctataacatgtaatatacctgttaa

SEQ ID NO: 330733 - DNA, 767 bp, Homo Sapiens
  misc_feature (349)..(349): n is a, c, g, or t
atcaagaatagaagaaattaagaggaaaactccacagaagagcataggccacttttagccatgtaaaaataagattaagtcacaaatacaacttttgaatttacctgtcaatatctctttaggacacaaaacaatgctgaagttaatataatttctaattttaaatgtcatttaagtgtagattatgccatctaggaaggtaagtaggaaaggtaaattaaatctatttttaaaattcaaaatattaggaggtatttttcccctctaaagccttttttggtgattattctgtatctgacataattgagaaactggtaagctgtaaagattccagtgtagcttctctgangaagttgtgagccagtccataactgcttcctcacatcccatctgatttgcaccatttctgcagcaaaccccaaagcagggtgcccaatatgccagatggccatagggagtatcatcccctcagcccaaatcacttttcccatcctctaaagtttccatcctattttggaagtcatctcccaactaattgtgtctggatttagttgcctaaaattgtccttatttatttatgaagcagcaatattcagcctgaaagcatttctgccatagttgttgtagttataatcccaatggctgatttttttcattggaaagtaaatttaagtaattcgtgggatgtggtatattctgtgtcaacttcaagataatcactcattttctcgttatattcaggtctgaattaaagttaagttaatcac

SEQ ID NO: 330734 - DNA, 580 bp, Homo Sapiens
  misc_feature (112)..(112): n is a, c, g, or t
  misc_feature (131)..(131): n is a, c, g, or t
  misc_feature (562)..(562): n is a, c, g, or t
ttttaaattctttaactttatcatttataaagccatacaatgcattgcaaagaaacaaagcagctgtacaggagtggggacgcgtcagtgtacaatacattcatgtccaggntaaggagcagacaccaggntttatacacggtggcagcggctataggcacgatgatacaaaatataaagtatatttccatctatataaatacacagctggggtggggaaggatgctgggtgatcttgtttcccccgcagagggcctggggaggccagggagggtggtggggaagggatttcttccatttgttctccaatgatggggtctgaagggaggagagaaatgggggaaacacagcctgcacacactgatgtgctctcacacacacgcacaaacaaaacacagacacaggagagtttcaaacagcttaacactgattggaaaacaagcttgggacatccctctacagtaactccactgctggcaagagcccaggcgtgggatctgaacagaggtcctccaacattttggacatttgaggacagaggggccaagagggacagatcctnccgaggcctgtgccgaat

SEQ ID NO: 330735 - DNA, 402 bp, Homo Sapiens
  misc_feature (24)..(24): n is a, c, g, or t
  misc_feature (31)..(31): n is a, c, g, or t
  misc_feature (36)..(36): n is a, c, g, or t
  misc_feature (46)..(46): n is a, c, g, or t
  misc_feature (134)..(134): n is a, c, g, or t
  misc_feature (177)..(177): n is a, c, g, or t
ctgaatgtgctcctcaacaacaanacgcaanaaaanaaaaacacanaacaacaggagagtttcaaaacagctttaacactgattggaaaaacaagcttgggaacatccctctaacagtaactcccactgctggncaagagccccaggcgtgggaatatgaaacagaggtcctccaanattttggagctcactgggcccctcccccagctgaagggacatgaccctcctctgccctcttccctccagacaccccagctggacagctggtggcagcacgggactgaacctgctggggtctgcgtcgctgcgatgtccatgactccctggctctttgttgcccatcttctcccagaccctttcccatcccagcccatgttcaaggccagacagcgctctcactgg

SEQ ID NO: 330736 - DNA, 451 bp, Homo Sapiens
agaaggttcactgtatgttttaatcaggctcagactgaaataaaagtagtcaattgaaaccccaacctggaaagccatccctgctatggctgtgatttcatcatttcggcatcccgaaacattcacttagagcaacatccatgtaaacagttcgacatatggtcccctgctgtggatctgtggctagtaacagcctgggagcagcagacagacaggggacacttaaacctcagaaagcaatagcagcctctgacgccttgctcaaggcttctcatctggtggctcagtgagactttgggaggtggaagtggtgaaagtggaaagccatgaagacatagctgtctttgcactggaaaaagctcctccaactgactggccaacagcttttccctgtttgtacaacattccggctagttgtgaccatgacgtttccaattttttttgccagttc

SEQ ID NO: 330737 - DNA, 376 bp, Homo Sapiens
  misc_feature (253)..(253): n is a, c, g, or t
  misc_feature (300)..(300): n is a, c, g, or t
  misc_feature (311)..(311): n is a, c, g, or t
  misc_feature (329)..(329): n is a, c, g, or t
tcttatgtatgttttggcagctattgtcattgaaattgctttcttgatttctattttggatagttcattgttagtatgcagaaatgctactgacttttgtatgttgattttgtctcctgcagttttattgaatttattggttctaacagttttttgatggtgtctttaggattcttctgtgtataaaatcatgtcatctgcaaacaaagaaaattttacttctttctttttgatttggatgattttattgctntctcttgtctaattgttgtggctaggacttccagtactacatatatngtttgtttgtntgttcgtttgggagaggnggcttgctatgttgcacaggctgggactcaaactccgggggctcaag

SEQ ID NO: 330738 - DNA, 759 bp, Homo Sapiens
  misc_feature (716)..(716): n is a, c, g, or t
ggaaagaggttttagtgcggccgcagggagcaccacctcagcctcagggcttagtgaggacacaggccgtcctccggcggggagcacggtggggtcagggtgctgtgtggtcccgcaaagaggcagctgagcttgggcctcaggtcgttccacaccttgctcatctccttgtgcccttggatctgagagttgacgaaggcgcggaggatgtgggaggtgaggggcaggtagacgtggatgagctgcgtctcctgggtgcaggcagtacagggagaagtagttccgcagctccatcgtctgaatcgcgttctcctgctccacgatgcgggattccagctgctccacggactccggctcgcggttctgcgcggtggcgtacatcatctgcctcttcaatcaggctgtacttgtgcagggcccgctggtgcttgtgcaacacgcccttctcatgccgctcgcacaggtccttataggactgcagcagatccaagaagaggttcagcttctccaccacgtcgttctcttcctgcttaccctgttgtgcagccttgtcggcgagcagcgcgaattccacagacaggcctttcagagcctgcttcagggacccccacgtgctgctattcagagcggccaggagggcagcggggtcgtgtcagaccctattgcacttagctccttcccgaatatgagaagatctgccgcattgtcgatggccncgaccgatccgctcggccctgctgcgaagcttgtgaaagctat

SEQ ID NO: 330739 - DNA, 455 bp, Homo Sapiens
  misc_feature (344)..(344): n is a, c, g, or t
  misc_feature (422)..(422): n is a, c, g, or t
  misc_feature (439)..(439): n is a, c, g, or t
aataggataacattatttatttatttccttttatcaaagaaggtaattgatacacaacaggtgacttggttttaggcccaaaggtagcagcagcaacattaataatggaaataattgaatagttagttatgtatgttaatgccagtcaccagcaggctatttcaaggtcagaagtaatgactccatacatattatttatttctataactacatttaaatcattacccggggactgtttgttttgtagtgaaccttgagtatgtgctgttaatataccaaattggggtgaaaaaataaggggattcctttcaaaaggttaaggggaaggtaaggtgtggtaaggncattattttggcttattaaatgttcgggtaaatggggcattctcttgtccggtaaatggggggaattaggcctaaaanattggggccaaggcccnttaaggtaggggggtt

SEQ ID NO: 330740 - DNA, 306 bp, Homo Sapiens
tttttaaaaaaagccaacaacaactgaatgaaaaataggattgacaattaaagaccatagaaaaaattatcaattattaaaatcttcacaacatgcttcactatgaggaaaaactataaagctccctattacacaaggcttattcttaaaaggtttgattgtgcaataaaagacttctgaatgtttatactagttcctgactattgcatgcacaattttcttaagtacctcaatttgcaaataaacggtatgcacgtacatgcccaagaatgaatgtaaccagccttttcctccctgtgccgaaat

SEQ ID NO: 330741 - DNA, 429 bp, Homo Sapiens
  misc_feature (384)..(384): n is a, c, g, or t
  misc_feature (391)..(391): n is a, c, g, or t
  misc_feature (396)..(396): n is a, c, g, or t
  misc_feature (405)..(405): n is a, c, g, or t
ctgcaggaattcggcacggagagagtcttccaattactgtacaacctcaagctaatacgggacaggtagtcctgataccagggctcatttcgggtttggaagaggatcagtatggcatgcccctggccatcttcacaaagggatatctgtgtttgccttacatggcattgcagcagcattcatcttctctccgatgtcaccgttcgggggtttgttgctggagctactaacatcctttttcgacaacagaaacacctcagtgatgccattgtgggaagtaggaagaagctctgatccagatccatgatccagaactcaggaagctgcttaacccaaccactgcagacctaaggttcgcagactacctagttgaggcacgtggantgaggantcggngatgacgtntttcctaggatggtcacgaggttt

SEQ ID NO: 330742 - DNA, 389 bp, Homo Sapiens
ttatttcaatcatctcaatttctatgagaagcaagaggatattttaaggcctattcaacacagatagatgctacagcctatctaaagcttccaataaaatatttctcatctatgtagacataagaactccttatacctggtgtttaatattatttgttcatctcaagaggagggaataaaatgattcttcaatacagctatttaaaaaatagtcaaaattctctaaaagagttgcagatgtgaggctcaagtcctttaacatcacggaattttactttctgagttcgtaacacaaggcaaccaggggctgggaccaactttaaaggtatgtgttatgtccgggattgttaggaaattttgggggggctgctggcacaggattgcctggc

SEQ ID NO: 330743 - DNA, 421 bp, Homo Sapiens
  misc_feature (366)..(366): n is a, c, g, or t
  misc_feature (372)..(372): n is a, c, g, or t
  misc_feature (403)..(403): n is a, c, g, or t
gtaaaatggctgctccggctgctctttttggctggtcttaaggggcgcaaatagctccaccccatttggaaagcacttggcaatggctgctaagactttagtgtttttcatagcttctaacctgctaagaagtagatacttgttcccattttgctgctgtgcaaacagacttgtagaggtcaagtatctcgtacaaggttacattgatggtgattgatggcgccaagatttgaacttggttgtgagtccaaagtctaggtctcccattctacccatgtgattttacacacatgcctgatataattagctcctcctcctctccagagaaggggcagctggacctttgttttccccagttcagaaatnccgggngttgagttattcagctgggggtttgagggtnggattaggatttgtttcc

SEQ ID NO: 330744 - DNA, 1011 bp, Homo Sapiens
  misc_feature (272)..(272): n is a, c, g, or t
  misc_feature (370)..(370): n is a, c, g, or t
  misc_feature (393)..(393): n is a, c, g, or t
  misc_feature (443)..(443): n is a, c, g, or t
  misc_feature (468)..(469): n is a, c, g, or t
ttcccacagttgtagattagggagtgaacaatttagagaaattttttccacaagaaccacccccccgggggggataagaggcgacaacctcggttaaacaagcccccgagggtttgttgaatttggaaggcccctcatcccttgccggtattataataaccggatccatctcaactttcctttcaatcccattacgtcacaccttgtcatgcagacggtgtggtggagctacggagtcgtgacatgacaagccccaccagcagtcggacagnaaggcaaagtcatttgcaagtacttcgtgaaagggcgctgcactggggtaaggagcgctaaaagtgggcacctctagaggcccatagccccgagagancacatgctttcagaaggttctgnagccgtggtgagggtgggtgggagtgactgtgtagtccttgtccttgtgnacactgccagatactgggagttgcnntgggtggcctgaaagactcaggttacctttcagagtgaggaggacccccagtaagatgaggacttttggttttaggggaattttttggccaaaattttcaaccaatccatatagcctgaaacgtaattatggaggttgatgtgaatgcaaagcagcagcatatcctggtgaagttattgagcttcagggttgaatggggaatgattaaagcatccaaacagaagaggaggggaggatgaggttaaccttggacttcatagcagagttcaatgtcagaagatggaccaatgaccacagagttctgaaggaaacaagtataataacccagtattagttcagccggcagcttcttaccccagtatcccaggcagcaacagacaccagcagatgtgtgctcagggcacactgcacccctgcatctgtcttgggaagaaatagatgcttcaaacaaataatgttgtgtataaaataatttgttttttcctttgagaccaagtctcactgtcactccagcctaggcgacagagcaagactctgtctca

SEQ ID NO: 330745 - DNA, 325 bp, Homo Sapiens
  misc_feature (215)..(215): n is a, c, g, or t
tttgtttgtttgcttgcttatttatttctcatgctcctagaacataagctctatgaaagtagagactttgtttggctttttcagtgctgtgatttgaacctaaaaatgtgcctgtgtcctgcacatagtattaataaatgagttaaatgagtgaaagaaataaatgtcaggctggtagtggtagctcgtgcctgtagtcccagcactttgggtgncaaggcaggcagattgcttaagggcaggagtttgagactagcctgagcaaaatggtgaaacactgcctctacaaaaaatacaaaaattagccggccatggtggtgtgcat

SEQ ID NO: 330746 - DNA, 266 bp, Homo Sapiens
  misc_feature (178)..(178): n is a, c, g, or t
ttgtcacttatttgtatccatatcctgagaaacccattaccctaatcccaaggtcaggaaggattactccctatgttctcttttgagagctttattggttttactcttatatttaagttgaatatccattttgagttagttaagttttgtatatagtatgacataggatcgagaggancttgttaatcactttttcctgatatacatcagcttcaaatgtgaagctataaatctccctgtaggtttcctgaaagccctcattatat

SEQ ID NO: 330747 - DNA, 133 bp, Homo Sapiens
tttatcaattcatctgctgatggacacttaggttgcttccaaaccttggccattgtgaacagttctgcaacaaatgtgggagtgcagatacgtctttgatatacttatttcctttcttttgggtatatgcctt

SEQ ID NO: 330748 - DNA, 451 bp, Homo Sapiens
  misc_feature (113)..(113): n is a, c, g, or t
  misc_feature (176)..(188): n is a, c, g, or t
ccctcagtgcaggttcagcattcccagtcctgacagctgcagccagcagtgcccacccccacccagacatttataaccgaggacaagccctcagttaagcagatggggggctnactcaagggggaaccttgtctattgaattgcaggggttcaaccccagcttgcaaacgatagcnnnnnnnnnnnnntacagtgtaccaggcagtgtatctgtctaggaacgcgggggccacagggtatcaggcagtgcatctaaggcctgcactttcctgtctgtgaaatggggacggtaacgactcacggcttcctacaaggttttctgaagcgacatcctgtgccaaatcatctgcagcaagtgtgcaacagacggtaggtgccacctaagaaagtgacacagcctgtgctggcgagggcttggagagaaaggccctcttaggcgagtctatttgtc

SEQ ID NO: 330749 - DNA, 416 bp, Homo Sapiens
  misc_feature (165)..(352): n is a, c, g, or t
  misc_feature (357)..(357): n is a, c, g, or t
  misc_feature (363)..(363): n is a, c, g, or t
  misc_feature (390)..(390): n is a, c, g, or t
  misc_feature (396)..(396): n is a, c, g, or t
ttggagacagggtctctgtcgcccaggctggagggcaatggagcgactgatcacggctcactgcagcctcaatctccctgggctcaggttatccttctacctcagcctcctgagtaactgggactacaagcatgcactacaatgcccagctattgtgtgtgtgtnnnnnnnnnnnnnnnnnnnnnnnnnnnnnnnnnnnnnnnnnnnnnnnnnnnnnnnnnnnnnnnnnnnnnnnnnnnnnnnnnnnnnnnnnnnnnnnnnnnnnnnnnnnnnnnnnnnnnnnnnnnnnnnnnnnnnnnnnnnnnnnnnnnnnnnnnnnnnnnnnnnnnnnnnnnnnnnnnnnnnnnnnnnnactanatatanatccacacaatatgatatccacaccgntatatnatacacacaatatgtgagac

SEQ ID NO: 330750 - DNA, 185 bp, Homo Sapiens
ttttttattagtaagacaattttatttattgctttactaattaataacaaaataaaaactttgttctaactccacgcattccaaaatagtatagtttgacctatcagagaccacagccatggcccctccactaacttttcatactttacttggaagcaagttactattacagaacattaggctgc

SEQ ID NO: 330751 - DNA, 696 bp, Homo Sapiens
  misc_feature (480)..(583): n is a, c, g, or t
aaactctccacttagttttggtgtgcagccaggtttgggaacctcttctgtaaagtaccttccatctctggtaattagttctgtgattcacccatgtagccccttggccagctctgctcccatctgcctctagcttccatggcatcttgggccactgtgctagcacttttcataccctgccctatctcacaggtaaatgagccctaccagattttatgcttgttgaggacagagactttttatcctacacagaatttatttagcccagtggcttgtgcatggttaatactcagtgtaaattattggataaatactattgtcatgaatattataaataattattccatatagaatctatgattcactttaagctattttagtaaggggagaaagaaaaggagacaagagctagcagagtacatgtgtagtattatgtggcaccatgcttcatgtaattcagatttataaggtttataagtnnnnnnnnnnnnnnnnnnnnnnnnnnnnnnnnnnnnnnnnnnnnnnnnnnnnnnnnnnnnnnnnnnnnnnnnnnnnnnnnnnnnnnnnnnnnnnnnnnnnnnnnaaatttaaatggagtcacttccacatgctatgtgatttctcctatcctctactgcttcccatgaagtgtctgaaaccaataccaaatctctacttctgtagagtcttccaagc

SEQ ID NO: 330752 - DNA, 856 bp, Homo Sapiens
tttatctccttccttaacctagaaggtatgtaggactttggaaggtcagggatattagcatagatgtcctcaattgactcttctgctctttcttctctttccactttcacagatcttataatgtcttctgttgtccgctcaattgactttagtttctttaaaatggcctcttccttcgttgagatttgcagttcagctttttcaagatcttggatctctttctcaagcctgaggatactttgttctagaacctggatctggtgctggtcttgttgattttgcttcttcatctcttcctgttcttttccgctgctgattccatctagaagccatttctccctcaaggcctttttcttcaaatgctggtgctttagtttgtcttcctctattttcagacgcttctgtgagatttcttcctgtatttttcttttatctgtgatggcctggagtcttcccttcaccagctcagcttcttccattctagaagtcaaggacagtccagacggggaagcaagtcccaaagctaccataaatcaaggagcctcctgggggagaggagcgggggtgacagaagagaagcagggagaaatccgctctttgcaccagtggagaaatagagaaattcccgacttgtcaggagcgtctccgagcagatgcacagatcaggccagacagacacatgtaatgagggtgtgctggggaggcagacgctgaggctgctggcatgagttgactgacaagtttgaacggcagcggcacaagcccttttccttcaggagctgccagctctttgttgtaatgtgcacagttagcaaggcacattttcttattaactgttccttacccaattcattat

SEQ ID NO: 330753 - DNA, 386 bp, Homo Sapiens
tcaaattttgaatcgaaaattttattgtgatttttaaaaagttaagttgttcaagaatgcatattctttagaagagcactatacatgcagggacctgggctttatcatcaccctggcaagctaaactgcctcatcaacactgtccctgcaaaagtttctgtagaagttgattcatcaattaaaagccagatccgtatatacacagctgaggaaactgccatcagttcattgctaattaccggggcaaacatttgtatttcaaagttgaccaacagggatgacaattctcaaaggctctaaaaaggttttgtcctaccaaacactaggcctaatgtatggaccgttacccatccgtggttagtaacaatcaaaggcaacacttctta

SEQ ID NO: 330754 - DNA, 223 bp, Homo Sapiens
aggaaaatcacaatgtaagaagtttcctttgtttactacgcttaattgggattccacacatgaatgaagaagagaagacggtctctcccagggtgactgggaaagggaaaaaaaggtgggttcctctgtctgtgtgctttttaatgtgcaaattagtcagagccttttccaacccaggatatcttacagttctgagtacagggtattgaagctcagtgctagc

SEQ ID NO: 330755 - DNA, 348 bp, Homo Sapiens
  misc_feature (96)..(96): n is a, c, g, or t
  misc_feature (272)..(272): n is a, c, g, or t
gaaaacggtctggaattatataatgatgacggttgtacctctttatgaatatacacccactgaattgtataatttaaaattatgaatattatggtnatgtgaattatatttcaatacaaaaatgtttaaaatggatcagatgtggtgctcatgcctgtaatcccaacactttgggaggcagaggtgggaggattgcttgaggccaggagttcaagaccaacctgggcaacatagctagactccttgtctacaaaaaaattttaaacattagnctgggtgtggcagtgcacacctgtagtcccacctactcaggaagctgaagtgggaggacctcttgaggccaagact

SEQ ID NO: 330756 - DNA, 426 bp, Homo Sapiens
  misc_feature (12)..(12): n is a, c, g, or t
  misc_feature (60)..(60): n is a, c, g, or t
  misc_feature (104)..(104): n is a, c, g, or t
taaaagccaaancagaggccaagttaacgaatatccatggggaaggccttttagttaganggattaatttagaaaacattggattctactcaacttgcctcatnatcctcaatttttgaaaaattagttattgagataatttttaaattttttcatgttattcactctcttgatttttagaaataatctttcatttaagtttgaatcataaaaatataaaattgaaatcaatttcagttcctagtttacaaattacttacacattgaaacgctaagttcaaacacagaaaacaataactggaaaggtttgcagtaaatctgaaatcaatgaaaaaagctgaaggttaattctaacttaatctttttcccccagccagattcaaagtgttctactctggaactccaagagctgctccgtctagattc

SEQ ID NO: 330757 - DNA, 517 bp, Homo Sapiens
  misc_feature (12)..(12): n is a, c, g, or t
  misc_feature (440)..(440): n is a, c, g, or t
  misc_feature (487)..(487): n is a, c, g, or t
attcggcacagntaaaaatattgcttttgaaagaactaaatccggattctggggctggaggacagataaagcagaagttgttaatggttacgaagcaaaggtttacacagtaaacaatgtgaatgtgatcaccaaaatacgcacagaacatctgaccgaggaggaaaaaaagagatataaagcagacaggaacccgctggaatctttgctgggaactgtggaacaccaatttggtgcacaaggggacctcaccacggaatgtgctactgcaaacaaccccacagccatcacgcctgatgagtacttcaatgaaggagtttgatctggaaagacagggacattgggaaggccgaaagagcttgacggtttggaacacaggaagttttaaaggcattgtttgttgggttgttgttgaaggattttcccctcttttctggttnggagcaggttctttcccttctttggacctattgggctcgaacgagtnctcttttttcaggattgaggagttttcatc

SEQ ID NO: 330758 - DNA, 525 bp, Homo Sapiens
gccatctgtcattctaaccgcctcctgtgacaataggaccatgatttccaagtgtccttcactaacttaagctggggggaaaaaaactataaaggctacagatataaatctgaatggcatattgtacatgtagaaatttgtggtgttcactttttatcagaactaaatccggattctggggctggaggacagataaagcagaagttgttaatggttacgaagcaaaggtaaaaggaaactcttaaaataagatttaatatagctatttagcttctatgcaaatgaggaatctgttcccatttttttcatgcatctgtgccatggagatgctctggggaatgagaactgtctaatgtgtctctcacttggatgtttgattttgtcttatttgactttcagaaaatgggatagcatgccctgaggaggtctgtagctatgctaaagagaaacaatatggtagagaaatgagtacaggtaccagttgttctggtaggaatgacaagctagtcattcccttaattattt

SEQ ID NO: 330759 - DNA, 506 bp, Homo Sapiens
  misc_feature (37)..(37): n is a, c, g, or t
  misc_feature (62)..(62): n is a, c, g, or t
  misc_feature (169)..(169): n is a, c, g, or t
ctcctaattgaatccacttgcaaatgctaggtaaganaatgccatttgagtctttccatttncccacctttttaaaactctcatgctgtttttccccatgttatccctgtcatgtgaacaagtgacagttttttcccttttgaatggtatttcagctagtttaggtgtnctggtggagttggtggtggccctggagagaagattggaattgtttaggggctagagaatgagcagttggacagaaatccaaaggaatgatgaacattatagaatgagcagtgagaactgcagtgagagccacggtcatctctatgtcaaataaaggcaggtggctgggtagtcacagagccaaattggggaactagacaaagaacctgagggtgatgggaagtatctggagagatggaaggatgtgacgtggaagaggtggcatctgtgccttggatgactggcacagcagtagcacagatgtggctgcttgtcagtcactgacaaccagggtattg

SEQ ID NO: 330760 - DNA, 441 bp, Homo Sapiens
  misc_feature (27)..(27): n is a, c, g, or t
  misc_feature (38)..(38): n is a, c, g, or t
  misc_feature (57)..(57): n is a, c, g, or t
  misc_feature (338)..(338): n is a, c, g, or t
atagacagagaccagaaaaaaatggancaaaggctcanccttagtaacacaactgangacagtgaaacacggtacacccatacatgtccatctactggatccaactatgcctatctgataagctatacttacaaagaatggttccaacaaacacctttgtagaacaaatattcacactgtgttatcaaatttgctgctcctccagtggcggttcaagagcttccattagctttttatttgcctcttcattatgccggctttgacaatgagttaaatgtttcttaaaacctcttgggaaatttgattcaaaattacaacgtggacatttaagtaaactnttcccatgggctgctacatgatttttaaggagagattccaaaagaaaagcctttccacagattgtgcatttgtaagggctatgaacattatgctgtgccgaaa

SEQ ID NO: 330761 - DNA, 288 bp, Homo Sapiens
  misc_feature (199)..(199): n is a, c, g, or t
gccgtaagtggagatctgaccgagtgttgtgggaacaaaaggccatggttgggagtggacttggccttctggcaaggctccacctagttataaggtcaactattttttttcccagacaacccagctctctgggttattagtagggattctacttcaggaccaagtaaattgccacacttgaaacaaaaaattagggggncaagtattaaaaggggaaggctaaggcaggggagtgaggaagtcataggcttaggacctccaggctagggtactgggctagttacaccc

SEQ ID NO: 330762 - DNA, 416 bp, Homo Sapiens
agaaaactttttgcaaaatttaattttttaaaaaataacctgctgactcactggtttgtaatggaggacagagtcctttcctagatcctcgaatttcgtgcctgtctcccaaggcacatcccccacatcccgtcacagtgctgcaggattagggaggattgcttccagctgaaagagatgggaggccataaaggctctttcttctggatgacgttggaaaggaagaaacatggagttagaaatgcttatgtctccacacgtagcctcttcctgggcaaccctggacagtctctgtctgccaaggtgatcattgtacttgcaaatttacctaacctgttgactgcctgtgttacatttactattgaaccagctagagttcaaaattaacttttgatcactgactttcagtttgaacc

SEQ ID NO: 330763 - DNA, 401 bp, Homo Sapiens
ctggaagggcaatttttctaaaatgtaaatctcatgagatttactcttctgcttcagatctttccatggccctccattaccccccaggataaagtctgaaatgatggttatggcccagaaacactgcagacctgaacttggcctacttcggatgccttgtttcccgtggctcttcctagggcctgtagctacactgatccactttgaagttctcgaataatctgcaacctctggcctttgtacctgcttctgtcacgtgtagtcttcctagttctcctccctcccacccctgacctaggtaacttttgatcattcttccaaatatattttaaaattcacttttaggggtccttcctcttgtctgacagacctgtgtgaactaccttagcgcctgcagccag

SEQ ID NO: 330764 - DNA, 359 bp, Homo Sapiens
  misc_feature (12)..(12): n is a, c, g, or t
  misc_feature (96)..(96): n is a, c, g, or t
  misc_feature (289)..(289): n is a, c, g, or t
  misc_feature (295)..(295): n is a, c, g, or t
  misc_feature (306)..(306): n is a, c, g, or t
gccctgggcggncccattcttcacacgcctgccagaagctggaggggtgctggagacccatagagctgatgggagcagctggtgcctggccttcgntcctgcgtccccagaacccaagggaacgtcatggaggccacatggggcacccggctccctcgggatggctccgctgtcacttttgaaaccccggtttccttcaacgtccacattccaggtgaccacacgtgtctcctcctcctcatcttagcttccaggtttcaccctaaccctgtaactaacctgctttgtngacttngaaaagacttngctctgtcgggaaaggagagacgggtgcctccatcacgcctgttaaccagagg

SEQ ID NO: 330765 - DNA, 430 bp, Homo Sapiens
gttcttccttggcggacttgtatttgataaagctttattactgagtcacttcgacgatgaatctgataaacttgtagaccagtttcaattacataaaaaccatctactcaataattcagctgaagtgctttccataaacaccacgttcttcttactctgggcttgtctaattaaaatatccagtccagacacatcctatttgccgtgaccacaccctgtgcccagggggtaagttctaagaccaaaccactggtgaaaatttttaaaaacactgctgggcacctgtcttaagcctccattttaatggggaagcgatggaaaggaacggaatctttaaggttcaaggggaggatctttcgggtcttagggaaaaagggtgattagggttcagggcttggcaaaatctggaaacctaccatggaaaggtagg

SEQ ID NO: 330766 - DNA, 729 bp, Homo Sapiens
  misc_feature (506)..(536): n is a, c, g, or t
cttccttggcggacttgtatttgataaagctttattactgagtcacttcgacgatgaatctgataaacttgtagaccagtttcaattacataaaaaccatctactcaataattcagctgaagtgctttccataaacaccacgttcttcttactctgggcttgtctaattaaaatatccagtccagacacatcctatttgccgtgaccacaccctgtgcccaggagtaagttctaagaccaaaccactggtgaaaatttttaaaaacactgctggcacctgtcttaagcctccattttaatgggaagcgatgaaagaacgaatcttaagttcaaggaagatctttcggtccttagaaaaaggtgattagattacaggctgcaaaaatctgaaactacatgaaagtaaggtgactacgggggccatttaatatgaactgaaaggtccggtcttggttagtgactttacaaaaacattctgagaagcttcccaattaaatgaggggccnnnnnnnnnnnnnnnnnnnnnnnnnnnnnnnggccgtgacctggaatacaactcggctatcggctcccctttgtggttcccaactcccaggtaacccccatcctgctcatgccccaatgaggaatattaattcttccactccaagactaggaaaccctccgaatgggcgggagcccccgccaccgccccgtgctgaacgtcacaaaactgggcggcgcctcttt

SEQ ID NO: 330767 - DNA, 434 bp, Homo Sapiens
  misc_feature (21)..(21): n is a, c, g, or t
  misc_feature (34)..(34): n is a, c, g, or t
  misc_feature (56)..(56): n is a, c, g, or t
  misc_feature (58)..(315): n is a, c, g, or t
tggcctcgggtaaacctgggncttccagttcaantggccgtgaatcttggcctcancnnnnnnnnnnnnnnnnnnnnnnnnnnnnnnnnnnnnnnnnnnnnnnnnnnnnnnnnnnnnnnnnnnnnnnnnnnnnnnnnnnnnnnnnnnnnnnnnnnnnnnnnnnnnnnnnnnnnnnnnnnnnnnnnnnnnnnnnnnnnnnnnnnnnnnnnnnnnnnnnnnnnnnnnnnnnnnnnnnnnnnnnnnnnnnnnnnnnnnnnnnnnnnnnnnnnnnnnnnnnnnnnnnnnnnnnnnnnnnnnnnnnnnnnnnnnnnnnnnatgaccatttgcttttcttccaactgaccaatatgttaaacttagcaacaagtttatcttggagatccatatttccagttgattaatgagtagaagttaactgaagatttgcagcttaa

SEQ ID NO: 330768 - DNA, 187 bp, Homo Sapiens
  misc_feature (21)..(21): n is a, c, g, or t
aaggacaaaaatgtttgttgncctccccaaaatccctatgttgaaaacccctaaccccccaaagcggataaatgttgggagcctagagactttgggaagtaattaggtcatgaggttagagcacctcatgaattaaattagtgcccttaaaaaaggaccccagaggcccaggagtggtggctcacac

SEQ ID NO: 330769 - DNA, 508 bp, Homo Sapiens
  misc_feature (392)..(392): n is a, c, g, or t
  misc_feature (401)..(401): n is a, c, g, or t
  misc_feature (408)..(408): n is a, c, g, or t
  misc_feature (423)..(423): n is a, c, g, or t
  misc_feature (438)..(438): n is a, c, g, or t
  misc_feature (484)..(484): n is a, c, g, or t
tcaggatctggctttctgtgaatttaggaaactcctaatagtatctttagttttccatttcttttcctttcaaagaaaaacatttttctttatctctttagaagaagtgaagagttgcttggcctaggtaaggtagctgtcttgaaatatttgaatattgtctgtttatggtgtttggacaaattaatagttaatgaaagtaaatgcaagttatagaactctaaaacctttctttataggttgcagatttggatgatgaatttgctgacttgggttttagaagaatttaggtgaggaattttgatttgttaccagctgaaaagctacaggactgccaatacataggaggtgacactaggctcaggacagccggtgcctgtggctttgtgggnaggtgcccnggaaaancaaaggggatacagncccttgttaggtgcngttacctggtacttacccttcacccgagggggtaacctggatttcngcgtgggttagggtggctatgttt

SEQ ID NO: 330770 - DNA, 355 bp, Homo Sapiens
  misc_feature (336)..(336): n is a, c, g, or t
ttttgtatgagcaccctctaaggaagcagtctttatttgcatttttagagtgaacacatatatgaaaaacactgcaacaggttgacacaatgctcagtccctttttaagtgaattcctggggagaaagtcaaggaccttagggagcagagcagtggaatgcaaacacagaaattacctatgagtcacttttgtgagccaatgacacggcctcactgcagccattccaagaagtatctttgctcacggtaaatgcaaagtaaacaaaataccacactgcatatttgaaacaaacaaatgtgacggttgcctatactgggcctcatgtgcagaagggnttttgggtcaggtcaattg

SEQ ID NO: 330771 - DNA, 406 bp, Homo Sapiens
ttagaaaaaaaatgttcaacatttattgattgatagactgttaaaatttaatgtttggaataacatttggaagtagtagactttgcattaaaaaatggcttttctttaggaaagtataatcaattattttaatgaccatagcattcatggactcaaatgctgctgccacacacaactcaagtgctggaatatttttctacagtctctctgttctacggattatcttgtaaaccagtgttcaactagttttataactgaaaagctgcacatttttcacagtacaagccgtagtttttacctgtagtttggacttctctgttagaatgtaactgcattaccagcccttttaaaggcatctatctatcaaaggaaaatttgggtgttagattttcttgggaccgtttcc

SEQ ID NO: 330772 - DNA, 452 bp, Homo Sapiens
  misc_feature (354)..(354): n is a, c, g, or t
tttgttccaaaaaatactttatttattaaacaatatatccataatctataacatgatccaaaaatactgatatacatctttacattatctaataaaaagatttacaacattatctttcctttacaaagggaacatagataataattccttgaaaataaaaatgtaacattcatgttaaagctgcatcatcgttttggatgaaacgtggttaaaggtggacaccacaaattacatacagaggaagaaagaaactccaacacaatctctcctgaatgggaacattttcttacacttcccctggcttaaaattcctctcagcacaagtattgaaggccaatcactggcttcacttanaaatttaagaaaacctttaagtcttcaatgcccataattaacatccctcacgggttttactctaaaccatggaagacctaacctaggacaggggcaga

SEQ ID NO: 330773 - DNA, 288 bp, Homo Sapiens
  misc_feature (173)..(173): n is a, c, g, or t
ttaggcacacagatcacactctcgatttcaaaatatatatgcctttactgccgttaaaagcaatgaggtaaagacagctttctaaaatctgcccttgagttgaaatattttttatgaacttatttttgaattggactcccatttaaaagcaaacattggtggagcatggtagnctcacaccctataattcccagcactttgagaggcctaagatgggaggatcacttgaggcccaggagttcaagaatagcctgggcaacatagcaagaccctgtttctacaaaaaat

SEQ ID NO: 330774 - DNA, 449 bp, Homo Sapiens
aagcttctagctgtggcctttctgcctggagagttctttcaggatcaccgtattataagcaggttactaatggtggagacggggttactgcagtaccgaagacactgggattattaaggatgttaagtgtcaagttttacagtcgcccgggacaagaacaggatggaatttttaagatgagcctttctcccagatgggatgcctcctggcagccattcacttctcagggaaactgagcatctgggcgattccatctctgaagcaacaaggggaatggggtcaaaatgagcaggtgttggactaatcttaagtagatgaatgaagagtaagtgggaagatggcagttgatgcgatgaatcttgatataatccacagctgttttcacaatttcaccagactccaggctatgatgaccttaatcctgattggaggctctctactgagaaggg

SEQ ID NO: 330775 - DNA, 541 bp, Homo Sapiens
  misc_feature (439)..(439): n is a, c, g, or t
  misc_feature (449)..(449): n is a, c, g, or t
caaagtgttgggattacaggtgtgagccaccgcaccctgcctagaaactattttaatagaaactatttgcttctattaaaatagtgcctgaatggtgggcgtctgttagcgagatggtgaactggcagatggcgcctgtgtgtcaatgcccatggccaccgtcctgctttcagacaccagttctcttccaggtaaccttctggcattttggggtttgagataccatttcctaaaggtgaattatcacaaaatactagaaataaccacataagtgtttaaaattattgttaaatacagtaagaaattcttcttcaaaagtttagcctgcttaagtttccttgtcctttgtttcctgctttcaaggccagacttccttactctctgtgtttcccctaccctggtaaacaaccttgcctggccagtccttacccatacagcncacattccanatctggctacccactctgtggatttacctcgcccgtcggaataagcctctccccaccaaaaactgatctttcccggcctttcccaccaggtg

SEQ ID NO: 330776 - DNA, 346 bp, Homo Sapiens
  misc_feature (245)..(245): n is a, c, g, or t
  misc_feature (267)..(267): n is a, c, g, or t
  misc_feature (313)..(313): n is a, c, g, or t
  misc_feature (331)..(331): n is a, c, g, or t
attttgcactaagattactgttttggagttctgggtaaaaatggcagatttgcacatataaactctactttctctccctaagaatctcactataacagtaaaggatttttcaagggcaaaaccccaaaagaatggagaacactgggggcagacaacagcaataaaatacagattctgaaaatcagatgaaaaccaagttgactcaagtcatgaggatttttaagttgaccaaaggggaaagcccnggggaccaatttgatttatgcngccaaatccccccggaacccaagggaagtgggcctgcaaaagttanctctggtaaggtgggagntgaaaaggtgagggc

SEQ ID NO: 330777 - DNA, 403 bp, Homo Sapiens
gagttttgctagaccaagaatgataaggaaaactgcttcttctttctctgtaaaagttttaggttatggaaaaaggatttgtgaggttgggcttaagctttagccaatcttggtgtgctttgccatgtctttctgtatggtcagtagcaaactttgctgcaggcctccatcttgttttacgtccttggaagtgtgacctgtaaccatgtggcaatgctttgtttagcctccgccattttacaatggtggcccaggctcaatcctagctcaggcagagtcctttctggtttgatatctatgtgacttttgctatttgtttattctcttcctccccaccaactgccttgggttttcctttctctgagcctttagtaaagtttgaaagccagaaacactgaccact

SEQ ID NO: 330778 - DNA, 462 bp, Homo Sapiens
tattcttcatttcttattcaactctatggggtaggtgttatagccactttataaatgaggatgtgaggaacagagaggttaagtaaattaccaaggtcatataactagcaaatttgatagccaggattgcagtctatgtctcctgaattccagatcccacattcctatccagtacaccatatttatgcaaactgtgcggaactctcaacctcctgattacttaagttaaaaaagtccagtggttacatatatgcatacaatgtgatataaatagagaaagcaaatatattaatgaagatgtttaaaattctatatgagtagaaaaaattctgaagatttaatagatacatctgttgtaaataggcagcccatatattctgccagagaaaggttatacattttaaaatgtgtaattagagaagcctaaaacaatggcagtttgaggccaggtgcagatgtgta

SEQ ID NO: 330779 - DNA, 502 bp, Homo Sapiens
gtctcgatgtagagacagatgaggagaagttccagatgatgtcattacagtggagcctgcatatggtacctgtgagtacaagttttcatttatgtgacgctaaagagcacaacaaaataaaaacttatttcctctagaattataccctaagtccccaagaaaattaactttcactcacaaaagattgctggcataccttaagcatcatgtgatcccaattaatcacagactgaatccccatcccattcctgatggctacactatcccaaaaatagagggataagtagatctttaaaaagctttttaattcttttaaaaactggatcattatagaggaggctttctgtttgagaacatttttatattcatccctaaagagtaaacataagtggaatttttacctctttttatttcattgataatatttaccaactaggaaatataagaaatttgattaaaacaccagtgataataggtagcttacaggtgccagtagtaaggt

SEQ ID NO: 330780 - DNA, 534 bp, Homo Sapiens
  misc_feature (392)..(392): n is a, c, g, or t
  misc_feature (412)..(412): n is a, c, g, or t
  misc_feature (420)..(420): n is a, c, g, or t
  misc_feature (459)..(459): n is a, c, g, or t
  misc_feature (492)..(492): n is a, c, g, or t
  misc_feature (510)..(510): n is a, c, g, or t
  misc_feature (521)..(521): n is a, c, g, or t
agagcacatgagcttcataccctgtgctccagctgtgctctcttgcttccagctcttaactttgccccattatttcttggctgggaatgccctttttcgaccctgtgcccccctaatattttctgcacgtggcttacagctacttattctttaagattagaagcccaaagagttactaccactactatgtgttcccattggttatctcaatcataaagacaatagcaattaaggattgcctgctctgtatcaacctcctttttttgggtgccccacttaaatattttctaattcctaccttttcttttaggccactgatgtgggggaatctgttctatggcaggacttggaccaacttctatgttggggtgtaactaggccagtacctaggngggaggtctaagctatgganttcttcantccctggccttaggccttctcttttaaatatttggcccnaattttttgtttcaagtgtgggcaatttaattnggtttgaagtaggatccnactaataaccngagagtggggtgg

SEQ ID NO: 330781 - DNA, 949 bp, Homo Sapiens
  misc_feature (819)..(819): n is a, c, g, or t
  misc_feature (842)..(842): n is a, c, g, or t
  misc_feature (880)..(880): n is a, c, g, or t
  misc_feature (921)..(921): n is a, c, g, or t
  misc_feature (939)..(939): n is a, c, g, or t
ggcacgagcatccttacatttccaaggatgcagctgtcccaaagaattcttacccatgggctgaagaatttgcattaatctaaagccaagctctcagggaagctgtgtgcatttaggaaacagcagaggattaatggaacctcctagcctgttgcctcccaacttggccttgttccctgcagcacaaattaaaatcaattgcttgcttaatatgagtctcacccttctccatcttttctctcttagatcgtaccatgaggggttttacttactgttaacttttctctcttagattgcaccatgaggggttttacttactgttaaagaatgcttgttaaagtgtggggttaactgtgctaagaaagtaatctttattcttggggtttgggaaaatgaaccacttttgggcagatctttgatgttttcagagatgctagggttagaatttctagatccttattttccagggctaacaattaaattaataaggttaaaacattttagtagtttataaacgcataggaaaaggactggatagacactaatgtcaaaagggagacatagaaaagagaatgattgtgttttactctcataggtctataatctttacaatgagaatgtgttttatattaaatagttgtgtaataaaaattcaaacaaattttattctggtcacaagcatgctttctgctctgtcccagacaacaaaaatgacccacattctctctactatgttcacttaggctcatcacactctggcctttttaaaaacaccttttgataggaaactttttggcaattttaattttttaaaaattnacccgctgactcaccgggttgtnatggggggccgggtcctttctggatccccggatttcgnggccgtctcccggggaccttccccacatcccgtcacggggngccggggttggggggggntggcttccgg

SEQ ID NO: 330782 - DNA, 385 bp, Homo Sapiens
  misc_feature (183)..(183): n is a, c, g, or t
  misc_feature (347)..(347): n is a, c, g, or t
  misc_feature (369)..(369): n is a, c, g, or t
gcttcccccagagctgtcgccatttccaaagcccagacttgggaactcacgtacctggttgtgctgaatcacgacgttcactgactgctttgtgctagtgtttctggactcccacttaggaaagacgtctctgacagtggttttccgagagcccttcccagtacagccccaggacagcgaganccccctgcccaactggtctccacctaccaccacctgggagtctgtcatcaacacagcctgtttcaccctctggacccgcctcctctgagggagtggactggaccactgaatgtcacttgttccttgaatcatggggcctaccagatttgccttgccagacgggnctttgaccaagccttcttgggnccagggggaagccaga

SEQ ID NO: 330783 - DNA, 462 bp, Homo Sapiens
  misc_feature (286)..(286): n is a, c, g, or t
  misc_feature (303)..(303): n is a, c, g, or t
  misc_feature (409)..(409): n is a, c, g, or t
  misc_feature (415)..(415): n is a, c, g, or t
  misc_feature (440)..(440): n is a, c, g, or t
  misc_feature (449)..(449): n is a, c, g, or t
gtagaagagattgagaatggtactctaatcaaaaataaagttttgtagtgggaccagaaattacttacctgacatccacccccattccccctcatcctgctggggttgaaagttccagacctgctgtcgaggccttgtgtttgtcagacacccagtgtcctcctgcaaggacgcaactgtgagctgaggtgtgagcctaggagcccagggacccctgaccccggccgctgctgccagcctcagaaaggcacccaggtgtgcaggggagcacacatgggcccggcangcccccagggaatcaanggatacgggctaacggttttcaccttgaactgtgaaggcaggaggattaggttgactgcttcctcccggccctttcacagaattgattttcacaaattgttccttnagtccngggggccgggttcaggagcatgacnggggttttntggcccactgggt

SEQ ID NO: 330784 - DNA, 527 bp, Homo Sapiens
  misc_feature (308)..(308): n is a, c, g, or t
  misc_feature (325)..(325): n is a, c, g, or t
  misc_feature (349)..(349): n is a, c, g, or t
  misc_feature (370)..(370): n is a, c, g, or t
  misc_feature (439)..(439): n is a, c, g, or t
caaacactatcttcatagttgtatgggtgaggggaaacttggctggctagttgagcagttctaagtctgcagtcctctaaaggcttgcttgacgatcaaggatctacttccaaggtgtcacactcacataattggcaagttggtgctggttgttggtgggaggcgatagtcctccccatgtgggtctctctatgaggctgcttgagtgtccccacatgatggcttactctcagagcaagctaccaaaggcagcaaggcagaaaccgtaacatcctttatgactttgtctgggaaattcatacactgtncacttcttgccatattnatgtttgttcacacaggacagctnttcatttcattgtggggagcntgactttcaaaaagggcttgaattttcaagggggcaattcaccggggttcatcttgaagggttggctgncctggtggttccctttcatattgatgatgttgtacactttttggggaggttgaggattgggccctaaaggttgccggggcttattttt

SEQ ID NO: 330785 - DNA, 515 bp, Homo Sapiens
  misc_feature (23)..(23): n is a, c, g, or t
  misc_feature (58)..(58): n is a, c, g, or t
  misc_feature (149)..(149): n is a, c, g, or t
cacaccctcagtcagagcttgtnaaagttttagttttaaacaggtcaaaagtccatanaaatcaagaaaaaaaattggggaaaacaaatgtcttttcttctactccttcaaataattaaaataaaggcaagcttaagagaaggcctaangtgggacatattcttcaaggcaatgggaactcagttttaaatgggttcctcatcaggcaatgttatttcacacagattgttttgtgaaatgggccactctgatcttaaggctacttactgttttccccaagcatctctaaaaggaccctgtggagtcccttgcccacaagaagactctctcaggctccatctgccctgatatttctacctacacacacttcccctattctctgacccactgaatttactgcctgaatgtttcatttcagcccttaatcacatattgccatgttgtggaatttagcttgtaaactccctacagttgtcagacatgaatctaatttctcttgtaagctaagtatcact

SEQ ID NO: 330786 - DNA, 463 bp, Homo Sapiens
  misc_feature (28)..(28): n is a, c, g, or t
  misc_feature (35)..(35): n is a, c, g, or t
  misc_feature (42)..(42): n is a, c, g, or t
  misc_feature (50)..(50): n is a, c, g, or t
  misc_feature (57)..(57): n is a, c, g, or t
  misc_feature (71)..(71): n is a, c, g, or t
acttacactaaattaactctatgaaatncaaaaanttggaanaagcctancttaaancatgtaagcccggntctcccaaaacttccatctgcccatgggaaaaatccaaagcttgtaaaatgattaaacttgtaaaggaattaaactctaggattcactcattttataattggtattttcaccctaagagctttctttttcctctctggtgtttaaaaacaaagtaaaaccagacaaaacaagattaactaaattaaaacccctgtgactttaaaaaatgtagccaagaataatgtgcaagtgtctagttaggccaatagatatccttaacatacgtgagctgggaacacaaatgagcatgaagggcaaggaagagcaccaccccctgcttcttttcctgctcctgttcttgcagagggtcaggcttggagaccacatatggtcagctcaacactcaagtcca

SEQ ID NO: 330787 - DNA, 430 bp, Homo Sapiens
  misc_feature (68)..(68): n is a, c, g, or t
  misc_feature (78)..(78): n is a, c, g, or t
  misc_feature (93)..(93): n is a, c, g, or t
  misc_feature (181)..(181): n is a, c, g, or t
  misc_feature (231)..(231): n is a, c, g, or t
  misc_feature (252)..(252): n is a, c, g, or t
  misc_feature (411)..(411): n is a, c, g, or t
tttaatccttttacaagctttgatttttcccctggcagatgaagttttggggaccccggcttacatgnttaagtagcntccttcaaattttgnattcatagagttaatttagtgtaaagtagtatcccattgagggttttttacctgtgttcctcccattgtccctacacagtgaccaggntcaataagataggatgcatatccctcaaagcaaggcccattggataattncaagttgtacacatgaagagnaaaaaataacatctgtgcaaaggagtatgttattttaagtgctaaagtgagagccccagacaaggctaactgcaataggaaattaacaaatctccaagatcctctccttctgttctcagtgttgtcttcttctagaggacacacacacttacaccccancgccgagccctatgcagtc

SEQ ID NO: 330788 - DNA, 488 bp, Homo Sapiens
  misc_feature (23)..(23): n is a, c, g, or t
  misc_feature (43)..(43): n is a, c, g, or t
ggtagcaatcacagctgtaagtnaaatagggatgggctgcctncatgagggccccctgtgttcaattttgccccctatttgcccagaaatttcaattaccccaagcaaataggagaaaagtgccgttaagtggcatttaaagaggtgaaattgtaccaagtttggctccttcccttttctccctggagacccacattataattttaattggtttactcaggaagcaatttaggaaacaacagtctaatgcctaatgcctaaacaatgtctccatcatgttgaactcccctaggattaggatcaaaatcagaaataaaagctcatttgcagtattttcaaagaagactctttcaaagactcctttcttttgttcacacttgatgtctaattcaacagtgattcttgttggatgtcggttcaaaacatatccagaatccagtcattttccaccacccctgcaggaccagtctagctatgactaagtgctc

SEQ ID NO: 330789 - DNA, 390 bp, Homo Sapiens
  misc_feature (190)..(190): n is a, c, g, or t
atgagcactgcacccaggcggaaccacctttttgaagaattacagaacgaatgtataggaaaaggggacagcctgtgcaaagtccctgaggtgatcagatattccaggaactggcagagaccttcttggctacagcatagtgatcagagtaaaatgagatgaggctggagaggcaggtaacagccttatncatgcagggcctagtttgccataataatgaatttgataaaataatttgtaatcacttttatgaaccaatcatgggcacgtcatcatcatatgtcctgggcacggtccctcccctgttgtatttatttttccctactcattcttgcccttgtctcccctcccatagtccccactttctcttagttatatgtccccccattt

SEQ ID NO: 330790 - DNA, 487 bp, Homo Sapiens
  misc_feature (20)..(20): n is a, c, g, or t
  misc_feature (100)..(100): n is a, c, g, or t
  misc_feature (237)..(251): n is a, c, g, or t
atcttatcctttttttcccnaccttttatgttcactattttaaaatctcaaatagatttactgttttaagtaaaaccaattgtagtatttttcttagatnattgcagtattcctgtaccccctatttcttgcccaaatatttctgacattaatttatacttatatggcgagaacaataaaaaacattaacaagagtgtagatatatgtgtgtgtgtatctttatacattaatatatnnnnnnnnnnnnnnngggacaaataaggagacaataagtgtctattttaaagcagggacattgctttttattccaatcattcaatgcccatcatgcaaaaaaggtggaaaacattagattttaagacttacgacagagaaatgacttagttgtagcaaccattcatatcaaataaccttacaaaacataagcaagagaaagacgctgtgaaagggcaatacagcatttcacagcttctgcctgtgccgaat

SEQ ID NO: 330791 - DNA, 497 bp, Homo Sapiens
  misc_feature (351)..(351): n is a, c, g, or t
  misc_feature (401)..(401): n is a, c, g, or t
  misc_feature (476)..(476): n is a, c, g, or t
  misc_feature (481)..(481): n is a, c, g, or t
gaaatttagattctgatgaagggcaggtacagagaacaatttttataagaagcttttgattctgaattgatgataggtgtatatgtgtgtatatagagagatgtgtaatatatatatggaacacacatgcacacacatggtagttaccttccacgtttgttccaaaggcgctgtgaaaggtggactgggtgcaggatggaaaccgcctcactgtgatggattataagcctccaggcggtggcagcaggagaaatgaagctctgtcctgtcatttctgttcactaggcagattttgatgactctatgccattcacacatatttggtgtgccgtgacacaattcagtcctttncactggcaaccaaagaggggtacaaacttcataggaattaattttagggnttttaaggaagccctttaaaatgttttatggatggcctgtatttaaagtgttttttaagggacgtgagttttttnccatnttatttttcaaccctt

SEQ ID NO: 330792 - DNA, 412 bp, Homo Sapiens
  misc_feature (341)..(341): n is a, c, g, or t
  misc_feature (366)..(366): n is a, c, g, or t
  misc_feature (378)..(378): n is a, c, g, or t
cataatttatttcggctctgagctttgttatttccttccttctactaagtttgggcttagtttgttctttttctcattccttcaagtataaagttaggttgtttatttcagatatgtcttttttctcaatgtaggcacttattgccataggcttcccttttagagctgcttctactgtaccccataagtttgggttttaatatgttgtgtttccattttaatttgtctcattatatttctggatttccctttagggtttcttctttgacctactgccgggggtgttgagggaggcagggttgtttaggtttacacatatttgtggaggttttctaggtttncttcccggttattggactttcaggntttggtaccacnggggatcaggaaagggtggcttggatttcagggc

SEQ ID NO: 330793 - DNA, 516 bp, Homo Sapiens
  misc_feature (56)..(56): n is a, c, g, or t
  misc_feature (65)..(65): n is a, c, g, or t
  misc_feature (505)..(505): n is a, c, g, or t
agatttctctcgctcctttgttaatcatctcttacacaacttttgtgtggtttttngctcagctnaccaatgacaggatctgtccaaatgtcaagccgaggtattttgagagcaggaagagaagaagcctgtctacagcaccccacatccaccacagcacgtgaaatgcaattgaacgctttagctatacaagaaccctgcagcttcattacattgcaaataggctaggccacaacccgagaggacaaacaaacatgagctgtttttaagagttcaacagaaatttggcagctttagctttttattctacatttccacaacttcttcacatggcatcttatagaagatgaaaattaattattaaagaaacatgcattattttttacaaatgcatactaatgcatgaaaaaaatacatcacctgagaatgtctttttcctcagaaacatggatccagacataagcaatatgctaaagatggctttctaattaatttatgaaatcancctgtgccgaa

SEQ ID NO: 330794 - DNA, 309 bp, Homo Sapiens
  misc_feature (11)..(11): n is a, c, g, or t
  misc_feature (210)..(268): n is a, c, g, or t
tctgtaagagnaattagacatagaaaaattaataaatttaaagccttaaaataatgtctgggcccagagtttgttgttacttttgctgtagattgtttacttaaagaattaggtgaaatttttatttttcctggtaggtttattgggagtgttctccatattgatatagatggatccatttcccatttggggctgagcactgtgtcttannnnnnnnnnnnnnnnnnnnnnnnnnnnnnnnnnnnnnnnnnnnnnnnnnnnnnnnnnncaacaccagcctggccaatgtagtgaaaccctgtctctact

SEQ ID NO: 330795 - DNA, 408 bp, Homo Sapiens
tactgccaccactgtcactggagctgctgttttgacgtgttatatttgcttgggacccttttgacacaggaacaggtgctggagtggaagggggaaggggaacaggaacaggagcttggtgttggaggaggtgatggagcagggggagtatcagctggtcttgggccatactccatcctttgtttctgtatagtatgagtataaggtggatcagcacgccccaatccgagattctggaggtctcacaatatccaaaatgttatttggcacaaatccagagtctccacttgcatttcgaactttccaccattgcttccgatcatcaagtatctctaaaatatcatcctttagaaccgagagctcactgttgttccttgctacaaagtcatacttggatttggcatattt

SEQ ID NO: 330796 - DNA, 191 bp, Homo Sapiens
tggaagaaacatttctccaccctaactcaatatttaggacttttccactcccagacctttcccctttcctttccccttgctccagcgtccataaaatcccaagagcctttttttggaagctcctttaggagttgagccagataccgtgtctatgctagtcctgctaattcttgactggtgctggtccatgg

SEQ ID NO: 330797 - DNA, 349 bp, Homo Sapiens
  misc_feature (228)..(228): n is a, c, g, or t
  misc_feature (272)..(272): n is a, c, g, or t
  misc_feature (333)..(333): n is a, c, g, or t
tatgaatgttcacttttaataaattcaaacagatcccgacataaacatcttcaaacttgatgggttttacgtgacccatcatttcatagatccttggcaccaaatctctggacattatataacccaacccactgcagtatggagggaacaccttgaaaggatactcctgggtaagaaatatgggttttttggtaaaatcctctataggaataattatcaattagaggntaacctgtgaaaaactttctctgagtggtttaggtttaaaaggntacttcactaaaatttgccagtatttgatggaaaaccatcagtgtctgtcttgcattacgngacttgggcttggggc

SEQ ID NO: 330798 - DNA, 397 bp, Homo Sapiens
  misc_feature (375)..(375): n is a, c, g, or t
tttctccctaaacatttattaatttagaaaaatatctgtattttgtgtatgtctttcctagagagaggtttataatttttgttgaagctcaaaaatgctgcacaatcctaaaattgttttaagaaaatgaagcaaacccttcttttctggagaatctaaatatacctgcttatagcatctgattatataattggcaaagttgaggacaggaaatgataccctaggagactgacatatcttaatgtagtcattgtgttaaaagtttcaacattatgaataagtctaaaatattttttgaccttcccctagccctattctcctctacttcactgtttcaatgttaatacatatcaaaacactttaatcttgtttaanccacttccagttctgtgccgaa

SEQ ID NO: 330799 - DNA, 517 bp, Homo Sapiens
  misc_feature (78)..(156): n is a, c, g, or t
  misc_feature (197)..(350): n is a, c, g, or t
tttggcttaaaacaacccaacaatttattttcctcaacagtccctggaagattaaaaagtcccaagatccaaggtgcnnnnnnnnnnnnnnnnnnnnnnnnnnnnnnnnnnnnnnnnnnnnnnnnnnnnnnnnnnnnnnnnnnnnnnnnnnnnnnnatttccctctgtgcacatgtggagagacaaacctctggtgnnnnnnnnnnnnnnnnnnnnnnnnnnnnnnnnnnnnnnnnnnnnnnnnnnnnnnnnnnnnnnnnnnnnnnnnnnnnnnnnnnnnnnnnnnnnnnnnnnnnnnnnnnnnnnnnnnnnnnnnnnnnnnnnnnnnnnnnnnnnnnnnnnnnnnnnnnatttggtggtgctggtgggaacacaattcagaactgaattcacaattcaattcacagtgactcttgtgaataaagtataaaatttaaccagcattccactttaacaatgcataaaaatagtctctaaatttggttatgagccatcttaaccctatgactttaaaccc

SEQ ID NO: 330800 - DNA, 404 bp, Homo Sapiens
  misc_feature (36)..(36): n is a, c, g, or t
  misc_feature (77)..(77): n is a, c, g, or t
  misc_feature (85)..(85): n is a, c, g, or t
  misc_feature (96)..(96): n is a, c, g, or t
  misc_feature (158)..(158): n is a, c, g, or t
aaagacatgaacctctgcccccctaatgaaatgtgnaagtgaccaccaataagcaagtgccccaaaaaagggaaacnaaataggnatgttaatgangaagaaatgaaaagggaaaattaacttgtaaccccccgggaaagatgaggggaacatttggnacctgaagatttggccccaggaagtttggggcccccccggtggaaaagcccccagaagagaatgccgggcaaagtagatcagcaaagggtctgactctcccttggtaggggtcctagagaggtattttgagggatgtccattgaacatattctttttggagcctgcctccgtcctgctgaattcctgccttgtgatttgtcgtgtcagaacacttagaaataatgctctacccagctcatgcctct

SEQ ID NO: 330801 - DNA, 482 bp, Homo Sapiens
  misc_feature (27)..(27): n is a, c, g, or t
  misc_feature (39)..(39): n is a, c, g, or t
  misc_feature (54)..(54): n is a, c, g, or t
  misc_feature (68)..(68): n is a, c, g, or t
  misc_feature (74)..(74): n is a, c, g, or t
  misc_feature (133)..(133): n is a, c, g, or t
  misc_feature (203)..(203): n is a, c, g, or t
  misc_feature (301)..(301): n is a, c, g, or t
ccccaaaaaccattaacccattacccnaaccacgtaacnagggctcacctgggngatacctccccaangactangggctttctcccttcccttaaaagggttactactggttggtacttcctaaataaaaggngattcggttttgcctgtttttaagttttatataatagaattattagtatatatttatatttggcttcctncactaatatattggttagatatgtttttaacccatcttctgcctgagtattaacctcctattatcatttcagatgttttagaaaacgattatgagagncttacgtgtattaaatgttgaaagaaatggaaatattatttatacctataaggtatgtctatattcttttttattgtggtaagatgtaaaatttactgtttttaatcatttatattctctttttacagaattctatactgtatcttattgaagggtaatgaataaacttgttggcatttaa

SEQ ID NO: 330802 - DNA, 394 bp, Homo Sapiens
  misc_feature (84)..(196): n is a, c, g, or t
  misc_feature (199)..(218): n is a, c, g, or t
aagatgcagtcttgctttgtcgccaggctggagtgcagtggccagtcttggctgactgtaatctccgtctcccaggttaaagcnnnnnnnnnnnnnnnnnnnnnnnnnnnnnnnnnnnnnnnnnnnnnnnnnnnnnnnnnnnnnnnnnnnnnnnnnnnnnnnnnnnnnnnnnnnnnnnnnnnnnnnnnnnnnnnnnacnnnnnnnnnnnnnnnnnnnnaagacaagataagctccagaaataaccatctgcatttagggtgaactttgatttgcttgttagggccttcattcgtgcaaagcaaagagtagggttctacaattttgtcttgattatttttccaaataatcaaatttagttggggcacaaagggaaagggtttttagggctaaagg

SEQ ID NO: 330803 - DNA, 365 bp, Homo Sapiens
  misc_feature (324)..(324): n is a, c, g, or t
  misc_feature (334)..(334): n is a, c, g, or t
  misc_feature (345)..(345): n is a, c, g, or t
tgtagagacagggtctcactatattgcccagactggtcttgagctcctgggctcaagcatccttctgcctcagcctcccagagtgttggcattacaggcattaggtggttcttcaaaaaagtctgcatgcctatttagatgctagatctctcaccctttctagctctacaagtatagaggggaaaattcgagacataaatagcctcacctttgtaggaattgagctccctgaaggcccacagtctgccctctgggtcttgtatctggggaccagcattcctttctcattgtgctgagagttgggaaggcccggggtgacccctngggaccattncctgagaaggngttctgtaaatgacagggtt

SEQ ID NO: 330804 - DNA, 417 bp, Homo Sapiens
  misc_feature (303)..(303): n is a, c, g, or t
  misc_feature (353)..(353): n is a, c, g, or t
  misc_feature (359)..(359): n is a, c, g, or t
  misc_feature (383)..(383): n is a, c, g, or t
ctcaaatgtcatttattagaaaatacaattcccgttaaaggtgatacaagggattctgggaagtgggaagtatatagtacacagatctctttttatcaggagcatataggtcataataaaatgagctttaggcacaaagccagtaacacatttatggtccgttcatctggaaaagtttcatcgttcactccccactcctcttccccctcctggaagcagccagcttttatccttggcatttttaatttttagagaaaatttaaacttccatgtctgccctgtggcttcggtcaatggagcttnttttctccagttatggaatgagtcagcaaaacggggagttttctgatccntggganttagggaggggacagttttacagnatgtccccatttcactctttttcccattctgggg

SEQ ID NO: 330805 - DNA, 321 bp, Homo Sapiens
agtctggagggaatgccgcttggcttcactaccaaaggttttatgacttagcattttaaaaggttttccttttaccaagaaatgcagaaaccaagagcaaaccccacgtaccagatcactgattcctactgaagcagctagcccgagaaaggactctctcatactggtcttgggaaatgacttggcagcctgagccatcccagcagtggacaaggatggttaattcttattctgtagacgtccacaggaacagactaggatggaaaacacagttaagcacagccatgcaccctgtggctttagaaatgcccctgtgtgaaa

SEQ ID NO: 330806 - DNA, 206 bp, Homo Sapiens
  misc_feature (18)..(18): n is a, c, g, or t
  misc_feature (29)..(29): n is a, c, g, or t
  misc_feature (52)..(52): n is a, c, g, or t
gaatctaatttcctgccnagcccccaagnacaattcccccatcttacacctngctcccccttgcttccccaaaccaaccaaaagtgacatctttgggcttgtttgtagagcctcgggttttaaacaacttaatccactaagtgagatcagtaagggcagcagaagccactgtccctttaacttaaccgcaagacaaaattaattgc

SEQ ID NO: 330807 - DNA, 584 bp, Homo Sapiens
  misc_feature (532)..(532): n is a, c, g, or t
aagttaacctggtgcagccagatgttctaacttttgaacaaatgagcgtggtcagtaatgtacaataactcttgagtctgttactttggcctagctaagcccatctggccctcgggatcctgcaagatgacagacagaagagcaagggcactatcagaaatggaacaggctgccccctactcctcccagcctctaccagtacacagagacagactggagatagagcattcgcagccagttggcatcttggttcttttgtcttctgaaaataaaaataagtgcttgtcttgtctttgggggtcaaagagaaccgcactaatttatttcctcgagggggcttttctggaggagaggatcctcagtcctgtgccaaggtttcacgctgtttggccacacgccaggcctttcttctggatctggtctgcacgtccagagatgatggaggaattgcatcagcatcatatgcacagtgaaagggtggctcttgtccagagaggcccattccgggctaggctacatggcctcagggctnggcggcagtttgaagagtctggctgcagataggagctttcttatgtgtctct

SEQ ID NO: 330808 - DNA, 652 bp, Homo Sapiens
  misc_feature (396)..(396): n is a, c, g, or t
  misc_feature (520)..(520): n is a, c, g, or t
  misc_feature (541)..(541): n is a, c, g, or t
  misc_feature (565)..(565): n is a, c, g, or t
  misc_feature (588)..(588): n is a, c, g, or t
  misc_feature (624)..(624): n is a, c, g, or t
  misc_feature (636)..(636): n is a, c, g, or t
actcactaggctcttaatagtagctcctcttataagcagaacagggcaaagtagtaattgcaactgagaagagaaaatgcagttcaaagcaagattaaaaggatgagtaaagtcccctagagagctcagccctacaggatttgagattctcattcattcacaccttccctccttccttcccttctaatttttgttcaactacttccctcttttcctctctctctacccaccaaccattatgctagactccacatgcagcatctcattttatccacctggagcttgcttttgccctactctcctcagtggagaattctcttcctcctgtccctcccttcacccccgcttcctgtctctgagcttccttctccaggggtttgttcctttccatcaggntattcactttatcaccacctcctcaaatagggccgtgttcatgtccaggcccacaatctcaagtagccatcctgtgattctgtatcatattatcctttttaaactctatggcaggcatttactnacctctggatgttttttcttnctttaagggatttggattggcctnatgtggacaaggcccaaggattntgtggacagttgggaggttcaaactaggggcagttntggatttccagnactggctctggaaact

SEQ ID NO: 330809 - DNA, 596 bp, Homo Sapiens
atgaagacttctcagttgtattatatttttaaaaatttaaaatgaacttgtatatgtggaaggattgatgatctgtactgactccagatggttatgttctcctgatgacagatggaagtccaggaggcggggccatcccaagtgtatgccagcaagatatggttctactgctggtgacctcatagaagcagagtcatcactggagaaagacatagctctcatcctgatgggcatctcctgcccctgaggcctcagttagctgcacttgccttctgcatctcctggggatttcactccatcagttagcatcttgtttactgccttcccatgacggggggcaggtgtccagatcccagatctacagaaaattctttcatttctgttgtgtccccctgcttccatcctgagtgtacgtccccaaactttcatttaacatgtcatgttcattagttccttcaaatactagttcagagcagtctggaatcaagactgcctagtttgagctccaactgtcacagatcttgggcttgtcacataaggcaatcaaatccttaaagaagaaaaaacatcagaggtagtaaatgctgcatagagtt

SEQ ID NO: 330810 - DNA, 169 bp, Homo Sapiens
gaaaaccactagcgcatcctggaatgcatcatcctatttaaaaaggaaaagcacacgtcacaaagtcaaacatcagccatttggaaacctttgcttcctgtaattagaattatgttccatctttttatgtttttgggaatttgaaataccaatttcgagatgcagaatc

SEQ ID NO: 330811 - DNA, 463 bp, Homo Sapiens
  misc_feature (42)..(42): n is a, c, g, or t
  misc_feature (97)..(97): n is a, c, g, or t
agtgaggatgacccgaggtcatttttgttaccatcttggttntggtgggttttggctggttttggccggcttctttaccaacttctttttatcagcnaaggtctttgtgacctgtacttagtgccgacttcctgtctcatcctgtgagtaagaatgccctaatctctcaggaatgcagccccagtaggtctcaaccttattttacccagcccccattcaagatggagtgactctggttcaaatgcctctgacacatgtgcctcatgtttgggcatgagacctcactgtgtaggtgcagagaagaccctgcctaaacgattgcctacacgttgctcctttttcctgcctcaacttccttaaaatgaccaagagcagcgcccttttgggagctaacatcaggactccttttctgtactctgctccgttgtgctgctagagccacaagcctattaaactttgcctg

SEQ ID NO: 330812 - DNA, 453 bp, Homo Sapiens
attgtctgttatattacatttattaagaagtgataacttgtaataattggatgttaaattaaagaactctctcctagttattgccgtctcaattataactgtcgttggctggcagttataatgatatatgagggttgtattttacgcagccgaccatgacctggtgagtaatattcccccagctatggggcaactcatgcactccttggcttccaacgccttgcttgggtgctgattggaatattaagtttctgcaagactgaggatgccgaaatccacacggagagccgcgactccacagctgagagccccctctggcaatctccacccgcctcctgcttctcctcgctggtacatgtccaactcatttcggctttgttttatggttataggaatcaggtttatttggtgagttataagtcgtaaacgtgggtgagagcgtgtttgtggttt

SEQ ID NO: 330813 - DNA, 376 bp, Homo Sapiens
  misc_feature (127)..(144): n is a, c, g, or t
gataagcatgagagttttggaggtagccaccagaactgaaattaacccttgttgcctgtacttgtctctctcaatgagaccaatgagtgagaaactgttgctcttcattttatacattttgattccnnnnnnnnnnnnnnnnnnactatgtgcaaatattcctcagatttaaagataaactcaaaatatttaaataatttctttaactttcttattttccttactttagggtaaccttgagcaagttcagaagtataggtttaagcttgttggtgggtggggccctaggcataggaaattcccctcactttcttcaggagttcttaatgtctccagcatgttcttggataccactaggggcaggagggaaatgcct

SEQ ID NO: 330814 - DNA, 355 bp, Homo Sapiens
  misc_feature (164)..(164): n is a, c, g, or t
  misc_feature (201)..(201): n is a, c, g, or t
attcatattaagtaaaccaaattataagccaaattagaatcgagtggtgggtgctttacatttttcccctgttttgcactgtttagggggtatatggggacggtgggaactagtgattaagtactgtgatgaagcttttattgtcttgttcagacaaacactgngataaagctgtttaattatcccattaccatctgtgtnttcattttcatgaattttatccatgctaaaaagaaaggagaagtgacctctgtgagacatagaaaatttgaataatttgcaaacaatttgttgcttataattttatgactgccttttaaaaattttagaatcctaggccgggcatgggctgtca

SEQ ID NO: 330815 - DNA, 365 bp, Homo Sapiens
  misc_feature (41)..(41): n is a, c, g, or t
  misc_feature (62)..(62): n is a, c, g, or t
tccaaaacgtatgtactacccaataatgcacaaccaaaaanttattttttaaaagtatttantttagtcaaatgtacaaatcaggatcttcttgctagcacagcatagtagaaataaatattgtgttaaatcagagtcttaagctaatgtctccattgcagtttgaagagctgtgtgattacatgacaattatgtgcaaaaatgctgttatgtgtatgtgttgtgtatatactcttgtctttcccttccttggaaaggatttagatgtcaagtatttattatttcacctgaagccctcagcattataattgtaattattattgattactttcttcttgaaatattttactcagttaacttccagt

SEQ ID NO: 330816 - DNA, 447 bp, Homo Sapiens
  misc_feature (385)..(385): n is a, c, g, or t
gggtaggtgttattttctcactttgcagatgagaaaattgaggctcagagcgattaggtgacctgccccagatcacacaactaatcaatcctccaatgactttccaaatgagaggctgcctccctctgtcctaccctgctcagagccaccaggttgtgcaactccaggcggtgctgtttgcacagaaaacaatgacagccttgacctttcacatctccccaccctgtcactttgtgcctcaggcccaggggcataaacatctgaggtgacctgggagatggcagggtttgacttgtgctggggttcctgcaaggatatctcttctcccagggtgggcagctgtgggggattccttgcctgaggtctcagggctgttcgtccagtngaagttggagagggtggtgtggttcctgaatgggtgttcgtccagtggggtacatggggtgt

SEQ ID NO: 330817 - DNA, 535 bp, Homo Sapiens
  misc_feature (155)..(188): n is a, c, g, or t
gctcaagtgattctcctactttagcctcctcctgagcagctgggactaccgccatgtaccaccacgcccagctaatttagtttaccctttgtagaggggaggtctcatcatgttgcccaggctagtcttgaattcctggactcaagtgaattctnnnnnnnnnnnnnnnnnnnnnnnnnnnnnnnnnngtgagccaccggcaagcccaaagtgacgtttcatcaacgagctaaagaaggtgatgtagtgagtcatgtggtatctaggggaaagagtattccagatagaggaaatagccagtgcatgcataggagcataccctgtgtgttcgaggaacaaaaaggaggccagtgttactgtagcatagagagtaaggaagaaactagtaggatatgaactcaagagaataggggcaggcaactgtgtaggtagggtcttaaagatcactgtaaatcactacctttttattctcggtaaaaggggaagtcactggaaggtttttagcagagaagtgaaatgaccagacttacattta

SEQ ID NO: 330818 - DNA, 475 bp, Homo Sapiens
  misc_feature (79)..(170): n is a, c, g, or t
  misc_feature (184)..(184): n is a, c, g, or t
  misc_feature (226)..(236): n is a, c, g, or t
acttccgactcctgggttcaagtgactcttctgcttcagcctcctgagtagctgggacttctggcgtgtgccaccatgnnnnnnnnnnnnnnnnnnnnnnnnnnnnnnnnnnnnnnnnnnnnnnnnnnnnnnnnnnnnnnnnnnnnnnnnnnnnnnnnnnnnnnnnnnnnggccttacaaagtnctaggattataggggtgagccactgtgcccagtgcttctccnnnnnnnnnnngcaacatgcggattaccatacctttcctcttttcacctttagcccactttttccctttaaatactgaagccctcagcatcatctctggagaaaaggcacagaccagactgtttctgggattccctatttagttcttccaggcatgtccttaaccttggcaaaattaacttctaaattgttttagacctgtgtcagataatttttggtgtacagtatgtggtcactttcccccaagattt

SEQ ID NO: 330819 - DNA, 424 bp, Homo Sapiens
  misc_feature (23)..(23): n is a, c, g, or t
caaaaaatgggctaaagctcctnttttcccacaaacgttaagtaactgtatgaaaaactccatggctggctcctaccagtgggccttggaaaatgcatgcaagaaggccaaaccagcttgaccctggctcacagacatggtcatgaggcgatttaaatttgtgcccacaatgaagagtgtgtgtacacatgcctcctagaaactacactatgggtaattaatttatttcatagaggccacccagatgccttataggttttattaatttggatatgaaagtgtaccccatttggtttcaccaggaacccaaatttagaatattgaaaagccatcaaaaagttgtgatatcaaaaatgtatgagtctcttaatatactaagcaagagtgtcacagcagtaatgataaagactagttttaatctcaa

SEQ ID NO: 330820 - DNA, 441 bp, Homo Sapiens
  misc_feature (317)..(317): n is a, c, g, or t
  misc_feature (379)..(379): n is a, c, g, or t
ggtgatattcttcttgctgtcaatggtagaagtacatcaggaatgatacatgcttgcttggcagaactgctgaaagaacttaaaggaagaattactctaactattgtttcttggcctggcacttttttatagaatcaatgatgggtcagaggaaaacagaaaaatcacaaataataggctaagaagttgaaacactatatttatcttgtcagtttttatatttaaagaaagaatacattgtaaaaatgtcaggaaaagtatgatcatctaatgaaagccagttacacctcagaaaatatgattccaaaaaaattaanactactagttttttttcagtgtgggaggatttctcattactctacaacattgtttatatttnccctattcaataaaaagccctaaaacaactaaaatgattgatttgtataccccactgacttc

SEQ ID NO: 330821 - DNA, 358 bp, Homo Sapiens
aactaattttgtagatcaggaatttaggtgggactcagctggccatttgtttccatgtcatgtatccaaagctcactctgtagtatcacctggtagatgggttgacctgaaaggtccaaggtggcttcccttatgtgtctgcccacttacgggagatgggtgggaagctggctcatctggggctattaaccagaatactggcatttgtcctgtcctctggggtggatttgcccatcaaaacttgaagttctagcagggcagggtagatactcctactatagttccaactacctgggaggctgaggcaggaggatatctttagttcagcccgagcaagctagcaagaccccatctcttt

SEQ ID NO: 330822 - DNA, 485 bp, Homo Sapiens
  misc_feature (292)..(292): n is a, c, g, or t
  misc_feature (323)..(323): n is a, c, g, or t
  misc_feature (339)..(339): n is a, c, g, or t
  misc_feature (356)..(356): n is a, c, g, or t
  misc_feature (407)..(407): n is a, c, g, or t
  misc_feature (427)..(427): n is a, c, g, or t
  misc_feature (445)..(445): n is a, c, g, or t
  misc_feature (464)..(464): n is a, c, g, or t
  misc_feature (469)..(469): n is a, c, g, or t
tagtttaaaatgttgctgattctttgttttatttttcagagtcaagaaaacttcttttgagctgttgtgagcttttctttgagctgtttaacaattgagtaaagtatatcactgtgaataaaatttggagcatatttgtttctgatttctccagaatttggaacctatttatgaatattcttaacttacagcaatatagttatttgcataagtgcaatacgaatgttttcttttgcaacaggacacaactgggagaaactgggttattttaccaagggctttgggctgggantagtgtgctttcctttaagggaatcaaactngacttataaaggccantaaaggcccttgggggnaaacttgcctcataccttgtttatgcagtccctgtacagggttccttaccngtgggggaaataaagggtgntcactttccgacgggccngggggcccccaggtatctnggggnccccaggggggagggg

SEQ ID NO: 330823 - DNA, 432 bp, Homo Sapiens
  misc_feature (216)..(216): n is a, c, g, or t
  misc_feature (223)..(354): n is a, c, g, or t
agtttttacatctaagattagtcttggctgaagagaaatgagacgtgattatactactttttcaattgcaggtttaaggagttcagatttaatgacccaaagtcatacagatcatggaatctgtcgtcgtcttataacagtgtcagcctcgagtacatttattaaccttttggggctgtcagttttccactaggattaagattttggccgggcgcnggtgcannnnnnnnnnnnnnnnnnnnnnnnnnnnnnnnnnnnnnnnnnnnnnnnnnnnnnnnnnnnnnnnnnnnnnnnnnnnnnnnnnnnnnnnnnnnnnnnnnnnnnnnnnnnnnnnnnnnnnnnnnnnnnnnnnnnctagctggggcacatagtggtgtgcacctgtagtcccagctgcttgggaggctgaggtgggaggaatgctagagccca

SEQ ID NO: 330824 - DNA, 462 bp, Homo Sapiens
cttttgtctttaataagcttaattatttccatcaccagttttatttcttgaacatttatatatgagtcattatcccgtctttctgaaccatctccaacatcaaacacaaggtatggctgaaatggccaatctgatgaacatcgaatggcttctgtctgtctatttgtttttaagtttctgttataaacataattagaagggaagaggcatatgtctggatgcatcctgtactgaacagtgagctgtagaatgggcagcctgctgatcatgttgtgttctacattctcttccagcagtctgcaggaagcgagccatcattgactgggtcgtaggccatactcctgtggctttcataggaggtgactgtcgggggggagctgcttaggggtctcctactaggatgagcttattgcagcgatggatgagtggagtaagagtctcaatttcacaagactgtccagc

SEQ ID NO: 330825 - DNA, 490 bp, Homo Sapiens
  misc_feature (382)..(382): n is a, c, g, or t
  misc_feature (456)..(456): n is a, c, g, or t
  misc_feature (467)..(467): n is a, c, g, or t
ccaattaaacttgttctccaaaattttataaacagcctataatattaaatagtttaatcatcttgaccataagatgtaatttccataagccttttttataaccttttattaaggagtgggttactgcttcaagaaaaccttgttaatctgactcagaggcccatatgctggtcttgcttcagtgtgcctttgacattaatggttaatttatagggaaactgaacttattttatctctcaaaattgacccttacaatgtcacacacccatgtcttccatgatagttcctgggtcttgaggagttgaatagttttaatttctggccctgtgtctcatgaacacagtttattttggattggtatcttctacagggtctgaaggtnaaagctttaactgctgttcagtgttttaagattttagccggacttgggcattcctttttaggacccgggagtcntaaaccccgtnaacttggatgggcacagggcttt

SEQ ID NO: 330826 - DNA, 467 bp, Homo Sapiens
  misc_feature (405)..(405): n is a, c, g, or t
  misc_feature (415)..(415): n is a, c, g, or t
  misc_feature (444)..(444): n is a, c, g, or t
ggcagtatattctacaacagtaaagcaaaataagtaaaattatcccaagtaaactaaataagaaggctttccatgaacgggcaactgttggaaaccaagctgattccagtatgggcccagaattagaatactgatccagattttcacattaccatctctcttgtttcttctgagcagcagccagagatcactggttggttcacatgaataagcagggttagtctaaattgcagaaaaaaccctcaagaacaactgatgagaaaaacactcaaaaacacctaataacaagtgtaccatagtttttgaaacataatttttttctctctccagtctcccatttttactaaaggcaaatcatgataagactggatttgcttttttattacttgggtctggttatctggnataaagtacnggcaggattaattatttttgcactggggnttttttaaattgggctttgatgg

SEQ ID NO: 330827 - DNA, 473 bp, Homo Sapiens
  misc_feature (28)..(28): n is a, c, g, or t
  misc_feature (34)..(34): n is a, c, g, or t
  misc_feature (48)..(48): n is a, c, g, or t
  misc_feature (103)..(103): n is a, c, g, or t
tttgtttaaacctatgtgaataatgtancatgtncaaaaatttggcancagctccatattctgaatagcgccagacaccaagagaaaggtctttcttgtcttntcctcactctaaggaagaaatatcatcttcttttactgcagaattaaaagatgaggtgaaaaagaattggttgggtatttctactgaaatgtctgttccaacaccacagttgatggtagtacatagtctgagagccttcaatactcagtcccatctgttaaaatggcacagtgcctaaatgccagatggtgtactggctttgcagggacagaggcgccagaaagagggctttagaagacatttttaataccacccccttgggcctcctgccttgggaacaactcacccatgttggcgaccctgtcacatttcacattgcttccataacatctagaaataagaggttccaaacgcttactaagtcacttcc

SEQ ID NO: 330828 - DNA, 375 bp, Homo Sapiens
aaaaactgtacaattttataaaatttgtgtttttacattagttacacaaaatgcatacttcatagaactttacttcatattgtaatgcaaagagttgcatattttaggcagacagtgattatgctggtgaatactaaaagtgtaatacaatatggtgtaaaaataaaaacacgagacaatatacataacatgcttattcaaggacaaaaacaaatcaagcacgacggactaataggcattttccttcagggtcaaacacaatgacattactaaatatcaggcctcctgcatgcctgatttatttgggggggtaagggggaggaatttaaatggctaccagaagtaggatattttaaaaccctggatatcaaattt

SEQ ID NO: 330829 - DNA, 258 bp, Homo Sapiens
  misc_feature (153)..(153): n is a, c, g, or t
  misc_feature (237)..(237): n is a, c, g, or t
atgagccaccacgcccagccttgagcagagatttaatctggactttaggtctagccaactccaaatctatgctccattccaccatactgcctttctaaactcactatctcgtctataaaatcaggataacattttccatgcaaagttacttangagtttacaggtcaaatgaaataatgcatgtataaattctaataacctaaaggagtataacatgttaaggggtttgcttgggcngggaggataatgttcattggg

SEQ ID NO: 330830 - DNA, 531 bp, Homo Sapiens
tttcaggtgagaaatggtctggttttattgagaagctgttggtcatttgatggaaagacacatacggtacaaaattacaggtggtttagttcattacatgatacaaatcattagagtctttacaagtcattagagtctttggattttttaaactcccatttactgtgtaccaaatcaatataatcacagaatcaaagtcacttctttatatgtgaactcttcgcatttacacgaatcccacacatagagaagctgttccaagaccccccaacaccattagtgtctgcagcccacccaggaaggcaccacggactttgtggagagaaagatgctttgggggttcaatgggtcagtatcttgggcaggaagcacagggtgactcccgtctttgttgcgtgcgcacagccaccaacacacactctcaggacttcccgtttcacatacagggaacttttaaggcaagaggagaaaatgctaggaagtaacgggggatcagaactcctccacctctcaggctccagcagtcacatt

SEQ ID NO: 330831 - DNA, 496 bp, Homo Sapiens
  misc_feature (192)..(192): n is a, c, g, or t
  misc_feature (431)..(431): n is a, c, g, or t
  misc_feature (461)..(461): n is a, c, g, or t
atttcaggtgagaaatggtctggttttattgagaagctgttggtcatttgatggaaagacacatacggtacaaaattacaggtggtttagttcattacatgatacaaatcattagagtctttacaagtcattagagtctttggattttttaaactcccatttactgtgtaccaaatcaatataatcacagantcaaagtcacttctttatatgtgaactcttcgcatttacacgaatccacacatagagaagctgttcccaagaccccccaacacccattaggtgtctggcagcccaccggggaagggcaccacgggactttgtggggggaggaaaggatgctttgggggggttccaatgggggtcagtatcttgggggcagggaaggcaccaggggtgacttccccgtcttgttgtgccgtgccgccaangcccacccaacacacattttcaggggtttncccttttcacatacagggggtcttttaggggaagt

SEQ ID NO: 330832 - DNA, 365 bp, Homo Sapiens
  misc_feature (13)..(13): n is a, c, g, or t
ttaaaggcaggantgcccgcacacagacacgcgaagaacacgcaaggtcagatggggagcatgcatgggacacataaggacacaaaacatgcgggagtcacataggtgtgcaaagacaggaatgacagatgtgtggggacatgcaggagggcacacccagatgtgcatatactgctctgctacctcctgggccgacgctgcacagggacacgagaagggagtccctgtcccattctcaatcagccagggctgagtggggagggggcccaggagcaggccagaatagacacgggcatccacatgaaacgcatgcagacacctcggcaccctgccctgtctcagtctctaattaagctgtgccgaat

SEQ ID NO: 330833 - DNA, 590 bp, Homo Sapiens
  misc_feature (35)..(35): n is a, c, g, or t
  misc_feature (48)..(48): n is a, c, g, or t
  misc_feature (62)..(62): n is a, c, g, or t
aaaaattgtgttcgggaaaggtttgccaaggttanggaaggccgcaangcagcttctccccngcccagttcccagcaggctaggtaccaccagcccagatcttaaacaatgaccccagtccgtttgttttccatggatgttcaccactcctcccatgaatgtacatgcaaccagctggtgtaacagctgcacagtgaaaataaactggctctggcatggtagctgggagcttcacccattggaaagtctgcagattcaacttccagatatctcccaggatcacctctccattatagcccccacaaataaatacatcattttttatttgaacacaactgtgacacttcgggctgcaggaaagcctattttttcatggggttttgttgcaatttcctcccaggcattcggtttcaaggttgtatgcatggatcttgtttaaggaatatgctgtccaggaagtaccatctcccaagatgtaaatcctctgcccgtcatgtgcaatttcatgtcggtatctctcttctggtagatcacaggataggttgtttggtttaagttgtgtccactctctggtattgagctcgtgccgc

SEQ ID NO: 330834 - DNA, 762 bp, Homo Sapiens
accctggatctcactctcctcttagtaacagagacactcctgaggttggacttccttgcttttctctacttccaaatcacaatttcttacaaccaagctttgtgctcccgagtaagcagggatgtactaggggaatgtaaaactgcaaacttaaaaacctgcatcttcttgaagcatcagttttacttaccaaatggtttagagtcataagatgacctatttttatataaaagttatattatagaataaaatgttcatacggcatagactgttaagataaaaaaatagggaatcttgcaaggtaattcttatttgcaagtggggttatgtgttcactctcctctacctttatggtattttggtgttcacttacgaagcatacaactagaaccatatccaagcagactctgggttgctgttaacccagggcctagacttctagtgcctctgaggcagaaccaaaggagcctgcactgggggaaatcccttttcctgcctgcctgtctgcctgtgacctgtgtacgtattacaggctttaggaccagctgattgttatgcttgcaggatggttttgaaacagaaacaatacttgtttactgtaggaatcctatttatattatttttcagtcctgtgaatgctgtgaaaagatttattcctttgaggccaggaagctcccaggcatatatgcttctaggttaggattgtcctgactcactaaagatgccaggatattggggctgaggggagtttgaggtgttaaa

SEQ ID NO: 330835 - DNA, 428 bp, Homo Sapiens
  misc_feature (354)..(354): n is a, c, g, or t
tttttttaacacctcaaactcccctcagccccaatatcctggcatctttagtgagtcaggacaatcctaacctagaagcatatatgcctgggagcttcctggcctcaaaggaataaatcttttcacagcattcacaggactgaaaaataatataaataggattcctacagtaaacaagtattgtttctgtttcaaaaccatcctgcaagcataacaatcagctgggtcctaaagcctgtaatacggtacacagggtcacagggcagacagggcagggcagggaaaaggggatttcccccagttgcaggctcctttgggttcttgccctcagagggcacttaggaggtctagggnctgtggggggtttaaccaggcaaccccagaggtcttgctttggggtatggggttctaggtttgtattgctttcg

SEQ ID NO: 330836 - DNA, 463 bp, Homo Sapiens
  misc_feature (121)..(121): n is a, c, g, or t
tgctggggagcagaagatgggttgctctgacactgtattctccctgtgacccaatagcctgtgttgtcacagctttacccaataataggtccccttgctggagagcccacttcacagcttntccctattgaattcaggtcaggtctccacttccttactttaaccccaatcttttacggttctccagtctgcttgcaaactcctagaattaattaccatatttataagtactgtgcatattttatattttctacatttgatgtgatttttgttggtattctgtttcgtattttcaactctgataataacatttctcataaagaagactatccttacaacatgtcttcatttagaaaaagtattgctgtagatgaaattcagtgagtttcaatttgatgattttgtattaaaatgcatttctttaggcatcaatattgcagtaacaattattgatgtgttacaa

SEQ ID NO: 330837 - DNA, 376 bp, Homo Sapiens
tttgtatgaacatatctcattttacattcatattctatgaaggctgaattattaacgtcccattttacagatgaggggcctgagatagagagaagggaatttgatcaaagtcaacaacaagtgagtagagagaggaatccagggagtctgaggccaactctttgccactgtatacacacacaccgctccagtgccagggcctgagctggggacaaggtcaatgtggctgacaggcaggacaagaggccattccagatgagtgcagagaagacccacagccatggggtggaagcaggcccagtggaggcatccgagacctcacaggtcgttagagagggcttcccggaggagggaaccagctgggctgggccctgaa

SEQ ID NO: 330838 - DNA, 609 bp, Homo Sapiens
  misc_feature (109)..(122): n is a, c, g, or t
  misc_feature (528)..(528): n is a, c, g, or t
  misc_feature (548)..(548): n is a, c, g, or t
  misc_feature (564)..(564): n is a, c, g, or t
  misc_feature (587)..(587): n is a, c, g, or t
aatatgcaaaccatttattgaactatttactattttaaaatatcattcttaaaagaggccacaaaaattataacattcagaaattttaggtaaactccaaaagtaagcnnnnnnnnnnnnnnggtagtcaacttgtaccaagtttagcagcaagaggatacttccttagagactttcagtggacttaaactcagtttccgctggtgctatgtaaagcatccacgatggttttattgtactctgcaatctgcttggtcacatttttcttaattggctggtaatcactctcttgactcttggttgctatgactaattacatgagttaagggggaaaacaatgtcaataaaaatctaattgtgcctgagaaaggaactaaatactgacatttttcatactgaagatggtacaaaaaagcacaattagaatactttaaaatacagtacatcattttaacagattaaggcatcaattaaaacctaaaatgccaagctaaacttaccgcaaaaaattcatatacattataaacnctttttaatacttaatatgntatggctttttaatcncattccgggcttagggccatctnacggtccatggaccaggtccct

SEQ ID NO: 330839 - DNA, 382 bp, Homo Sapiens
  misc_feature (11)..(11): n is a, c, g, or t
ttaatcccttntttttttaaacaactgtcccctgcattttaataagtgtcctaacttaacaaaatgtaaaggcaaacatatcttaactttcctttgaaacgaagtaatgatcttagaataattttaattacattgaccctcccccaaatgcctacttgctattgttattggaggcattagttcaaaacttcacaaatcggaccttatttttctagactgatgtttggactgacaagcttgttcaccattttattcactcaccattctattttgtacttcagaccattcttttatgataatttcctttttttaagctctgacttaacaaagcacttatattccaggtttggttctaagtgctttattttatattagttcattt

SEQ ID NO: 330840 - DNA, 450 bp, Homo Sapiens
  misc_feature (11)..(11): n is a, c, g, or t
  misc_feature (55)..(55): n is a, c, g, or t
caactggaaancccacaggacaggaaaaagctcctgcgaatggagcacttttttnttctaaatgtttcaatcattatctcttcctagtccagtgttttaaagactggttggccagttcaaatttggatcaaattgaaaagttgtctctagggttttgatacaatttagggtcttctgtaacttacagggtttctattttatgtttatggccacctaaaattagtttttaactgatatttgagaaccgtaaacactttagaacattaaaaaggaactttacccaagcaaaatctgatcagctaaattagagctcagttaaattagagatcagctaaattagctgcagggataggtgggtgtggatagcatccagggctccacaggctgaccagtgcccctgggactcatcaccacagtacattgttttaagtaagttcttgttgttgaacc

SEQ ID NO: 330841 - DNA, 466 bp, Homo Sapiens
  misc_feature (420)..(420): n is a, c, g, or t
aagaaatattagctatgttttacaaccatttaaaaactccatttgatggtagtaatacagacaaatgacactctgatgggtaaaaaggcagaactcctttgttactggcagctcccaaatcagaagaaggctgcccaggcaggggcctataggggatttcaccccaagaccatggtaacaacaagctggagctacacggggcagcttatggtaagcaggatgtgtttagctaggtcttccaagcttctcacggattgcctaatctgaatgatctccggggctccagtgtatagggactatccttaattgtttcctacctggttctggggcaataggggcaggcgcacagtggccttagtgtgtgagatcaaaatagtagaaatagttgaagtgtggctttaatcagctgctcagaaaggnaaactgattgtcctctagccagggcttcaggactgggtcaagaaac

SEQ ID NO: 330842 - DNA, 485 bp, Homo Sapiens
ttcataaagctttccataaatatatttattaaaaaccaataggaggagcacttcgagtcgagtgtaagggcccttcacaaaagcagaaggaacactggcccaaacccccagcaccccggaagcagaggtgagatgggagcagcttgggagccccccattggcgccgctctactggggaagccggtccgtacgtaggccttgcatctcgccacctccacttctgtcctcaagaacaagtcctaggtcaagggaaacagcacagcctgtttataattaggaaacacttaaaacagcctggcatttgggaacagccatgttaacgtgagcaaattcctctcatgaaatagcctgcagctattaaggaagcacgtgtgtgcagggaagcggaggcgcaagggaccttaccgcggcagtggaaagtttcccggggcattggtcatggaaagcgtggttttttaaggaatcagaggggagaaaggggagag

SEQ ID NO: 330843 - DNA, 401 bp, Homo Sapiens
  misc_feature (12)..(12): n is a, c, g, or t
  misc_feature (132)..(132): n is a, c, g, or t
  misc_feature (273)..(273): n is a, c, g, or t
  misc_feature (283)..(283): n is a, c, g, or t
  misc_feature (311)..(311): n is a, c, g, or t
  misc_feature (351)..(351): n is a, c, g, or t
  misc_feature (384)..(384): n is a, c, g, or t
attatatttatngtataatgaagaaaaacaacacattcagggaaaaattgagattaacttattttccttaaaaggttcatctcaaggatggcaacaaagtccagcttgtgccgccaaacggttttacatgancaaaccgtgtacagcttcttgtgtgaactgttgactacaaacatttaccaaatacataaatctcttttaaaaaagccattttaaatataggcaaagcaggtgtcttcttgcacagcaaaggtgaaggaaagtttctacagnggaaataggnaggttttacatttggtaaaatctttttncaccttctaatcatcttggcttaaggatccaatgccgggngttttcaggcttccttatttactatgtatttcntgtggcggcatgatggg

SEQ ID NO: 330844 - DNA, 495 bp, Homo Sapiens
  misc_feature (465)..(465): n is a, c, g, or t
  misc_feature (471)..(471): n is a, c, g, or t
  misc_feature (482)..(482): n is a, c, g, or t
ctaatttacttgggtgggtttttgtgcaatttaccatcttggcctgagctgatcaccatttgaaccatggatataactaagggtggtttatggatgattcacttttcaaagactgtgaccctggtccagggcttaactcactaatcctctttcaaatttgtgttgtacagcactggaaatattttgcagtgatttttagaaacaaatatcacttatccaacttgttgcggagaacaatattacagatttttatcagtgggcattgttcctaattaacttaccagcgctgacgtggtttgtttaactgtgttcccaatcttgctgttttctattctaactgatctaggagactgactatattaaagggggtctacatacagggcagtgggtgtggggtcatagtggggattcaagggctgtaccgttggccatggtctgtcaccttctcctcagctgagctgcaanggggangttccgtgggngcccttctctgcc

SEQ ID NO: 330845 - DNA, 475 bp, Homo Sapiens
aatagtccaacttttaacaacatgagctgaaactaaaccaaagtactcttctttccaagtcatgaaaaggaaaccttaaatatatttccaagaaatcctgaccatagtctgtagatctgtttttaaaatattttccgctatcttcatttctaagtttcaatattcctagatttggtagtttgagagatgtaacttcatttagggaaaatgataataggaattttctatgttaggctttgcccttaaaaattaaatgtgtcctggggcagatggagggatttcctgggtgtgcatcactttctagcatcagctcttcagggagcccacgggagggaacccctgtattaaagtcaatgcaccaaagggcagctaggggtttccatacagacaccatgggtccaagccctcatgaaagggtgaggacctggagtttgtcggggatttgggttcttgtacacagatacaacacggccgc

SEQ ID NO: 330846 - DNA, 709 bp, Homo Sapiens
  misc_feature (632)..(632): n is a, c, g, or t
gcacaacactcaagaccagtgcaaacccttcccaacccacttcccaggttgtaaaaaactggggttttatgtctctgggggtagaaaggtagggtgagggcacagtagtgaatcagaaaaagaagacatgttttaaaaggtctgtacacaggtagtggtgtgtggggtgggggatgtacacttcatcactccaacatcaaaaaacatgatgcaaaaaggatttcagcgatgaccacagatttcttagaacccttaccacgtatgcttgccccccttcccccatccaacttttaaaagttgcttttaaaaaggattaaaaagtgcacagacactttcgtaaggccacagacagattgtcacacaagtcgtttcattagggactcggataagacagcgagacagttaaataccgagaaattccaggaggccgcatgttcctgagccggtgccccctgcccaggactggggcaggcgcagggccgagcaatgggaggttattgcctctgcctcaactggacggactcaccggggttctcctgggccttggcgactgatttccagggcctgaaagcagcaattagccaacctcctcactgtgtctccctggcaggacctgagggtgatcaccagancgcggggcctctgggggttctacttaacgccggttttggcagcagctcactgactgcaatgtgcccctgtgccgaat

SEQ ID NO: 330847 - DNA, 430 bp, Homo Sapiens
  misc_feature (105)..(105): n is a, c, g, or t
atatatttaaaggagttacaaaatatatagctgtcaatgcccatgtagaacctgctactccattaccaaattacatctcccaaaaagccacaggagcaactcttnatgtgagagtcactgacaaaaagtctgtgttaatatttcctgattgagtcagtcagtatgacccacctcccctgttaaagtgcttgcttctggaacacttccttttatctccaaaacgtgcttctggagcactttttatctctctcttccccttttcctctacaaccctagatacaatctgtcatcaagttatgtatcaatagcctccttaatgtcaatcacactttcctcttatgcactgtttcctccctgatccgtgtcttgcccatgatggtaatctgaaaggtctaccatgtcgctcatggtctcgccacctgtgccgaat

SEQ ID NO: 330848 - DNA, 415 bp, Homo Sapiens
gaaatagtgagaaaaaggtatcctagggaaaagaaggtgtgtcttaaataaaatatccaggccagactgtgcaaatgtgtaacatggaactgccattttagactctatctctttaagtgttaatgcatcgcgactactaaatgcattattaaaatggtgccgattgctcaaacctttgtacccaaagcactggattatgttatccaaaattttaaaaatacaaacaaacacttttcataacaaaagttctctcagacttttgacctctctctttctggcattacacgaagctagaacttgtaggggttggagaatgtggcctctgatcactaaccagggttttctctttacactggcttgtttacttatttcttcaccaaagccagggaacgtccctttagctactgcagcattt

SEQ ID NO: 330849 - DNA, 685 bp, Homo Sapiens
  misc_feature (338)..(338): n is a, c, g, or t
cttacaccctcaatatgtattagtcttttttaatcctatgtatcttataaggtaccagtttatccaagctctggtggtaccctccattctctgggaaataccatcacccgcccacacacctacctacctaacccccatccaaaggagtgagccctggggaggcagaggtgtcctggatgactccaccctatcacccacagccacagccaccttcattgtcatcaccctgcaccacctccttctagccaccactgatgacatcagggttggaccctttgatctaagtggaaccaactagattatctctccacagaacttggaggtaggacagagagagnagatctctacttgtggctagaactatgataaagaaaacttagcaacactagtcagacaaactgtaacaaggaaatagagcattaaagaaagcaactcatgggaaagaagaataaagcagaagccctgaagaaagcagaaatcagagactgaatggaggtactgctggagttctcaatgtctttctagttcttgtttcccttaactttcgatgctggttgaggttatgaagaacccggtagtaccgttacaacaacgtttttcttttctactaaagctaaattaatctggcttttgttaagtgaaacatcaagaaactcaaatgaatatagtgtaacatcctgtgtgc

SEQ ID NO: 330850 - DNA, 143 bp, Homo Sapiens
gtgaacccccctggtttgtgttttcccccagtgcctctgtgctccctgccctatttgcccatgatttgtcttctgaggcttaaaaggcagatgctgtcagatgacagaaaattttgctttggggcccaggcttggtggctcat

SEQ ID NO: 330851 - DNA, 179 bp, Homo Sapiens
gtgtgagccaccgtgcccagccaaagtgaatttcttgtaggcagcatatagttggtcttgttttcttattcattgagccattctgtatcttttaatcagataagttagtccatcaacagtcagtttattattgttaggtaaagacttaactactgccagtttgtttttggttttctggt

SEQ ID NO: 330852 - DNA, 414 bp, Homo Sapiens
  misc_feature (76)..(76): n is a, c, g, or t
ttgaacaaattaaccttatccactgcccttcctagtctgtacccttcatcacaggcaaccaaacatgttgtccttnatataacatttccccttgtaagaacagctgatgtggcccatgtttcggctggcggagatgaggacatgttcttactctgcagtagctctctgaaccggaccacaaaccattgggtagacataagatgatgctgcttcccacaagatcaaatccagggtgacatcggaccccacaggctgcattgaagtggttgttgcaagtgttttggataaagtaaccattttcgggaggcttcagggcagggcagtggacaagttcacaggtctggccagatgccctgtatccctctctgcagacacagtcttcaggggatgtgcttccaggtggctgtgccgaat

SEQ ID NO: 330853 - DNA, 468 bp, Homo Sapiens
tcactttcttaggcagtaaaagcaacaaatcaagctgatgaaagtcagacattgaaggtgacctaagaaataactataatgagaaagggatctaaaaaatattttatattttcatgctctcaagtggctcttaggtgaaaaatgttggctatataaaatgtctagtcctgtattggtcctcttgggatagacctgtatccattggtgctgcttctttgtggagatcctgtcagccctgttgggtattccagctgggtgcttgctcttgatcctcatttccagacatcctaggaagacttattgggggcatatttaaacctgtgtcctcccccctccttcaggtgctgtaccctgtgtggccatgtgcgtaacctggatgctgtgggagtggcagtgttacctgccctggcccttccccaaccaccctgtgggacggacagctgtgcaccataacccagccccaggtat

SEQ ID NO: 330854 - DNA, 476 bp, Homo Sapiens
  misc_feature (37)..(37): n is a, c, g, or t
  misc_feature (44)..(44): n is a, c, g, or t
gaacccattaccctccaaactcgaccccagggccccnccccctnttgccggatttgccatgtacccctgaacattgtaaatatgtccacagctgttagaaactatatggctgggtccctgtgaagtcctttttagtgaataatccaaacctgaggtggtccttggggactccccaacacacacagtattttacaaatggcaggctgcacccgattagtggggttttaaacaaatatacaagattatgaacagcattctttactgaaattttttaaaaaatgaaatagatgttaaagagtagatctaacaagttgaggtatctgtttatgaaatcctgggcagtgatgtgcgctaagatgaatataatttgtattgcacttgcctttaactttactgaatttgcataggcatggcaactcttagactccctgtcactaagtttagataactagtgacttgaccaccacttattattt

SEQ ID NO: 330855 - DNA, 382 bp, Homo Sapiens
  misc_feature (42)..(42): n is a, c, g, or t
  misc_feature (89)..(89): n is a, c, g, or t
  misc_feature (142)..(221): n is a, c, g, or t
acccctaaggtgtttttgctgaatgtgaccatgtcagaggcnggaaagggaagcatcatggggttaggaaaggaacactgagcaggganacaaagaaaatgggatcattttgtgagtgttcgctgtgtgtgtatgtgtgacnnnnnnnnnnnnnnnnnnnnnnnnnnnnnnnnnnnnnnnnnnnnnnnnnnnnnnnnnnnnnnnnnnnnnnnnnnnnnnnnctgcagcacagctagtggaattagaatttgaacccggctcttccagactccaggtgcttcacaaccatcccaaacctagtcatttgcagtttaccttcatgattttaccatttccctttgccatagctagtgttatttacttaataattccttttgaatca

SEQ ID NO: 330856 - DNA, 460 bp, Homo Sapiens
  misc_feature (88)..(88): n is a, c, g, or t
tgggcttgaaatgatgagaccatggtcctaagcgtcttcataggaaaaatcatcaccaactttgaagtactggggccgttgtgaaccnaatccacctccaagacactacagcttctcaatgacctctccattgggtacagtagcgtaaggaagctagtgaagcttagtgcggtacagttcatgcctgaacaatcacacggtgagtgattttagctttttttcctggccctcctaccacccacacatacactttctcgacacataaaggagatatgtaaactgaggtcccgggtattgctacagcaaagacggtggtcctgattcccacgatactgccagattatacttacgtcatcagagtggctctttgagatccagatgatgtgagttatggtgaagtcacctactgctactcatactgcagataaattagtagtagtgacaacggtagcctgccttc

SEQ ID NO: 330857 - DNA, 538 bp, Homo Sapiens
ttgagcagacaaatctttattcctgaggctaaaatatgcaccagttccctccctgtaccgcgccactgccagcctgactgcatgcaggccctgtcccagacctggagcgctgaacttggagtcccaggacctccttccctgagttgtgtgtgtgtacatggaggggactcctgggtagcacctggaggcggcctaggggtgaggggcttctcaagggtgccctgcactccagaggtgcagtcttgggcaggatgtagcatgttcagagtctggtgaccgaaacagggctgtcggggacaggcctcgggtgttggagggcaaaggtgacagcatcatggacagaggcaaagagatgcttcttggtgatggatgcatcgaagaagtgcccagcctcaagctggctgaccacagggctgtggcaggccgccatgtacacctccacctcaatctcccggaagtcatggaaaatattcttcaggctcttgaggcacacagtgtccacaaaagggagggaacccaggtccaggatgaggctgtg

SEQ ID NO: 330858 - DNA, 470 bp, Homo Sapiens
tggacccttaagaattttatttttaaaggagattgaagccatagaactcatattgacactcagctgttttacaaaagcttttcattatctgaagacaaaaccgaaaaagccaaaattaccattgcttcctccagcttgtcaggaaacctgtgggctgaatccgcagggatgttcaacgtcaatatcacgggaacacacattcggcacctagaaggcacgtgggcaaagtaatcatcgttcaggcccaacccttaggtttaaaaagtcaggttgtccatcccattgggttcactgagtgaaggcacataaagcaattgaggaggaggaggaacccctcgtccccctaggagcagacccaagcttgtggcaccaggcatctgatggtgccaggaaagccactggaattgtcacacggcgagcacagagggccggccaccagtcctcgatgcttctgaaccctgaagcccgat

SEQ ID NO: 330859 - DNA, 399 bp, Homo Sapiens
  misc_feature (107)..(107): n is a, c, g, or t
  misc_feature (138)..(138): n is a, c, g, or t
  misc_feature (157)..(157): n is a, c, g, or t
  misc_feature (183)..(183): n is a, c, g, or t
  misc_feature (202)..(202): n is a, c, g, or t
  misc_feature (207)..(207): n is a, c, g, or t
  misc_feature (210)..(210): n is a, c, g, or t
  misc_feature (262)..(262): n is a, c, g, or t
  misc_feature (266)..(266): n is a, c, g, or t
  misc_feature (276)..(276): n is a, c, g, or t
  misc_feature (279)..(279): n is a, c, g, or t
  misc_feature (308)..(308): n is a, c, g, or t
  misc_feature (356)..(356): n is a, c, g, or t
  misc_feature (366)..(366): n is a, c, g, or t
  misc_feature (373)..(373): n is a, c, g, or t
ttttcagaggaaaatatttatttcaaaaaacagcagaaaatatggatgcacataacagtggagttacatcattaatgtgttgaaagaaacgagctgacaacctaganttccatactcagaaaaaatattttttaagantaaaaattaaatacaaatnttttcagacaaaaacaacagagatgntcagcagacctcctctaanggaantantagtaggggtacttcaggtgggaagggaaatgaccctaggaaagtcacagangggntaaaacacantgntagtgggcatatatgtggggccatcaaantggaacatcaacagtactgtgtcttgtggaaggttttaaatacagganttaactaaantttcccnataaactgttttaggcttgtcggggg

SEQ ID NO: 330860 - DNA, 504 bp, Homo Sapiens
atatgttgatgatgttttaatttctagaatattgtatgacatggaactattcagaattcctttaaaaaggaatctgtcttgattaataacattattaaggtactttcaggctttcccttaactccatcgagaaggaagagggagtatgtgagtacatgtgcatgtaatgggtcaggaggaacagaagcaaagaaggaagcacgtgggaaagtgagatgtccataaactgaaaaaccaatttacagaaagggcatctgatgtattttctaaataagggccttgatcaggggtaaccaatcctctttgtaggcacattctacactgcccataaataaaggggtctctttaaattaacatttccagtattcattgaacagtccggaaatcctcttttcaagcgttcgatgagtccctggtgtgagtccaaggtgcagaagttgtgttcgggagaggtttgcaaggttagggaaggccgcaagcagcttctccccatgccagttccag

SEQ ID NO: 330861 - DNA, 453 bp, Homo Sapiens
  misc_feature (190)..(190): n is a, c, g, or t
  misc_feature (331)..(331): n is a, c, g, or t
  misc_feature (404)..(404): n is a, c, g, or t
  misc_feature (436)..(436): n is a, c, g, or t
tttcacattatacataattacatctttctttaattatcaaagaatcactttagaacattagagttcttccagatcactgaataggaatttcaaccattacattccagtacttagagaaaatgtaaatataattgcctttagtcaaacaaaacaaaaataatatatttggatgatgaacaagtcacccagnaaagggctgaaaattaggcatgacagggagagaaaacatttctggggttgggcgacgttgaaacactgggctgtgcattaggtccgggtgtggggatttccaggcctcgtcctatgttgctggggattctgtttagtctcngggcagggacttgccttccggggcttagttccttcttctggtaaattgggcacacttgcctgtttccgagggnctgagggtgatggttaaggccctggcacccgnttggggatggcaccgct

SEQ ID NO: 330862 - DNA, 440 bp, Homo Sapiens
  misc_feature (96)..(96): n is a, c, g, or t
  misc_feature (291)..(359): n is a, c, g, or t
aaccggtgttttgggtcactgttttgctggtgaaagcctgtgtttaatgaggctgccctagcaagttttcacccctttccctgcaactcagcacantcccctggggcggagtcaggtccatgggctgcaaccctggagagtttatggcaaacagaagcccctgttaccctcatcccaatggagataacccttgcctgccctaggagatgtgctgtataatcttcccaggtcttgtttttcttgatagactcatggtagcttttacatcatttccatttgcgaatgaaactnnnnnnnnnnnnnnnnnnnnnnnnnnnnnnnnnnnnnnnnnnnnnnnnnnnnnnnnnnnnnnnnnnnnntatatttcggagattttcaacaacatgaaaacactcatagatatacaccatgtataactgtgtagcctagatataccattt

SEQ ID NO: 330863 - DNA, 230 bp, Homo Sapiens
catttagccgttctaaaattaaaagttaaatgcaaatcacactattcatggccatatcattttcttcctggtagtgaacctctggctctttctgtcttgttacattaaatgatatcttaagaaaataaatgacacctgggttgttatagtccatttggctgcctgggcttttgtgggtaagtctgaactgatatggggaaaggcatgttttactatttgtacaaagtctc

SEQ ID NO: 330864 - DNA, 476 bp, Homo Sapiens
  misc_feature (417)..(417): n is a, c, g, or t
  misc_feature (444)..(444): n is a, c, g, or t
catcttccaaagtttttaattcattggtttctagtatattcacaaagttgtgcaaccatcattccacaatttcatcatcttccaaagaaagcccgtccctgttagctgtcatgcctcttctctcttcctccagtacctggcaaccaccaatgtgctttgtctctgatacacagatttgcctattctggacatttcacataaactcgtgattggcttctttcacttagcgtaatatttgtaggattcactcaggctgtggcatgcgtcagaatttccttcctttttatggccaaataatattccattgtatgggacagaacacacttcatgtcttaattcatctgtgggatgggacatttggggttgttgcctaccgtttggacttttgaggtaatgctggctatggaacgcggggancacagggtattgtgtggggtgggatgnttttcaattctcttggggcatagaccggggaa

SEQ ID NO: 330865 - DNA, 341 bp, Homo Sapiens
  misc_feature (15)..(15): n is a, c, g, or t
  misc_feature (29)..(29): n is a, c, g, or t
  misc_feature (44)..(44): n is a, c, g, or t
  misc_feature (66)..(66): n is a, c, g, or t
aagggggggaacaanaccccggtgccctnccccctcctcccctnggggctgttttccttcctcctnacatgggcccactgtcatccccggaactactgtggccccaactcccctccctgaagccctgaacccgaagggtagggattcccggagcccctgccacagagactacactacttagagagtcattccaaaagacaaaggggaacctccaaaatgccttccttttcattctgaggagtctgtcccttctgtgcatatttatagtctacacgggagtgtctgatgcaactttgaattatgcaaatgggaaatagtgcacttgtgtacaatctttatat

SEQ ID NO: 330866 - DNA, 177 bp, Homo Sapiens
  misc_feature (23)..(23): n is a, c, g, or t
  misc_feature (29)..(29): n is a, c, g, or t
  misc_feature (37)..(37): n is a, c, g, or t
gctgttgaaaaatgttttgaaanccagtnatttttgnagcctgaaagtttgtaaaattccaacaaaaggaaaaagtaatcctgtttttggcaaattgagtaattggcctaaacgttagaaatgtgtttgttcatgtttttaatatccttatgtatactgatgttaggatacttctat

SEQ ID NO: 330867 - DNA, 523 bp, Homo Sapiens
aacatcacaaaatgaaacaatatagaaagcttaaagttaaaggtattatcccttcttctgccctggtctccctgctcttgggtgaccaggcagcccttgtaaagcatgggtgtgtacactcagaaatgtatccttccttatgcttatgcaagcatgaatgggttttgtttgctaagggtgtcacattcttcgtgtctataacttgcttttttttccccttcaatttgtggacaagtcagtatatcgaagttttacccttttcagggctagtgggtagcccctcctgtggacactccaccaattattagccagatcacggattaaccttaggagacaagaggactgttaggaaagtcctgtatgtgggaggccgctgctgctcctctctcaggtgactttttccaagtcctgcacctgttggggagggcttctctggggagcaggagtgtatgggcttgggcaagcacctagggagggaaggtaggagtgagatgccaaaccacagggtattgaaggtgctagc

SEQ ID NO: 330868 - DNA, 629 bp, Homo Sapiens
  misc_feature (106)..(106): n is a, c, g, or t
  misc_feature (498)..(498): n is a, c, g, or t
  misc_feature (527)..(527): n is a, c, g, or t
  misc_feature (533)..(533): n is a, c, g, or t
  misc_feature (570)..(570): n is a, c, g, or t
  misc_feature (583)..(583): n is a, c, g, or t
ccccgtaaggaaccactggtctatccaaaatgaccgtttgtgattagctggagttctaatactgttacatccccatttctgaacatttggatccagacgaacttcnatcatacttcagatggaaggctttaattttagcaaatatatcaactggtgatccatcaggcaaaagccatggccaacctttgaactgccatgcaggaccctgcacaaaaacggctacaacgcggtcccagtcttgaggcataagtttaaggggctggtctactactctataaggtactgtaacactaattgcagtgccccctggttgcatctggtcttttcttctttgtattagagtttcattttctcgttgacaaccttgtttcttcttttcatctgatgggacaaatttcaggtcctgtagaaggtcttttgcattaagcatggttattaaagaggtggtagctgcaggaattatgataatgggtgttcgagatcctttcttctgatttnggggaggtcttggcttgagaaactggtcnttggtnactgggctgggctgcaggagtctgagttcttcccggncagatgcaccctncctttacagattttcagtgttcataccattggtaggttcccatagt

SEQ ID NO: 330869 - DNA, 425 bp, Homo Sapiens
  misc_feature (320)..(320): n is a, c, g, or t
  misc_feature (368)..(368): n is a, c, g, or t
ggaatttaagaacaacaacataggtagcagaagagatagctatccctgattattttgtactagaactttaaaatagctgaatttttgtgaaaccccccatggtgagaaaccaaccttgcttctcactccttaattactgttttagcatagcttatttgaaaggtgtatccaaaaatatgttttcctgataccatgcttgtgttattttttttaaatattactaacacaagctgctgtttttatttctaaagtgtagtgttttgtccttttaaagtacatcttcaataaataactttatacttgattttgtaatcaaaganaaaaaacacacacacacaaccaaggattttaaaacacagaaggggccngggtaggggtagtttcatggcctgtaaatcccagccttttggggaggggtgagggcg

SEQ ID NO: 330870 - DNA, 551 bp, Homo Sapiens
  misc_feature (377)..(377): n is a, c, g, or t
tctaaggaatgttctgggcaacacactgactgatcaacacaaagtcctagacagattttgagtgaacaagcttaagttcctgttagttaaagtctggtttgttccattcaaagtcaggtacagagagaggcgcgtgcgtgtgttcggaagcacaggtgaatgtaaaggtttgtttcctctcccagcacttaggcatactgcccttttctccacagtgcccctggaggacacacggaatgaagtcagcagctggcctggggcagcttctgcttcttctgtgcttgcttcacctgtgtgccccagaaagtgtcttctgtgacattcctgacttcctcttctgtcttttctccttttctttccatttcaagaaaaccctnttcttaggaaacaatagtaggccaacatgtgttaggcacctaccatgtgctggtgttgacttaagggctttatatggcattcgggtcctcacaatctaacaagggttcttccctgggggttcagcagaccggggtttcagtgttcttgattagtgagtgaattggggccagttt

SEQ ID NO: 330871 - DNA, 505 bp, Homo Sapiens
  misc_feature (36)..(36): n is a, c, g, or t
  misc_feature (44)..(44): n is a, c, g, or t
  misc_feature (50)..(50): n is a, c, g, or t
  misc_feature (58)..(58): n is a, c, g, or t
  misc_feature (68)..(68): n is a, c, g, or t
tgagtcaaaatgcacatcagatccgggtaggaaacnaacaacanattccnaaatcccnatcaattctnaggcctcccccggaagatctgccaaagtgagaaacgcactggcccccaccctgtttctcccccacttcccccagaactatttctgccttaggtatctaccaaaagcaggctttctactcccagggacaagaaggataagagacagaattctctatgttcacttcaccaatcaattatttcaactacttataaaaagcttcctatgctgggtacaatgatacacatgaacctactcagcccttacaattcttccaggtaggtgtgtttgtgctcacaatgtaggaaagtgaggtggaagctcaggagtgtcctatccagagccacacaagcagtaaggagtacagctaggctggaccaggtcttctgatcccatgtccggtactcttttggccatatcatttgtttacactcttacaagcctatgctaatttggacac

SEQ ID NO: 330872 - DNA, 477 bp, Homo Sapiens
aagcccattgcatgtcagattctgttctaggtgctgggagtttaggcatgaaaaaggcagacctagtccctattaagatagttacagattgtagtaggtgacacaagataagaggataatgtgagagggagtaaatgatgtgtattctatggttaaagaagagatgacatttaaactgaagccttttgggataaatgcaaaaagccaaacgaggcactttccgggcacagtgaacaccaaattcaaaggctctgaggcatgggacaatcctggggtgttcaagaaccagaaaggagggccatatgtagccaggcagagaggttaaaatgagattggagagaagggcaacagccaggttaagcagggccttcctagaacagaatcacagccccatgtgcataaatgacacttgaaaaatgtgtcctgaattactttagtgaggctgacatgtataattatataagattgcccacgcct

SEQ ID NO: 330873 - DNA, 695 bp, Homo Sapiens
  misc_feature (387)..(387): n is a, c, g, or t
gagagagaatgagtgcccagcgaagggagaagctccttataaaaccatctgttctccttataaagatctcttaataaaaccgtcagagaactatctcattcactatcaggagaagagcatgggggaacgcccccatgattcagtttactccacctggtcccgcccttgacatgtgggtgttattacaatttaaggtgagatttgggtggggacacagagccaaaccatatcacaaggctttctcctccttgctgggattgtacccatagcctctttctgagtcctctctcttttagcctctttatgcctgcagtgcatccttataccatttctagagtcatctttataaaacttatactctccgtatgactcataaatcctgttttntttttgcacagtatattaagtataaaatttgttaaagtctttaatggtctgcccccaagctacatttccattttgtatgtctttcagttcctttctactttgtattttggctggttgagttaactgaatttttgccattccattaacccatcccatgcttttcccacttctagatttcacttttcttgtaggctagaatgtcttgactgggatctgactggagataatgagaacaaaaactggttcaaagagccagggatgttgcataaaagtcctaagattgtatctaaggcaggtaaaatgaaaaa

SEQ ID NO: 330874 - DNA, 455 bp, Homo Sapiens
  misc_feature (108)..(108): n is a, c, g, or t
  misc_feature (272)..(272): n is a, c, g, or t
cccagagaatactctccctccctccctccgtttctctttttacttatttgtgggtttgtctggaaaatgaacagctagcacccttaaagacagaatgtaattctactncttcagatctttggttgaaacgttgagagcatttcccactcccagacaacgagggctgatgtaaacctttctgtgggcccaagttctaggctgggagtgtccaagtcatcaccttcaccgtaaagctgcatagaccaaggacctgctaggaagcgctgcatgtntctcacttcaatccttggcaataatttcatgaggcacatacatactcattttacaggtgggggaaatggggctcagacaaggcacaaaacctagggtcagactcagccccgtgtggcttcaatgccctgctccgtttcccccttagctgccttactggtgaggtcaagggggctacaagaagc

SEQ ID NO: 330875 - DNA, 481 bp, Homo Sapiens
  misc_feature (25)..(25): n is a, c, g, or t
  misc_feature (33)..(33): n is a, c, g, or t
  misc_feature (43)..(43): n is a, c, g, or t
  misc_feature (53)..(53): n is a, c, g, or t
  misc_feature (58)..(58): n is a, c, g, or t
  misc_feature (67)..(67): n is a, c, g, or t
  misc_feature (69)..(70): n is a, c, g, or t
  misc_feature (83)..(83): n is a, c, g, or t
  misc_feature (87)..(87): n is a, c, g, or t
aaaaaaaatgaaatgaaccttcctncccttgtnaaatgtcctncttgtcaccnatctnaaaaattgnannaaaggtctggctnaaancgggaaaatgtgttggcctcaatccaaacccagggatgcctgccactgaaaagcgccagggctgggatggtaaggcatggaactggctggcaaaagctcatttgaagagaggacagacgccttgagggggatggccgcatgctccgaagaggttggtgtcactcatgaactcatgcttccctggaaagccgcttcaggtccgactctgcagctgctttctcatccgcaaaaactacgctgcttctctttgtcctcttcttggacctccgcagcttgacctcaggcagggtgctccccggggagatcggttcctcctgctccactctcggcgtcttgggtgatgctaattccaggtcaaagctctctgaggtaggcttgctgggggtgctgcagt

SEQ ID NO: 330876 - DNA, 431 bp, Homo Sapiens
  misc_feature (27)..(27): n is a, c, g, or t
  misc_feature (69)..(69): n is a, c, g, or t
  misc_feature (78)..(78): n is a, c, g, or t
aaggaaaattttaaagtgccccagtgntcccccggcccagagtaccagagggagggacactttgcctgnctttccagnccctttcctttttaattgtattgattccttttccctcggtaataaataagtcccatccctagttttattaagaaaaagacaggtacaagcccaaattgtattcatttaatcatattcgatttcaaacaaataggttctgtgtatgtgtttgcaaatcaggtgcagcctttcgggttgcttgacaagttgcttgggcagcccttagactataaagtttctacgtcattgatttaagggtgttttaaaatgcgataggctagcttccagaccatgattagtgtcactcctgagaagcagaggtttaatatttcataactgatttcattgcagatttatgtcttccatattctctt

SEQ ID NO: 330877 - DNA, 463 bp, Homo Sapiens
  misc_feature (105)..(121): n is a, c, g, or t
atttattggctgaggtcctactagttgtgatgtgtaagtgttctgcttatgaatgttaagacctgtacttgatttcattttactaaaataagtgggcctgggtcnnnnnnnnnnnnnnnnncctccatcagtttatccaaggcacagcagagctccgtggtgacacctcaccacatctcaggcatccgggctgtctcccgacctccccacgggccacactcatagttccttgtcttgtgcagttgtgaatctatgtcaaacaaaagactgtccttaaaatatgagctgtgggtcagcttgctgtttctttagactgttgatttctgatgtttccatgtaatacttgtgtgcctactgtatgccagggcactgtgcagagcctggggaagtacctcaggtcccagacaagatgaggcccctggcttcctggagcttttatccattctcctgacccagtgcctag

SEQ ID NO: 330878 - DNA, 436 bp, Homo Sapiens
tgccccttctcaaccttaacagggtttgtacctcgcctatagtaccaggataattttgtgatccaaataccactgtgtgctgagtcacatggatgaagaaactaggtgttcattatctctgtccagtgggaaatcgggggcttggctccaagtcacagcacagcaagtgactctgaaatctgccacctgctccacctgctgtgagcagtgcagggttctgctagcagttggtactttaaaaaatattcgttgaataaattgtcatctgacatatagattatccaaacctgccccttctctttgtccttcctgaggctaggaactgtgtctacctcatttgcattttatcttaaatcagcacctgagaaagtccctgggaatggatttcattcttttcctacctccttccagaccacgccgagccctatgcagtctc

SEQ ID NO: 330879 - DNA, 225 bp, Homo Sapiens
  misc_feature (113)..(113): n is a, c, g, or t
  misc_feature (134)..(134): n is a, c, g, or t
  misc_feature (186)..(186): n is a, c, g, or t
taatttaacatctcagaatcctcttttcagagactgcaaaaaacaaaatagttttgcaaccaacctttaaagttattgagtaactaaaagtgatcaatataaacaaactagantttgaactcacctacattgancattcattgtttaagtcaacactaggaaagggtaaaagtaaacaacaaaaanttgctccttaatgtagggagaaatctcttgggccagtga

SEQ ID NO: 330880 - DNA, 483 bp, Homo Sapiens
  misc_feature (50)..(50): n is a, c, g, or t
  misc_feature (55)..(55): n is a, c, g, or t
cctaaaattaacccctcacctaaagggaaataagccttgcggcccgcctnaattnaacctttagaacctgttggtctgggatgaagtaaaacaatcaacaacataaactggaaaattgaaaaataaaacaagtcacagagtacaacatatttgtaatacaaaggactggtattcagaatatagaaaggattccctgggaatcagtaagacaaatagcaaacgacccattggaaaaatgagcaagacttgctcttcaagaaagatgatgtccaaatgggccaattatcatttgggaaaggtgttcaactggcattaggtcattaggggaaatgcaaaattaaaaccaaaatgcaataacactatacacccaagagaatgcctacaatgaacaaaatgaagttggcaagggtatggaaccactgtcgtagaggtgtaaattggtacaaccatgttttaagagtatgcatactcatcacccagcaa

SEQ ID NO: 330881 - DNA, 421 bp, Homo Sapiens
  misc_feature (74)..(74): n is a, c, g, or t
caccaaagatgaccacggtagagcagtggagaaaggatggtcttttcaataaatatgtttatggaaaaaatgtnatgttgattctctacttcacatcattcataacgaaattgtagatggattgttgactctaaatgtgataggtaaaacaatagagcttcctagagaatgccctaggggaatttatgatcttgaatacaccaatatttcttaaactacatacataaagtactaaccataatggaaaaagttaattacatataatacaattaagaatgtttgctgattttaaaaaatctttcaggttgcttggtggatacaatatgtgttgttccagtgatggatacactgaaggccttgaattcgccatagtgcaatatatcaatatagttaaattatactcatatcccatgaatttata

SEQ ID NO: 330882 - DNA, 712 bp, Homo Sapiens
  misc_feature (60)..(71): n is a, c, g, or t
  misc_feature (294)..(294): n is a, c, g, or t
  misc_feature (372)..(372): n is a, c, g, or t
aaaataaatatactaagctaagaaacaatgggaaactgtcatatgtagggccaacagccnnnnnnnnnnnnaaacccttccaatttattaatatctagtctaataaaccctgatttataggacctctgcaccttttttgactttttattcatccattcttaatattctacactatgacaaaatccttaaaactccattattgatgaaatgggaacagacttttgtttttgtatgttggtgttctctgagtggtgaaggcccagggagaatgttttgtttggtggtcacttagcnatttgaaaacatccacttccttgtgacttagctgggtatcttttaacatctgggaagcccacgtccctgattgaaatnctctgggagacaacttacctttcaccaacttgtctgccaaattgcaccatggacccaagattgcagtggctgcatcaagtctaggcctgccctgaagtctggatttgtaagtcccccatttcaaatggggcagaaggcagaggagcagaggagccactgtgcctttcgctgtcctggagccagttggccttctggttttggtgaaccctgcttttataagaggactccctggcatcttccagtttcccgctacttgttttatgtattattttatgtctgtgtttgtcctggagtgctgtaactcctttcactgtctgctgtaagttcaacttcttcaata

SEQ ID NO: 330883 - DNA, 641 bp, Homo Sapiens
  misc_feature (258)..(258): n is a, c, g, or t
  misc_feature (385)..(385): n is a, c, g, or t
gagctatttccttagccacagcaactgctaggctagggtggcagtttcagtttcccatatggtctccagtgacactgcagtgggagtggtcttctcacctctgggcaatgggaaaagtcccgactttccactaggcctcctttgatactagccaactaggagaaggagtaagtaacaccgtattacttcctgtatgggtggaaatctaggctctctaggtggtctccgctgacaccattatcatggctccctacttgntctacatagccctttgactctaccccagttagggtgttgaagatgccaccttgtagcctcactagggtggaagtccagactacccacttggattttgcttgccatgggtaggggagccaggtatatnacatggtatggagagggttgctgtggtctaatatttgggggatttcagtacattgagcctagaactgttcctcatattcttatatcttagaaatttttgattatgttagagatttttgtctccttttagcaaacaattaaattagatacctatcattttaggtcttaaatgtactctaaaggaaaaaatgaaagcagcagtcaaagaggtcataaagtttaattttaatcataaactatcagctttgactggagat

SEQ ID NO: 330884 - DNA, 370 bp, Homo Sapiens
  misc_feature (37)..(37): n is a, c, g, or t
gcggggctactcgactgctctggaggtagcggccggnttgaggagagccatgggacgggcagtcaaggttttacagctctttaaaacactgcacaggaccagacaacaagtttttaaaaatgatgccagagcattagaagcagccagaataaagataaatgaagaattcaaaaataataaaagtgaaacttcttctaagaaaatagaagagctaatgaaaataggttctgatgttgaattattactcagaacatctgttatacaaggtattcacacagaccacaatacactgaaactggtccctaggaaagaccttcttgtaggaaaatgtgccatattgtgatgcaccaacttcaggaaggcaatgagt

SEQ ID NO: 330885 - DNA, 280 bp, Homo Sapiens
cccagtaaccctgggaacacaggagggaaaatgaaatccggcacaggggctgcggggaatcggggcagtcaggaggcggcaagtgcggtgcaagggcccccccacgcggccagctgtggaacttccaccacgactccctgtcctctcctgagcccgcccatcacgtgtagaagctcagaatgctgggcgccaggagggcggcttcctggctctgggcaccgtggttctgtcctaacgaggggcgctctctgggtgtaaaaacagatgttctggctgggcg

SEQ ID NO: 330886 - DNA, 310 bp, Homo Sapiens
  misc_feature (276)..(276): n is a, c, g, or t
  misc_feature (288)..(288): n is a, c, g, or t
ttttctatctgtgaaaaacatttattctgagaatctaaaatctggacaaagtactggactttagaaaaagcctacacaaaattgtctcattcttccctaatacattaataatctaagaataaggaggtgaaaaaaaccctttaaaaataacattgctccagtttgtctgcaggtatgtgatttaaaatatccctgttttattgaggtataggctgcaaactttggtaaaattaggaaaaattaacaaaccctttcaaaggacaaaaattacaaaancaaaaacaaccnaaccctaacgttatatctttct

SEQ ID NO: 330887 - DNA, 397 bp, Homo Sapiens
  misc_feature (137)..(137): n is a, c, g, or t
  misc_feature (157)..(157): n is a, c, g, or t
gcggcacaatcactttgtagaaactgtaaaaaataaaagtatctcctagtcccttaattttttcataaatatttctggcttttgagtagtgtatttatattgtatatcatactttcaactgtagacaattatgatgnctaatttattgtttcttggnttcacctttgtataagatatagccaagactgaagaaaccaaatatatgtgtttactgtagcatgtcttcaaattagtggaacttagttcagggacatagaagagtcttaatgaattaaaatcattcacttgattaaatgtctgtaaatcttcatcattcctactgtagtttatttaatatctattgtaaattatgtgacttgtagcttcctctggttttcaagtaaactcaacaaggtgg

SEQ ID NO: 330888 - DNA, 466 bp, Homo Sapiens
  misc_feature (368)..(368): n is a, c, g, or t
  misc_feature (398)..(398): n is a, c, g, or t
  misc_feature (422)..(422): n is a, c, g, or t
tttgtgtgctgattttttaatgaacaacttataatcttacaaaataactggctgtagctgttttacattacaatacagtagatcagctcctttcactacattcccaatcaagccatccccttgggtgttaactaatgcactcaatagtgatcacaaagaatacaggaagtgccaagttcaatgccttgtaataggaaaaaagagaaggatgagaatcagggaagagctctttactttcacaatccctttactttaatttctgtcagtatctgcccattctcctcaccctggtccccttacctggcctttctggattgggagggctggtcatgctaggttggttaggagccagcctagccctggggccnacctgggggaccaaatccaaccacacaggnaggaggtctctgtgggaaagggcntttccaatggacccacatggggtgggaataaggaggtaggccag

SEQ ID NO: 330889 - DNA, 576 bp, Homo Sapiens
ttttttattttgtgtgctgattttttaatgaacaacttataatcttacaaaataactggctgtagctgttttacattacaatacagtagatcagctcctttcactacattcccaatcaagccatccccttgggtgttaactaatgcactcaatagtgatcacaaagaatacaggaagtgccaagttcaatgccttgtaatagaaaaaagagaagatgagaatcaggaagagctctttactttcacaatccctttactttaatttctgtcagtatctgctcattctcctcaccctgtccccttacctgcctttctgattggaggctgtcatgctagttgttagagccagctagccctgggccacctgggcacaatcaaacacacagaagagtctctgagaaaggctctcaatgaccacatgggtggataagagtagcagaatgtggaccaccacatggattgagtgtgagttgatgttgctgggatctgtgaccacagtgtcttagtccttccactttatcagtgacctgagttgctcaaaacatcaggtcccaggaacaaagactggaagaacctg

SEQ ID NO: 330890 - DNA, 520 bp, Homo Sapiens
  misc_feature (135)..(135): n is a, c, g, or t
  misc_feature (333)..(333): n is a, c, g, or t
  misc_feature (336)..(336): n is a, c, g, or t
taagtttatttttaacaacaaaaaaatctgtatttttctcctaaaaggtaccaaaatttgggcaactataaatgtttcattctatacttagaaataaaataaatggtttcttttttatcattatctgaaagaatnggattgtctggcttcttgaaatccatggcctcttactgggacaggaaaggcattggagttatgtccctaggactaggaaagagtatggttcatgaggtccctggccctctccataactctgcatttgggtcactaaatattgggtaggaaaaagtatttgtccattactttacttgttccaccacctagagccaaagnatntagaaggtaattaatagtgatacggatagaatgcaagccacagtcacctccatccttctcaccatctctcaagcccatgtccttgacctttggtatttacatccatgtgacacgctctacctgaaatgtcacctttttccagcctgtcaaagttattcatccttcaacactgaggcagaaatgc

SEQ ID NO: 330891 - DNA, 345 bp, Homo Sapiens
  misc_feature (36)..(36): n is a, c, g, or t
  misc_feature (82)..(82): n is a, c, g, or t
  misc_feature (107)..(107): n is a, c, g, or t
accctaaagcgcccatgtgtcctttcggctgcccantggccacctgcgggtggttcagtgctccgaccctgggtctgaagtntgtgcccaaagagatctcccctganacccacgctgctggacctgcagaacaacgacatctccggagtccgcaaggatgacttcaagggtctccagcacctctacgccctcgtcctggtgaacaacaagatctccaagatccatgagaagccttcagcccactgcggaagctgcagaagctctacatctccaagaaccacctggtggagatcccgcccaacctacccagctccctggtggagccgcatccacgacaacacataa

SEQ ID NO: 330892 - DNA, 454 bp, Homo Sapiens
tttcctcttttcagggcctcttggtgatgtaacagtgaaaccctcccccagaaaccagggatatgtggtcctataaatgtaaacacactggcactatgaggaacagatagctctgtttctagctccctcactgggacttctgaccattgcaacctgagatacctgggctgcagacagcagggaaccagacatccacaagttattgtttttgtccccatgttttcataatcccagaactaaggctcaaattttctgaggtcctgactaaactattcctaggctaggagccaaaaatcatgaggaatgaggattttttaacactattggccactgcaggtgtcccggttgctgtcttagaagtatatacagtgaaaagacaatggtaacatctgcctccttttcatttgtgaagccagaacaccacattcctcagcttttacacatctgagacact

SEQ ID NO: 330893 - DNA, 357 bp, Homo Sapiens
ttccctcatttcttataggtctgtgtactaatccaaaagcatgttaaggaaataaaatcagttttgttgttaattcagatgattttagagtatatcagtcctagaatgactaattccccttagaatgtctataggtatcaagaatagacctttccataaattggcccctgaatttcactggaacttaaaaactcaagaatgaagggcatccttggagccagtctactgacaagctatggattcaacacactttcaaagctccattttgggatttttacctatttttggaaccagtctccagatgttgaggacagattcaaggtttcacagccttgggccgggctgggtgggctcatg

SEQ ID NO: 330894 - DNA, 452 bp, Homo Sapiens
  misc_feature (23)..(23): n is a, c, g, or t
  misc_feature (30)..(30): n is a, c, g, or t
  misc_feature (38)..(38): n is a, c, g, or t
  misc_feature (75)..(75): n is a, c, g, or t
  misc_feature (104)..(104): n is a, c, g, or t
acctggagtaaaaaaggcaaatnccaactnaaccaacngcctcaaagtcaagaacaccccggggagtctgggaancccttacccccccacatcctaaacataantacgggcaaagttcctgttgaattccatccctcagaaatatacctcaaaccccattaacttctccttcatcccccaatgcccaccttagtcccaagctagcagtctccccactgcgatgactacaaccacctactcttttagtctcctactcttgcctcttcccaaattattcttcacacagcagcccacagtgatcttctaaaataaaaattcagagctctaaccatgagttgtaactatttctctctgtttatttgattatagtctagctcctgtaaacccccataagggcagggactatgtttgtcatgttcactgctatatccccagagctgagcatagtatat

SEQ ID NO: 330895 - DNA, 333 bp, Homo Sapiens
aacctcgacactgggtctcagatccttctgctgactgccagatccctgcatttcaagcactacgccttccacccccaggcactggatcccagattcccaagccttcacccaccagattctggctcctaaaacaagtgcgggggccccagtggcacagcaagtggatcctgggcaactgcagctgctggattccagattctgggtccccaatccctctgcccagtccctcaatgttggaaacctcatctcttgaaggcagatcctgatattccaagggcactggaattcccaaggccctggaatccccggtttctggatttggaatctttccag

SEQ ID NO: 330896 - DNA, 383 bp, Homo Sapiens
cagtaaatatttaagtgagcctcatgccttgtgtccatgcacattgctgggtgcctggagatacaaaggtgacccaagacagaggtggcccctttgccccttcctcaggggagaaaggtaggaagcaagtaaatgatcgagatgctgtacattgagtgggtgcccatggaaggaactaggggagcatcctggggcaggatggggtacagaggaagggatgactcttccgtagggttgtcaggagagccctctctggggaggtgacattcaagttgggcatttattgttttgatattacgttatcaggttcacacaggtcagactttaatttcatttatgttgggtctatttaggcccatttgctctgttacattgctctcagc

SEQ ID NO: 330897 - DNA, 420 bp, Homo Sapiens
  misc_feature (285)..(285): n is a, c, g, or t
  misc_feature (378)..(378): n is a, c, g, or t
  misc_feature (402)..(402): n is a, c, g, or t
agcatgtgtataaagaatgtacttttagtggacatgcttcactttgcaaatatagtgcataattttcaaatacatctttgactcttcctcaaacctgctcagaagctgtgtttttcctctcttcattaaaatgttccaacctggaaattttctctttacaattcagatatttttcacttcttgggaagggaataactaaataatttcaatactttaaactacaaggatgatgtatttttgttctacacagcattgatatggtggagctgtattctttttctaatnatacaaataatatagggctgtaagggtttggtatccattgcatgtatatgttaaggagggataaggaggtatgttattaaaagttaaattttngaggaaattataagtattaaaccnaaaagtcttattaccctt

SEQ ID NO: 330898 - DNA, 286 bp, Homo Sapiens
ctacccacggaggaacccccagggcccaccttttccttatgatgggttgattcacgggcagcacctaccgcccagccccgccgcccgcccacctctacctcccagtagtgccggccggagcggaagccctgggcccccagtacgcagcagtcggccgagaagcgcttgggatggtcagcaacctcctgacgccgctctgccaggcggaccccccggcggtcaggggacagcatcagggccgggtgagccgtgtcagggtccagcgtcaggtccactctcgcagcct

SEQ ID NO: 330899 - DNA, 426 bp, Homo Sapiens
agaagcaaataaacattttatttccacagcacgccttcccttttcccaaagaacatgagttcacctcagccatcaaagcagagggcgaaagtgcaagtgacaaggcaagaggctcctagaaaaatagattatacccaaggctctcctcctggggacccaaacccgtccccaggctccccctcagagcttgccaaatggagtgaaaggcatggaaaggggctgggagaaaagccagctccactgaacaaaggggagaggagcctgggcagtgagcagacctggggaggggtgtggggttgggatgagctttgctccttgggttgagtgctgggaaaaggggaagggggaaggaaataatttatgtttgatgtaatttaatgtaatgatgatgtaatgggtgcgtggtttccattcctggccgacctt

SEQ ID NO: 330900 - DNA, 530 bp, Homo Sapiens
gttctgtgcatttgaaaggagatttctaaaaataattaaggtgccctaactcctttcctcatgattcctactccgaaacctggatggtttagagcccagggctccctgatttccagagctatatcctgttggacctttgccaacagacctgacacttaggggttattgttataaatctaattctctaatattttttacatgttgtttcactttgaataagcaaatgaagaatcagttttctaatatgactttatcctcaagctagagacactagcctatttggtaaatcacacattacttaggtatatttattactataaccaggttggagcttccatgtttaagctgggtatatgatgggtttttgttaaaatgtgccttaaaaagcctattacttcaagagcaaatgattctttgggggaaaggcaaaaataattctatgacatagggcccaagttcatggtagtaagtgtactctttgattaatcacacgctaatatagattactgcctctaactttgtaagtgtgg

SEQ ID NO: 330901 - DNA, 471 bp, Homo Sapiens
ttttttggagatggagttactgtgaagaagttttcacaactatttatgctggtaaaacaaatgctgttaaatcaccttatgcgtcgttttcaacagcagtggggctaattacccggaatacggtctcaccgatgcagttttcatggacatagaaaattcaaatagaatatataatattgaatttaagatttggggggttaaaaaagaaaacttaactttataaaattatttattctattttaagccttctatcatattttcccatccaattgtttggtttcagtggtccagctttatttacaggcatataaaatgaaattgtgagatgttttgcaagcttctttttactttgagtagcttttaatttgtatgtttttatgtggatgaagagcattttttatgcttttgtgcaataggttccaatatgcatttattagacatctgtttaaatggtaatgtagcatttatttt

SEQ ID NO: 330902 - DNA, 411 bp, Homo Sapiens
  misc_feature (65)..(65): n is a, c, g, or t
aaactggttttgtcaaataccctgcactttaacccacgcggcaccccggctgggccagtggccancgatgaccctgaaaggtggtggtgtgggattgggttacggcggcagcccagtactggactttgagagtggccacaaaagtaatgtgttcccaggccaagtttcttcctaacagtggtgattctactctggccatgtgtgcccgtgacgggcaggttcgagtagcagaactgtctgccacacagtgttgcaagaatacaaaacgtgtggcccagcacaagggagcgtcccacaagttggcactggaaccagactctccctgtacgttcttatctgcaggtgaagatgcagttgttttcaccattgacctgagacaagaccgcccagcgtcgacactggtggtgacaa

SEQ ID NO: 330903 - DNA, 535 bp, Homo Sapiens
  misc_feature (150)..(150): n is a, c, g, or t
gctcttaaacattaatacacacatatgaaaaggacacaggaaccagccagcaggagtttccactggccatatctgaaatcaagtgagcagcagaaaaccccatgactgtgactacaacacaatgaatagtcagttggcacacagtgattncacaaaggaaggatggagggaaagaaggcagaggagtgaaaggaaaacactgatttcccacaacctataggtgacctatccttcctttcaaatggataaaggacagaatgaaacattgaccctgcttttttagaagaatctatgatgttctcttattgatgataagaagtttctttacagaatgcccgcctaatacatgtgaaaagaatcacagaatatggaaatcatctttgacatccctgatgaaataatgatttagggatgctaagaccattaggtgaaaggctgacaggaaacagaatattcacaaggtaccagtgaacctccccagattacctgctgatgacgcaaggcaacaggagcatccggctgtcaccaccggata

SEQ ID NO: 330904 - DNA, 443 bp, Homo Sapiens
  misc_feature (31)..(31): n is a, c, g, or t
  misc_feature (36)..(36): n is a, c, g, or t
  misc_feature (70)..(79): n is a, c, g, or t
  misc_feature (84)..(126): n is a, c, g, or t
  misc_feature (409)..(409): n is a, c, g, or t
gggggtcaccttgagccccacgaatttgggncccancgtgggcaacacagcagaacccctgtcctttacnnnnnnnnnntaaannnnnnnnnnnnnnnnnnnnnnnnnnnnnnnnnnnnnnnnnnnttttcggggggaagaaaaactgatgtcctggaactggccagggaaccctgaagagtttatgtggtttacccattgtgtctgtgcccttggactctttttagcaagtaaaatctaattgagtttaatttaatgtgttcccaaataaaaggcagagattttcagattgggcagagaaagtaaaaccaacatcaaaaaattaatcttcagtcccagcttactcgggaggctaaggtgggaggatcacttgagcccagaagttcaaggttacagtgagctataattnaccactgcactgtaacttgggtacagagaagccc

SEQ ID NO: 330905 - DNA, 585 bp, Homo Sapiens
  misc_feature (382)..(382): n is a, c, g, or t
  misc_feature (553)..(553): n is a, c, g, or t
tagcaaccaggtgtctttatttttcggaaagttcgtcgctgggttaacaaaatcgcacctgccggtttgggtgacacctctggccaccatgcactgggccccaagaagagaccaccctgagccatggccctgcaggcaagcaagggacagctgcccagactcagggcccagtaacagtacagaacgaaccaactgaattcacggcttccctccaagctttgaaaggtagcagtccaggctataaaactctagaaggcattgcgtaagaaagtgttaagtctacaacaaatacatcttgtaaaaactcaataaattatttatatagatatatataaacttgtaacatctaataacatcaggaacctgcacacagggccggccnctccctggaaaccgtctccctgcctgggacacacagcaattagaagaatttgtatgaaaataccagcttgctttgaagtccaaaaaataaatctcctaaagaaaaatcctatagaaatctaattctcctgaaaaaggacaaaggaaataaaatatcttcactggaatcacntccaactattaacaaccttttaggcttggagg

SEQ ID NO: 330906 - DNA, 417 bp, Homo Sapiens
  misc_feature (350)..(350): n is a, c, g, or t
  misc_feature (379)..(379): n is a, c, g, or t
  misc_feature (394)..(394): n is a, c, g, or t
aaataagtaaatgaaaataaaaataaactattttaaataaatagaatacattttgtttggtatgaaatctttctctgacatttaccaatcatcacttaaactccggggggtggggtactgatttatcctagatccaaataaagcatgcagaagtggatcattagttaagctagtatctcttttggtttgcccttgaaatattaagacaaaggcaatataaaggtatttcctcaacgtgaggatatctgtacaggcacttcctactaaaggaaaatgtggaaaacagggccgggggcgaatgggcttcacgcctattaatcccaggcactctgggagggccaacgtggggncggattcacaagggtccagggagttttgnggaccagcctggggnccaacataggtggaaaccccctt

SEQ ID NO: 330907 - DNA, 388 bp, Homo Sapiens
actaacaaaaggagatgaagcctccaaataaatacttttttaaggacttggaatttatatcagtcggacataggttcttgtttttttaaccctaagcttatgtattcccttagttttgaggaatttcccctcactgtgagttttgggggatgatgaaataggaaaaaagttgtattgtatttctacttaaagaggaaagaaacaactagtgttagttaaataatgggtaaataggatgcttttcaggtttctgttcctcactccaatctcctgattctaggaatgccccgtaaaaaatttttataatcttacttctccaagatacattctaccagggtgggccatttgttaaagtgtttttatttactttttaacctttgggcccttt

SEQ ID NO: 330908 - DNA, 444 bp, Homo Sapiens
  misc_feature (401)..(401): n is a, c, g, or t
  misc_feature (417)..(417): n is a, c, g, or t
  misc_feature (426)..(426): n is a, c, g, or t
acttcggcacgaagcaatgccaccctttgaatcgctgtgaacactgttctgttgctgttcagagaaaacaagcaaggctgcgacgctggggggtgcaggcagctgcagtgcttgggccagggcagctccgctcttgtggtctgaggccacatggcccgcccaggcaggcctggccacaagcacgtggggtccaaggcaccaggacccaggcaggactgaggtggccccacagcgtggcccgaggcatcactggctgacgggcactcacacacaaccccaataacagcattctcacaataataacaatgaaaaacgaaaaaccaaacacgctgaatgtacatattttgggattccatctatgttgcccttttcaattttagcaaaattaaattgttacattnacccttttaaaacagntgtttttanttaaatggctttttggga

SEQ ID NO: 330909 - DNA, 616 bp, Homo Sapiens
  misc_feature (59)..(59): n is a, c, g, or t
  misc_feature (65)..(65): n is a, c, g, or t
ccgctgatgtattcatgtatgaagagcttcttctctacccaccaaagagttccacggcntgaaanactgctgaaacactggttggtccgtccaggaagaagagaacccccagctcttgttctggattccgagtagaatcattttttagccccaaagtaaatggcacctataaccagtccccagtacgactgtgacaatgatctgagctatagaggccctggggattacccagcaagtttttgaatgaacgcttggaaacccatctgagttgatgacagaaggaggtggtgtagctgatctccttgaagactgtgatcttcttcttcttctcacccccggaaagttgatgtaattcagcttttgtctctttgtagaaggaggagttgacataaatctccgctaatttttctatgagtggcttatcctgcttggaaggctctatgatctctgtggctttaaagtcttcttctctgtttaatgccacagcagtggaatctccattaatgatgtccaagaagaagtctgcagggttattataggcctcacagtgataaccagctgattcaaagtatcccaaggcctcctgagcaggcccgtggaacataattcttccagt

SEQ ID NO: 330910 - DNA, 442 bp, Homo Sapiens
  misc_feature (119)..(119): n is a, c, g, or t
aggtttgaggggggatgtatctgtttcaattaaatatgttaatgggtttagagtctgatttggtaataatttgggaactatcttgtctttcaagcctcaccgaaatcctagtttacagnatgaggaaactgaagaccaagagaggcaaaggacttgtctgacatcaccctacttggctgaaacagaaccaagactcctgactcaagggcctgtgctcttcctatggccccatgcggcctgtatcaagctgctgctgctaccatggggcctgaatgcctctgttacttttcagccagaaggtgcactccaatatagggtgtctgcagagggccaagcatgtcccatgcttccaactatggacatttaagggagatagcagttaatctaagagaagaggccatgggaaaacctggagcttggaagaaggtttgtgctatttgta

SEQ ID NO: 330911 - DNA, 532 bp, Homo Sapiens
  misc_feature (516)..(516): n is a, c, g, or t
acagtggctcttcaattcggaagtttcttcggcctggaattttggaacttttcaaactatctctttgggctcactgctttgtccaagagactatggcaagcatttacctcccactctggtctggccaaacaagaggcctgcaagtgctgtggttgaagtttcctttgagactaaattctgcgaccggggctatgctgggtaagaagttcttggatgggatccccaccttctcctccactaggccacccgcaagtgactcagatgctatgccaccatgattgctttttgtggtcggtacggcggagatgagctcggagggtaccagagtggttactatcgagcgtacactggtggggagagcaccgccaggtaagctgggtcctgctgaggcagtgcccgggccacagggctagaggtcatttttagcagagtgggtgctgggggcgttggggttttactgtccagctctgtggataactgctctgttcccatgagccccggagctgtggtgtctanccttggccttcagtct

SEQ ID NO: 330912 - DNA, 400 bp, Homo Sapiens
  misc_feature (314)..(314): n is a, c, g, or t
atttaacaaagggattttattacctacaacaagtaaggaggacagctggggcagtttcccaaagcagtacctcccaaacaatggtgaaaacagctttcgttaggctagttggctgagccattgtatgcggaggcagagtaaaggcagagactgtgaagtagctgatcatgcttctccatatgtcacatgtgtaggaaatgggcagataagctccttcctggggtggggtttttagtatgggtaatgaggaaagtttgcaaggttcatctccaactcagggcatctctgggactcaaccagtttttgttcatctnggggctgagcttcactctgggaactttctggaaactcaaggatggcaaccgttacaagtggggtgcttttttcggggtgcataccc

SEQ ID NO: 330913 - DNA, 203 bp, Homo Sapiens
ttgaaacttgtgaccagtgtgaaaccaggaggggcagttttaacattggatttgtgatatttctgtttccacagtaaatgtgaatatgagctgaagacaaatataattgaagcccacattttcatactttctaagattttagctttcctttacgtggtttattccccctgccccatcactttactttttttcttttccttcct

SEQ ID NO: 330914 - DNA, 237 bp, Homo Sapiens
ggcgtgacaccccacacctgggccattatcaacattctaaacattaactttgtatcaaaattcattcatttatatgggggacttaaggggatctgcaggattctacttcacacttaacgtttattcaattaacatatgcaaacttatgtttaactaaaatgatttttaagagagttaagaacctgacttactgtcttcttttagaaacagtctggaggaaggggagagaaaccatct

SEQ ID NO: 330915 - DNA, 666 bp, Homo Sapiens
  misc_feature (504)..(504): n is a, c, g, or t
taaagaaacagaataatttttattgctaggttaatttattacaaagataataataatagtctgttgaacttagttacagttaaacacactgtaccgattcaaaatcattatactagtttgatagggaggagggatgggggagtgggctggggttccaggaattggaagtatcagggtggaaataggaactttataccaagccccatgaccagctgtgcttcaagtgagttttaaaattaattggtcccttccctgaagagggtctggctcagaagaaacaggaactggtagagctgcaccctgtccacagtgatccactactaaaaatactcatacctaggaggaccttaaacttctgaatgctggttcagtaaggctccactgtaaaatcaaacatcttttgtggtattcatttttttattgcttgatgtctggaacagttaccgaaactagacctgtatcgcgcatctctactagtgcttgggcctcaaagcagtgctcgtnacctaactgcacaaagaaatgctattaggtccaattgtgagataagctgaattataaatacacaattttcagaacgacaggcacttaaagctcattaagtaaaatacaaaaatagattatattaataagaaatatttagtgttcatcaaatcctgtgccgaa

SEQ ID NO: 330916 - DNA, 373 bp, Homo Sapiens
  misc_feature (233)..(233): n is a, c, g, or t
agctcatcagctatggttagtgttagtgtattttatgtgtgacccacgacaattcttcttccaagtggcccagggaagccaaaagattggacacccctggtctaacatgaccatccaccccggattcccaatggcagtactttgccttgtccccagttctgatttcaccataagcgtattctgaccctcagagactcaagcatccgccttctctgctttcctgggggccatgnctcattaagatgctggaaaagaaaagtcttcggcatcattgtgcacagacagggctgccattcagaggggcttttttggtagcacagatgggaatcaggacattagggtaggaggccccagttacttcaggaaggacaat

SEQ ID NO: 330917 - DNA, 460 bp, Homo Sapiens
  misc_feature (14)..(14): n is a, c, g, or t
  misc_feature (22)..(22): n is a, c, g, or t
  misc_feature (176)..(176): n is a, c, g, or t
  misc_feature (440)..(440): n is a, c, g, or t
  misc_feature (448)..(448): n is a, c, g, or t
tgccttcctttccntgggcccnggttaaattttcccagcctaatgtgagttttaaccttgtaaaaattttaactttgttgctggaatatttttgtactacaaataatccttgaagcctcgttctgggatgaggctaaagttacttggagactgtttgaatcctttacaaggcttgntttttaagcttttgttcagcagagtcgcagcagcttttagagactagtttttccatgctactgagggcaggaaccttctgactactcatctgatgccttgtgagattctcactttgggtagtggaaggaggaattactctgctacttctgtgagttgtggggattgtttccactgcttctttctggggcttctctggtagtttatacgcatgtgctaattaatcagtactgagctgaagacttgagagggacctggtacaccgnagccgagnctgtgccgagat

SEQ ID NO: 330918 - DNA, 401 bp, Homo Sapiens
  misc_feature (38)..(38): n is a, c, g, or t
  misc_feature (69)..(69): n is a, c, g, or t
  misc_feature (389)..(389): n is a, c, g, or t
tttgatgaacagcaacatttaagcaacacaccttgaanatgcccaaatgtgctaaaatgtgctaggacnacttggattagttaatacttaactctattattctgaagtctggatccttgcagactttcccctggagggccatctatacagagaggaccttcccccacccagagatgtagcctcagggattctccagagctctggacactgaacagccagaaggctaggtcttccaggttggctggccaggaaaaggaggaactcaaccctgtgttacctgcttatgagcagcaaggccagcatgagaacccagatgtccaagctctggggccacctctgttccccatagtccctccaacccccattctagacactgcagacagaagctncctgtgccgaat

SEQ ID NO: 330919 - DNA, 130 bp, Homo Sapiens
tttaagtttgcttgttcaattcattttaatacactgtattagttccacaaaatgggcttttgaaaattacagtaacttgcttgaaacaaactcttctccaattcgatactgtttttaaatttttggcttt

SEQ ID NO: 330920 - DNA, 394 bp, Homo Sapiens
  misc_feature (268)..(268): n is a, c, g, or t
  misc_feature (373)..(373): n is a, c, g, or t
  misc_feature (383)..(383): n is a, c, g, or t
agaaatcaacccatcctgtcacttttcatttctttttgctcagaattttaccaagagatttttactatttcaaaacatcatgttactttgattctgccaaaacaacacacctgaatcagtccacactactaagtgcagctctaggcagaagtacacatgttcaagtacttcatacatgtagttgcttcccaagcatttgaatactgaaatgcatattatgttattacaaattgttttcctttaatttccctttatattacaactatgnaaataatactgtgggggtttttcgtttgagacagagtctcacttctgtcacccagggctgggagtccaaatgggtgcaatcttgggcttcattggcaacctctgncctgcccagncttaaggccat

SEQ ID NO: 330921 - DNA, 552 bp, Homo Sapiens
  misc_feature (292)..(292): n is a, c, g, or t
  misc_feature (475)..(475): n is a, c, g, or t
tcctgttaagcattaatagctaatcactgggacttgaattctgatggcagatagtctcttgcttagtgagatggagttaactattttttagtaggaagtgagaacagctgattttcatgccacgtttcatagccccacttttggtagactaccaccacgcttcttcgcgtaagagttggcatcttgggaatgaatgcccagccgctcgtgggttggtgcaaagaagtataaacatatatcactaaggaaaaagaaagtttgtcttgcccttctgacacagtgtgtgcacttncagggcaatttttgggaaaatattaaaaaattccaaattctgcctttcagcagcatccaattgctaggaacatttcattcatttccctgtaatattaatgttctttaagcataatcactaattataagttgtatcctatttttttccagcttaatttctgtggtttattgaaaaccaagtatnaaatgtgactaaaagcattttgctttgtttttatagttaactttcttaagggttatgggacattttataatgtaaac

SEQ ID NO: 330922 - DNA, 323 bp, Homo Sapiens
caatatttaattttaatttttcccttataaattcacttcctatgctttatctcttttatgtttgtatgtccattcttctcttgttgactttataaaagctcttaatatgtaaaagttattgatgctttacgacctatgttctaaatatttcgctagttttatcatttattatgcagctttgtttatgcaaacatttttagcattttaatttgattattattatagagacaattctgtttattttcccttttcttggaaggaaatgcttacactttatgagtctttaaaatattactttaagtttatgatagattaaatatttg

SEQ ID NO: 330923 - DNA, 337 bp, Homo Sapiens
  misc_feature (28)..(28): n is a, c, g, or t
  misc_feature (30)..(30): n is a, c, g, or t
  misc_feature (33)..(33): n is a, c, g, or t
  misc_feature (195)..(207): n is a, c, g, or t
  misc_feature (220)..(220): n is a, c, g, or t
  misc_feature (296)..(296): n is a, c, g, or t
  misc_feature (311)..(311): n is a, c, g, or t
ttaacagatcttaagaggtgcacagcantnggngactcctctaattttttaaaaaatctacttctacttctgttacaccatgtgtaatctattgtgcatattaactaaataaagagaaacttattctttgaagaacgactaatatgtgggatggttaatttgaaatccgtgatctagtgatgacggtctcattgnnnnnnnnnnnnngagacgcgctctnctttgtcacccggggtgggagtgaagcagtgtgatctcaggctcactgcaacctctacctcctggggttcaggcgnttctcctgcctcagnctcctgaggtaggctgtgactacagg

SEQ ID NO: 330924 - DNA, 484 bp, Homo Sapiens
  misc_feature (209)..(209): n is a, c, g, or t
  misc_feature (250)..(250): n is a, c, g, or t
  misc_feature (307)..(307): n is a, c, g, or t
  misc_feature (317)..(317): n is a, c, g, or t
  misc_feature (394)..(394): n is a, c, g, or t
  misc_feature (461)..(461): n is a, c, g, or t
gcgtttatttaaaaataaaattattttctctagagcatgaaggaaaaatttaaaagtatttctgctgtgctagttctgtaaaaagttaaaaaatgagaaatggcggcaccattttataatcctgtgtttttcaaggagtggagggtcaaattgttaagaaaaatatttacataaggctattagcaatcataattagagtgtcatagganttctgcatgcggcgactaaggaggaatccctaggaagtccngggtgcttcttgcctccgcccatcatgccacagcctggggcccagccgcttggggantttcatgccnagatcccattttgcttgagcggcctcactgtgtctgaccaagtctgggaggccaaatgcagtcgctccaatgggttnaatagcttccctttttaattttaaaagctaagtctttgaccatctgattcatcacaggtccaagttnttaggccggggatctgcccttat

SEQ ID NO: 330925 - DNA, 337 bp, Homo Sapiens
  misc_feature (311)..(311): n is a, c, g, or t
caacatcgaaatctgtgttactgtatataaatctacaactgcttctgactattacagagtattcccttgtatgcctgaaagtattatattttgttacattttcatctggtgatggtcacttaggttactgccaaatttttgttcttacaaacagcactgcagtggaacagcggcaaatatgcattggatttttgggacctgtggtaaaaatttatctacaactgttggggtatatggcatacttaattttattattggccagatccattcttcggaaatacttggcatcggtcaattatattggttttaancggggcgggcacctaatgggggtacc

SEQ ID NO: 330926 - DNA, 438 bp, Homo Sapiens
  misc_feature (38)..(38): n is a, c, g, or t
  misc_feature (344)..(344): n is a, c, g, or t
  misc_feature (407)..(407): n is a, c, g, or t
ttgatgatgaatatgaacattttatataaataattttnccctaacagaatgtgaataggtcattagtaagctgatgagcccatcagagtacagatgactcctgaggtcctacctcagttgtcaattgcagcactactctttccaactttacactggtacctaacctgcagaaatgatctgacagatggcatcataagccataatgggatgcagttagtgtctcctccttggggtgctatacaggagtgaccatcaccaataaaaatacaatttgtaaggcaactcttttaaacaggactctccttggctttggagggactggaaataattctggattggggacnggctggtaattcactgtgggggggggtgttttgcccagggaatagggttgtttaggtgggggnatttccggccctttcaaaggtgggggttttt

SEQ ID NO: 330927 - DNA, 382 bp, Homo Sapiens
ttcttccaaaattacatttatttttctcaattcagaaaagtctcaacaccacaatttatctgtttaatgttttcatttacatttggctttatcccaaaaagggtttaacagtgtcaccaagttaccaggtctctgtttcatcatatttacacaagatgaaggaaactcaatctgttcgtatttgccccaggtaataggttctatgtagtgacaggcatttcactatttgacttagtgtttgccaaaatgaagtaaggggaattgggtccagagctgaggacagatccatttgggaatgaaaggcataataaccttgaaggttattccagtgacaaaaaatgatccagtgaaaggttttctaagggccaggccgggttgaggg

SEQ ID NO: 330928 - DNA, 496 bp, Homo Sapiens
  misc_feature (120)..(120): n is a, c, g, or t
  misc_feature (193)..(403): n is a, c, g, or t
  misc_feature (414)..(414): n is a, c, g, or t
  misc_feature (438)..(438): n is a, c, g, or t
  misc_feature (467)..(467): n is a, c, g, or t
  misc_feature (479)..(479): n is a, c, g, or t
atcagagaaaaaggaaatggttaaatatcttcccagatgttgctgccttatcgaaatgcttcctagaactgtctgtataagtcgtatttcagacagtactaaatacttatattttatttntgagggcatgtaattttaaaactgcagtaggttaaaattctattaaacaaatatagaaaatattttgtttatnnnnnnnnnnnnnnnnnnnnnnnnnnnnnnnnnnnnnnnnnnnnnnnnnnnnnnnnnnnnnnnnnnnnnnnnnnnnnnnnnnnnnnnnnnnnnnnnnnnnnnnnnnnnnnnnnnnnnnnnnnnnnnnnnnnnnnnnnnnnnnnnnnnnnnnnnnnnnnnnnnnnnnnnnnnnnnnnnnnnnnnnnnnnnnnnnnnnnnnnnnnnnnnnnnntaaacctgggnaggttggaggttgccagtgacccnaagatccgagatccacaccacttgcactnagccctgggttnacagagccaagacttcc

SEQ ID NO: 330929 - DNA, 985 bp, Homo Sapiens
  misc_feature (192)..(231): n is a, c, g, or t
  misc_feature (559)..(567): n is a, c, g, or t
ttcacgttaacattttggtttatttctttctgatcttttttcctaggcatggggcttttacagtcatttatttaccagtcatgaattcattaaaaaccacagcgatatagcaatgagcaaaacagaccctcccccaaaatcaccctgcgttcatggatcttccattctaatgggaggcgggggggtgaaccnnnnnnnnnnnnnnnnnnnnnnnnnnnnnnnnnnnnnnnnacaatagagggaaatgtaacaggacagggcaggagggcggatgagctggaggcgtagtcattccacatagggtgctcagggcagccacgctggaggaggtctatgagtgagtcccgtaagtgcctaaggaatggggggtcttaggcagaggcgacacaaagagcgaaggaatcttctggtgtctgaagaatagcagggaaccagaggtgagtcagacctgtgtgccacggagggtgtggggggacaggttgttcggagagacttgtctgctattgtaaaaatgggcttttgagactgtaagactcatctaaatataaatgttttagannnnnnnnncaatacacaaacagaaggaccctgaaaaagaacttccctccgttgtgcctgaatttccagctgccctttcatcccacctggtagagtcgcagattcaaatgcaagcactgattattccaacatactctctgtatgggaactaataccgctgtctaacagtcacttagaagtatccttgtcatatcaaccgaaaaatcctcaacaaaggaaacctgctgcttacattaagtttgaacaaatcatgcaagatataaagatgtgttgtttcttccagcttagtaccacaccttataacccttcctacatttatttctctgagtggctaggaaattagtttatattcaccagaatctctagcctaggtgttcatccagccccttactttctttagcatttccttgctgtcactggtttggaa

SEQ ID NO: 330930 - DNA, 457 bp, Homo Sapiens
  misc_feature (83)..(83): n is a, c, g, or t
cccacccccaccggccccagaaaatggtaggccccccataaaccaggcaggcaggtggaaggcctacctgtaccctataattnggggccccatttcctgcatcctcctccacccctccctcacctataatatgggccccaactcttagggaaactgaaattaaatccaaagtgtcattttccaatgggtagaatatgcaagaattttaagtactaaatgactatgattattaaatcagtttaataattataatgttttcttcaaataatttatatgatgacttggatatgaaaacctgatgaactacataataactacaaatgtaccattcctttcggtacaactttaaacttatgtctctgtattttaaaaatctcttttatttggaaataacattagtaattgcaatgaagaacatggagcaaaggtcaaatgctttacctaatatattcctttg

SEQ ID NO: 330931 - DNA, 395 bp, Homo Sapiens
tggaaaacttttgagtttcctaaagctcaaaaatgcaaaatctgacgcacatggttaaatgagatgtggttatcaacttacaccaagcctaacttaccacaaaatagaaaatatcagagaaaggagttcacaagcagaaaacctctgctttctaactcacaatagagtcttgtccaatattagaccacacactgccgttttgttgttgttttagctacaaggaagggtatgcaatatgcagtaactattccaacagcttcaagcaagtcatctgctacgactagaaaaagtagcaattaggtcccaaacagcaaagacataaaaaagatgtaagcagaagcctcaccatctgaaaagaaggcccatcagcacctcttccgagaaatacttccctt

SEQ ID NO: 330932 - DNA, 472 bp, Homo Sapiens
  misc_feature (19)..(19): n is a, c, g, or t
  misc_feature (36)..(36): n is a, c, g, or t
  misc_feature (55)..(55): n is a, c, g, or t
  misc_feature (85)..(85): n is a, c, g, or t
  misc_feature (100)..(100): n is a, c, g, or t
  misc_feature (111)..(111): n is a, c, g, or t
acactcctggataaccggngcctatggcccaaaccngcaacttctcccaaatggntaagcaccaccctaaaatttccattaaaangaacggatattccanggtttagaaangtcccccaatggatgagattttataatgtaataaaaatgtaaacttctgaatgaaaaccatttacatttgttaaggcacatctggatacctccagacattcatatttatagctatattattattcatttcaataataagggatttctaaaaacacattctgtccctgaacacaatctgctgggtgtgttggataactagaatgcagaaggagcagggtagtactcactgtcaccctagagattagccacacaaatatgttcctgtaataaacagtacaaaactcaaaaagaagccagcaaatgtacactcctaattttctagatcctacattgacccaggccatttttctctacaacttca

SEQ ID NO: 330933 - DNA, 452 bp, Homo Sapiens
  misc_feature (45)..(45): n is a, c, g, or t
tgagcctgaaggtaaaccccagtcccttggcagccttccttggancactggctttctaatctttgcacagaaatagcagttaaacccctctctggctttagagatctaaaaatattatttaagaacgaggttccttctcatgatgtcttgttttaactctgaaattctgtggtcacatgtcttggaatcgaatgaacccatccagttccagcgtgtacaacagagtaagagaaagacttggttttatactgagacattctagaaatccaggagttcttctaggcattctgttgctacagaagcactttttctggacactttaagtcgagcagtggtttctgtctgttccgcttacttaagtgaacataagcatgatttgtcttttaaaaggtaactgttttagtactcaggtagaatttgtgctttttccttccctacatactttcctactt

SEQ ID NO: 330934 - DNA, 687 bp, Homo Sapiens
gttcaaatagctttgcataaccattgggttctgcttctgattcaggtgctgggcatcatgtcctccctattcttctcttcttggaaacccagcctatctcataaatacctacttccgccacccatccaacctccctgctcctttcaacacaaatcttggatattgccaaaggaagccattcagcagctgctggggtttttcatccccctgacatgcatacatttgctctgggagaagtgtcttccctctgaccctggtccccagctccgtctgtgcttaattgctcttacctgttgcactaatgaatatgactaggttttaaagggggaatgtgaagcaataggcacatggggcttggatgaattggtcccacagatataccctgccttaagccgctgaggtgatgagtccactgctcatgtgaccctccacctttgtggatccctcttggtttgtgaccagtgtgtctgtttgttgaggttgtacaaacttgacaaaagttaatacttttgtttgtattttctgcactgttgcactctccaaatggccccttgagtatttttattgacttgttacacacatttttgtctttgatgtctacattttttcctttaatgttttttatttggaaggttacctgctgttggatttaataaatttgtttacttgaatattgatattgtctac

SEQ ID NO: 330935 - DNA, 490 bp, Homo Sapiens
  misc_feature (36)..(36): n is a, c, g, or t
gagccttctcccctgttctgcattttctctttgatntctttcctttgtttctgtgatcccggcatcgtgacataatagaacatgggattagtgggaggaaacgagggccccaagcgaggctcctacatccaactctctgtgtgaattttaaggaatattaaagtgatttatttgggtgtgtcacttgtttacttgatcattgtctgtcttccttttagcatttaagtccacaaaggcagggaccttgtgtgtcctgttcagtcctgttcatcacttgatctctagttccttgaaaggtacccagcacataataggcatttatcaaaatttggctatctggctggagtgatttttatctcatggagggaagcggagagaggaaagtgtttcaggatctctggggttcttttctaatctaaaattagattattctcctctgttcatattattccttaacagggtattgaagctcatggtgctagctctcgtc

SEQ ID NO: 330936 - DNA, 779 bp, Homo Sapiens
tattgagtcatataggtattttccttgtaatattgaagtcattgagtggcttggagcctatttacattgacacccaattttgggaaaaagctattcagtactttgaaagagcttctcttatacagcctacacaagtgaaatggcagctgatggtagctagttgtttcagaagaagtggtaactaccaaaaagcattagatacttacaaagatactcacagatcttggattaaaagatgctcaagaatatgccagaaaactgaagaggttggaaaaaatgacggaaataggggaacagcgcataaagtcaggcagagatggcagtgggggctcccgtggcaaaagagaaggaagtgctagcggtgatagtggccagaactatagtgccagtagtaaaggtgaacgactaagtgccagactcagagctttacctgggacaaatgaaccttatgaaagtagcagtaacaaagaaatagatgcctcctatgtggacccacttggccctcaaatagaacgaccaaaaactgcagccaagaaaaggatcgatgaggatgattttgctgatgaagaattaggagatgatttgcttccagaataatattcactttaatatttattaaaggaaagaaattgccttatgagatcatcctcatgttaaaccttggattaaatatctaacctgtaattattttttttcactgtcaaaacttaagtaagtgtattctattctgtatgtatgcatttaagttgtttttttcttttaaggaataaaaatcaggt

SEQ ID NO: 330937 - DNA, 505 bp, Homo Sapiens
  misc_feature (14)..(14): n is a, c, g, or t
  misc_feature (269)..(282): n is a, c, g, or t
ccaaatcttgattngaaggcataacgttgctacagtacaacgtacagtgcagtaaaaacacacaagactgcccaggaagcaagcaggagggaaatggtatttttatacatgcatctcaagtttaaggacacaaatgagcctaattaccagagaatggctggcatattttgacagtcttggctattatcacattgtcacattataaacttcactgtgttccttgccataaattgtgtgctgcttttcaaccacaatgcatgataaacttnnnnnnnnnnnnnngcatgtctatgaaatagagaacactgtaacattgcaaacatgaagaaaaactcttcttaaattagaattttaaatatattagtatgctttataaccttaaacatcctgtcatgatttaaaaattaggtgtcatttcgtccctaagcatttttgtgcccacttgacctgtatggcctctatcccatatatccatatacacagggtatgacaggtgcttgcaaag

SEQ ID NO: 330938 - DNA, 443 bp, Homo Sapiens
  misc_feature (15)..(15): n is a, c, g, or t
  misc_feature (27)..(27): n is a, c, g, or t
  misc_feature (85)..(85): n is a, c, g, or t
aaacacaataggctntgggaatcaggnagttccattcccagttaatcttcaatgttatttactagcagtgtgccctcgtgcacanttatcaaactcctctgaactcttggaatcctcatttttcaaataataactcacaaagctgtcaagcttaagggttctaacagctcgaacagcacctggaacagaagcaatagccgccactcagaggttacttcttccttctccgccttctctggatcacctccctacctcatcctcaatctaacgctggaaatattggatatggggtaggtcaccaaatgttgccagaagactcaaattatgccacccatatctcagctggggaagggcttaccgtggcctgactctcctcagggtcccaagtccccatttatgatgtccaggcagaaacacttgtttctgacacatagtaggcgctg

SEQ ID NO: 330939 - DNA, 287 bp, Homo Sapiens
attgtgagaagatggtatttcagaatagaggaagaatttccttatgtgctggtaagattgtagataatccatttctgccataattttcatagctggattgctttaataaagccacttaaaggttaagttctagattgcttcatgttgcttatcaatgttttaaagctaaaatagaaaattagctgttaagttggctcaaccggaaattcagtatatcctttaaaaagagaaatttagtaagcagtgtgtctaaagaatgacatatggttgggtacagtggctcgtga

SEQ ID NO: 330940 - DNA, 565 bp, Homo Sapiens
  misc_feature (12)..(12): n is a, c, g, or t
  misc_feature (26)..(26): n is a, c, g, or t
  misc_feature (46)..(46): n is a, c, g, or t
  misc_feature (76)..(76): n is a, c, g, or t
  misc_feature (84)..(84): n is a, c, g, or t
  misc_feature (95)..(95): n is a, c, g, or t
aaatggactttncccgtttaaccccnccctaggtcctaaaaaagcntagtatcccagagcttttgaaaaaatgggntccccagnctttggttccnctggttaaaaaatcccccccaaatttccctgacttcctcagaacaagctcagctccagctgggaagtctgtggcctgaaggctggcccgaagacatccagcagaagtaccctggaatggaactcccaagcaggtcgaagcttgggagccagtgtccttgcagtctgaatatttggggtggagagaggtaactctgttaatgctcaccgctgggaccacagcaagaattcctttgccaccatttctctagtcaggcggagctgtccagggttcaggtggctttccaggacatgcttcaacttgcctggagatgggtggtgtgagcagatccctgggtgtctctctctggaggtaataatgacaaagaggtttagccactgagggagaaatgcatccccaggtctgaggggatatcccttttcttcaaacaatccctgggttgtttgtctacagtagaactctctttaataa

SEQ ID NO: 330941 - DNA, 590 bp, Homo Sapiens
tcatgttgaggctgttgccagtcccattaactcccttgtccccccacagaaggaagagacattgcccagctaagcatcaggaagctgtgttaaaagcccttctatgggtttggttttgtgatgtttttccctaatgggaaaaacgttatagttgtttcttactgccctgtctgggaagcagggcaaacctccaggtttttaaatgagctagatgcccctcttcctcttctctggtcactgaacctgggaccaaagcactttgatattccaggtgtgattttctctgtcatggggatttgctccactgcagagccccatcattttcacagcgtaggccaacagagtgagaacctagggctaccctagctgatggatgtgaggctgctgtctacaggagctcatcccagccctgttaactggcagtggcaaggatactcgtcatcggccattgcacttggggaacttcctcaccccatggctttccaacttgaaacccagatttacctccagggagaggttagaaaaaaattggtaaataggcttggctaaagagcaactccaggggttggggggtggtggttttaaatttc

SEQ ID NO: 330942 - DNA, 617 bp, Homo Sapiens
gccgtgtggttttgatggtggttgtagttttgtttcgttttgtttttaagagatgagtcttgaaggcagagttgtaatggccctcctctctcccctcccattcccgaaattagggtagcttaacagaaagccaccttgaccacatggccagggactgagattcaatggggaaagaaagactgtagctggaatgtgaagaatttgatttgcagttgattgcaggttgggtttccggaagggcagacagctcaatgtagtgccatcatagggcctcagatgcccacactccacccccagagcttcacaaaatggaaggaccctggagtcacccttctcccccacccccataagcactcagcctacagattatttcaagtgatcaggagaattaaaacacaccccaaccctgagttgctctttagcaagtctatttacaatttttttctcacctctccctggaggtaaatctgggtttcaagttgggaagccatggggtgagggagttccccagtgcaatggccgatgacgagtatccttgccactgccagttaacagggctgggatgagctcctgtagacagcagcctcacatccatcagctagggtagccctcgtgcc

SEQ ID NO: 330943 - DNA, 503 bp, Homo Sapiens
  misc_feature (11)..(11): n is a, c, g, or t
  misc_feature (24)..(24): n is a, c, g, or t
  misc_feature (37)..(37): n is a, c, g, or t
  misc_feature (42)..(42): n is a, c, g, or t
  misc_feature (53)..(53): n is a, c, g, or t
  misc_feature (83)..(83): n is a, c, g, or t
  misc_feature (92)..(92): n is a, c, g, or t
  misc_feature (108)..(108): n is a, c, g, or t
attcccaaaanaaattaataacgngaacggtcaactncaccnggttaaaaccntaacaaaagggcttttttgggaaggggganggaccctanttaataatttttaaanccttaataacccctacccttaatccaaaaagtccctatccagttttcccctagtttagagaagcaaagtggacatttttgtgtacattttaacaggactgccttaccttcacaacctgctcagtcggctttcccctggacttctcctaaccgccccatttttccctggatttggcaccgagagttacagtatttcacgtgcgatgataaaatgttacttaggagaaacagttccaataccaagaaacttcagcaattttaaagcattttaaagccacaaaaccatgccggaatcccaaaagggggtcctaactcctttacactgtcagaatctcaattttaaaagggaggagtagagaagagatagaaacgctctctgttggtgctgtgccgaaa

SEQ ID NO: 330944 - DNA, 451 bp, Homo Sapiens
  misc_feature (12)..(12): n is a, c, g, or t
ttcggcacgagntgacggacatgcaaccaaaaacttacatagggagaacaactttacttactcagggaaggcaaagagaccacttaagaactccttcacatgtgttatgtcttaaaagctgactactggagttgtatcccttgcacagcatccccttgcaccaaagtgaacactactctaagaacatgtgttcagctctcctgaatgccaagcacaaccatgcttggcatggcagtggtgtcttatttctgctcctctttttccccagggcatgccattgcaagagaatgctcagccatgttcatctggggacctgctcctgggtacgagcaatagggtctgtgtgcccagcaccactggcccacctagctgtcctgggcctgtgcccaatggctggaccttcaccttcaggagtgtgggctgttaccacatttcggttgatgttcaattt

SEQ ID NO: 330945 - DNA, 371 bp, Homo Sapiens
  misc_feature (26)..(26): n is a, c, g, or t
  misc_feature (41)..(41): n is a, c, g, or t
  misc_feature (72)..(72): n is a, c, g, or t
  misc_feature (174)..(174): n is a, c, g, or t
  misc_feature (272)..(272): n is a, c, g, or t
aacccgttaatttgatcactaccctnggtaagctaggcccnggatcaccctcaaaaaagttttccgaaacanggccatttccaaacagcccattatcccgtaagttggagttactgttcctagatgaaatctttgtcaatcctatcccagtaaacatattctgtgctttttagnatttatgggctgcttaccactgcttctttagttgtgtttggggtactgttatctttttctgctgcccaagttacttgtgaggagcctaagaaaccacnccgtgtcacaacacttcagattgctctggatttgcttccttatctgacagtttcattatatttatttatttatttaaacagaatctcactctgtcaccc

SEQ ID NO: 330946 - DNA, 309 bp, Homo Sapiens
  misc_feature (165)..(165): n is a, c, g, or t
  misc_feature (284)..(284): n is a, c, g, or t
gagaatgtcttccagaaaaatacataagctagtttctgttctgtaaagtgatatctttcatacttgaccaaagttcccaataacttcccaaccactgttcaaaagctgtgatttttgtctccccttcccaccctccagccaaggagcagccctgcccaggggatntgagggtgtgggtacccggggagcacccctttcctgggaccccagtgttgcatttcctggctgaggaagggtggttcatcccagctcctgccctaccctctcacttaactggagctttnggacgcaccctccacagttggaggt

SEQ ID NO: 330947 - DNA, 510 bp, Homo Sapiens
ctcccgtggatgacggatgaggactctgggctgctggaataggacactcaagacttttgactgccattttgtttgttcagtggagactccctggccaatgaatccttcttgatagtttgcaggcaaaacaaatgtaatgttgcagatccgcaggcagaagctctgcccttctgtatccctatgtatgcagtgtgctttttcttgccagcttgggccattcttgcttagacagtcagcatttgtctcctcctttaactgagtcatcatcttagtccaactaatgcagtcgatacaatgcgtagatagaagaagccccacgggagccaggatgggactggtcgtgtttgtgcttttctccaagtcagcacccaaaggtcaatgcacagagaccccgggtgggtgagcgctggcttctcaaacggccgaagttgcctcttttaggaatctctttggaattgggagcacgatgactctgagtttgagctattaaagtacttcttacacttatgc

SEQ ID NO: 330948 - DNA, 180 bp, Homo Sapiens
tcggagggctttagaattttatttttggtttacattctcccccttctggccaatatttaccagaggcaacatcaaaggccatcaaatctttattttgtcccatagcattgccagggtggcgtggctgcctgtcccccatccatcctgtcccttggtgggacttcctatggctgagggcct

SEQ ID NO: 330949 - DNA, 296 bp, Homo Sapiens
  misc_feature (245)..(245): n is a, c, g, or t
caaacttttgcccatatttaatgcctcttacaatcagtgttcctaaagtaatattccccaccactccaacctctcttctctgctccacggtgctatgaagaagatagacattatttcaatttcataaataaaataaatattttatgaaaaaagaaatactactataataatctaggatcataaatcacacataaagttcacatctataaatgttttatttctttatttcatctttctctcaatanggtaaaaaccaccaggaccataaaagggaaactttcaagtgtttgggctta

SEQ ID NO: 330950 - DNA, 445 bp, Homo Sapiens
  misc_feature (406)..(406): n is a, c, g, or t
agaaatcttttccttctattggacaactcttaactgggctggaaggggccacagattccttggagaatctaataaaaggatttagatcttcccaagaacaaaagttttccatccttcccaaggagccttgagaacaaaactgggcaacaagcccactctgccctcttctctttttctttccggtgtatctttaaacaagtttcgttcactgtactcctttgagatacaaaccatcaaaatgaatgtaatataggcaggtgctaatctcaagatcacaacttttgctttgacttttccgaaatgctgcatttggatgtctgtttagccagtgactacaacttgagtccgtcctctctcaagctgccccatccctgatgtcatttctgcttaatttgctccacaactnctgttccagcttctggtctctcttaaatctacctatact

SEQ ID NO: 330951 - DNA, 423 bp, Homo Sapiens
  misc_feature (157)..(347): n is a, c, g, or t
atcttacagaaatttctattcagtcctacttagtaacaaagagcatttgattgtgggtaacgttgacatactcaactattctaatgcacttaatcttcaaaatattttcttcagtaacatctttactgagggaggaaaaagttaacggttcttcatnnnnnnnnnnnnnnnnnnnnnnnnnnnnnnnnnnnnnnnnnnnnnnnnnnnnnnnnnnnnnnnnnnnnnnnnnnnnnnnnnnnnnnnnnnnnnnnnnnnnnnnnnnnnnnnnnnnnnnnnnnnnnnnnnnnnnnnnnnnnnnnnnnnnnnnnnnnnnnnnnnnnnnnnnnnnnnnnnnnnnnnnnnnnnnnctctttaactaaggcaccttgaacatggcacctgtgggcttttaattttgcgggttgggggtgtggacagttaaaa

SEQ ID NO: 330952 - DNA, 400 bp, Homo Sapiens
  misc_feature (17)..(17): n is a, c, g, or t
  misc_feature (203)..(214): n is a, c, g, or t
tattgtgtttgtatttnctagaataaatttatctgtggtaattgaagcctggattgaaagaatttgcatttgtttttgtcaggtgcctggagatattactagcttgggaccaatattagttaaattcttggcttgagaattttttgaccatgtaggtatatgaattcaggtcacgacctacatgagaagattttcaaagtagnnnnnnnnnnnncccatttctacttaggctccaagttcacactgggcagttttccttccagtctaggaaatgtgggggaagaatatactgggtgtaggctatttgaaatttttaggtcaagggcaaggctattttatctaggcattttaattgttttcagaggggaggaatccattaaaggggacccgaggtgactca

SEQ ID NO: 330953 - DNA, 358 bp, Homo Sapiens
  misc_feature (13)..(13): n is a, c, g, or t
  misc_feature (25)..(25): n is a, c, g, or t
  misc_feature (206)..(206): n is a, c, g, or t
tccctggaaaacntggtcaagtccnttctctttggacctgcatttgtgtagacagaagcttactttcatgcctggagctacaacatttttatatgttgcttcctggggtggcaggagagagcggtggggggagaagggaagacattcagactttgcctaactgcatccaagaaggctgctcctaatcacccaggtcagtcacctgnggaaaatgatcagttatcttctttatcccctcccattcttcaaacaaagctcaattgctcagaacaagtaatgcaaatttgctggtgccagtattcctgcccaggcacctttgtgattagctcagccattgacaaactatccctgaggctca

SEQ ID NO: 330954 - DNA, 376 bp, Homo Sapiens
  misc_feature (330)..(330): n is a, c, g, or t
gtctcattcagactgggaccgtggagacatgccaaggaacctaagggacatatctctgggaactgaataagaaaccagagtacctgagaaaacccatgcagacatgggaagaacttgcggactccacatggatggtgaccctgaccaggaaccaatttttcttctcatcagtgttataacaaaacaaagttgaattaaacagtgttattcaagggccttctgtgtgcatatgaatgtaaataattcagtcccaagccagaatttggtctcagaatctgggttgcaatcctggctttgaccacttgcatggctggttactgtaccattctnttctggaactttatctgttaagtctcttttatctgttaagatggag

SEQ ID NO: 330955 - DNA, 458 bp, Homo Sapiens
  misc_feature (314)..(314): n is a, c, g, or t
  misc_feature (349)..(349): n is a, c, g, or t
  misc_feature (442)..(442): n is a, c, g, or t
tttttataacatatatctttataggggatagtttttttaaagacataaattttcttttctgaagatggaaacatacatattattaaatcatacttccatggtaaaacactgcctaaacacttgcactttagaaacttcacatcctacaatgtttccatcacttagccagtgtctccatcttattaccttgaattactctaagaaaatgaatgatttactgagaatttttttaatgataatttaatttccttaagctttttataatcaaaatcattgtaaaacgcagactgttaccaaaatgaggcaactccttncatcttattccaaacatttttatattttgctattncaataaatttaagttctatcttaggaccaatccatgatagtagggttggaagagggaggtagaggttgactagattagcattccgggttaatngactatggaataggtg

SEQ ID NO: 330956 - DNA, 423 bp, Homo Sapiens
  misc_feature (38)..(38): n is a, c, g, or t
  misc_feature (76)..(76): n is a, c, g, or t
  misc_feature (92)..(92): n is a, c, g, or t
  misc_feature (130)..(130): n is a, c, g, or t
cgggaagcaccaacccccactgaaaagacaccaaattntggagtaaacccacccgtaatttaggcagcatcttganagaagaaaatgcctgnagtggatggagaggcagcaatgaagctgagttgaaganggaggaagcctgtgcagggaacccatacactacagctagttccccagaatggctcctaggaaagggcctctgcctgagagagacctgtggcctagtacacctaacacaagaaacacagtgattgcaggagactcccccagggcccaggagcagatctggtgatggaggcatctctcccacccccactatagagcacacctgcaaacaaaaggaagtataaaacagccatgccactgggtattaggctaccactggccatcgctcttaagcaccatgcattggatcacatccca

SEQ ID NO: 330957 - DNA, 374 bp, Homo Sapiens
  misc_feature (22)..(22): n is a, c, g, or t
  misc_feature (37)..(37): n is a, c, g, or t
  misc_feature (75)..(75): n is a, c, g, or t
  misc_feature (163)..(163): n is a, c, g, or t
gaagggaaatgcccaccggggnaaggaatcccccacnccattttttgtgcctgtaaattggccccaaaagttccntaaccttccagtccccaatccatggaaatacatccagacaatccccaaatcgaggaacatttccataaatactgatcagtactggttncaagatgtcacggttatgaaagataaggaaagattgaggaactgttattgcagtcctacaaaacggcgagagactaagaaataactaaatgcaccgtgatcctgggtggaatttgggaacagaaaaaggacattagtggaaaaagtggtgaaactccaataaggtcttttgtttagcgaatatgttcattttaaatcagttaaattattta

SEQ ID NO: 330958 - DNA, 395 bp, Homo Sapiens
  misc_feature (211)..(211): n is a, c, g, or t
  misc_feature (215)..(215): n is a, c, g, or t
  misc_feature (317)..(317): n is a, c, g, or t
  misc_feature (363)..(363): n is a, c, g, or t
aaaagtctagtttattgcactgactcaaagcacaactaaaaattaaaaccagaaagaaaactgtacaaagcacgaagctacaactttaaaagcatcacctagacgcgggtttaattgcactacagtcccatgggtgaggagagctttgccatccgtgaggcgccgggcaaggcacaacagacacagagagatgcagcccggcctggggctncctnctgctgccaccaacttttacaaaaggttctaggaaaaggggaagtgtgaaggtcagatctggggatttcgggcatcttggaccttcatttgggacatggggnaaacctccacctatgtgggctgggctgggggtcctgttcaggaggnacatatttttattcacccttccacctgcgggc

SEQ ID NO: 330959 - DNA, 366 bp, Homo Sapiens
gctcaagtagtcctcccatctcagcctcctgagtagctgggactaaaggcatgcatcaccatgctcagcttcaaagtgctatttttcaatgcagtcataatttgtatccttttcctttaaactctcataggctgttaaaatttttactatgtatcattttataggccttctttcattttataattaaggcacatggttatggcattttggataagagctcctagatcaaatattttattcaaatttgtatcttctataatccctagcacaggtttcatacataaatgaacaataaagatccactataataaagagaactaaatgctaaaccttaaagggatgaagattttatatgtaatatgggca

SEQ ID NO: 330960 - DNA, 522 bp, Homo Sapiens
  misc_feature (438)..(438): n is a, c, g, or t
  misc_feature (490)..(490): n is a, c, g, or t
  misc_feature (496)..(496): n is a, c, g, or t
tggggtcagacaaatctgacttcaaatcctgactcatgggcacttccacccttgagcctcactcaggatgtgcatctgtaaattggggataataaataacgatctctgtatttttaggcctctgagttgtcccagatataacacacatgtgacccagattatacaaaaattgatggggaatttatgtgcaggcaccaaggcatcaaatagagatgaaggtggcctcagggactctgccgggatgctttgctcctctctcccgtgatcttcattccgttcttgggccaataattcagttcagggcaggaatatgggctgcctttccttaggaggaaattatcaggattcaagggttaggggccgccattattcccgggggaaagggactcttgattgggcttcagcctgggggttcaggatggacttattatcttgggnacccaattcaggcttaaggggacaggggagttaggggtcttcagttgggggncagacntgggcttgtttttccactttttgggg

SEQ ID NO: 330961 - DNA, 437 bp, Homo Sapiens
  misc_feature (412)..(412): n is a, c, g, or t
  misc_feature (425)..(425): n is a, c, g, or t
ggaaaagccatcaccaagaagaagtatattggtatccgaatgatgtcactcacgtccagcaaagccaaagagctgaaggaccggcaccgggacttcccagacgtgatctcaggagcgtatataattgaagtaattcctgataccccagcagaagctggtggtctcaaggaaaacgacgtcataatcagcatcaatggacagtccgtggtctccgccaatgatgtcagcgacgtcattaaaagggaaagcaccctggaacatggtggtccgcagggttaatgaagatatcatgatcacagtgattcccgaaggaaatttgacccttagggcagaggccttgagctgggatttcatgttttcccttcaaaggattctcccgtgggatggacgggttgagggattctggggtttnttgggattagggncattccaagatt

SEQ ID NO: 330962 - DNA, 276 bp, Homo Sapiens
  misc_feature (31)..(31): n is a, c, g, or t
gggtggaatgcaaacagttgaacaccataantccatttagaaggcaaaagttcctttgttttacccagctgttgaggcatctttatatactcctccttgatttgaagggtttgaccttgacctaacttgagccctcaaaactggctcttacaatctcatgtacccaactcttccacaaccctgggtctagagggagggtgcttgtatagttttagcagcagggcatttgcagtgaaaaacgacactggggcccagtgggatgccaaatgagggaga

SEQ ID NO: 330963 - DNA, 386 bp, Homo Sapiens
  misc_feature (65)..(162): n is a, c, g, or t
aagggattatcccgcctcaccatcccgagtggctgggatcacaagctcatgccaccacatccagnnnnnnnnnnnnnnnnnnnnnnnnnnnnnnnnnnnnnnnnnnnnnnnnnnnnnnnnnnnnnnnnnnnnnnnnnnnnnnnnnnnnnnnnnnnnnnnnnntatttctaaataattattacagatctgtcacttcaccagttaaacatacaaacggtttttttgggagggggatggacctatttatatttttaaatcttataatccctaccttatttcaaaagtccctatcagttttcctaggtttaggagaagcaaagtgacattttttgtgtacattttaacagggactgcttaccttcacaacctgctcagtcggcttttcc

SEQ ID NO: 330964 - DNA, 340 bp, Homo Sapiens
  misc_feature (304)..(304): n is a, c, g, or t
aatttttataaagaaattttattgcataattcttgtatacaataaacataggaaaagggtttttaatgaaaattcatgtcatttttcaaaagtgttgaactgtctggagaaaaattattacaaagctatctaaggcaaaaataatatttaaccatctaaacaaaagataatcccctttaccatttgttttgtatttaaagcaagacattttaaacacaagtaatacggggaagttttcaaattggctacgtcatttggcattaagaatttaaatggcatctaagaagtggaagaggtttaaacncctggggaatggttccccaggtaaccggatattggc

SEQ ID NO: 330965 - DNA, 501 bp, Homo Sapiens
  misc_feature (461)..(461): n is a, c, g, or t
tgcacttggcacctagcccactgatcactcttctgcttacagaatatcagaagtcattctagaggcaaatttgaagagtggaaaaatcactttttctgaatgatcttttttttggtgtagatgtttttattgtgtgggttagtttaatgaatacataaaggactaccagtaccattctgtctttactccgtgggcatctgtgggaataaccctgctaatgtaacacgtgagaaagcctttggtcatgccacccactctaccagttgtccccaccatcccccgccctcctccctgtgagacactgggccaaaggtccactacccctgtgcgttgtccagcacacagacactatgtgcattatttgtacataaggataatcacatctacctgaggactggctatcatgggaaattaaaatgtttgggtacatgttaaagtcctttgaaaagtgttaactgggnatattgtgttaattttaattaattaataactattgttgtt

SEQ ID NO: 330966 - DNA, 370 bp, Homo Sapiens
  misc_feature (21)..(21): n is a, c, g, or t
  misc_feature (154)..(154): n is a, c, g, or t
  misc_feature (224)..(224): n is a, c, g, or t
cgtagttaaaatgtgtttatncatttacaaacccaggtaacatgagaagaaactcagtggaaaccttgcttggtggagacagtgcacagtgttagtgccacattcacaggggcagaaatgctcggtcaccctgtgcacccaaagtcacccaggntctctagaaacgatcccacttactgaagtgcctcggatgtcttcagggccagattgtaactacacaggancagggaagggctaagctgaactgcacattgacaaacacaaacgatgagtcacaggactctacagtagttacaatggcatttttatatgtcccaagtgttgactggagagtaaagtgttaactgagctgctagaacacccttcactg

SEQ ID NO: 330967 - DNA, 384 bp, Homo Sapiens
  misc_feature (45)..(45): n is a, c, g, or t
attttttaattttttcccgagaccctgccctaaccaggttggttnaagccccacctgcgcccccggccctgttggtgattttggatgccttaaaaatggcccccccaaacctattgaagtgcctgccccgtgtttttaaacacaagaaggcctttgattacccttacaaggaatgtgtagggaagttttgttcaggcatgagttataatgctgttaactatagttcagtgttaatgaatcagttatttatattaaataaggtgtttttaaatagaaacatacctaaaaggttttatattgtatgtatgtagatctggaaggttgtatattaattggttaatgaaaatatgactagatcatcttctactggctgagagtttattt

SEQ ID NO: 330968 - DNA, 698 bp, Homo Sapiens
  misc_feature (53)..(53): n is a, c, g, or t
  misc_feature (109)..(110): n is a, c, g, or t
  misc_feature (166)..(166): n is a, c, g, or t
  misc_feature (173)..(173): n is a, c, g, or t
  misc_feature (194)..(194): n is a, c, g, or t
  misc_feature (237)..(237): n is a, c, g, or t
  misc_feature (609)..(609): n is a, c, g, or t
  misc_feature (659)..(659): n is a, c, g, or t
  misc_feature (684)..(684): n is a, c, g, or t
ttctcaaaaatggaaggagaaaaaaactgtgaatggggaatgctgactgacanaccaacacaactttcagaggcttcagtgtctgttctctggacatttcttttcaccnnctgagcaccaaagtcgcagggccagttgcaggccgctgattgccatgttgattttnaacctgntattctttttaattgttttanatttttcataggggagttttggacaaaacagtcactggggagntcactgccatttttacacacttgactttttaaaaatacaaccaaccaaccaccacaacttcttatacatttgggacatgagccagagtttaagagggaaccaacaaaacactataacttaaaaggatggggttttggattttgtataataataaaaacaatacagcatatggctagggaaggacatggtgtatataattgtaaaatactgttctaaattattcaggcctatagtttccattactggagtcctccattgtgtggccacacagtgtcgttgatttaaaggagccagtgcttcccctctccccaggtagttggtcagctgtggactctgtgacctttgtctaaacctgtgttgtaagatcttggngacttcctctctttctatgtctatgctcttccccccaacactttctcttnttagtctctctgtttattttttcantctctgaatatttt

SEQ ID NO: 330969 - DNA, 568 bp, Homo Sapiens
  misc_feature (145)..(145): n is a, c, g, or t
  misc_feature (147)..(147): n is a, c, g, or t
gctcttcccctagccccagttaatttaactatcactgtaaagctgctgtaaaccagaatccagttttttattagtaaggcaccaggatagaactgttcttgccaccctcctatttcagtaattgcctgaatttccctgaaaggtngnacatacttcacttcttgacatttaggaaggacagtggccactcagtggcgaggtgactgtccccgaggatgccagtagaccaagccagcatgctggttcagactgtaaattaggtagggtttgcatagctgtttctgactacaaaaatagcatgggtgttagttgaaacagtgcactgaaataaggcagtggttaagttttgaacctgaatcctttaaaggaaattagtctgagggtaaaatgttttaaatcctttttgaccttcagcttgtgcctctgacagagcttttgtcctaaagctgagagtagaagcaggattagatgtggtcatctgtggtgtggacacagcagacctgccatgtggactgacggtagatgggagaaccgcttgttagtgttctgggcttcctgatgatccccc

SEQ ID NO: 330970 - DNA, 822 bp, Homo Sapiens
tacatgaagtatgttccaatccatgtgggaacttgactctctcatctgtctaaagagtactggacgatataaaaatatatattttttaaacaatgtgatctcaaatttaaagactgctccagatagcctgcatttgcaatggaataactgacaaatcacaagtggtttagttgggcagggctttgatcattcaaaagtaactaaagtagctccagaatgccaagtattcgtgtaaattacggttacatgttatcatttgctgttcttacataagcactcatgaaaatatggtattctgtaacttgaattccatccattttccagacgtctactcatgtctgaggtaaatctagaaattgtcttagttttaggattgaaacagtctataaactgtatttttggtccatccaggaagctagtcccttgtttctcctttctacatgacattgcagtggtggtttctgtaattaaaatttgtttgcctcatgtccctttgtctgataaaccttcactctaccgattcagttgtgagcattctttttttccttctcaaaacctactatgatttgttttactgaacaaaggttatcaaccacacatccagtcctgacatggagcttttcagtgtttggagacatttctcaatcccctgctgtggtaggaactccagtggtgaaacggttgcgcgcctgcagccagagttgcagggaaagctcgtacttactgcgagcagcatgtaatcttttttcttcctggacataaagatagcttgagtaaactgttctatttcattctcttcactctttttactgtctttttaaa

SEQ ID NO: 330971 - DNA, 415 bp, Homo Sapiens
  misc_feature (379)..(379): n is a, c, g, or t
  misc_feature (390)..(390): n is a, c, g, or t
cagttctaagacatttcactttatttaaaagaagccaatatacaggatataaagggcatgatatttacaacagtacagtaaacaggttggtttccggtagatcagtagtctttccatgagtataaatcccccccttccctgtgatgctagacccagctggcagacaacagcaacggtggggcaggatcatggggtataaagtctccctgggtggggctaaaaatcaggtagatgcaaaaacatccacaaggggtcttgcagggaagggctttgctcatttctttgagggcttgggagggaagggtcttgggtgagggatttgctcagaactaacacacagcccaccctgagcctgggaaatcatcccattcatagaaantttcccttccnggaggagaatctgggctttaccctg

SEQ ID NO: 330972 - DNA, 482 bp, Homo Sapiens
  misc_feature (384)..(384): n is a, c, g, or t
  misc_feature (400)..(400): n is a, c, g, or t
  misc_feature (409)..(409): n is a, c, g, or t
  misc_feature (429)..(429): n is a, c, g, or t
  misc_feature (450)..(450): n is a, c, g, or t
  misc_feature (472)..(472): n is a, c, g, or t
cataggaaaacttaaaacactttattggagtaatctagaaaattttaaaattgttacatctttggtatttataaatgtgatactttactttctgtgggtacttctatagaggcactacaggatcagaaaatgcaaattgaatcattttagcaccttttgatataaatagaaatgcactgatgcagaggtaaaaaatcttagaacttttgttgggaaactataaataattggtcctttcccatcagttctgcattgggcttctccaactgtcaagggtttaggattatattgttatattgatcacatgtgctttaatttcttgggccagaaggaatccatgggcaaaaatccgggtttagagtcttaaactctaattcctagttngaatggaatttgatcnttttaaatnttaatggataaatgtttacnagaaagttgctttaataagcnacagttaaaattccggttaccnttttaaactt

SEQ ID NO: 330973 - DNA, 241 bp, Homo Sapiens
  misc_feature (1)..(1): n is a, c, g, or t
ntgtcatgacccactgtgcccggcctactttctattttgaaataattttaggtttaaagagaagctgcaatagtacaaaaaactgaggcatacccttcacccagagtcctttatattatcaacttagatgaggatagtacaatgatcaaaaccaaggaattaacatggttagaattctgttaactaaatgacatatcttctttttaatttcacaaatttcccctctaatagccttttctat

SEQ ID NO: 330974 - DNA, 268 bp, Homo Sapiens
ttagaattatgtgttttacagattaaataagcatgaatcagtaacttaactagtgaagtaagcacatatttaaacaggttctccaaatgaatacaaatgtcatttatatagaaaaagatatcaaactttaaattgtttattttccatctgaaaaaatccttaaattcagcagctattcaaaaagttgggcttgttgaataaatagtaacattatttcttttacttctttatggaaatacttatattctcatcttgatccttaaaaaac

SEQ ID NO: 330975 - DNA, 663 bp, Homo Sapiens
  misc_feature (506)..(506): n is a, c, g, or t
  misc_feature (602)..(602): n is a, c, g, or t
  misc_feature (649)..(649): n is a, c, g, or t
tcggtattcaatgcgtgttcatttattttacacttacaaaagaaatcgcccacccctttgccccattcccccaaaacagtctctttttacaaacatttaaaaattaaaaccaaatgaagatagacaagttaatttcagtacaattatttttcagtgtagctgtcataattagagtttaaatttcctacaagtgaccaatgtccaagtgacttatagggaaatcctgattatcggccaaaggaaattcaatattacaagttagcaaattctagtacaaaaatagtccgtgtgttggaacagctttccttttacataggtcttaggtcagtctgctgtaatacctaacgcttccggattctctctcacaaatggctcaatcgtcactgctgaagcagcatggcgcctgcagcagcagtggtctagtgtccaccttggggccgtgctggagacggcaggcctgggactgccttgctggccccagggcacctgggcagagctccagcccntagtccgcatcgggggcttggagggagggatgagcttccccctcctgaggcaatgtcagacccaggacacagggcacatctgcccagggagctggntggcgctggtgcaggacagcacatctcctgccagtgtctcctccccntacagcctggtcag

SEQ ID NO: 330976 - DNA, 411 bp, Homo Sapiens
  misc_feature (79)..(79): n is a, c, g, or t
  misc_feature (389)..(389): n is a, c, g, or t
cctgcgccctggttcatcctttttgcactctcaaagtctagcctttcccagaatggacctcagtccccagcccccctanactggccatccccccagatctttagggcagtggggttcattgaacaaggttgcaggctacaaacttggcaaagtttatactaacacctcattcccatcccacctcccatcttaaaaaggaaaccgttaagtatcttattctagtgacttcaataaaggaactaatttataagacagccaagaacaattaaagtcataaagggccaaacattttattttcatctaagaaccgtttgcaggtgtggtccgatcttttggcttccctgggccacactagaactgtcttgggccacacgtaaaatacattaacntagctgatgagcttttttttcc

SEQ ID NO: 330977 - DNA, 440 bp, Homo Sapiens
  misc_feature (213)..(213): n is a, c, g, or t
  misc_feature (316)..(316): n is a, c, g, or t
  misc_feature (374)..(374): n is a, c, g, or t
ccggaaatgagcattttaatgcagaaagaaaaccatgataatttacaaatgaatcactttctgggccagagccaggaaggccccaggagctgtgagggtagaaagggaggtggaggctgttgagtgtccgggcaaccagtttagtcagcacctttctgatgggatcctgcccaggctctcccacgataggccctgggggccttgggccacccnccattcctcttggctccctctagtcattccagataggaagacctcgggtcagcttcaggacataaagtagagctggagagacatccctgggaaggagggcctnagggcaggggaggggaaccaaggcaggagacttctggttctggtttttggccaccttnaccctttgggccacgttccccttccggcttaaggccacaagcacaaaagcagagccaggggttttt

SEQ ID NO: 330978 - DNA, 400 bp, Homo Sapiens
  misc_feature (362)..(362): n is a, c, g, or t
  misc_feature (372)..(372): n is a, c, g, or t
ttacaaaaacaacagtggtatatgttttaatagttttcagaatataagctgcatagctttttagaataaaaaatgatataacttcaggtacatgctttgggacacttggttaaacaaggaatctgtgtctttgatgaccacctcaaaagggtcgcagcttcacagtgtaacttggaaacagacaaggagatagatgattacatcatgacatactgcctacaaaagaacattctgacagaacattaagtaggaacagagcacacagtttcaagtattcagcactgctttctgggccaagtaaaacctgccttaaagctcagtttctttcgactggaaaaaattagatggagctgctgagttcncgggacacancgtttcttttcccagaatgagactgggt

SEQ ID NO: 330979 - DNA, 832 bp, Homo Sapiens
  misc_feature (90)..(90): n is a, c, g, or t
ttaatattttataatatctataataaatgcaaagaaatcaatacaaacaaaacttggctttagcaaactgtacatacataaatatctttnttttttactataacattcaacttttttcacataaagccttccatgatcttatttattacatctagtttttctttatacctctaaaaaaaagtgccttttagatttacagcttgtgcttctaaagcaaaggttaaaacatcatgccccaaaggaaaacaaggtaaaaaggaagctgccatataagctcttaaaaattgtatgttacaaggttctaaaatctcttcagcactggttggttggtagattgtacgacactgacatggtgcttgggagggtcatttatctgatggttggagcagcaccatgggaaagctgcccagatggtctactgaagtccttggctgtgcacaggatatgccaagggcccagaattcatgagtccggggaactttggaggtccttactcaatctccttagtgctaaggttcagagtctcaaaccagatttcttccaaaccttcttgttgtctgtttgttcccccgtcactgtttatcttccacctctgaagccataatttgcacacatgtgatctggaggaggctaaagctgccacaccggaggtttcgccaagatcaaggtcctcttgttggtagtttgggattgcttatgacccgatcctccttatgctaccagcacttctgcagatggcatctgcttagttcagagtggaggagggccattcgtgtatctgagcatggggtggaatgaccgggcaaagttgttggagaggcacagctgtagt

SEQ ID NO: 330980 - DNA, 527 bp, Homo Sapiens
  misc_feature (247)..(247): n is a, c, g, or t
  misc_feature (252)..(252): n is a, c, g, or t
  misc_feature (360)..(360): n is a, c, g, or t
tttcctgttgttttattacttactggtaaaataagtcaaaatattcacctatagtgtttaagtcacatgaacattgtgaagtgacaaaacaacacacacatttctaaaaatattttaatgaaaaagttatctttctgtaaacatttcattatactacaaatgaaacatctgaatccattacagaacacttctgaattcttaaaaatcagaaaacatacttaagttttaaagtaattttgaatatttnggatngggctaacaatccttacattacccttggcacactgggcatgcttattcactaatttgtgacattactggaactcccaagatactgtcaggtttcaatttgtgattatnatatactggaactcttaaaaccaagcctatttcaattagttacttaacaaatatactttattaccacatattctcctttaggacatgagtataaattcagctttttagaagtgtaatattagaagcagtaacttacaaattgggtttaacaaaatcagttaaatctg

SEQ ID NO: 330981 - DNA, 524 bp, Homo Sapiens
  misc_feature (163)..(192): n is a, c, g, or t
taaccaattgtattattacacattcctagttgctgcttgtaatagaacagatttcaatctcagaaatgtttatctgagagacatagatcaggtttacaaggacaagaggtcaaagtcatgccacagacgatccacaccacctatgtatgcactctctctcttnnnnnnnnnnnnnnnnnnnnnnnnnnnnnngctgagtctcatgtgcttacctcgtctgactgccgctggtgttatatgtagcttccatgccttggaagaggcacatatggtaacatggtgtggctaaagtaaagcaaaagtacaaaagcaataggtaagggcagtgggataacaggaaaggtttttgatgttattgtgggtattagcacatgatagccccaagacaagaaatgtcagttactcagaaagaggaaagctttccaaccaggagagttatatttatgtgcccatccctggaatggaggcagactgacaggaagattattttctaacttgaatggaaagaaggcagagacagacag

SEQ ID NO: 330982 - DNA, 361 bp, Homo Sapiens
  misc_feature (27)..(27): n is a, c, g, or t
  misc_feature (61)..(61): n is a, c, g, or t
gcatgaattccaaagttcctacttttnctgaaaacaaaaccccatggcctttgggtaatgnctgcctgataataaaaaggaatataaaagtgaagtaagatggaaatttattcctcccagctcaaatcacattcctgtcttcattacagtggctggataccaccaaaagctttattacctgtttcctatgttttgacgttggacaaatgcaagtcatagcaaagatagcctgaggccaacaatgaagataccttacatatcttaatattatcaaggaactatgctgtaatcagggatcctaactagagtttgtaaatacatgaaaaaaaagtaagaagcacaattggacagtgtaaaggga

SEQ ID NO: 330983 - DNA, 462 bp, Homo Sapiens
  misc_feature (39)..(39): n is a, c, g, or t
  misc_feature (92)..(92): n is a, c, g, or t
  misc_feature (120)..(120): n is a, c, g, or t
ccatacaccaccataccgccccaggacaatcctcccccncataaaaaataaccccatccaggtttccctatggaaaacccttaagtgggaancccaattacccccatagtaaataatttngggagaaaattataatgccttaaaatgttggctcaaacccctgacctattactaaactataattggaacagtaaaatgcatatatgtaactatcatatcatgatttaaaattgcttaaaccattgctgcttaatactaatcaaacttaacggctgcctaacaaaagttgtgaattattacacggcctctttgtaacgtgctgcatgttttttaaaacatctctgtgtttctgtttgttccactgctggtatttggaatgtaatttaacaagttctcacacatggtttggttataaattctgtattgccttttagggatataaatatacatttttttctatgt

SEQ ID NO: 330984 - DNA, 400 bp, Homo Sapiens
  misc_feature (48)..(48): n is a, c, g, or t
  misc_feature (289)..(289): n is a, c, g, or t
  misc_feature (361)..(361): n is a, c, g, or t
ttgcttggcctggattttatcttgaaatacttttgacagctggctggnttgagggtatctgctcacaggaacgccgcatttgctggctttgtccactagtgctcgcccctggctgctgatgcggacctcacgtggccgcagcccaagagtagggactggcttggcacgtccaggctaagcttcgggctcccaggttgctgggagggccaggggtgcacaggtgcatcagagcaggtgctgccttgctggagggccagggctcttctggccagggtccaggtcatcattntccccagccaggaatccaaggggcctttccaaacctgcgcaccccagcagccttccgccctccgcctggggntcaagggagcagagcctgggaagacggcaatgacagggt

SEQ ID NO: 330985 - DNA, 445 bp, Homo Sapiens
  misc_feature (317)..(317): n is a, c, g, or t
  misc_feature (325)..(325): n is a, c, g, or t
  misc_feature (335)..(335): n is a, c, g, or t
  misc_feature (405)..(405): n is a, c, g, or t
  misc_feature (410)..(410): n is a, c, g, or t
  misc_feature (430)..(430): n is a, c, g, or t
atgcttttactgtgtttgttggtctctgaggtgctcgtgacataccattatcataccgttcctcataatgaccctcagccactaagaaatggttgagttatgcgggataatttgctaagactgtagaactaatacactatataaagactttcattactttgtttttaatctttgcaacttaaaggagtatttttcagttaccagtaacattaatttgttttactcgggtgctaggataaaaatgacttaaatttggaatgtggcacattatttcatttgattctttaaaactaggtagggtcataggaaagggttangggcccanggggtaaaantaagggctatggagtttcaggactttccaggccatatattttggattctggggggctcctttcccccatnggttnaccccccaggccttattttntttaagggtcagggg

SEQ ID NO: 330986 - DNA, 293 bp, Homo Sapiens
ctaatcataagcatgtaaatcttgcaaatctcctcaccagaaggtggtgactgtgcttaatataatgcccaaagaagccagaatgtgttttcctcatccattctgcctagcatagtctcatttcatttcccacactgtatatccactcagcattttgctccctaactgtgtttgtgcaatttactcttatttacatacccaacaagattgcctacagattctatctgtctcaatcttactggacttttttaaagctcattatcaagtgtttccatccatgtcatattttctaa

SEQ ID NO: 330987 - DNA, 472 bp, Homo Sapiens
  misc_feature (50)..(184): n is a, c, g, or t
tgggcacatgtgatcctcccacctcctgagtagctagggctacaggctannnnnnnnnnnnnnnnnnnnnnnnnnnnnnnnnnnnnnnnnnnnnnnnnnnnnnnnnnnnnnnnnnnnnnnnnnnnnnnnnnnnnnnnnnnnnnnnnnnnnnnnnnnnnnnnnnnnnnnnnnnnnnnnnnnnnnnccacatttaatttttcaaatattttaatatctgaagaggattctagagtatggatgggctgaaatttataccaatccttcccaaaggaaaaacatatttatttctaattttttgctaaaaaacttagttatggtgaccattatttcacagatgtttttaaaacattaaaaacatttttatgcacgtggtaaccattcaagtagtttttcagggtgaataatccctgtctgtctccaggtaccctcaaaaggggaagtcattgttagcagttttttctgaattcttcca

SEQ ID NO: 330988 - DNA, 540 bp, Homo Sapiens
  misc_feature (99)..(114): n is a, c, g, or t
  misc_feature (488)..(488): n is a, c, g, or t
caatttgaagaaccactgctgcaggtggtagccctggctagactgaattacactagaaatcagccagaaggaagcgtccttgggatcccagatcactcnnnnnnnnnnnnnnnnaaaaggggcagccccttgatggctcatctctctgaataacagttacgtcttcatatcgataccagatgccttcttcatcatgccactgaagccactcaccaccttcaagaacatgccaacctctgtcagattcacttacccacaaacaaggaggcacgtttggcacaaagtgttgtcctccaggtccaagtggactctacagagtgcttgacctcaacacactggattccaggtggactggaccaagagcaggcaaagacacgggaactgaaaaactccacagggtttggagaatagaaatgaaaagccacgtcatataactcaaggaataaatgggtgttttgggaaattttgaaaattattcatcgaaggtnggtgaaattattttcagggcccaaatggaaagggaaattcgccagttggggg

SEQ ID NO: 330989 - DNA, 351 bp, Homo Sapiens
  misc_feature (28)..(28): n is a, c, g, or t
aaatgtataaatatgtatgtatataaanacctcacatacacacatataccacacacattttgtggtagacaagtgatactgtacacactgttcctgcaaacttgctttttctgtttaactatatatggaaaattgttatgcatctgtccatatagatttcctgcattcatatttatgtaactttgaaggggtaatatactcattgttcaaatacatataataaaatatataaaggtgtaatatacctgaatatatttgaaggaatagagtgaaacgtttcctgcttccactccaccccgcataactatgattattttcgtatgattatattagctttttaatatccttcca

SEQ ID NO: 330990 - DNA, 474 bp, Homo Sapiens
gtattttgaaaatttttattgtattttttttcagaatattttccatccacagttggttgaacagagtgccatctgtacctagaatgctgtctcagcccaaggtaccttcttcacatcattcatgaagtgctttaaaccactccccctcaagaagccctttagaacactcagaaaaagatcctcatctcataattcttggtccaaatacaaaactccagactcctcaattactgcatcactaaaattcccaccatttcagtgcatataattagctttttaagttatatatttattattagcttggtgtttgtgtgtttccatcagtggtaacaccataaacatgattcttccaattttactacttctgtaacacagttgcatgtggaaaacggacattcgataaatttatcctgacttcacatgtcagatagtagctttacacagccctcagttaaaagcaccggtttataagta

SEQ ID NO: 330991 - DNA, 344 bp, Homo Sapiens
  misc_feature (125)..(135): n is a, c, g, or t
  misc_feature (229)..(229): n is a, c, g, or t
ccctgacaaaaaaaaggccaaaactatttgggcccacctctgcaactgaaaccacagttccttcccattcacaaaggctgtatttccctttatttttcttgctctccattgtgctccttttttcnnnnnnnnnnnctcatctgagggcaagatcaggagcctcttgcggccacagaaacacccaaagtgcctgcaccaatacagactttcacaaacatcaaatatgagnggaattaaaaaaatgagatttttttccatttggtctttactgaatcttcagtcattttaggcacatgacattacttatttgtgtcaattcttacctcctttccctcaaacctaaa

SEQ ID NO: 330992 - DNA, 454 bp, Homo Sapiens
  misc_feature (15)..(15): n is a, c, g, or t
  misc_feature (49)..(49): n is a, c, g, or t
  misc_feature (55)..(55): n is a, c, g, or t
  misc_feature (57)..(82): n is a, c, g, or t
  misc_feature (94)..(94): n is a, c, g, or t
  misc_feature (112)..(112): n is a, c, g, or t
tcccaaaatggcctnccgggccctgtgtgatgtggccccgaaactcacngatctnannnnnnnnnnnnnnnnnnnnnnnnnnactcacccatgnctgagcccacgctggctntcctatgattcctttgatcctaggtagatgtacaatagagaaaaaaagaatgtgaaaattattgaaggatatagaaggagatcagttctcaaaattagcaggagagctcggttttatgtaatgattctgccacacaaatgtgggcgtatacgtaggaagcatggtttgatttcaaggacctctgggaaggaaccttttgtatctcaaaacttagctctttcaccagcttcattaaattattttccaggacaatatacttcataaattcccacctatgaggaagtacagttagtatttactctgtgccaggtacagtgctaggtacatgagctatgatgatat

SEQ ID NO: 330993 - DNA, 328 bp, Homo Sapiens
  misc_feature (18)..(18): n is a, c, g, or t
ttattaaagtttaggaanccaccgggatagtccatcccccacctaggccaatgaggttttgttaatccttccatagaggtgccaattatgggaggaaaatggtagtgagtaggagattgtggttgataatgatgtaccctacaggattacagtgtgggggcaaatgagagagagtcataaatacagagtctgagtgaaccaaaatgagccttggagggagtaagtcttactgtagacaagcatcaagtttaccaaccagcacaggtcctacaatcttgcaaggatgcaagaattttcttaaatgggttaacaagtaacttcagttcaa

SEQ ID NO: 330994 - DNA, 423 bp, Homo Sapiens
tttttaagtttgttttggaaataacagaaaagatatttattggccaggaagttggtgctgctaagaccgagaaatttaaagaatcggacagatggacgcagagaaccagagggcaatgtgggaccttctcttgccatggcctcaggtcttgagggaaggctcgggcctaggtttctggactgcaaaggggacccccaggtgggaggggcaggaagcagccggagtgagcccttcgcccctgagtgcctgggctcgcacctctcgagctgtgccctgggcatcactgagcagaggggtgcggcactttcaggaggcggaaacgagaggggtgggagatccacaggaccaaagggtgcagtgatgggctgggtggcgggcccagggaaatggggtggggatgggctgggtaagacctggccctcc

SEQ ID NO: 330995 - DNA, 397 bp, Homo Sapiens
  misc_feature (55)..(72): n is a, c, g, or t
  misc_feature (378)..(378): n is a, c, g, or t
tccatggtccacctgggttttaattattagatcttggtcgcccaaacaaaaattnnnnnnnnnnnnnnnnnnaatttgaccccaaggaagaacaagtcaaaacaaaatgccacgctctgtttgctctagaaaaagaaccatcaagtccacagagtgcaggtatgacttactctccagagtcagtcattaatgtctgtcacctagccacgtataatcatcttttgaaaaaggactatattctatcttggggacaataattatgggctgttttaatagttcaagagcataatataggcattgatttaccaaaatttttgggcctttaacagccagtctatggaaaaccatttaggagccccattcctggtctggtaggcntagggaaatggggaaccat

SEQ ID NO: 330996 - DNA, 400 bp, Homo Sapiens
  misc_feature (295)..(295): n is a, c, g, or t
gaataatacttgacattttccaaaggcaaatctcattctgcaaggagattgtggcaccatcctgtttgactctcagaaacctcttgtaattctgatgtaaaaactgtagaatgaagatgagaaaattctcgcaatgagtggatcatgacaactgtaaattagaacaatcagatttaaaccaattccgcaatcttctatatctttgtaaaagacaaatccttgatgttgtctgtgtgcaaccttttcataaactctggttttatgactagtacaaaccaccaaaaaagccatgtgnatccaatagtctgtgtcctgttataacatggctgtgggttgagccatcttgtttataaataataggggctctcctggatttgtggcataggacttcttgggttcc

SEQ ID NO: 330997 - DNA, 388 bp, Homo Sapiens
aaatatacacatatattttattttaaaaagcacaagaacattatacaagttttaaatttacatttttgcaataaaagttatcaatatatgcattatttgtataacttcatcatggatggaatttgaatcagtggtataaacatgttgcagtcactaaatatagatcatcatcacagtgaaccaaaatgcatagttgttatgaaatgacaaatgaccactaaaaggtgaactcacagcccatacaccaatataataaattaattatacagatatatttttcttcaccatatcattaaaattctcactagccccttaccaaacattagaaaaacacagttctggagccatcctgttgaaccagtgccttcacatactacactaaagaaaa

SEQ ID NO: 330998 - DNA, 424 bp, Homo Sapiens
  misc_feature (24)..(24): n is a, c, g, or t
tagctccgggccagagcgcgtctncctcttgctgattgaattcctttggtgcagtttagcatgttcctctgtgttctgcatctcctgtagtgtaatgttcaagctcagaaatgccttatgtggatcgtcagaatcgcatttgtggttttctagacattgaagaaaatgaaaacagtgggaaatttcttcgaaggtacttcatactggataccagagaagatagtttcgtgtggtacatggataatccacagaacctaccttctggatcatcacgtgttggagccattaagcttacctacatttcaaaggtaccaaagcagttcagactcacagccttaattctgataaccctaaagttcggccatggtgaatgttgggaaaaaagccagtgtctttacagaactggatattgttgggtggcgtt

SEQ ID NO: 330999 - DNA, 524 bp, Homo Sapiens
gcccgcttcttaaaagaatatgctttactttgaaagtttgcatttatgctatcttgtctatttaatgctatataatttcagacataatatagtaactctacaagacctccttccctgtataaaaagacgcactataagtttttgtagtcatctttgaggtctgtctgtagtgtgctttattaaaagcgagcaaatactgaaggatcccatttaagtatgtggtctgcggtggagtctaatttgtaccactaggcaaaggtcacacagaggagctcgttaatgcacttactccgggatgaaatcaatctccatacttcaccatattgatctgatagctcattggcgcttccctccgtgaactggttagctcacgtgtgaatggagagagatagatagctttctgggcctgagaattctagctggggtgccatccagggcaaaaggtggatgtttttacatcctcatttgggtggcccttttggtttctggtgttaggctcttgtgctggtatatcagttagtcag

SEQ ID NO: 331000 - DNA, 267 bp, Homo Sapiens
tcctggctttttgtccttgaagcccatttttccttactcattgatcccttgacagacacaggaccagttctcctcatgccccatctacccatcttagccgagtcccgcagtcactcaatttccactattttcctcccaaaatattacatctcacatccagtaaacagttgtcatctcataagccataaaacaatcaatcaatcaactatcaattctgaaacttttgcttatttggaaggttagcctagggtaggtgtttataaaaaa

SEQ ID NO: 331001 - DNA, 381 bp, Homo Sapiens
  misc_feature (69)..(93): n is a, c, g, or t
  misc_feature (365)..(365): n is a, c, g, or t
aacccaaagaaatttgtaataaatactttagttagtaaaaagaatatactgaaagtgaaaaaagtcaannnnnnnnnnnnnnnnnnnnnnnnnaagtgagcttagttctgtgtggttttaagggcagtgaaatgctgtagaaggactgtaatctgcataactcaaactggcttaataagtggaatttattggctaatatcactgaaaggtaaaggtacagggatagacttgaggcattgtgggatctagaaattcaaacgatgttatccgcctctctttccccactcaggctgtggtttccctctgtgttgggttctattctctagtaggctcttgcttgctgtatccagggtggactgacagcnggcttccggcttttat

SEQ ID NO: 331002 - DNA, 220 bp, Homo Sapiens
gagccacatggtgctgcaactgaggttcataaacactaagaagcaggaggagaaaagatataatcacgttccagatttaaaatgccagaaaatcttacaacattcaggagcaaatgtgtcaacaaccaatactaagattttcaaagtgaagagcatttaagtttcagttcatatttaaatagtaaatgaatagctttcccccaatcatctctttatattt

SEQ ID NO: 331003 - DNA, 388 bp, Homo Sapiens
  misc_feature (277)..(277): n is a, c, g, or t
  misc_feature (283)..(283): n is a, c, g, or t
  misc_feature (306)..(306): n is a, c, g, or t
  misc_feature (340)..(340): n is a, c, g, or t
  misc_feature (348)..(348): n is a, c, g, or t
  misc_feature (365)..(365): n is a, c, g, or t
  misc_feature (378)..(378): n is a, c, g, or t
aaaggtgtgagccaccgtgcccagccgataactgaatatttttaactacctgtctacaggatcatttccaactgatcaataggctagatttcttttatatcggagcttaaacttcctgactcctatttactcatcatccttgactcatacccacgagtcatcatctctggggcaggccacagaccatcaatcatttttttcatttagactttgtctatttcatttatttattaatttactactttataaataaaagaaataggacatgaatcagganaaaaantagggacaaggagctgtggatanccctgttggttcttatctgtaggagcagtttccntacaggantttaggacctggttttnttggaactgaccnggatttggtt

SEQ ID NO: 331004 - DNA, 421 bp, Homo Sapiens
  misc_feature (105)..(118): n is a, c, g, or t
  misc_feature (356)..(356): n is a, c, g, or t
  misc_feature (373)..(373): n is a, c, g, or t
  misc_feature (402)..(402): n is a, c, g, or t
tcaatgacaacttttaaagatcccatgatctggttcacagtgagaactctcttttgcagtcatcctttgcaatgataatatatgcctgtaaactaaggctttaannnnnnnnnnnnnngagatgaggtctcactctgttgcccagtctagagtgcagcagtttagtcatagctcactgcagcccgaacttctgggctcaagcgatcctccttccatgcctgagtagctgggactacaggcatgtgccatcatgcctagctagtttatcgttattattttttgtagagacagggtctcactatgttgcccagggctggtctcgggactcttgggcctcaaggggattctccctcgtnagcacttttggggaggnccaagggcaggtgggatccattttgaggntcagggagttttgagacca

SEQ ID NO: 331005 - DNA, 429 bp, Homo Sapiens
  misc_feature (281)..(281): n is a, c, g, or t
  misc_feature (346)..(346): n is a, c, g, or t
cacgatagtcacttgctcatctgaaaatgccttgcactttctttttcactagcttcgtgtatgacgcaaaacagaaatatttcaattacaggtgactaagagtaagaaaaatatacaactatatttaaaatacttaaattaacaagatagtacttttccattctaacaaaatatcatacattcagtttaaacaagagttaatatccagacacacgttttcaaaatacctgatgctagttgaaaattagtgaccatgaggctttccaagatatttctaattnggcaaactgtgtacaattttgaagaagtgtacacaccgtgctgggaagacagacactgaacaggntcaaaatgcaaactcatgtatctttcatcaacctaaatcttgttgcttcacttttctaaatggatactttgggctgtcagcgg

SEQ ID NO: 331006 - DNA, 460 bp, Homo Sapiens
  misc_feature (304)..(304): n is a, c, g, or t
actgacatctgtaactttaatttaatacaaattgatcataactcataaaatgggcaacattttaaataaaaatactgctggggtggcccagattctggtagttgaagggttggggtagggctgacaattccttttgcccaagggaggcccgggtggcgggggcagccattttaagaaccccctgtgtttagctcttccggctactttgggatggtgtgttgtgtcagagaccccaagtgcagaatctaggccccaggggctaggaaagaaaagtcaaggccggggagacatttagggctcagtntttgcagcccactcctccagttcccacctctgggcagggatagagccaaggggcaggacaaccctagatgtggactccaccctctcccgagttcttcacgattggatgctgtggcagaaaaacgcaggtggggcttgctccacccaccctaacttc

SEQ ID NO: 331007 - DNA, 157 bp, Homo Sapiens
ggaagagacaggttctcattttgtggcccaggatgaagtgcagtgacacaactgaacctcactgctgacccctgaactcctgcgctcaagtgatccttccaccgcagccttctgagtagatgggactacaggcgtgcaccaccatacctggctaatt

SEQ ID NO: 331008 - DNA, 440 bp, Homo Sapiens
gggtgtgacgttaagacatttattacatacagagcagatatgtgggtttgcttgcagggccaaagcctgaggagaatcgtcacccctcccccagccgccccactgctcagcccggagtcacttcgagatcctgggggaacagacgagggagcggacatacatcacagtggaggtggcagggtggtggggagaagccggcagcgcaggctgcagccctcggtggccagcggggcttgtggggcagctccccaagatctgtgcttctctggttgggggtgggtgcgggggctgggctgccctcataagggctcccagacaggagtgcagtgggcctggaaggtaggaataggccagagaggccagctggcgagggagagcagtccagggtggcgtctgccctctgcgggcttggagtcggctggggcggctccatcctcagc

SEQ ID NO: 331009 - DNA, 432 bp, Homo Sapiens
  misc_feature (263)..(263): n is a, c, g, or t
  misc_feature (394)..(394): n is a, c, g, or t
  misc_feature (416)..(416): n is a, c, g, or t
atatatctaccatttattgagaacttatatgccaggcactgtacatatatatttaggcaaatcctcacaacaaccctgtgaggtaggcattattattaaaccaattttgcagatcaggaagctgaggcacagagagaagcattacacagtagatcagatagatactgttatcccatttttagagtagaggaagccaaagcacagaaaagtgaagtgacttgctcaagaccacacagggaggcagtgtcagaaatagaactagnaaaccagtattactgcttctaagtctagggtactttctgtaggcaccacagctgtccccaaggcctatttaggctgggataggagagactaaaggcaaatgtgggcccaatttccatcggggaaacctccnggggccatgggggtggggggantgcgggctggggacat

SEQ ID NO: 331010 - DNA, 660 bp, Homo Sapiens
tggaagaattgattttaaccttttctatgcaaacacaatctgaaaagttatgtgctgcatattgtgctcaaaatgttttatactctccacaagctgcaattaagagattcattcctatttttaaaatttagatccacatgggttagagaaaaatactctcaaaagtgagttcctagagaatattatccctttgcctcacagagattttaacctgcatttaagagtaagtgttaggttgaggcatatgatattgtcgcttttgcagatcagcaatggttgaacactggcaatttcatatggttcaaccttgcacatgactcaagtgtaaaaaaaggagaaaccttcaagtattccttatttcttccaataggggtacactttttttgtacagtgagatcaacccaaagtacgcaagcctcttctctcccttgatgtggtagctacaggcagttacattcctttgctgcttgtgagaagcttacattttggcattttcttccaaaaattaccacgttgaccaaagtaaacattacaagaatatgaacttgttattgggggaaaggggaagtgaagcaatctgtagaaaatatttaactgaaattacaaacataaggacaagcctttaaagcaaattatacaggcatttttgtcctctctctg

SEQ ID NO: 331011 - DNA, 279 bp, Homo Sapiens
cctttaaatgttctttaggatattcctacaaagacaatccctgtcatctgtgaacagatgcagtctcacatcgccccctcccctctgaatgtagcaacacagactccatcgctacaaaacataaaaaaaatttggctggacatgatggcttgtgcctgtagtcctagctacttcaggaggctaaagtgggaagatcacttaggcccaggagatcaagtcaatagtaagctatgattgtgccactgcactccagtctgaatggcaggccttatctcaaaa

SEQ ID NO: 331012 - DNA, 359 bp, Homo Sapiens
  misc_feature (142)..(142): n is a, c, g, or t
  misc_feature (149)..(149): n is a, c, g, or t
  misc_feature (222)..(222): n is a, c, g, or t
  misc_feature (268)..(268): n is a, c, g, or t
  misc_feature (310)..(310): n is a, c, g, or t
  misc_feature (322)..(322): n is a, c, g, or t
tgacatgaagtcttgttacgttgtccaggctggcctcaaactcctgagcctcagcttcctaagcagtggcatgtaccacagcacctggctttaattgctgcaatttagttcatgaagtaattattttgttgcttaggtagtnccttggnaagttttgtgagagcaaggaccatatcttaacacttgattttatatatcccatggcaaatgacacaacgaggnggtacttgacagatatttgttgattattttgtaattctgcattttnctgaattagccaattaaagtcatcctttgtaaataggtggtnccagtttaaaanccaaacaggcagttttatactaaataggcatgcagga

SEQ ID NO: 331013 - DNA, 174 bp, Homo Sapiens
acatttgaagctttgagtgttcaaggttttccttaatgatttcacgcagccaaattcttgaatcagttgaactaacctgtatgttactgttattaatgtttactctgcagtctgaacctggagattactggaattgttttccaagaggaaataaattcagtttaccgattaaaa

SEQ ID NO: 331014 - DNA, 549 bp, Homo Sapiens
aaattttttatttcaaaaatctcaagttgtaaccagcatagcaccactgacatggatgccttgatagaactccttgatagaactttatgatctgttcaccagaaaagattctacatgatcacgccagactataattaaggctaaccaatcaaaattcaggtacccaaaaccagttataatcccaggtagaaactacagatcataggaacccctgggactggttttcccagggaaccctgggaattattttttaagtgctacagcatgtacaaggacactggcccacaagcttgcttctcacacgtaggaaactgacagactaagaggtaggatgagagattccagggttccatctagcagtgggagaggcagggctccagcatgtatcagagataagccccaaaagcaaagtccacttatgcttcagcagaggtaagcgggcaggctcctggcaccacctcctccaaatggaagggaaggagggctgcaccgctctgcctgtgtcactggctcctctccctgggtccaggcagggcctctcattttctc

SEQ ID NO: 331015 - DNA, 562 bp, Homo Sapiens
  misc_feature (33)..(33): n is a, c, g, or t
  misc_feature (39)..(39): n is a, c, g, or t
  misc_feature (45)..(45): n is a, c, g, or t
  misc_feature (55)..(55): n is a, c, g, or t
ccaccggggtggtactgacagaaattgtggatnatttgnaatccngcattttccngaattagcccaattaaggtcatcctttgtaaatagtggttccagtttaaaaacccaaacaggccagttttatactaaatagcatgcagaagactgttgatcacatattgatcattcacccaatattttatcttataaaagcaaaaaagttattgccagaaattttcccgattagtgtggtagaaattggcagcctctggttttaaagtgtagtttggaaaacattaagatgaacattagtgggaatgaaaaggagtcttaatatctgataatacaaagttgtttagtattagtaattcctcaccaaaaacaaagatataaaagcctttgaattcttgacatttacacaaaatttgtatgccaaaataccctatactttcacattatttctttgtgacaatcaatgtcaaaaatatttatgctttctggctctagatgtgggttaacctgccagttttaatatatcttcaataagttgttatatggtatggctttatctgtcatttca

SEQ ID NO: 331016 - DNA, 616 bp, Homo Sapiens
  misc_feature (122)..(122): n is a, c, g, or t
  misc_feature (246)..(246): n is a, c, g, or t
  misc_feature (255)..(255): n is a, c, g, or t
gtaaactttaaatctggatattgtatatggaaatattttagttaatttgaggccctggatgatgctatttacctctgcatatttccttttgctttgggctggctgtgggaaagagagcagancaacttagtctgggagtcagccctttggaagcttggtttcagactttgagagggacgatctactcacccctcagccttcctcccctattgcagccctcagtgctctcagctgaaggtctgggtncactcatcnagagtctccctatcttgtggggctgtcaccaattattgtctccccaacactaggagatgcaaaaagctctgctcagtgtgtcaacttctttccactgcatatgtgagactgaattgtgtccccccagcattcacatgttgaagccctgacctccaatgtgatttcatttggagacagaacctttaaagaggtgattaaggttaactgaggtgataagggtggggccctaatcccagaggactggtgtctttgcaaaaggaggaagatacaccagagatctctccctctctgcagacacagcagaaaggccattgtgagaacacgccaagttggctgcatacaagttgggaggagaggcttg

SEQ ID NO: 331017 - DNA, 227 bp, Homo Sapiens
cctttgccataagagagagagcagaacttaccaagttgggtgtagtatatacgtttgacttgggaggaaggaagaagtatgttagtgctctctcttggatttataacaaaaagttggtagaatgccaaacatttgaaaaacagtaactgaacttactcttgtactttcttttactctctcttcctcaatttaaaaatcatggttcttggagccaggtatgcgtgttg

SEQ ID NO: 331018 - DNA, 290 bp, Homo Sapiens
gaatttataatatgaggtatttattattaatagataatgcatatgaaaataatcaattaaattctgacacaatttccaaagagtttttgtgattcatgccatcttcctcttcatttcaaagttattattaattcattccaaaaatatattttgaatgttgcagtaacagagatgattgtaggtctggaactacagtggtagtgaacaaagcagatgagatcctgcgcttttgttgagccaggatctcatttagtacatttgcatttagtaagttaggggagggaggtaaa

SEQ ID NO: 331019 - DNA, 351 bp, Homo Sapiens
aagtatcagctattgttttaacccttaaatttttccttataaaagcagaatgaagcattctgcatttagttgcatgactttttggatgcagtaatcaaagattgatattcgacattcttccagtggtttcatttacagaagatcatcacatttctcattgttctgtggtcttgggtttgtcggtaccattcagattaccagtctcctgtattactaacactttttactacagtacttctcactatgcctagtatcctgtagtccagaagccttttgttatttctggagtataaactttcagttttataaaatgggtgtacctgtctgtatatgggagggtgctaactgctt

SEQ ID NO: 331020 - DNA, 371 bp, Homo Sapiens
caggaaacacttgattttaacttgctacttggactactctgaaagtcctgtgtaatgattctgaacatatatttcagaatatgacacattaattcatgcataataatatatagtttgaattatgaacttacctttcatgaagtcagaggatgcctctggacattcctgcatttatccattcagatggaagcttgatataaaagattataaaacttttaacaggcttaacttcttctaatttgaaatgcatgcactacctctttgtagcttctaaatgaactggcccaaaaccagtcagattttatagttggatggtaggtttctttactgaactatgaaaacagcagtgccaatggggaaaatgtgattgc

SEQ ID NO: 331021 - DNA, 476 bp, Homo Sapiens
  misc_feature (410)..(410): n is a, c, g, or t
gactcaatgcagatgtttattagaactaatgtttgttttttcatacgagcaacagcttctgttgttaataaaatccgggcatgattattattgctaacagcagcactcatggtatgaaattatagcttcagttatacaaactgtattctagagaggtgggttttggttgcacaaagaggagaccttttaaagaggcagcacatttaaaacattttcttacttatttttttaaattaatattcacaatcagtgattcaaaaagcagcaattttaaagttgaatgagctgcaattgggggtagtgagtttctcatcagtagaaatgctcaagaatgaggtcgcgaagttagacaaggttgttgtcctcacagatactccagccctctgcttctatggctctgtgagagatcntgggtttcttgggaccttggcagcagtgcagggagctggcacagctaaataagtgcttgtagggca

SEQ ID NO: 331022 - DNA, 428 bp, Homo Sapiens
  misc_feature (155)..(170): n is a, c, g, or t
  misc_feature (385)..(385): n is a, c, g, or t
  misc_feature (400)..(400): n is a, c, g, or t
  misc_feature (411)..(411): n is a, c, g, or t
atcaccttatctctgatgctggtttctaattcaggaaagagccaaccaggtcatattgggagtaaagagcccctaggtattagtatcatttttgttctttttaaaacaaggtgctctgtggcctataattacatttagcttaaagtcttttgacnnnnnnnnnnnnnnnnccagtaaaggttaatgtggaccatgtgcaaagcaagatttcaattgagcagaagcttttagtttagcatgtttgtggtttggctggcccaaaggacactagagagtttacccatgcacttttagcttgaaacattaatttatccatgcatgtctgcatgtgagacaagcagatgcaaagcatgttctgcccttctgttctcgggaggggaggagnccatggacagccctngcagccccagncactgcccgtgtttagg

SEQ ID NO: 331023 - DNA, 722 bp, Homo Sapiens
  misc_feature (51)..(89): n is a, c, g, or t
  misc_feature (152)..(152): n is a, c, g, or t
  misc_feature (599)..(599): n is a, c, g, or t
  misc_feature (652)..(652): n is a, c, g, or t
  misc_feature (670)..(670): n is a, c, g, or t
  misc_feature (672)..(672): n is a, c, g, or t
aagctttagtgatttattgcatagaataatgactgtattaaataataatgnnnnnnnnnnnnnnnnnnnnnnnnnnnnnnnnnnnnnnngagacagagtctcacaatgttgtctaggctggtgtcaaacacctaggctcaagcgatcctctnggccccatcctcctgagtagctgcccgatgggttcttcctgcccactgcacaaaaaaatcagttcatggagaccatggcactgcagtaaagaaagaggttaattgacatgatgccagccacaccatgtgggacggcagagttattactcaaatcaaactcatctaaggcttggaggttagggatttttcaaaggtaatttggtaggtagcaggctagggtatggggagtgctgattggttgggtcagagatgaaatcatagggtgtcgaagctgtcctctttctctgagtcgcttctgggtggggacacagaagccgttgctgggtcccggtggagccatcggtcatcagacatgcaaaatcctgagaagatatctcagaaggccaatcctaggttctacaaaagtaacattatctgcaggggtaactgaggaagttgcatatctcngtggcttctggaataacgcctcacaattgtttttgtctacaccttagcagaanttaggctcctctcctccncntagcctggtggtctctcagtattacaagggtggttgagtttcggggaagg

SEQ ID NO: 331024 - DNA, 379 bp, Homo Sapiens
  misc_feature (341)..(341): n is a, c, g, or t
ctaccataatccaacttttaccccttttttgttttctctgtcagtataacttccaacagtatttcataaaattcctttaattcttcaaatctacgatgttggtaaaggtatagcttgggtactttgtaacaaactgccagctataagcttcagccagtttacatttaactcttacaaaccctctttttgtgtgtgtggataaacttacagattgatgctctatggtcactttcatttccattgtaagtattcttcagttacttttgagtttgaagcctgctccatttcgtgtgaataccgtgggtgggagggtaggcacctaggctctaataggctcaggnatgctggggctgacagatggggggaggacaggatgtac

SEQ ID NO: 331025 - DNA, 395 bp, Homo Sapiens
ggactcatgcctataatcccaaaatgctgggattacaagtgtgaaccaccatgcccgacctgttactctttttatatccttgtttacttcctgtatcctgggaatctgtacctttacctcaaaactcattttgctattagtttgtgtataatattaatacaaaacattcacacgtgattatactttcacggaggaatctacgcagccaactgtggaatctatcagccagctgtttcatttttaattgaggcagcactgaagagtcatgcaattccaaataaaaatctgggtttcagagtcctcttgaaaatgtgggaagatctggacaacacagtgcttgcaactgtcaaggaagttaatcctctggagttgagtaggattggtcccccttaagc

SEQ ID NO: 331026 - DNA, 425 bp, Homo Sapiens
  misc_feature (230)..(255): n is a, c, g, or t
  misc_feature (395)..(395): n is a, c, g, or t
ccaactgaatctgaggttttataaatccctcaaacgattgctgagagcctgattgtggaaagaagtgagatgcaccttattttcaagaagtcctgggaagcgctctcctagcacgtccatttccaggaggagaagcaagcagatgagaggttttccattttgtcatccaaggtagctgtgcacttgccttgttgctgaagttccaataatgtgaaaaccaaagtagaggnnnnnnnnnnnnnnnnnnnnnnnnnnattaatttcacttataccaaagtgtttgaaagtatgaaatgtgttgcttctgagttatataagggctacttcatggacaaggactggctttgtaatattttcactttgttttactacaaattcagatccactttgttttnactattaaattccaggttatcccaatattt

SEQ ID NO: 331027 - DNA, 473 bp, Homo Sapiens
  misc_feature (115)..(115): n is a, c, g, or t
gggggttttcctcaacactgtttcctcctcaaaaccgtggctgcctctgaagaaacaactgaaacactgaatttcctgaaacgaaagcctttccccacagatgcccacacttgtnagggtttgtctcccagtgtgtgttgtctgatgtttattcaaattggacctgttgctaaaggccttcccacactcagcacacacgtaaggcttctctccagtgtgaattcgctgatgcacttggagctgtgattttttagtgaaagacttcccacagtcactgcactcataaggtttctctccagtatgaattctgtgatgtgtaatcaactctgacttctgtcgaaaggtcttcccacattcagaacaaatgtagggcttttctccggtatgagttttctggtgcttactgagatttgacctgccactaaaggctttcccacactcagcacacacatagggtttctcctgtgccgaat

SEQ ID NO: 331028 - DNA, 321 bp, Homo Sapiens
  misc_feature (19)..(19): n is a, c, g, or t
  misc_feature (29)..(29): n is a, c, g, or t
  misc_feature (52)..(52): n is a, c, g, or t
  misc_feature (291)..(291): n is a, c, g, or t
aaaaacctaggtgaaaaangttaaaaaanaatgaattccccccggaaaaaanacattgaactggaaaagggggccatgaaaggaaaacagcccttcctacgatgcctggaaaatgttcctgtatcttgatgggggtaatgagggaggtagatacatgggtgtatatgaatataataattcatgaagccttataattaagacgtgtgcactttactgaatactagttatatcccaatctaaaaaatctttttgggccgggcacagtgggctcactgagggccggtgggatcnccccgaggggtcagggagttttgaggaccc

SEQ ID NO: 331029 - DNA, 369 bp, Homo Sapiens
  misc_feature (18)..(18): n is a, c, g, or t
  misc_feature (185)..(185): n is a, c, g, or t
aggggaaaccccttttgncttggttcccctcattcctcctccttggccgcccatataagaaagcgccttttgccttcccaccatgactgtgaggcctcctcagcccatatggaactgtgagtccagtaaacctctttttccttataaattacccagtctcagttatgtctctattagcagtgtgnaaaccggcctaatacagtaaattggtaccagtagagtggggcactgctgtacaaatacacgaaaatgtgaaagtaactttggaactggataacaggcagaggttagaacaatttggagggcccagaagacaggaaaatgtgggaaagtctggaacttcctagaaacttgttaaatggctttgaa

SEQ ID NO: 331030 - DNA, 592 bp, Homo Sapiens
  misc_feature (557)..(557): n is a, c, g, or t
caattaatttgaggctatttcctatttgaccccttttcttttttgaaattccctgaaatgatgttattctaaagaacttctatgtcaggttcctttggatacccttgaatccagtgtagtaatattttcagacgtttccccaataagtgtgttgaagcatacatctttacgctgctaatatgtctaaatccatatgttatcccttgatttttttaaataactgagagctctatttatttatgggattattaagttctgatgaaaatataaatgttgacttaatcagcatagtaaactgatgtttaaaattccatacttcatgcccacactaatttttaatgttattttcagtggttgccgatttccatttgatgaagaactatacagcttaaaaaaatacgttagttatatctatctagtggttgtctgttttacccaggaattcttggatatttagttttctgggtactgaagtggatgggagggggaatgattaaaggaacaaattataaaaagtttgaaccaatcttttccaattaagtatataaaagtaaacntttaagaaaaacctttttaaatggagattttaata

SEQ ID NO: 331031 - DNA, 512 bp, Homo Sapiens
  misc_feature (15)..(15): n is a, c, g, or t
  misc_feature (30)..(30): n is a, c, g, or t
atcaaaaacatctcnaatgcaagtttgttntacaaattgtcctacattttacattttttctagttttcctatgatctttataaaagcttatcacttataagaaaaaaagttattttcatttttgaaaaatatctataccctttactaagtccctttacattcaatgaccaagattcccacaacactctgggaagctgaaagatctgaaagtaacacggccattacatagatgaaggcagcagaccttggaaatgtaaccccgatggactgactctgggctggcattctcccacccctgcggctactccagactcagaggaatgtggcaagtcagatgccagctttggccaaaaaaactccgatcattttaggagtctcaccatgcccagttacttcctctgagatggtaacagcaataggggaacacttcaaagacaaagcattcagaatgattcatgctgcaccacctccccctggtggcaggttctggaaattggcttgaggataactat

SEQ ID NO: 331032 - DNA, 468 bp, Homo Sapiens
  misc_feature (388)..(388): n is a, c, g, or t
ttttcagggtgaacaggatcattttattctcatttatgcttaaaataaagatacaattcaagttttacaattcagtatgattagacgtgatttataattttaacaatttaaaaaaacaacagaaataaagaactagtacaaactttaaaactaccagagcaaagagaactacctttctgatcaaaacatgtgccacagttaaacttccttagaaaactttttaagttttctcagctaaattttctttaaaaaggtttgtgaaaagcctttaatcataaatatttaaactggtttttggtaaccactaaatgccttcaccaactcattaatccaatgttttctaaattcaggaaccagtgaccaagtggcctggaaacatggtaagccntggatcctattcttccagctacaaaataccaatattttaaggaaaccacaaaatatttttcctaagcacagaagccttct

SEQ ID NO: 331033 - DNA, 323 bp, Homo Sapiens
  misc_feature (31)..(31): n is a, c, g, or t
  misc_feature (62)..(62): n is a, c, g, or t
  misc_feature (92)..(92): n is a, c, g, or t
ccccccaatgtttaaacctggagttaatggncccctaagcccttcaaaaatgggggtttaanaagtatccaaagtgaagggctgtttgggtncctccggaaaaacacaccccattttcctggacacatgggctagactttaatgcccgggtacatggctatttttgaaaaagctccttttttaagaggtaactgtttattaaaacaatctgtttcacccaaatatgttagccctgtaaaattgacatttacaaaagtttgaagaaaacaaatttgggaaagttaataattcgcctttctatcttcaaggattcaaattgaccg

SEQ ID NO: 331034 - DNA, 268 bp, Homo Sapiens
  misc_feature (31)..(31): n is a, c, g, or t
  misc_feature (51)..(51): n is a, c, g, or t
  misc_feature (60)..(60): n is a, c, g, or t
  misc_feature (71)..(71): n is a, c, g, or t
ggaaaacctgtctgaattcccacctcgtgtnccttcccaaaatggccaagnaaactctgntgtcccccacntcgaacttctgggagggtggcctactcccctctttccaaccccccttttctgggatcttgaccaagggattcctacccctgcccccagctgtcaaaagccctgcagcagctgcccaaaaaacctcaacacaggcatactttggaccctacatcatgtgttgatgtcacagatgctgtacccaggcatttgactcctt

SEQ ID NO: 331035 - DNA, 380 bp, Homo Sapiens
  misc_feature (27)..(27): n is a, c, g, or t
  misc_feature (82)..(82): n is a, c, g, or t
  misc_feature (126)..(126): n is a, c, g, or t
gataccatgagccctttcctgtttatnttgggagttgaaaatggggcacccatcaacatttagattacagccctaattaatnccctagataagaccttcatttgaaataagaaataactcttttanctagtgattcatttatacagatatagtatctctgtgcggggatatgatataatattgtatttccttactgttttatctattgtaaataaaaagcattttaaaaagtattgacacaaatcccatcagtgggcattaaaaatattaaaagtgcagacttttactgtccttaagtgccatcaactctcagctcccttgtagcttttgtgggatttaacaagtaacaaattctgttgtgtttccctggtatacatctt

SEQ ID NO: 331036 - DNA, 408 bp, Homo Sapiens
  misc_feature (41)..(41): n is a, c, g, or t
  misc_feature (48)..(48): n is a, c, g, or t
  misc_feature (391)..(391): n is a, c, g, or t
atgcatgctaccttaattttggtgacaattacatggccccnggtttcngctcccctggccatcagtggtctccttcctcaggtcataaatggcttcctgctctgcttggccatcctacacgctggagggtcttgcctcagaacttagtcactagtcttctccatcaatgtccactccctaggtaacaacccttccctcctcacctagtcacataatttaaatgccacctacatgccaatggctcccaaattccaatcctctgccacaggactgtccacaaaagcgcagtcttttgcttagaaactgactgctccccttggatgtctatcaggcaactcaaagcattttaaacaaatattaatttcccctttccccatttctataaacagtnaccagttgctgaagcat

SEQ ID NO: 331037 - DNA, 551 bp, Homo Sapiens
  misc_feature (200)..(200): n is a, c, g, or t
  misc_feature (454)..(454): n is a, c, g, or t
  misc_feature (468)..(468): n is a, c, g, or t
  misc_feature (506)..(506): n is a, c, g, or t
  misc_feature (536)..(536): n is a, c, g, or t
cttctttgttggatctctgggtttctttaagagagaaagttcttcggggtgtctgatattaaaagtcttacagatgtcagaaacagctttgaagactctatcagagaaattcactttcaccttcacatacttcatgttgggaagctgcaggcggacagttttgtgctgaggggtgaactgaagctttagcatctgcctgnaataccatacttatctaaggtccaatgtgtcttcagaagccaagttctcttcttttcccaccagagagcatgggtcagaccaatctttttttacatcgagtttctccaccaggcttaagcatcacgcctccaatgtggcacctcgccgggtcactctcaggggtgacatcgcggttcagggtccgtcacatgggacactcagttcccacgtcccgtccgcgtagcagccatctggcatccttatcccgtccagnccatggctcctctnccgcgctcctagcgctccgggcccgggactcgcgcggnaacaggcgaggggctggaggctccggggcnggggctgtgccgaat

SEQ ID NO: 331038 - DNA, 1032 bp, Homo Sapiens
  misc_feature (83)..(83): n is a, c, g, or t
  misc_feature (407)..(407): n is a, c, g, or t
  misc_feature (426)..(426): n is a, c, g, or t
  misc_feature (634)..(657): n is a, c, g, or t
  misc_feature (958)..(958): n is a, c, g, or t
tcggaaggaacgagaatgtttatttaaaatacggcagacataaataataaataaaagtttaaaacttaatcggcgacacaacnaggaccagcctccctgttgcattcatgattcttttcacaagcacctggatcttttcctaaggataaaaagaggcacaaggagacaaaaggctttggagggggaaaaagaaaatatcttgttgtgaccatgtgctgttctgaaacaagaaggaaaagcatgtgggcattgaatggctgcaatcaaagaccacacggtgacagcaccctggccagcctcgggtttcagaaaaagcgctggagccagcggaataccaaagccttgtttccccctggaaccggtttgggtattatgcctggtttgtggttcttcccctctaacatttnggtggttgacacattttcntttaataagctttttccctatcctttttcctttcagtcctattgttaaaggtgtcttgggtccggtcttaaatcaatttggttgtgactctgggtcccagaaaaaagctgctatctcattagcggcttggtgtgttcgaaattcatattttgaaccccatagaaaacatacactacccagtaccattacttccctgcatatatatgtnnnnnnnnnnnnnnnnnnnnnnnntcacacagaacacagaggggctgctgaacaacgccagcatgagtgtaaatacattctctttcgggtcagacatttggcctgacagctgattacaaaacacaggatgacttcaaggggaaggcatgaaaacaaaaggtcacacctcaaaaaagaaacgactgtccactgaggcagagcagtgaaggtcttgaagaagctgggccacccataaaagaaaagccctccgatcaggaaagccacgtcagctgcacgtggctgaggatggaggctccttacgctcctacagggtgggcgaggtgangtgtccgatgacacccagatgtgttatgacccgtgccgcgtgacagctcgtggtgtgccagccacggaatttca

SEQ ID NO: 331039 - DNA, 380 bp, Homo Sapiens
  misc_feature (14)..(14): n is a, c, g, or t
  misc_feature (21)..(21): n is a, c, g, or t
  misc_feature (41)..(41): n is a, c, g, or t
aacaatggccctgnaatctgnaaaggaacaacaggtttgcnaagaacccctggcacaactctaagcatatctgtgaagcagctgttccctgtaagccactgcccagcacctcctcaggccagcctggtgccacagtcacgtgggggaagacctcagccacagctgtaagcagctctctgccagccacatggccggggaccgaaaaactcccgtgggagattttggccccaacccacacaggccaatgcaagaggccaaggctggagaggcgtgccagcaagccagggatggccggagggcctgcgggccgctatttgcaaatggatgccccagtgtccgggatgtgtggccagctgctgcaggcaggactccagcgtcag

SEQ ID NO: 331040 - DNA, 453 bp, Homo Sapiens
  misc_feature (402)..(402): n is a, c, g, or t
  misc_feature (417)..(417): n is a, c, g, or t
  misc_feature (429)..(429): n is a, c, g, or t
  misc_feature (439)..(439): n is a, c, g, or t
aaaacaatctacgaagcaggcactataataagccccgttttacagaaggagaaaatgagacacaacataaataacttgcctagttatgggcaaataacttgcctagtttatgggcataaataacctgcctagttattgcctagtacatgggcagaggggagttttggaccagacttgagagatcgtgctcttacccactgctgctctgaacacataataaataaagtataactcactgttattaaagcacagggtgtgagggggaggactgaggagtgccgctgttgagagggcagaagtcagacagagcctgaggtcagtttggggatgggtgttgaaaggaccctgtgggacatccagactcctgagggcaattcgaccacacacctggcctttaagggncacggttcttgaggntgggaggatttngaagttaccntttaggggacgtag

SEQ ID NO: 331041 - DNA, 530 bp, Homo Sapiens
  misc_feature (344)..(344): n is a, c, g, or t
  misc_feature (441)..(441): n is a, c, g, or t
attaaagatctttttaaaatctactatatgtctgctcaaacttaacatttaatgtatcagaaaatattacagaattatttgtttgttccagttatgttaactaaatttcattcaagatttagtcacttatagaggacaacaactacaagtaaatgagaaaaattatatatgtgtcatatacaatgaaaaggccagtaaggaatctatatgtcctccgaaatatcagagaaagatgatgctgcctgatcctttgattcttcttttgtgggacagaggaggttcatttcttcataaatttctgagccctgcccttcctagactagcagaatatgtctggctccttnccagaatggctgaccagtctgtcatgtgtctccactgcccattgcccctgacctcttccttcctcttctgcctgctttataacctcttctagattcnttggagtccagttttctcaattgtaagcaaagactagccttgataagtgatggggtccattcctagcctaacatttaacaggctctgat

SEQ ID NO: 331042 - DNA, 386 bp, Homo Sapiens
  misc_feature (334)..(334): n is a, c, g, or t
  misc_feature (340)..(340): n is a, c, g, or t
  misc_feature (345)..(345): n is a, c, g, or t
  misc_feature (354)..(354): n is a, c, g, or t
ctgtgtgaagcttgcatttattttagttaggtttctaactaatttaatttctgctaaaatgatcacactacaaatagaaaagtaattgaagaggtgagtcttgtgaattttaagcccttttcatttaattaggcagtaaaagccagactattaacttggaaacataagcacaggctattatttgtaaagataattctagaaaactagccaaacttcagtatgactgagaccaaactgtacatactatgctgtattgtaacatcaaaccagagtgacagagtgctcctaggtgacactgtagtgacagttgaaggacaggggcagaatggagaangttacngtccntctaatcantggaaagatggcttgtgatgctgcccagtgtc

SEQ ID NO: 331043 - DNA, 404 bp, Homo Sapiens
ttttctgtaaacctttttaatagtatatatatgtttggctttagtacaattaccaagtgtaatcagttacagtaattctgtatgtatctcagcagtattattttccagcatggctttacattttaaagaacttaataactatagaataaacagatgcatgctatacgagttggaatgtattagagctgggttcccttttgtgtgtgtttgtgtcacgtgtttagtttatccatagtcatgaatactatgttgcctagatacagtggggaacaccgggaaagtgaaatgcagttttgttttctgggagggcaaaccaagattcttgggtacatatttttctgtttcaaagcatagggaaaactgttgaccccccaaaaggaagggctttcctccataaaacactc

SEQ ID NO: 331044 - DNA, 467 bp, Homo Sapiens
gtaaggctacttttgtagctttttgttttccctttgtatttatcatgtttttaatttcttctctgaggaggaattctctgaatctgtatcttccaattcaattcgttgccttttgaggccactgtggcattgaacagccctgctactatctgtggctggggtgtcagtggggtcctctcttgttccagcattgggggtctcacaggccatttcagacccgcaacaatctttgtgtaggagtgtccctgtcagggacgaggttatcacggtcagtgtctgagtgtccttggggaagagtaggccaccacctccagctcccccaagttctgcccgttattgtgaggggtgagggggacgagggtgtaagcgtccattgttgtggttgggcacagatggtttcgaggctcctctcctcactggtcatcagactgggtcctgggacagttgccagacccgctgttgagaat

SEQ ID NO: 331045 - DNA, 779 bp, Homo Sapiens
  misc_feature (658)..(658): n is a, c, g, or t
  misc_feature (766)..(766): n is a, c, g, or t
attctttaatagagtaactggattggcccaaggtctgattcaagaggctgtgaggagagtagagaacaaatagactttgcctctcagagttcagagctttaagttgtataagcatggtccatgtccacctcttgtagacacttattccttaaaagtttccatcatgaaaaataatatcatgtcaaaattttataagcacccagaatgtcccagtagtcaaatgtagtgtctttctccagtctctgttttcgataataaataccttgctctcaatttaggatgatcgtaaagcctatgttcatgctgtgagtcattgtctcccacagcttttggaaacatcgttctttgtctttttctattacaacacctggattctttgtgcctcagactcattgctatcaggaagagactttgccaagatccaccaccacatttggccagtagtgtatacacattaaagtgagagctgatgaaatcacaatgctctattttgttccgacaatcagtatgaaggggtaggtcccagtttgccaatgagcaacagcctctgtatgctggtgtccaagacttacgacaaaacaagtgtcagtgcagtcacagcattttcttgaatgctgttgtgacagactccagttataaacatctgcgagccatatgnacaactcatagctaaagaggccggtacagggcacatgcacagagctttgaagaacatacacaaacctgttgaatcaagttactttcctcatcctcagagactttgacnattcagagctcac

SEQ ID NO: 331046 - DNA, 285 bp, Homo Sapiens
  misc_feature (227)..(227): n is a, c, g, or t
aacgatagcaaacagtagtcactttaatttgctttcccaagtaagcacattctttacaaattaaaattatgatagaaagccagacaaaatgcataatacatacatagttaaatttcatataccttcagaggtagaatttgggatttatgtaaataaatgttactcaagtatatctatgttttcaaagcatattgtcacatttttgtctgcagaataaacaataaaanagggttttgcagggattctctgagcctatggggtcaaaaatagcccatcataaatccc

SEQ ID NO: 331047 - DNA, 614 bp, Homo Sapiens
  misc_feature (554)..(554): n is a, c, g, or t
  misc_feature (563)..(563): n is a, c, g, or t
gattggtactgtgactagtggctgcccctccccctctctgaagaagaatgtggcgatgggttatgtgccctgcgagtacagtcgtccagggacaatgctgctggtagaggtgcggcggaacagcaggattggctgtagtcagcaagatgccctttgtgcccacaaactgctataccctcaagtgaagctggctcagggtggggctgtcccttccaggagttttgcccctacaagggtttagtcaagaagctgaggcagaactcactgggggtgggcagttaaggtggaggctgattctaattgtctggttgaggggccacaccacctattccccccacctaactcatgccattccagcttccttcaggaccctgcttctgaagtgacggaccagctcacacaatgtcttgtttcagtccatgattccactggacctactcttgcctgctggagggttaatgagaagctttggttctggccatctctcccattctggccaggttgctggcttgttggagcaaaggctcacctttgtgggagaggataaaacctgncccaacctnccttaccatgggtttttcacattggcaaagggtaattaacatgggggcagt

SEQ ID NO: 331048 - DNA, 403 bp, Homo Sapiens
  misc_feature (84)..(84): n is a, c, g, or t
  misc_feature (105)..(105): n is a, c, g, or t
  misc_feature (156)..(234): n is a, c, g, or t
ctgcccctaaagccctccccaaagaagctgggaacctaacaggggcccggcccacccaatgccccggcctaattttttggtaanttttgggtaagaagatggtgnttccaccccatgttaaccccaggatggcctcgatctccctgaccctcttgnnnnnnnnnnnnnnnnnnnnnnnnnnnnnnnnnnnnnnnnnnnnnnnnnnnnnnnnnnnnnnnnnnnnnnnnnnnnnnntgaaataagatagtctgagtcttaaaattttgttcttctttttcaaaattatatttgctattctagtttactttattattatttttgattgctgcttatagtggttgccaagtagccaaacattaaattcaatatttggccaaagctgagactgaaattaagtatcatc

SEQ ID NO: 331049 - DNA, 368 bp, Homo Sapiens
  misc_feature (29)..(29): n is a, c, g, or t
gattgtctgaacccatcctggttttatantcctgtttaccctactgtccagcccattttggagttgttaaaatcctttgaaagtagttgggaatttttcacagtaagctgggaatctatacccactctttaaaaactttgtgtttttagggtattcccatttaatcctccagagaataattactttttaatttaggtgcaatgtgttaaatattatataattaaaatgtttttctcccttcccaattacttattcttagaaatcaaagtttaaattgtctaaataggtacttggccatagtgtgataacactaataacagattcgtaatgatagaatgtaaatattaatttatatgtcccctctcatt

SEQ ID NO: 331050 - DNA, 512 bp, Homo Sapiens
aattccattttttttattattcaacattttatacataataaatacaaactttttacagccactgtaaagaaagcacatctgcacagaggctccctccgagccctgacctgtgcactgtggtgctggattccatatcctggatggaggggttattttttaaaaaggaggcatgttttcacaactttgttttttaaaataaaattagcagctcttccaaaaaatattttaaaatacaacaaaagatttcaaataacccctttgaggttgtggaaaacccaaattcaagggacaatttgggctagctaaagacagaataccaagactggggtggcaagaactggctctattttaataaagcatttggaaggatttttaatatggttaggcaaactttaaaaatcttaaaaaaaccacccttttaaatttcttttttaaacttaagaataagtttgataaacaccaaagacctcaaatagatcaccaggttaagaagtgtaaaaaacaacaacgaa

SEQ ID NO: 331051 - DNA, 354 bp, Homo Sapiens
ctttttttattattcaacattttatacataataaatacaaactttttacagccactgtaaagaaagcacatctgcacagaggctccctccgagccctgacctgtgcactgtggtctggattccatatcctgggatggagaagattcattaatgggtattgtcactgaagtgatcaaagaactaaaaatttcttcagttatcaccttacttttgggtcaaaaatcccatgggggacatttgggcgagcatttcaagtttttttaggattcttagggaggggatgggagttttcaaagcataatacaacttgtaggattaaattcttgccaaatttgatttctttaacccaagggg

SEQ ID NO: 331052 - DNA, 490 bp, Homo Sapiens
atgatttctaccagggatagataagtagtgataattttaaaattactatgtaggtagcttatattgtgttaagaagccactatataatatataccctagaaactttactgttttctgtaccactgagccacaatttcttcaaaagacagaattttaacttggtcatttctgccttccctatagaaacatagtagagtgtcttgcaaaagctagttcggtaaagatcttttgagtgccacgcatgcttgaaaccttttaagagcttagaataaaccccaaattccttgccctagcctacaaagcctttatgggtctggtattatctacttcttccattcattttgtactcttttcccttcatttgcttaatctgtaggccacaccaggccttttttctgtcccttgaacactcttgagctcatagctgttatcctggggcctttgcgctagctgtgccccctgcttgcaatgtccttccccatgatcttct

SEQ ID NO: 331053 - DNA, 416 bp, Homo Sapiens
  misc_feature (370)..(370): n is a, c, g, or t
aatgtatatacccttcaggtaggtttattccctcattaaatggctacttttctcttttatcctctagaaaaaacacatttcctttcttctggtgtagctgaaatgatccattggtgtgtattttatggacaatatcttctcatctgcacacttttctgctgatttacatttatgttggctccatggagagatacaaccagaaagggactttgtggcattgttgggatatccacaaccctgccactaagtctaccatcagctaactccagccaaggacagccagggggactaggaagaggtgttgcctaaccctcctaccaggcaaagcaattcaaggaagacagtaactaaaataaggctcttagggggngttgtggcctacacacccttatttgacctgcccgagggggttaggt

SEQ ID NO: 331054 - DNA, 377 bp, Homo Sapiens
  misc_feature (51)..(51): n is a, c, g, or t
  misc_feature (57)..(57): n is a, c, g, or t
  misc_feature (101)..(101): n is a, c, g, or t
  misc_feature (129)..(129): n is a, c, g, or t
tagaacccctattacccctttgaagaaggaacaagaaaatgtgggcccaantttcanttgcccaatccttcccatgtgagttagtatggttccgtaagtantccctggtgatacgctagtattggcaantctgtgaggttgaacaaaggggtggtatggtgtgctagcgtgggaattaggagacctctgggtcttgacagtgccctggccactaagcaaaggcagttcatccttggagtctcaatgtgcttttttgttaattgagatatgcttgaagtatcagccctaaatagtctgattctgtgacctacaaacccttacttaattcagtgttactataaatgattcttcccttaaacctactttttacttagcaa

SEQ ID NO: 331055 - DNA, 485 bp, Homo Sapiens
acacctatttttttctttcagttttaaaatagtaaacaaaaaatccagaacagtaatacttgtataacaagttacactatcttacgtttaagaaggttcactggaagcatgtattcaataactgactttttatgtagaataatgcattttatatatttaaagtagattgtggtatctaggtacaagaggacattaaggagatgagaatttatagtaccccagcactttaatctctgagaaagctttagcctaaaactaccgtatactaattgccaatggccttatcaagaagacaattatgaaccctaaaaataagtatcaaatacttatgtgctggaactccatggaaactgcacactctcctcttaaacctattcaccattttatggcacagttttaacagactcagttacttaccccttagaactagattgataaaagcaaatttttaacagtaaatgctagtagatgcagggatttcaaca

SEQ ID NO: 331056 - DNA, 522 bp, Homo Sapiens
tgggcatcaatctatcaaagtcagcttttctgtacgagactgctcgctcctttctgtacatgaattaaatatattatctgtctctgcactgagtcacacgacgttcacagtaccgtggggaggagtggagggtgggggcctgaggtgggcagggcagggggcctgggtagaaaggcgaggctggcctccccttggcctgtgccattcaggatcagcccagtgttgaggagacctgggggatacagaggggagccttcttcaggggccccggccacccaggcttccagcccccggaggcaagcctctcagcatcagagcctgctcctgttccacgttcctctccctcagatggtggcatctacacctctccctgtcgtggccgccctctggggtggcaggggctgggggaagctggtattgggatcaggtggacagagccacaagggccgggaaggaaggatggggaggctgtgcgagccttcgggagctgaggtcagcccggcaccagtgtcagggtgactc

SEQ ID NO: 331057 - DNA, 288 bp, Homo Sapiens
  misc_feature (67)..(67): n is a, c, g, or t
gtgcacatcactatacctgactaaattattattattgttattttgtcaagatggggtctttctatgnctgtccagggctggtcttgaactctttgggctcaagcagtcctcccacctcaggcctcccaaattgttggggattacagggcatgagccaccgcatttgggccttcattttcttttctatctataaaccttggctttttaggcaaacttgactttcaatgtctaggacttctggatccttttctgaggggggaaacatctcaattctaaccataggtcttg

SEQ ID NO: 331058 - DNA, 433 bp, Homo Sapiens
agactggtacattttgcaaaagtcactcctcaaatggttttctggaaggatacaaaagacatctgcaccatggtaaccacagtggcgagtgttcattgtagtacctgtaagagtttatgaccaaaggcaggagccatgaagaaaaaagactcaatagatttgcttttgatgaaacaacaacacttccatacagtgaacgccataagcacaactgcaagcaaaccgcaaactgaagaacaaatagggcaaaatgtggcagtgcagacatttcagcatatcaagagcacttccaaattacaggaaaaaaaagatatctcaatagaaattttgctgaagataagtgaaggcaactcataaggaaaaaatatgtaaaatggccgataggaaagatgtttaacgtcactaattaaaaattatagaataaaacgacaat

SEQ ID NO: 331059 - DNA, 394 bp, Homo Sapiens
  misc_feature (358)..(358): n is a, c, g, or t
aatccttttaaaaaattctttgagcttttattattagttccactttacagctgagaaaactaatgtttaaggacattaagaaacttccctctggaagagttagaggtgagattcttagccacttcaaccttgtgcctcttataaacatgcatgaataaacttgagtggaaagaaacttcctggcatgcaagactattggttagaattgagatgtttctcctcagaaatgatcagagtctagacattgaagtcaagtttgctaaaaagcaaggttatagatagaaaagaaaatgaaggccaaatggcggtggcttcatgcctgttaatcccaacaatttggggaggctggaggtggggngggacttgcttggaggcccaaggagtttcaaggacc

SEQ ID NO: 331060 - DNA, 376 bp, Homo Sapiens
  misc_feature (21)..(21): n is a, c, g, or t
  misc_feature (27)..(27): n is a, c, g, or t
  misc_feature (184)..(184): n is a, c, g, or t
cccccctttccattttgaggnaccccngcctaatagggtccagtatgtaaaccgttaagcattggcccccctaatggtagaattagaacagcaagattgtagagcctgtaattgactcccagacaacatagatttcagcccacctcattcctacagctgaggcccaggacaataaatgcctttncccagaactgggtagtggcagatctgggatggaatatggttttcttgattccctttcagccttcatttctctctctcaggactactactttttaattacttttcacttaatttcccaatactgatgaaataaagaaaaatgagggttatttatatacatttcaataaaatccaatttgatttttcaacttaa

SEQ ID NO: 331061 - DNA, 185 bp, Homo Sapiens
  misc_feature (152)..(152): n is a, c, g, or t
  misc_feature (167)..(167): n is a, c, g, or t
ggcataagcaagtgtgccaagccctctctttctttcatctttaaaccttaaatcctattccataactttagggaaaaaacattaactagaaaatcaaaattggggtcacccatgctttgggggatggctgagggtgggggagggacagtttngagggccacaaattncaacatcaaccggggggg

SEQ ID NO: 331062 - DNA, 444 bp, Homo Sapiens
  misc_feature (18)..(18): n is a, c, g, or t
  misc_feature (26)..(26): n is a, c, g, or t
  misc_feature (92)..(92): n is a, c, g, or t
  misc_feature (335)..(335): n is a, c, g, or t
gcccagcctgagggaaancggtgtgnggaaaaaccccccccgagggttggggtcctgattgtaccacctgttgccaccccatgccagccagnaaaaatatgtatattattgtaaatagaaatgaccccacatcagaatgtccaccacatggcctgttcctggagagggccctctgagaaggcacctgaatgaggcgagggaccccttccctacattgtcacccatcccccagtaaaccttgggtcattattcatactgacaaggaaccgagtcaatttggtgaataggaaaagccttctcatgaaaactacaatagaatactgttaccaaattcntcataagaaagatcatattatgggaatgataatcctgtttactgtggattaggtatagtgccaacagtttgaatggtaagacaacataatatatatgatagtgatgaat

SEQ ID NO: 331063 - DNA, 278 bp, Homo Sapiens
  misc_feature (27)..(27): n is a, c, g, or t
  misc_feature (32)..(32): n is a, c, g, or t
  misc_feature (80)..(80): n is a, c, g, or t
  misc_feature (134)..(134): n is a, c, g, or t
  misc_feature (170)..(170): n is a, c, g, or t
ccccccgaaggaccggatattgtaggngaatnccattccctaaccaatgtgggtccaaaccaagttttaaattaaaaagncccccaagtgcctgaggaatacctaaaatattccctataaattattattaggcnaaagaggaaaatcggtgtaaaataatttagaaaacnaaaggaatgcctaattttactaattttatagacgggaacttaagctatactcagaagcaaacatattagaaagagtgaaagagagagaagtgagatgaggaagggagg

SEQ ID NO: 331064 - DNA, 421 bp, Homo Sapiens
  misc_feature (382)..(382): n is a, c, g, or t
  misc_feature (391)..(391): n is a, c, g, or t
aataacagagatacaggtttttatttttccatcatgcatgcaaacttacaactatttatactgtttaagaacacagaaataattgcgttattaacagggtgtcaaattaccaagtagaacaaccagttactaattattttggggaggttattttcacagaacacagcaacaatttccaaattattcttccaaaaccagagttatgagaccagtacaagctgataacaatgctaatgggtcacacaagtttccatgttacacaggaaaaaaaggattgacattctgggtgaaggggtctcaaggtaccttaccatatcagattttttggaaggggttttacaacagaacagtctctctcctggtttggtgggtgccaggggtngggaggccncccctctccttttcctttttgggggccccc

SEQ ID NO: 331065 - DNA, 556 bp, Homo Sapiens
  misc_feature (130)..(245): n is a, c, g, or t
aagtattccaattaataacatcttgattttttaaggtaaatgattttatagtttcacagctcagtgtcatgttggatgattaaagtagcatgttaaggacatatctatatatttttttaaagacagggtnnnnnnnnnnnnnnnnnnnnnnnnnnnnnnnnnnnnnnnnnnnnnnnnnnnnnnnnnnnnnnnnnnnnnnnnnnnnnnnnnnnnnnnnnnnnnnnnnnnnnnnnnnnnnnnnnnnntgacacctggtgctcagccagggacacctctttctattccaaatttagtaagagtaatcagaaatgagtatttaatgattatatctgtcttttgtacacaattttgtaatcaaaatgagaaaactaaccttaggcaaggtgcttcccctcattatactgtatgcgatatattacaaagaaagcatttttccctttgtagtgaaaaataagtaaaacgtgtgattaattccctgcccatgtttacttggctctcttcggaaacattttcactagccaaatattcttacagtgtatagctccactctgataca

SEQ ID NO: 331066 - DNA, 621 bp, Homo Sapiens
  misc_feature (135)..(157): n is a, c, g, or t
cctgcttctcatataagatgggcctgcacctacctctggcatgtttttctttgtgtatttcctgtttttcatcctgtaactaatgctcattatttaaaacactccagttacttttccctttaggcctggcaaacnnnnnnnnnnnnnnnnnnnnnnnataactgtacattttacaaaacacctgaaaggacccaggggcataaatagtattacatgatttatggtagctctggggtgagctgtgggggaggccagttacaaggtctccaagacccgcctccatgtcagtgttggggggtgccttgagcacttcttttatttcatataggaaaatgcacatctttcatttgtctcccaaaagatgatttccataaaaatatacttcaaagtatttactgtacatagacttcaatgattttatttccagcatcaaactaaacatttctaaccttttaaataaatggggaatttagtttcatgagaaatttttactgacaactaataaacactgtatgtgtacatattcatatacactgtggactggagaaagtcagtatggaaataaatttcactgagatccagaaagtagcaatataggacttttaggggtatgtattagtg

SEQ ID NO: 331067 - DNA, 427 bp, Homo Sapiens
  misc_feature (306)..(307): n is a, c, g, or t
  misc_feature (360)..(360): n is a, c, g, or t
gactgataagacagattctttgtaacaataagataccaaactataaacaagaccactgaccataggctaattctggctagtttacaaaaagtacacatttgcatgcctttatgtcctaaaaagaccttttgatgtctagggcctaattataatacattatatgttaagtccccacacaaaaataaacatgagtcatatgttacatacatatttgttccatacacatgtgtcaagactgccttcataaacatttatgacctctcctgtatgtcttaaccaaaagatgtgggaaatataaactaaatnnaaactgttaaatttgtgtattgagtccacctgtccttcatatccccacagganctctgggacacaattgatagtgggggactgtgcctggataatttaaggtaatttaggtctggaatgg

SEQ ID NO: 331068 - DNA, 467 bp, Homo Sapiens
ttttaagagtgaagcaacaaaagcagagatttactgaaatcgaaagtacactccacagggtggcagcaggcctgagcagcggctcaagggcccagatacagaatcttcttgggtccaaataccccctagaggtttcccattggccacttggtgcttacctcacgtaaatgaagtggtggcccgcaatcagtctgaatggttgcggaaagcaacaattcagaggctgaagtgaacttacaaaggtcacattcctatgcaaacatctggtggttgcagaaagcaaccaatcagaggctgaagtgaacttacaaaggtcacattcctatggcaaacatctggtggttgcagaaagcaacaattcagaggctaaagttgaagtcaaaaagttgtacttctatgcaaacggtgacctggctggcaatcaatcagattgagctgaactaaagttataaagttacactcctatt

SEQ ID NO: 331069 - DNA, 522 bp, Homo Sapiens
gacaaccaacactctataaatttattaccaaatataacctatgcacaaacacagctaagctaatgagattagcaaagtagcagcacaaaaggtaaggaaaaacacatttaataaatacaacttggaaacgtctttttctttaaattaggttcaaatactgggagacaaacactgaaacaaaagtcttaacaacgcacttacaagccatcataacatgcagtgatcctgcgagacactgtgtccactcacagccatgttaactgggggccactccctgctgccgtaccatcatatgaatatacatttgtcagtaaaaatgtgacaaaaatgtgatgtttttcccaggtttgtgtgttttcataaagttactcaggtttttagagaatgaacataggaacatgtaggatccacaatttttaatgtcatcaggttagtctgtatttacaaaactctaagaaaatagatgtgtgttatgtttggaactgctgctttgaatgcaatacatccaaataatgaagctga

SEQ ID NO: 331070 - DNA, 464 bp, Homo Sapiens
cagacttatgtgtatccttggtctcttagtcccttctctaggaaaaatgtatcacatagccttatttaagacacttttctgaacctgatagagactaagcaaaatggaagcaaagggtctttatgattaaaagcaattgcgtgtaactataacagtacattagtagcatctaaacagttctagtttttccatgtttgtatagattccattgctattaaatatttccaaaaaaataaatattatgtatttgcaggtttctaatatggtggcgaaaaatgcagaaatgcataaaaataaactgcagtactttatggagcagttttatggaatcatcagaaatgtggattcgaacaacaaggagttatctattgctatccgtggatatggactttttgcaggaccgtgcaaggttataaacgcaaaagatgttgacttcatgtacgttgagctcattcagcgctgca

SEQ ID NO: 331071 - DNA, 757 bp, Homo Sapiens
  misc_feature (17)..(17): n is a, c, g, or t
  misc_feature (23)..(23): n is a, c, g, or t
  misc_feature (705)..(705): n is a, c, g, or t
cctcctgattgtgtgcntctatntgttttgtctttttggccgggctgggagtcggcaggggtgttcttgttcactctaattttccaccgaaaacgtgggccggggcggctggtgctgccccccgggattcctgggacgatggagaaggggcgagggaagaagacctttgctatcccagataccaggacggtccaggttgctggctggctgggtcacaggccagcgagacaagatctttgagcgggtcctgggggttgagatgagttgtgtagcggatggccgtgtgggggaagtaggtggaggccgtctggggtaggatggacgtcgtagggaaatgcagagcggaggacgggtgtgggctccgggcgatcccgctgtgcaacggcgatgacgggccggtggtgctgggtgaagctggagaggcggggagagtcctggggggacgggctgttgaatggtgacttgtccatctctgtcttcttcaccggggacgagatgcctccttccatgtcctccgtccagttgcggctgctactcgtgggcgagctgggcgaagtgtagtaaatcgtcgccagggctcgtgtccacgtcttcctccatcgagcccgatttgtgccgcttgctcccactggaggaggtgctgggcagcgttcttctgaggccagtgctggctgggttcaggtcgtatgccaggtgcccctgcangctccccagggagaagttgggtcctgttccaggtaccacgggtgtccgggac

SEQ ID NO: 331072 - DNA, 225 bp, Homo Sapiens
  misc_feature (141)..(150): n is a, c, g, or t
ttgcactggaataatttttattttttcccttggcaaaaagtcaagtgctacatttttaaaaacagaaaatctcaaacaatcaaacgcattacccattacagaagagggtctagcaatagtacaaaacatcctactgaagannnnnnnnnnaaatatacaagtcagtttaaaatgatagaagttctgtgagaactaagaaatctacagcctgtagtttaataatag

SEQ ID NO: 331073 - DNA, 459 bp, Homo Sapiens
gcagagaagagctctgatttgaccaagatgacacagcaggaattgacggccaccgaccccctcacccacgtgcctcgaaatttaggcaaagcacagggtcggggcctcatgcccatggatgggagaaccagcaggtgcctcggctacctcaaacacaatgacgaaggcccaggcggatggcaagaagattccagtaggtctgggaataatgtccatcgtcatcccggaaagcccgatacctgcagcagacacaggactcagtgcgcgcagccggggctgagttttggctgggcaggtgcctctggaattagcctatctccccttttttccaccatttcgctctctcatcccatgttcctggcctggctcttcatcgagggtgcctgaaatgggaattcttcccaaacaggatactctgacaataccttaactggtgggttccaaaggtggatgtgctgg

SEQ ID NO: 331074 - DNA, 621 bp, Homo Sapiens
  misc_feature (526)..(581): n is a, c, g, or t
ggttctataatggtagcggtaggcacagcacctcgggcctgaactggctgcaatgagggagcagtcactccaattgggacagaacattctgcataactcataattgcaggtgctgccgctagtccaaggtaatttgactgcaggctcattcctctggcctgatgacccattcctgctgctggaaggctaactggtattgtctgatgtccaattcctgttgcctggtttccaatccctgctgcctggtgacctgtagctatagctgactggctatagagaactggagaactgccaatggtagctgacctctgaaccactgcagtgctaatttctgtagctttcctctttattcctttagtggaagaagaactagagatggtggaatcaactgaactctggctagttacaactgtggtttgtgctgaaggtttcaaaggggtatcttcctctgttcctggggcagggggctcctcacttccctcatcctccatctctacctcctggatctcaccatcttccgcaggannnnnnnnnnnnnnnnnnnnnnnnnnnnnnnnnnnnnnnnnnnnnnnnnnnnnnnncatttccaagggtaatggaggttgaagcacaggaacattt

SEQ ID NO: 331075 - DNA, 173 bp, Homo Sapiens
ttattcatttgttttaccttatgtgttcctctacaatggatatctaggaagttaacaaccattctagctatctagcattcgggttcttgatatcatgtaaaatgagcgttctgatctctgacacacaaagctatttagaggataaaaaatagacatttttttcaacaatcatt

SEQ ID NO: 331076 - DNA, 299 bp, Homo Sapiens
  misc_feature (94)..(94): n is a, c, g, or t
tgtgttgctgtgcctggcctgttatgtgtattttattacaataaaaaattggggaaaacattttcaaagggcagtgtaaaaataaatagtttantgtgtgtagctcttttttctcctacctgatttaaaagacaactgcagagagtgatgattaggacatctgtgctgggtaggtcaaatgatgtgtaaacatttaaattatatgacagtgataggcacagagggagggagggaggggaacagagctatatatggggcaaagtttttgtatacccattgaccattaaattataattaat

SEQ ID NO: 331077 - DNA, 478 bp, Homo Sapiens
  misc_feature (171)..(171): n is a, c, g, or t
  misc_feature (255)..(255): n is a, c, g, or t
  misc_feature (285)..(285): n is a, c, g, or t
tttttacggcttgcaagatttaattcttcctttaatataaataaggcagcatgaaacaccaagagccccactgctttctgctttagaagcagctttggtgcagaaaagattcccgtttccccaccgagttctgttgtctctgtacacacaagaagccagaagatatttttntttcagtgaactttctcctgggagcaaaggagaagctatgggagatccaggcatggttttggcttctggaggctgttttttggntactggggtctcttcaaagcaaaacgggancaggatgaagagggggaaaggcatgggccataaataaataaggaaatttgccccgattctacaaatgcatctgatggaatgaggagggtcaggctgtgagggattgggggtagctccaggctgctgttagggacacacttgagctggttcattccctggagtgcccgcaactgcgtctagggagaggcaggcc

SEQ ID NO: 331078 - DNA, 436 bp, Homo Sapiens
  misc_feature (12)..(12): n is a, c, g, or t
  misc_feature (298)..(337): n is a, c, g, or t
  misc_feature (352)..(352): n is a, c, g, or t
  misc_feature (367)..(367): n is a, c, g, or t
ggcacgagaatngaggcacaatatagcactgactgagttgtaaagcctcctgcctggagacttcagttatagctgtaataattaatcttatttataaaagccactccactaaccttttctctccaactgtaaacacagagacagctttgggaataagccaaaaacagggtgatctcattagattttgaagatatatgactcctttgggctacatttcatattgatcaatttctaggtatttttcactggcccaaagtattgcattcccttaacagcaagcacaagttctctatatcannnnnnnnnnnnnnnnnnnnnnnnnnnnnnnnnnnnnnnnaggacggagttttgnctcaggtgccccggnagtggcagtggtgcaatctcagctcactggcaacctccacctccgggggttcaaggcaattctccggtt

SEQ ID NO: 331079 - DNA, 477 bp, Homo Sapiens
  misc_feature (290)..(290): n is a, c, g, or t
  misc_feature (371)..(371): n is a, c, g, or t
  misc_feature (411)..(411): n is a, c, g, or t
  misc_feature (439)..(439): n is a, c, g, or t
  misc_feature (453)..(453): n is a, c, g, or t
agctggagacagagatcaaacactcaaggttccattttgataaacctgctcctgaagcagcctttgatcccagggtcatccctaagcctttgccacctcctgagtagtagttctgagtctcctgctggcacccccctgcagccaccagggtttggcagtaccttggctggaatgtcaggcctcaggaccacaggttcttatgatggggtcattttccctcttcagccctgagagaagcacagaacctgggcattcactgggactgaatctggttgcccggaatgagtgcntcacgtgatgggagacccagcagaggggaggcagaaggggctttcccattctgccagcttcctggagccgtgcatttcctnccccttgtcacagttcttcatcggcttacactgccagggncctgcaggacttgggcagctgctaaagnagaagcgggagaanctgggggactcaccgtacacattt

SEQ ID NO: 331080 - DNA, 255 bp, Homo Sapiens
  misc_feature (153)..(153): n is a, c, g, or t
  misc_feature (184)..(184): n is a, c, g, or t
tttcatttgggtgagaactgctcctgtgaagtgcattttacacgcctgtctctgtgcttatcagtggctgaagtgatgagctctgttcctaccttgtacatgggtttttgcagcataaaagtgcttaattctggactaagccttgttagaagnccaggagcttaattgagcttttagaagaganagaaaaggaaaagtgttttaacaagtccatgtttatgctaggtgggattgcatgtctacaatttacctgtc

SEQ ID NO: 331081 - DNA, 458 bp, Homo Sapiens
  misc_feature (443)..(443): n is a, c, g, or t
tctatggctcattgctttttctttagaagtgttatcacaagctatatcaacctgctgttcccatcagcttgcaatgttaagcatccttctactgtgccctgcctaactatgagaagataaattcatttctctattttcagcttcttaaacagtccttctggcatccctatgtaccagctataattttaatagaaactataaaaactagggggattttttgtagtttttgtagggtacaaaaatttgattttcaatataaatattacaaaattctaaatgaacacaactcaatactacagaaaattgtaaatctaccgtgggttcaaaggcaaggttgctaaaacttatgggctaggctcatggaggaatgtaggggttgtcttatatacttacacacctattataagggggggtctccatctggcataatgctttatagggtnccagggaccttcccc

SEQ ID NO: 331082 - DNA, 378 bp, Homo Sapiens
cctttattaattctcacatttaccttaaacaagtttcacacatttttcaaataaaacttagatcataaaaccactcttaagccacctcttaccaaggctaatctactttatttccttttttcagagagttattcaacaaatataaacatttaccacttacgatcgtgggatctttcctttcactagtgaacccattgcttctgaatcaaaacaatttctcgtcttcaaactacttaggttccactgtcccggtaggataatccataaaattagctgtcaatatcttataaggattatatcacactgagttctcagaaaagaaaggtagcatctaagccattttaaaaacgatcactagactctgaccctgctgctaga

SEQ ID NO: 331083 - DNA, 843 bp, Homo Sapiens
  misc_feature (57)..(57): n is a, c, g, or t
  misc_feature (300)..(300): n is a, c, g, or t
  misc_feature (390)..(390): n is a, c, g, or t
gtcggccggaggtttatttgggccctggtccatcaccggagcctagtccgtcccggntcaaattagccgaaccggtctgaccctctcgtagaaccagtggtgacatgcttgtctgagatcagcactagagattgcctgtagggatgattacccatatcccatactcatataactgagctagttctgaatctataaattgctactcactgtgtccagatgacttcgatattgtatattggaactgttacaagcactcagatcaggattgactcttaatatgatcataattacatcacaganacaactccagaaatgcatttactctgattaactcttactcaggacaaggaacatgattttctagcactttatgtacaagttactgccaanggtccagttaattttacagactgaataaaacgttaaaataaaggtgaactggtacagacagtgatggggaatgtcctccattaagtgaagtaaaagatctttcctcgactttgaagggagctagagtcaacaaataaaagagattgccaagccataatggatgtatgtctctgtaacaagatgcttaagcatgcttcctggaaaagagttttatattagaaaataggaatggcattttatgggacagcatttccttctatagctgccaaactgagcacaggcctggtcaccatatggtgcacaaactgacagcatatttccaattgggcataacatcatggagagaaaacccaggagcaagaagcacctgtttcactgcacttgcccattcaggaggcctggaggggactgagacaactacattttatagttctgggttaagtttacccatga

SEQ ID NO: 331084 - DNA, 461 bp, Homo Sapiens
  misc_feature (101)..(101): n is a, c, g, or t
  misc_feature (261)..(261): n is a, c, g, or t
  misc_feature (447)..(447): n is a, c, g, or t
attcggcacagggaatgttttgcatttttctagaattgatgaaactggtcaactgttaatcaccctccttcctttgtccctttctaggagccctgggtccnccagtgttgcctgggtctgactttgcctcagtgaaaactgcctcgaattctttcttgcaccgatgggcagatgggcagtgtcggaggatcgtgtcatctgtcccgtggcgctgggtaagtctgcagtgttgtaaagctgcaaacacccttctgggttggngctcaggctggcacccccccactgccccagcctgcgctataccacgttcccctgatgcttgccttgtgccgtgccccagaacccagtgttcatggggttcacaagcgcggggagtagcgtcttcagtgtttgtgagttctggggatgaaggttcgggggtatgatttacaagctttggaaatgggntgatttgccattat

SEQ ID NO: 331085 - DNA, 359 bp, Homo Sapiens
  misc_feature (81)..(81): n is a, c, g, or t
ttggaattgcttttattgggggcggatacccaaggccccgcccacggtcaggttagtgttctgcccttgcagaggcgccancgagcctgacacctccacctgccacccgcccgggtttagtggaacatgcaaagctcggagggtggaggcaggggtggtcgctgctgagaccagggctgggtgcaacaggagggtcagcacagagcctggctggtgtccctgggcccaaaggggctggggctccatgggagagagacgggcaggcggcaccccagtgtggggctccacaagctggaggggcccctgggacccaccagggaggacaggtctgcagttcccagccatgccggcttggaacg

SEQ ID NO: 331086 - DNA, 476 bp, Homo Sapiens
  misc_feature (18)..(18): n is a, c, g, or t
  misc_feature (26)..(26): n is a, c, g, or t
  misc_feature (41)..(41): n is a, c, g, or t
  misc_feature (73)..(73): n is a, c, g, or t
  misc_feature (86)..(86): n is a, c, g, or t
  misc_feature (90)..(130): n is a, c, g, or t
tcgggaactgtgagtaanaaacctanccttttagtgatggncattccctgaccctgttgggcttcaccccatnccctacattcttnatcnnnnnnnnnnnnnnnnnnnnnnnnnnnnnnnnnnnnnnnnngtgacagagcaagactcccatctcaacaacaaaaaaagaagagattaggacatagacacacacagaaatgaagaccatgtaaagacatggggagaagatggccgtctataaacccagggagagaggcttgagacagatccctcccttatgaccctcagaagaaaccaaccccacccgcaccttgatctttgccttctggcctccagaactgtaagatatgaaattgatgttgtttaaggcactcagtgtgtgagactttgttatggcagccccagcaaacgaatacagagggggcctgcttccatcccagcctgggtgacagagcaagactccatctcaacaacaa

SEQ ID NO: 331087 - DNA, 446 bp, Homo Sapiens
  misc_feature (416)..(416): n is a, c, g, or t
aaaattttatttagaaaaaataaattttccttgcagagagggctaactcataggcatgcatccagaattggcccagtctttgctctttgtgaactttttcagttgggactgtctctggagtttttgtgcctaaacttcctttaagttgcaaggtcaacagggcaaatgtgaagatatttcactataattttccaacttccttttggacctcaacgcaaaggaggtccaaagacagcaaaaggtgacaatagagatgagacacatttaaaactgatctttcccctctgcttcctgattgctagggaacaaggggcaatgttaaattctccacaactcaaaccaaattgggaaggctccttgtcgggatgaccaagttctctctgaaagcttgctgggtggaccacagtttattcccnggaaactgactggggccactaattcggtct

SEQ ID NO: 331088 - DNA, 575 bp, Homo Sapiens
  misc_feature (24)..(24): n is a, c, g, or t
  misc_feature (102)..(102): n is a, c, g, or t
  misc_feature (315)..(315): n is a, c, g, or t
  misc_feature (558)..(558): n is a, c, g, or t
gggggcttgcaagagaaagagggntcactaacaattctcctgggacaagagactaaactgcgtggccccagatatgccaggacatgtgaccacgtcaccaancagccccaacagcgcttggatgggtcaggacagggctaccagacaattcattctgcctgtcagaaatggtcatgatacacagattcagctagaacaaggccctttcccatcccctctggaaaaactgtccaaacaagtgcgtaagtctgtgatgactgcaatgtgagcggcttcccctcggcggaatcctggcaccgtgcgcggcccgcactnccgatccctggcagtcctgcacctgttgcgggaaaagttctctgcaccacagctccgtctatccatgtgggcaatgaaggacagccccgaggcctcaggaggccatgtccagctgctcccctcattcctctcccctgcttggcctcaggtgcttcactggggaatcttggttttacactggggaggttgactgttttcccccaactggtaacaacttgtaaacatattgacggtgaggcattngatgacgggtttcaagt

SEQ ID NO: 331089 - DNA, 299 bp, Homo Sapiens
  misc_feature (22)..(22): n is a, c, g, or t
  misc_feature (276)..(276): n is a, c, g, or t
gtgagcccaatgcctttatgtntttatggaaataatagtttcattttagtcttattcattgattattttatcatttcccttttacctattgattgatagtctgtgtttctaggctcagcttgtcaatcggaaacagaaattagagtctgtggaactttctagccaatcagaaattcaacacttaagcagtaaactggagcgggctaatgacactatctgtgccaatgagttggaaatagagcgcctcaccatgagggtcaatgacttggttggaanccagtatgactgtcctacaggag

SEQ ID NO: 331090 - DNA, 418 bp, Homo Sapiens
  misc_feature (395)..(395): n is a, c, g, or t
aaacaactgaggtttatttctcacagttttggaggctgaaagtccaaggtcaaggtgccagcatgcttgggttctggtgaaggccctcttttgcactgtagactgctgacttcttgctgtaacctcatgtggttgaaagagctagctggctctttggcttcttcttataaaggcagtaattccactcatgaaggctccaccctcatgacctaatttcctcctaaaggccctaccttcaaataccatcaccttgggattcgtgtttcaacataggaattgttacgggaacacaaacattcaggcccataacaggattttatcaaagaaggtacttcatggaaatgtaagtgatgagtgggtttttccaaatttgtcatctccattggcatcttccnattaaggaattccactaataata

SEQ ID NO: 331091 - DNA, 1046 bp, Homo Sapiens
  misc_feature (574)..(798): n is a, c, g, or t
  misc_feature (830)..(839): n is a, c, g, or t
aaagctttaatttctttattggcaataagaaagagtatttcatgcctaagatgtcctccaccgctaacatttaggacttacacagctctttctgcacttgaaacatttaggactgagtgtaataaatccccttaacctccagagaagcagcagcaggggtcctcacacaccctcacctgagacccccccagtccattcctttcctagtttagaacctctaggatgaacctacaatgaaatatgatttctatggataatccaactttaaattgctgacctacacaggaagttagagaaagtttccattagccgaggttaaaataatgtgcaaaatgaacatccaattctttctccttccccagggtgatacaactggtaagaaccaactataaagctttattatgaagccagatcatgaaaatttaaagaagattggaacccgtgttatttaatataggacaaatgggggtggggagtcacaggaagagcttgattcatttgaattcatatataggataaattcatgataacaagtcataacaaaccaaagttcactatagttaaaacaggcagnnnnnnnnnnnnnnnnnnnnnnnnnnnnnnnnnnnnnnnnnnnnnnnnnnnnnnnnnnnnnnnnnnnnnnnnnnnnnnnnnnnnnnnnnnnnnnnnnnnnnnnnnnnnnnnnnnnnnnnnnnnnnnnnnnnnnnnnnnnnnnnnnnnnnnnnnnnnnnnnnnnnnnnnnnnnnnnnnnnnnnnnnnnnnnnnnnnnnnnnnnnnnnnnnnnnnnnnnnnnnnnnnatatctaagaaagaattctataacagcaacannnnnnnnnngctatcttttaaaaaggagacttgcaatcatagaataatgatgacaaggggtgcttttcagagttcttgtctatgttggaatcaataactatactgaaaaaattttatgctttattgtgcagagaagcacttaaacaatagtcagtgaccaaattgacttacacggtgtgatttatggaatgccagcagatctgaaattatttcccc

SEQ ID NO: 331092 - DNA, 119 bp, Homo Sapiens
gtaggtatggtgaagcccaacaggtcaggaatgaccatcactaaaaagatagtttattactcacagttcctgagaagagggggcactctatgccacaagggaccacacagggaagcatc

SEQ ID NO: 331093 - DNA, 479 bp, Homo Sapiens
  misc_feature (29)..(29): n is a, c, g, or t
  misc_feature (42)..(42): n is a, c, g, or t
  misc_feature (120)..(120): n is a, c, g, or t
  misc_feature (287)..(287): n is a, c, g, or t
caagctgaaaccccaaaatgtgtcctccnaaaagaactttangtaatgttaaaaacaattcctgaaactgaagaggcaacaaatcgttgcaaaaagaaaacaggatgcccctgtgtcccngttctttaaggaatttcgttccccctgtcctcctcaaactggtaacttcaacattggcccgccagtggctgatggtggtcatggagagcccagtaaacttcgaagatgtgcaccctctcctgtgggcccaagtccgaacatgatgtacttgccctctgtggtctccncgcaagctcgaggcgaactgggcctgcaggatgagaaggtgctgcgggttccagttggactgccggcccttcctcttgtggaccggtgacagctcgtccaacgcctcctcaaagctactgccatcagcatcggacttctctgaaactgtggagggcgtggaggacttgggcgtcaagcggcctgtgaggttt

SEQ ID NO: 331094 - DNA, 458 bp, Homo Sapiens
  misc_feature (21)..(21): n is a, c, g, or t
  misc_feature (35)..(35): n is a, c, g, or t
  misc_feature (47)..(47): n is a, c, g, or t
  misc_feature (54)..(54): n is a, c, g, or t
  misc_feature (124)..(124): n is a, c, g, or t
  misc_feature (184)..(184): n is a, c, g, or t
gaatttccctaaatttaaggngaactaagaggtantttaagacccanacatttnattaagttaatatgtgtaaaaaaacatcaacacattggacagaacttcctggccataaatattttgatantcctataaatagagcatgacatggaaaccttttcttatattaaattacattaatgagttnttctgatgttgataaagatgtgaatattgtcctaaaggcctttcctacataccttacactcatagggtttcctcaccagtgtgaattctctgatgttccagtaaggtgtgaattaagtctaaaggccttcccacattgtttacactcatagggtttctcaccagtatgaattctttgatgtattctaaggtctacactacgactaaaggccttcccacattctttacatttgtatggttttacacccgtatgaattttctgatgttcagtgaac

SEQ ID NO: 331095 - DNA, 447 bp, Homo Sapiens
tttaatattttccagatcttggttgatcataactggaaaccttgggaagcaaaacccaccagataaagggggagacttagtgtactgggaactcagatgttcggataataggaggaaaccttaactaaataatgatatcaaccattctgctattaaataaaagtgctcagaagagcattatgtaatcagggagtacagaagagagagcaaccaactccttacagagattgtaataaaagattttcccaaattaacaaatgaggtgctttgttgtcccccaagcaaagtttcgtatattttttaattatataaacaatacatttcattatgggaaacatatacataaaacaaaaagcaaatatctacaattccatcccctgccctagaccactataaatatctgtttatatctttccagatttttttctatgcatttatacacacaat

SEQ ID NO: 331096 - DNA, 631 bp, Homo Sapiens
  misc_feature (453)..(453): n is a, c, g, or t
  misc_feature (496)..(496): n is a, c, g, or t
actatgcttgaactttaggcatttattgaaaacttatacatgccatataaacaaactaaactcttttagctgctataccaagtttccataaaactgtctgctggttggggaggctacagcctgaccacattctttgccattgcctacaaggggtaagaaatggcacatggaaacatggcaggccgactcacgaacacaggcctgggccagcgctttcttcttcctcttttattcccatcagtcctagaccagagagtgaaccatgagtgctcttggttcctggcagcaggatgaggcagagagtgcccgggcacaagctgttgtagagctttccaatcttccggctccagcgccaggctgctatcttcgggtggtccagtttcagagtctgcaaggcctcctgttcaaaggggggaggtacaacacgaagccctgggagccttgttgaattcnaggtggtcagcctctgagccaggcatggaggtgcctgggggtncaggcatgcctgcctttcagcttccagtccttgcctgtgagaatgttgagggcctgctggcactgccaaaacttttgaatttcaggaaacagtattttttctgctttccacttttaagatctttaggcaagatca

SEQ ID NO: 331097 - DNA, 459 bp, Homo Sapiens
  misc_feature (24)..(24): n is a, c, g, or t
  misc_feature (59)..(59): n is a, c, g, or t
  misc_feature (78)..(78): n is a, c, g, or t
aaacccttttcctaaacaaaagcnacctgtaaaaaccgtgctgcagacatagacaagcnaagtgggaagccttgccangggtgaaatgcccagcagttgtgccccattggaatgtacctaccctaagacctaagcatgttcaaaatggcggctccgtcttctctttttgcccagctatgagtgcagtaaggagaagacaagatggcccaagtggaaagtccatttgcataatcagatttgggtggggtggccagcctttctcgtgcactacgtaaacgtcacacctggtcaaaccaatctgtgagccctatgtaaatcagacaccacctcctcaagcctgcctataaaatacgctgtggtccaccacttttcccttttcagatgcctctgtctcacgagagagagagctgctctcctctctcctttcttctgcctattaaacattctgttccttaatat

SEQ ID NO: 331098 - DNA, 451 bp, Homo Sapiens
tttttaccagaaattccatctttattagtctgttttcatgctgctataaagacctgcccaagacagggtaatgtataaaagaaagagatttaattgactcacagttccacagtgctggggagccttcaggaaacttacaactatggagaaatggaagcaaacatgtccttcttcacatggtggcaggaaggaggatcgtggagcaaggggggaaaagtcccatataaagccatcaggtcttgtgagaactcactcactatcatgagaacagcacgagggtaaccgcccccatgattcaatcacctcccactgggtccctcccacgacacttggggagtttgggacctacaatttaagatgagatttgggtcaggacacagccaaaccatatcaccatctctattataaattatgttaaaatgggctgtcttcagtttttgaatgagccatc

SEQ ID NO: 331099 - DNA, 289 bp, Homo Sapiens
ttctgacaagaaggctttataatttccatttattgtagaataatatagtactatcaacatagaaatcatgtttataccatttaaaatcataatttaaatgattttcattttagcaattgtggctgctggtatattataaacctgcttaaatattgatacatagtgtttaaaataatattataattctgcatttttggggaaataaacattcaatacccttaattagttgcatacaattgggatggctgctattaataatgttttacaactacagataatgcttctaata

SEQ ID NO: 331100 - DNA, 366 bp, Homo Sapiens
  misc_feature (51)..(51): n is a, c, g, or t
  misc_feature (81)..(81): n is a, c, g, or t
  misc_feature (105)..(105): n is a, c, g, or t
tttaaaaaattgacacccaaaaccctgccctgccattgtaatggaattcgnaaagaattccatgttcacagaactcaacgntcaggctaatatttacagaagggnccaaatctaaatccctggtaggtaactcctgtatgctttatccaaaggacacccacagttttccagcatagatataaccaaggatgaattgattccttcaaagaactgggaggcacggatattgcattttttgtttacatccagtagccaagacgcctcagtgagccagtcttgggcagaggctgtcacatttaggcagattggaagttggtatgttctaattctcactctggactacagtgaggctgaatttatcatgtc

SEQ ID NO: 331101 - DNA, 424 bp, Homo Sapiens
  misc_feature (373)..(373): n is a, c, g, or t
catgggataaaatgtgcatatttatttcagggcaacaagcgtatacacagcaaagcagtgtggggtagagcccacctcgtgcctgcaagccagccagcccctgccggtcgagaaggaagcctgtgtgagagcacacaactggaggccgggcggggaagagaaacacgtgccaacaggccacgcaggccagggaccccagacccggaggcagcgccctttgagttcctctctctggtctccgatgttcttctgttgggatcatttcaccttgaacaaggtgacggtggtactgtagaagaggctcaggaggaagaggacgatgaaggtggaggcggtggcccacaggttttcaaagccctcctcgtcggcgctnacctccccctcggtggacttgtcagggtcctctcggtgaccctgttgggca

SEQ ID NO: 331102 - DNA, 423 bp, Homo Sapiens
  misc_feature (18)..(18): n is a, c, g, or t
  misc_feature (35)..(35): n is a, c, g, or t
  misc_feature (41)..(41): n is a, c, g, or t
  misc_feature (319)..(319): n is a, c, g, or t
aaaatagctccctggccnaagaacgctcccaccgntggggncatggtggccgtgaacatgaactgtttggcggtacttatgttttcccgactaaaagttggccagcatcttctcagggtcctcagcctcatccgtgtctggcttctggttgctgacaggcatgtgctccaggatcttctggacatctgctcaaagcccatgtcaatcatcctatctgcctcatccagaaccacataggtacagcggctcagcaccaggttagcggttctccagcacatcaatcaaacgccccaggggtagcaatcacaatcttcacaancccatgcgcagcctgaaagcccctgggtcttctctggagatgccaccaatgacagccacagtgcggactctagcggtttcccaaacttgatggtcctgtgccga

SEQ ID NO: 331103 - DNA, 466 bp, Homo Sapiens
  misc_feature (166)..(220): n is a, c, g, or t
  misc_feature (356)..(356): n is a, c, g, or t
  misc_feature (380)..(380): n is a, c, g, or t
  misc_feature (385)..(385): n is a, c, g, or t
  misc_feature (412)..(412): n is a, c, g, or t
  misc_feature (423)..(423): n is a, c, g, or t
ccattcatttgtcttaagtgtatctttttctttatgtttaaagtgtcttgtagatagcatgtaattaggtcttcctttaccaattctgacaatccttgccttataattagagttcagtctgttaatgtaagagtaaatatcgatgtggcttgatttattgctaccnnnnnnnnnnnnnnnnnnnnnnnnnnnnnnnnnnnnnnnnnnnnnnnnnnnnnnnccttatcaatgaaatgtatttgagatttccattgtggtttatctaatgctttttaaagctattcttctttgaattattattttagtgggttactctgggtgtttgaaatatgcacccttggccaggtgcggtgggntcacttctgtaatcccaaagtgcnggggntacaggtgtgagcaccctcccgggganttaattttccntaatatataaaaagctccttacaaatcaattaagggagggagg

SEQ ID NO: 331104 - DNA, 479 bp, Homo Sapiens
  misc_feature (21)..(21): n is a, c, g, or t
  misc_feature (82)..(82): n is a, c, g, or t
  misc_feature (87)..(87): n is a, c, g, or t
cctttgtatgccaaaaattgnccatttgggaactcctcatggtgactcaacgcttgtaatgtaaatccccggctaactcggnggctnaaggccgggagaattatttgagcccccagattttgaaggctgccagccgaactatgccaatccagcctaggcccacagagccgggaccttgtctctaaaaataaaaaataaggtcaggtggaatagctcaagcctgtaattccaacaactgggaggtgaggtaggaggatttatcacttgaggctagtagttcagggtcagcctgtgcaatgtagtgagatctgatccctacaaaatcaaaatagtagctgagcttggtgtggtgcacactgtagtcccagctactcaggaggctggagcggatctcttgaactcaggttgaggctgcatgtgagccatgatcatgccactggactctgtgctgagcaacagtgtgagaccctgtctctaaa

SEQ ID NO: 331105 - DNA, 475 bp, Homo Sapiens
  misc_feature (332)..(332): n is a, c, g, or t
  misc_feature (407)..(407): n is a, c, g, or t
  misc_feature (446)..(446): n is a, c, g, or t
  misc_feature (465)..(465): n is a, c, g, or t
acataaaattatctcactccattttatttaagatttttttatccagttagtaataggaagatgtgtctctctttatacatatgtacaagttcagttataaaaatagcacattcatagagaaaaggcttggcatttttctgattccctctaaatagcatctgtacacaggaatctgggtttgagcaggggaatcttaatgatttaaattaaatgattcccctataccccctactccaaaaaagttttaaaaatcaatctatcgaaactcaattccgcggattttcaggtgtgcaaatcagaggcttgcccgcccggaggtacctgctccaccnggggacatcaggcagggacaggcaggaaacacctcccatgcaaacactgcccctctggtctctactgggaggggnagcaagctcaggctgggccgggctggggaggggccggtngccgaggcttgcccccctnttttccggcc

SEQ ID NO: 331106 - DNA, 455 bp, Homo Sapiens
  misc_feature (160)..(160): n is a, c, g, or t
acgcaacccccgagtccctgtaggtgcaaggctttaaaaagggagctttttcgagaagaaagcacatcgggggctctttagaggccagcgtggaccgcgcaaatcgcggggtgaagccgcgcgacgaccctatggctctcggaaggtgctgacttggggncgggtgcgcgtgcaccactgaccgcgaccgacccggggtcgggccggggcagcgcgctgggcggagctgctccgtggcccctaacaaagggcgagctcattgcccggtgggaactgtgagttggtgtcagagtcctactaggaactcagtatatgaaacttatctagaggatgttgaagtaccagcaagcaatagaattctgacaaggctgtaatttgaggcttggaaatgaccaggttaactgtctcttgaattcgtagaatttgttatagattctgtcttaacataaaaaaac

SEQ ID NO: 331107 - DNA, 424 bp, Homo Sapiens
  misc_feature (22)..(22): n is a, c, g, or t
  misc_feature (36)..(36): n is a, c, g, or t
  misc_feature (405)..(405): n is a, c, g, or t
ggcccgaactggctgctgaccnagcttctggggggntgatcttaaaagccgcccagcaaacatcatcttctcccaaacgggaaccctggaacccctgggcagggggcgggattcggaggaaccctgagtgcctcagtcatcgccgtcaccatcccaggggggagcgcaccacctcgacctcagagcctcccacccagaagatcctgcttccgtggttgaggcgcggaagctggaggccaccatcatcggcgagtgggtaaaggcagccaggcgtgagcagcagccagctctgcgtggggggcccagactcagcctctgagcacaggactggaggggtctcaaggctcctcatggagtgggggcttcactcaagcagctggcggcagagggaaggggctgaataanaccctggagccctggcaaa

SEQ ID NO: 331108 - DNA, 402 bp, Homo Sapiens
  misc_feature (181)..(181): n is a, c, g, or t
  misc_feature (208)..(208): n is a, c, g, or t
  misc_feature (386)..(386): n is a, c, g, or t
ccaagaaaaaccaagccagtcaaaggtggaacatgagattagccccaatgcaatagtacaggcttctacagtctcaagatgaatgttttgacatcctgttcatctacccaagaacactgggaggtagacaaggacacgaggtgtctccatttgataatcggctgtagcagcaaagcccagnaataacgaaagaaccaacaaaactggnaattgggaccaaggcatatcgattctctttcctatcttgggataacagagtgacatccagcctgctttgacttttattgctctcggattactgtaacccggctggggcgtgggtgggctcagcctggtaaatcccaacactttgggggagggctgagggcggggcaggatccatctgngggttaggcagtttcg

SEQ ID NO: 331109 - DNA, 524 bp, Homo Sapiens
  misc_feature (358)..(358): n is a, c, g, or t
  misc_feature (470)..(470): n is a, c, g, or t
  misc_feature (477)..(477): n is a, c, g, or t
tgggaaagaaaagattgagtttattccggtctctctctgctcatctccagaactgccctcacacagatgtttgtatgggtgtgtatgcatgcatgtgtactaaacacagatgggcacactctagatatagaacacgtttcttgctgtggttgtgtgacaaatggctagaattttaggaggctctgggactgcacactgtatatgcaatccatctcagactttgggatgggaatccatttcatcatccagcatggcgaaacttggttcattcgccccaatgtgagtccttcctgggtaaaattaaaggcagaccggttgggtgctaaggatccctggttgtggagaggccattccgttngagcagctgactgtgaaatccaataccaaaggggatgtggggtcctgggcgttggggaattctttgacaacttcttgtccttccttaggccatggctgttatccccggaggnctttccngctgtgttcttggggccgggggggtcccgacaaggcacagtcacctt

SEQ ID NO: 331110 - DNA, 443 bp, Homo Sapiens
  misc_feature (181)..(395): n is a, c, g, or t
aaatgatgatgctccagataatctctttagaaaggtacaactatttctcgagtttaaacaaaatgttaagtcgtacagtaaaaatatcaggacatcagagtatacctgaatgaatgtattggaagtacttaccaggtataaaattccttatgcttcgggcatggtggcttaagcaagcatnnnnnnnnnnnnnnnnnnnnnnnnnnnnnnnnnnnnnnnnnnnnnnnnnnnnnnnnnnnnnnnnnnnnnnnnnnnnnnnnnnnnnnnnnnnnnnnnnnnnnnnnnnnnnnnnnnnnnnnnnnnnnnnnnnnnnnnnnnnnnnnnnnnnnnnnnnnnnnnnnnnnnnnnnnnnnnnnnnnnnnnnnnnnnnnnnnnnnnnnnnnnnnnnnnnnnnnctcgccaccgcactacagcctgagcagcagaaccagactctatctcaa

SEQ ID NO: 331111 - DNA, 422 bp, Homo Sapiens
tcatggggccccacttccctgacagtggccctggaatctgttctcagaccacatactggtagaaagttccagccgtgagccaggagtccagccctttatgacaccaatgagaagacgagccgggaagtcactacgtcgttttccagagccagcaacagcaggcctcactgacgtgcgtgtctcctgacttcccgtccggtcccctgccaccactccctaccctgatgttgacaagtgcagcttgttttaaaactgggcgctgcattttacatggaaaagattttattttgaaatctagggtggcgtaaaactccagccagtgaagacttgccatgtgctgtgcagagaatccaaacaggccccttcccaacccaaacagccaggagaaactgagtgcagggagtttacttacacatttgttt

SEQ ID NO: 331112 - DNA, 380 bp, Homo Sapiens
  misc_feature (336)..(336): n is a, c, g, or t
aagttttcctaagcaatatttttccaagccagaagtcctctaagtcttgcccagtacaaggaagtcttgtgaaagaaaagttgaatactgttttgttttccatcctcaaggggttcccctgggtcttgaactactttaataataactaaaaaaccacttctgattttccttcagtgatgtgcttttggtgaaagaattaatgaactccagtacctgaaagtgaaagatttgattttgtttccatcttctgtaatcttccaaagaattatatctttgtaaatctctcaatactcaatctactgtaagtacccagggaggctaatttccttaaaaaanaaaaatctatccatctacttctctcttacctgatttatgtgtta

SEQ ID NO: 331113 - DNA, 448 bp, Homo Sapiens
  misc_feature (22)..(22): n is a, c, g, or t
agagggtggaggcggctggtcncctggggggtaattgtcaggcacaagcttccaggagaggacctcgtttatttcattagttcttctcccttcaaagccagcaaacacagcactcccttccttgctaggagtcaagaggaataggtgaagatgatctgctatgcacaggtgtctcttccaaagaaaaagatgaaattattcacacagcaactgaattaaagactgcctcaagactgttaaaaactgcagaacataaatctaaacttggttctcagaaattaccaacctttaacgataagactttcctaacagatagcacctgaattttatttggttaaaaaaataaggaataaagcactgacatatgctacaatgtggatgaaccttaaaagactatgcttagtgaatggagccaatcacaaagggccacatacgtagctgtgccgaa

SEQ ID NO: 331114 - DNA, 391 bp, Homo Sapiens
  misc_feature (325)..(325): n is a, c, g, or t
  misc_feature (351)..(351): n is a, c, g, or t
  misc_feature (378)..(378): n is a, c, g, or t
ctgctttcttgcagaataaacagccattggactcttcaaacaaaaacgctgtctccatcaagtactgctttcgcaggataagtgaccatttttaatcagttgaaattaacggaaagtagcagttatttttgaaagatgacatcaattatataatatagtaaagagatttaatttttagtcctttgtttcttactgcacaaattgtatggcgtttgaatagaattcccatgatactgacacttcagcaaatacttgcttgatgggctaccaatctctataacttacattgcacagtacctagggaatattcatgtgagttgcattnctccctgcttcagattctttcagctnctcgtgggttgggttttatttccagtnaaggtatttggaa

SEQ ID NO: 331115 - DNA, 484 bp, Homo Sapiens
  misc_feature (27)..(27): n is a, c, g, or t
  misc_feature (76)..(76): n is a, c, g, or t
  misc_feature (87)..(242): n is a, c, g, or t
  misc_feature (474)..(474): n is a, c, g, or t
aaacaatttcaactcttgttgcccccngctggaatgcctggcttttttaaagacagggtcctccgctgggccacgngtgtcacgccnnnnnnnnnnnnnnnnnnnnnnnnnnnnnnnnnnnnnnnnnnnnnnnnnnnnnnnnnnnnnnnnnnnnnnnnnnnnnnnnnnnnnnnnnnnnnnnnnnnnnnnnnnnnnnnnnnnnnnnnnnnnnnnnnnnnnnnnnnnnnnnnnnnnnnnnnnnnctagtcatttttttctagtataattgccttggagtcagacaatatacttggcataatttcagtcctttgaaatttgctttatggcccagtatatgggcagttttttgcacacgttccatgtgattgaagagaacagttgttgagtgcaaggttgtataactgtccagcaggccttgttcatactttctctacttgggttgtagttagtccatctttcctaatgtgtatatanatatatatat

SEQ ID NO: 331116 - DNA, 486 bp, Homo Sapiens
  misc_feature (254)..(254): n is a, c, g, or t
  misc_feature (336)..(336): n is a, c, g, or t
  misc_feature (420)..(420): n is a, c, g, or t
  misc_feature (457)..(457): n is a, c, g, or t
ttcaatgtaaaatcaagttttatatgattcaaagagaaaagttacagttacacatgctcgtttaaataatgtcaaagtctgttacataaaacataattatgaaacattttaagtcttatcattcaaactacttaaaaggctcaaagtcacaaaagatcaagcaaaactgcccaggcaataaagtgcacgaggggagcccacctctccagcggccgtcagcacccagagccgccagctgagggctccatgccgantccatacacaaggtttgtgggttctcagaagagttttcagacagggaactgtttccaactttaaaatctttcaacagacaantgggaggtgggaaggggggatgggtttacacaaggtattttcccaaatgttaatcagggaattggggaggtgttaaatttaaanccgtttttccacatgtatctcctctttgggaatatcnctgcttggggggattttgtggcaggcacc

SEQ ID NO: 331117 - DNA, 625 bp, Homo Sapiens
gagccaatacacaatgaattttatagattcttccaaaaagtctctaggtatacttaggccaccaggtacagttaaatgacacaggccacacatccaatgtaaaatcaagttttatatgattcaaagagaaaagttacattacacatgctcgtttaaataatgtcaaagtctgttacataaaacataattatgaaacattttaagtcttatcattcaaactacttaaaaggctcaaagtcacaaaagatcaagcaaaactgcccaggcaataaagtgcacgaggggagcccacctctccagcggccgtcagcacccagagccgccagctgagggctccatgccgaatccatacacaaggtttgtggttctcagaagagttttcagacaggaactgtttccaacttaaaatctttcaacagacaaatggaggtggaagggggatggtttacacaaagtatttccaaatgtaatcaggaaatgggaagtgtaaattaaaaccgttttcaacatgtatctcctctttagaaatatcactgcttggagaatgttgtgacaagcaaccaaatactcaaaagaccttatccaccagaatactggcaggactcacattactttgcatgtcata

SEQ ID NO: 331118 - DNA, 174 bp, Homo Sapiens
ttctctttgcttagccagcttcatcagtggtgccctaatgcaaagactagaatactgctttctaactgctcactaaattacatcctaaaataaagtacatgtttattgtccaaaagcaccatgcactatcagtcctctagctataggcctctatcgtttctcgcttagctaagg

SEQ ID NO: 331119 - DNA, 392 bp, Homo Sapiens
  misc_feature (140)..(140): n is a, c, g, or t
  misc_feature (300)..(300): n is a, c, g, or t
  misc_feature (349)..(349): n is a, c, g, or t
  misc_feature (379)..(379): n is a, c, g, or t
cttttcttaagctacgtgtgcaatgttgtgtctaacccgacacccaagagtaatcacaatcttgttatcatttgagagaatgaactcaattcaacaaaattctttttaatgaaaaaagctttgatcttactcccactgtnctcctccattccatgtcttttgttgttgtttaaacatctagcctatgcgaatactgtaaaatgaacagaacctatttccttaccctgccaaataatcagggggtccataatactgaatttacaaatggcacatttcctttggcttctcggaggatatcgnggggggagggtggagaggggcggggaggataattgaagggcctcggggngaggccggaccacatggatccaaaaacggngtggacacttaaa

SEQ ID NO: 331120 - DNA, 462 bp, Homo Sapiens
tagcttaagaaatacttttatatttgaatgatgttatttaagttttaaaatgaataaaatagaatgaaatacactgagagtaaaatattagttctgagctagaaatggagcttaggaatgctctccggttctctagtggcagcgacatgatttgcaggcaatgtttacaaggacttcctcatgctgggatagacagaccagtgctggagaaggagtttcaggaggaagctttcctgttctatgtaagtggactcaccatttgaagaagtcacataattatttctttgaacaaactttgtttctactaaggaatttttatcatttttgcctgtgtgtatgtcacaggatgattcctgatgccacgatgatttccaccgcagccattctggagttttcctctccagctcaacagctatttcaagtgtgttttatatttcacataccaggaggcttcaaatgttg

SEQ ID NO: 331121 - DNA, 480 bp, Homo Sapiens
ctaaccattatatatggatgctttcaagtccattcccgggagtcctcaatcttgttaaagtccagattaggaattatgtaccctgaaacaactagaggaggttttagggaaattaattgttgagttaatgcttaaaatatgtagccacacaaagtaagtgcctgaaggaggccccaggtgggagagagatttaccctttcccattacctgtgtatattgtggatggccatggggattgcccccaggccctgaaggacttttcaaactaggcaaactgggaggagatctctcagacagaaattcggcatgagacaaagtctgaaagtgagaaagacatttgggggtgcatgcaggtgcgtatgtgtcaggaaaggggagtgaggaaaataatgcatgtaaataaaataaggcatataaaacacttggcactatgcctgtcatacaggacattattaccctcatgcttatcgtcatcattat

SEQ ID NO: 331122 - DNA, 340 bp, Homo Sapiens
ataaccaccaccaccacagccatttattaagtgcttgccaggcactgtgctaaagctttacaaacattgtttcagttattccaacaaccctgaggtagatattttcaacatgcctccctccacccatgttattatagttgaggaaactgaggctcagagaggttaagtaaatcaaccaaggtcaaacccagctggtaagtagtgaagctagaaattcaaaccaactatgtgtgactccaaaatccatgccttttaaacactatcctaggattgtttaccattgaaagttaaaggacatatgctccttcccaaaatatgagaatagattttcagtgggaaa

SEQ ID NO: 331123 - DNA, 507 bp, Homo Sapiens
  misc_feature (16)..(16): n is a, c, g, or t
  misc_feature (28)..(28): n is a, c, g, or t
  misc_feature (37)..(37): n is a, c, g, or t
  misc_feature (49)..(49): n is a, c, g, or t
  misc_feature (69)..(69): n is a, c, g, or t
  misc_feature (131)..(131): n is a, c, g, or t
  misc_feature (139)..(139): n is a, c, g, or t
tatttaggtttaccantctcctaggggnaagtatacncagctgtggctncctcacaaactgcttagcantctctgatgccagcaatacgttcttatggaatttatctagttttctagtggttcttaatggnagtgttanctcctactccatggtagccagatgcaaaattccatcttttatacttttcaacaagttgtcaacagttggtcacccatctacccatcatccatatcagacatttgctgagcaactcctatgtgttaggtataatgccttagtgttaaggggtgatgagacaaagagtaaaagtcttctacacttgaagtggtcagtctgatggaagagtcggacagacaaacagatattccgaaggtaggatatgtaaaatgctatgagatgtaggagaaggagagtataactttgtagaataagtgagcatttcaaaaagtaggcaatatttaagctacagctcactggataaataggaagttgccacggataaaagg

SEQ ID NO: 331124 - DNA, 283 bp, Homo Sapiens
  misc_feature (128)..(128): n is a, c, g, or t
tcatctaacacccatgacaaatcacatttttaaactttcctattatatgggactttccaaaatttttatggctatttactattttgggcaaaaagacacactctttagtacctcagaaaatactctanttactttacgataagaaaacagttcactcaactaccccagagttgaaaaataggtgacaatatctactctgacccgagaatttaggatttagagttttactagagtcaacttactatactgaggaaaactaattaacttaaataataataataga

SEQ ID NO: 331125 - DNA, 469 bp, Homo Sapiens
  misc_feature (405)..(405): n is a, c, g, or t
  misc_feature (417)..(417): n is a, c, g, or t
  misc_feature (436)..(436): n is a, c, g, or t
  misc_feature (446)..(446): n is a, c, g, or t
atcttatttaaaaactattgttagaaaatgctaatgatcatttgagctttcagtaagttgtaatctttttggtggtagagggtctcgccttgatgttgatggctgctgactgaatcagggtgatggttgctgaaggttgaggtggctgtggctattaaaataaggcaacaatgaagtttgccacattgactcttcctttcaccaaagattcctctgtaggcatgtgacactgtttgatagcatattccccaccacagatcttctttccagaactgggggtgggacctggggcacttgcagtaatgggttcttaaaccctttgttgtccattttcaacaatgtggcacaggcatctttcaccaggagttggattccatctccaggaaccactttctttgctccagncgtaggagggantcccctgttccagtttttnccagaggttncaggattccagtcacacttcaca

SEQ ID NO: 331126 - DNA, 475 bp, Homo Sapiens
  misc_feature (12)..(12): n is a, c, g, or t
  misc_feature (27)..(27): n is a, c, g, or t
  misc_feature (60)..(60): n is a, c, g, or t
  misc_feature (81)..(81): n is a, c, g, or t
  misc_feature (400)..(400): n is a, c, g, or t
tccagttacttntttttggagtgaatngatgttcccagtattcttctaaaccaaccacgngtaccaaatgtgaataagatnggaccgttgccagtccaagagcttgttctgtagtcctttcctttatatgattttttcccctgatttagaagtctataaagcaaagctaagtattacacactgataatggctgaataaatcaagagcaagagataggatactttgcaaatatgcatatttattaaaaatgtactttaaaatagagattaaaattctcgtattgaatgtagaataggtaagcatttatttgtgaaatactcgaatgcttcatgtaaatactttctgagtttgtatttttagaaaggaacattttggaggctgaggcaggagaatggcgtgnacgtgggaggcggggcttgcagtgagctgagattggccactgcactccagcctgcgcgacagagcaagattctgt

SEQ ID NO: 331127 - DNA, 381 bp, Homo Sapiens
  misc_feature (272)..(272): n is a, c, g, or t
  misc_feature (313)..(313): n is a, c, g, or t
  misc_feature (321)..(321): n is a, c, g, or t
  misc_feature (332)..(332): n is a, c, g, or t
  misc_feature (348)..(348): n is a, c, g, or t
  misc_feature (364)..(364): n is a, c, g, or t
tatataaaacttttattaaaattggaattagaaactataccaaaaactttaaaaatacattaagacattgttcttttttcttacagaaaagagggtgaaaataagacccatggcaaagagccatccctgataattttgttcctttcaaacattcatgaacatttaaataaaattacaaatatttaaataaccctaaggtattacccacaggctaaaacttgccagtaattccttagccctgctatttcaatatcaattccacaaacatgggnaaattatgggtaactgcaggctggtaacagtttctaatatncacattanggaacctattnggttatgggtgtcatnaggaatggtggctcanggctattggggcaaatt

SEQ ID NO: 331128 - DNA, 492 bp, Homo Sapiens
  misc_feature (360)..(360): n is a, c, g, or t
tttttactgaggagttagtccccattagttcttgtatcacattttcatttgcacgacattactcgcaggtggtggggagcctgggcttttggggaaccaggctgctctggtccccagcattgcctcctcctagcccctctagtccagtttgcctcccttaccctcattttccaaacctcttgtaccctcctctccctcccccagctggtatgtaagtgtcttgaagttcagtatgttatgatggaccaataattctgccacttcgggtttctccctacattcctggctccccagttttcatgtggggtactcaactggacattcccatggggtttccctcccatctgcctgatccacctnctcctcccaccagggagagttgggggttgggccacaattgatctcttgtgagaggggtgggctaccagtgtgtgtgtgggggtcatcactgccttggggaggagtggggtagggcagagaatccccccaatt

SEQ ID NO: 331129 - DNA, 417 bp, Homo Sapiens
  misc_feature (48)..(48): n is a, c, g, or t
  misc_feature (181)..(181): n is a, c, g, or t
cattttccactgattcccaaaacaacacttgccttgttgaaattctgnacttttccaaaacaagccgcaactgggtcttccaagagaaggtggcaggctttgcttgtgttagcttggggaagcccaggctttgagctgtgctcagtcagttgtatcccatgctccccttcacccatacccntcctggcaacgatatgaggtgtggattgtgtgatagaagaatccagactccacgaagccaaggacagtcacttctccctggcagctctcatggtgtcggcaggagtgggcgcctcaccttgggtactgaagagagtaccgataatcccgtggatggaacaggagggagtgtaattcaatccctacacattgtatatgctgttggcaatttcatttaaactcacagcagaaaacaaa

SEQ ID NO: 331130 - DNA, 373 bp, Homo Sapiens
  misc_feature (291)..(330): n is a, c, g, or t
gccatgagcccaccaacaccctggccctaaataagtgattttatggccacaaaaggtttttgttccttgtttgcctgcctttgttacttttatagtcttctatagaatcaagttaaacacaattttggaacctctgattctataaaacctacatcaaaaaaacacccaaaggattttcccagttatgaattgtctactacgccagtaaatgacaacaggaatatgaggccagggtttatttacagccttaggctatttcctaggaagccaaagatgctctggaatttttgnnnnnnnnnnnnnnnnnnnnnnnnnnnnnnnnnnnnnnnntctcaaacacctgggctcaaatgaagctcatggtgctagctct

SEQ ID NO: 331131 - DNA, 416 bp, Homo Sapiens
cctcctaaggaatgtaaagtgcaatcatttcttcagatataagactttccccaacaatgtgattggattcctttatgggcaaaatcgagagaagctgcccattccaccctgcttatgcatttaatctctttttgtggacttgtctgaccaccttctatttgcccagagtttgctcaattccaagacagtgccccatgaatgggacacctgtaatgtaacccacacagcggtttgcagagaatgttagccatgacttgggctttctgaaagttggctataatttctctatccctacccacaaccctgggaagttggagcaagaggggcatactattgggctgggaggatttgacagcatttccccagttgccctttaagttcttctatttcaaaccgttaattttgcttctctttct

SEQ ID NO: 331132 - DNA, 646 bp, Homo Sapiens
  misc_feature (533)..(533): n is a, c, g, or t
  misc_feature (545)..(546): n is a, c, g, or t
tagtataattcttggattccactgttttctttggggaatggaagttctgaattaaaagcccactgtggagatgctgtggttcatggaatctcttccagtgtaattcagaatcattggcctagaaagtctctgatatttggaggggaacaaaaatcactcacaagcaatccatgatctatacacataaggcataatttcctttagttctagttagtcatcaggggaacagtcatgtatgcaagttttgtgactgagaaatttctgtgcttccaatccacaatgagatgcatgattttgttttcatcccatttcccccaagcccctgtaaatcagggaaaatgcgcaactgatcgcctaggagagggcctcgtagtggcacagctggagatagtttcaaagtctaaaccaccagcccatcctgaggaaagcctcctatgggaatgtaaagtgcaatcatttcttcagatataaggactttccccaacaatgtggattgggattcctttatgggcaaaatcgaggaggaaggctgnccatccacctgnnttatggcattttatctcttttgtgggacttgttctggaccaccttctattttgcccaggagttttgctcaattcccaggacagtggcccctggatggggg

SEQ ID NO: 331133 - DNA, 109 bp, Homo Sapiens
ggatattgatttgatgacaaacttatcatcgttcagtgatgtacctccgtgtcaaacttagatatccaagataggttattcttttttttcttgagactctgagtcttaa

SEQ ID NO: 331134 - DNA, 490 bp, Homo Sapiens
  misc_feature (253)..(253): n is a, c, g, or t
  misc_feature (359)..(359): n is a, c, g, or t
  misc_feature (411)..(411): n is a, c, g, or t
  misc_feature (442)..(442): n is a, c, g, or t
  misc_feature (455)..(455): n is a, c, g, or t
  misc_feature (467)..(467): n is a, c, g, or t
cacacatgtggggcagacgcctttttgctgctaagatgctggtttaactagcattgcccaggtgtggagaaaagcgtctctgccagcacagttggtacgtagcaccctgagctctctcgtcttctaggtagcgggggacaggcctgggtgactggcatgaacccagcttctctgttgcaacccccagcttggaatctccagtcaccatggatgggagaactgacaggcagggagaaagcatgtcaagactttngaggaaaggctgtcccctcaaccccaacctgaggtcacccaagtctccctcctaaagtaaacagaattttccattttgttagggagaattgtgcacttactagttngacattcacttggaaccaggattttctggcttagtggagttagggatttggncattccccttactttaggggaagttcggggnacagggccagctngggggcccaacnggggcttggttggctgggttttt

SEQ ID NO: 331135 - DNA, 513 bp, Homo Sapiens
  misc_feature (153)..(153): n is a, c, g, or t
aaattggttttgagaaagagaatccagcaggaatttaaaaatctgaggatcagtaaatctaagatccatgataccacaaataagtcaacccctttgcctaatgcccagtgatttattattctgtataccgtcttgtcttattccaaagtgctngtcttatttcaaagtgcttattccaagcagtgtagacaagggaatgttggtaaaatattctctttcccaaaaagattattaaatatagcttctttgtttttagaataaaagtctttttctcaatcaagcatgcagaactttacttaagtgttcttgcatatatgcccagatcacactgtatgcaggccgtggaataaatgcagtggcaaaaaaactggtgtatagagtttaagatatggacagacccagggtttgtgagatttttgaatgctagagtcaatgaaaagttaggtgctttaacttagcaacgtttgtgagtttcatgtgtgggaacaatatcgtaaatgccaaaatacatca

SEQ ID NO: 331136 - DNA, 942 bp, Homo Sapiens
  misc_feature (24)..(24): n is a, c, g, or t
  misc_feature (40)..(40): n is a, c, g, or t
  misc_feature (142)..(142): n is a, c, g, or t
  misc_feature (211)..(211): n is a, c, g, or t
  misc_feature (227)..(227): n is a, c, g, or t
  misc_feature (237)..(237): n is a, c, g, or t
  misc_feature (637)..(645): n is a, c, g, or t
  misc_feature (781)..(781): n is a, c, g, or t
aactccgcagacggtacggggatngtcgctagccggatcnaagccgtacttttttcagagtcgctacgcgtcaaggaacccgccgcaatgggaatgtattcggccgaaaaaattttttctataatatgcccgccatcccaangagtacttagacagtccaatccaaatctcattgttggctacgtgggtctatcagtagaggacacagctnagatactagaggaganacgaacgcancatggctgaaacacctatcggtgtatgtgcgcacctagtgatggatcttcatacccctatctcagcatcatgaatatagtcatgtacaaccctgcacatgtcccctcaaatctaaaagtcgaatctattaaaccattaaaacataaaaataaaagataagaatatgataaaggaaagctttctgaaattaaaataattgcggtacaatttagaaattattttttaaatgtcctatctaggcttttatctgctataataaaggtatgaattattcctcaaatacttacaaaattaagttctagatgaaattttacatgtttgaagtgaagagaaaacaaggcaacatgtatgcacacttgatttgcagacaaaataaatttaccctttagagtgttactgnnnnnnnnngacaaaacaagcaagaaaacctactttgttttatgtaacaagtagtctattaatttttaaaataaccaaaacacattagacctctctgtactttctgcttaattttgctgtggacctaaaactgctgtaaaaaaanaataaagtcaataacaacaacaatgctgggccaaaatgtcagcctttataaaaaattatttttcaggactaaattttcttcttgttgaccaaatgtccaaaatgatagactggatcaaggaaatgtggcacacatacactctcccaatccagtctatcatt

SEQ ID NO: 331137 - DNA, 435 bp, Homo Sapiens
tctccacccagtcccaaactcctaaagcaaggaatcgagtcctaatgtaggatttttaattctcttattggtgtattttccacttgtctatctttaccaaaggagcatcagtgatttttagtggatttcacaaaggagtaataggacagcttccttgtcctgtttttttctttaaaaactacaacccaataatgatgagtgaggctgttgtaatttttggaaacatgataatgggttgttgcaaatatattgaaagttaggggctgtgtgcagtggcttacacctgtaattccagccttttgggagtccaggtcaggtggattgcttcagctcaggagttcaaggtcagcctgaccaatatggtgaaatcctgtttctactaaaactacaaaaactaggtgggcatggtggcacaggtgagaggatcacttgagc

SEQ ID NO: 331138 - DNA, 389 bp, Homo Sapiens
gtcttttatttattctttattatcgttagaatttaacttacataattatatttatgatttactaatatttaattctgtttttaataaggccacattcaaagtgtttcatttaaaaaaataataatggtagagtcaaccaataaagtgatgatatgcaggtttccagctcctaggtagtagcattcttacagggaagatgtttcactgcacaaacgaactaaccctcaggaaggcttgagggatcctgtgaagggaccacacaccgtctaatcatgtcagacgatgtaagtgtgcaatgatgaaatttttgatggggagggaagtccctgcctactcaccctcccttctttaggatgtctccataacataatatgcctgatcaaaagtgg

SEQ ID NO: 331139 - DNA, 365 bp, Homo Sapiens
tagaagaacggggtttcacccatgttggaccccaggatggtcctcgaatctccctgaccctccgtggatccgccccaccctcagccctccccaaagtgcctgggattaataggtgtgaacccaccgtggctggcctcacccagcctattttttcatggttctacgactttgtggttgtccaacctgggcaagtaaacctctttgagtctcagtttcctcaaacataagagccatctttagagaattgttcgagctttaagaaagtaatattaagaaaagtgcctggggcataataaggactcaaggaaagttagctattctattgccattcttcaagcttgctgtcattcactgtcattattact

SEQ ID NO: 331140 - DNA, 382 bp, Homo Sapiens
aaaggtcttgaatgctgcaaaggagaactgggaagcaatgtctttgcccagtcctggtcctcccagctctgggatagagagcagggcagcccagctcctgacatcttagatgcctgaggctttgcaggaggccaaagacacagcccagaaagaactttgttcgcttagttccaattcaaaacagcccttttagctgtgcaatggcaccaaagaaggagagcagaattgaaagaaggaccacattgaaggcagttaaagcgagaggcatatattatccaaaggagcaccagaactctgcttctctagttgacaaagttatacaaccatgaaattatccagatggaagggaccactgagctgatccagcccaccccactattca

SEQ ID NO: 331141 - DNA, 437 bp, Homo Sapiens
  misc_feature (12)..(12): n is a, c, g, or t
  misc_feature (316)..(372): n is a, c, g, or t
aatccttcctanttttcctccccacagctttccacttctcctgagcccagaagtctattacgctgtagtagatagtgccaaacaaaggtgattttgaagcaggcggtatttctaatgaagtattgggaagaatgcccaggttaaagagctccaacttaacctgagtgtgctacaggaagaggaatacaactatttcatggaaaatgagcctaaagagaacaatgaccacaggaacattctgacctatttgtttccttgacctggaagcaccacttcacagaatgacagattaggaaaggacattgaacatgatcannnnnnnnnnnnnnnnnnnnnnnnnnnnnnnnnnnnnnnnnnnnnnnnnnnnnnnnngcctaggcaaacagtagtgaattcatgacaaaaatcctcatccatgacccttagactagtcctcc

SEQ ID NO: 331142 - DNA, 470 bp, Homo Sapiens
  misc_feature (295)..(295): n is a, c, g, or t
  misc_feature (379)..(379): n is a, c, g, or t
  misc_feature (406)..(406): n is a, c, g, or t
  misc_feature (414)..(414): n is a, c, g, or t
  misc_feature (422)..(422): n is a, c, g, or t
  misc_feature (447)..(447): n is a, c, g, or t
  misc_feature (454)..(454): n is a, c, g, or t
agtttattaagataaagctctcccaaggagggagtatgtctaatactgccaaaagatctagtaagatggagaagaaaaatatattcgcaatctcaaaactgggctcaagtgtgctccccagacctctgtcaggaagtagaaccaggacagctgctgggctccacatgcgacgagcccctaaatcataaatcgccatctggtacctgcttcactgtcactcacctcacaatagtgttttctacaaagattcctagacaaattaagtagacatgagagcaaatgtccccagtgtctncatgccccaacctcccctactcctgtggggcagacaagcacccgggggctgttttaccatattggggaacattatattgttcantttttgtagtatttccggggtttattnaccaaccntcatgggnattccaagtacccattcaattaggntgtgaantatttcaaggggggga

SEQ ID NO: 331143 - DNA, 241 bp, Homo Sapiens
  misc_feature (46)..(46): n is a, c, g, or t
  misc_feature (214)..(214): n is a, c, g, or t
ctgccaaaagtggtccgctctttataacttagctgtgggagaactnttgaagaatgtggttcaagagaaggactagctaacagagaagattttaaaatatataccttaaaaataattttatgatagtaaattccaaaggtatatgaaaatagaaaaatagtagaatgaattcttaggtactcaccacctggcttcaataatggccaactccatncagtagggcaaatattaaatattaaaa

SEQ ID NO: 331144 - DNA, 791 bp, Homo Sapiens
tgaatggcacgaatatgatgagcaatagcaggtggtgcccttcagccagaccatcgctccgtgcgtctgatgcatcttgccaaagagtagttctgggaggtggttgcctctagagaacacattcctcctattctggggtcccgtgagagaaagaaatgcttttgcttttgatgtgggactcttactaagcctttcttcagagaaaaggaagtgaaaaatgcaccccatgataatcagtttcttacaacatactgtgatagtaccggcttcgttgtttttagctggaatcattagcttccatttttagaataacagctattggctaaattaggctacagtaggccattaagatggatgttggaattaaaaacatttttggaaaaaagcctgctttgagcctttgttataagcccttgggtagagatctgggtcctgtttctgatttcttgtgagccttcactctgacagttttgtttccagaaacacactcttagcctgctcctgaaatgggaacagacaggccaacttcccctctccagtctcccctgcgggtcaaagctttactttcctgtcatgttaagaaagaatagatttaaccttgataatccatgtagtattctgtatttttaccttttccttatctgaaaaaaagtgtatatatggcatggaattgattgcacaggcacatggcatgttggcttgtgaaccaattgttaaaatttcaagttaatcattaaaataatatctttcaaattaagttatattaaaaacaaaggtaacattctaaattc

SEQ ID NO: 331145 - DNA, 448 bp, Homo Sapiens
  misc_feature (62)..(107): n is a, c, g, or t
  misc_feature (346)..(346): n is a, c, g, or t
ttttagtagagacggtgtttcaccatgttgaccaggctggtgtcgaactcctgacctcaagnnnnnnnnnnnnnnnnnnnnnnnnnnnnnnnnnnnnnnnnnnnnnnacacgcatgcccggccccacatacattttgtagtcagggtcacaaattctggttttgttggtgttagcaggtgctggtaagatatctggtatcttttcatgtcagtgaagagtctacagttcatttgaaagctacaagttcaagaagctaatgttagggataaattgtgtaaaataggagaatcagtgattgtcttgggatttaaataaattgttggtgcctttgttcactatattatnaaatacgaaatgattgtgaaatatattgacttggcatatgcacagaatacagtctcattctcagtgaacttatcctaaatgtgacagaatagcagtaaaaag

SEQ ID NO: 331146 - DNA, 540 bp, Homo Sapiens
  misc_feature (85)..(85): n is a, c, g, or t
  misc_feature (113)..(113): n is a, c, g, or t
  misc_feature (134)..(134): n is a, c, g, or t
  misc_feature (150)..(150): n is a, c, g, or t
atatttgacaactttatttagttttgctaaaagggaaaaacaaagtcatgcagccttctccaaacacatcttaacatttcaaaangctgagcaaatctcatttgatgaatctngagttttataaacactttgantggtacacagtgacangatgcagggaagatatatggatttttattagtttgattaccttggtaatgttatgctattaaactcatttctcattgaattggcattaaggtcatgataaccctcagcttttatcaaggggcctgggatattataataacttgaaaattccagtttggcagtaatgattatacttaaccatgatctttaccagaaagtcaaatatattctaccttaattcctcagaattcacattccttgcattcagctccaaggaaggagtacaataaaacacattcttataattcctgaaaatgtgataatgtgggtaaattacaatagcccattttaaatggaatggtattgatggatgtacttttataatagagactttgtaagagaatggggtct

SEQ ID NO: 331147 - DNA, 478 bp, Homo Sapiens
  misc_feature (27)..(27): n is a, c, g, or t
aaacctgccccattggctgttggtgtngtggagactgctgaaggggtcctaggaggttgcattaaaatcacaaaggtaaagtcgggaactgtagaagggaatctgggacacagatgtcctactactacttatctcagagcccaccataccatgctgctcccatttcccatcctctgctgcaaagctctttgtctatctacctcctgcatgagttggatccgttgtctctcttgctgttctcgtaaacgttccttacgttcccgttcttgaaaactttcactaaagggattgttgtcatcaaattctacccgaggtggtgggtcactctgtggatttgcatttgagactgtccctggggctggtgtacaagtttttattggtaactgggcaattgggggctgaattctaggaggattgaggggcaggtgggcaggagcactgttgggttgccatccaggtaaactgggcattctaacag

SEQ ID NO: 331148 - DNA, 416 bp, Homo Sapiens
  misc_feature (28)..(28): n is a, c, g, or t
  misc_feature (42)..(42): n is a, c, g, or t
  misc_feature (59)..(59): n is a, c, g, or t
  misc_feature (120)..(120): n is a, c, g, or t
ggtaaaatggaaaaatggaattttaccntttgggtgaacccnattagtttaggaccatnagggataataaaacatttaaacccatatcctggcctccctaagaaaagtattttttaattnttttgtatttcctatcctgaaatgaaataattgccttttcttcccctggtaaaggctggatggattggtaggagatttcatttatcacataaataatcttaatcttaataatttatcagtgtgtttagattttgaatattgtgtttcctaaaaattatttttaagcttttaattcttttgtgtgaactattagatagttgcaatagttactgctttctgtaatagttaaatggaagatcagttctaatcatgaagataaaatgacagggaagaaaagcaattatttcatttcagat

SEQ ID NO: 331149 - DNA, 759 bp, Homo Sapiens
  misc_feature (17)..(17): n is a, c, g, or t
  misc_feature (23)..(23): n is a, c, g, or t
  misc_feature (33)..(33): n is a, c, g, or t
  misc_feature (43)..(43): n is a, c, g, or t
  misc_feature (50)..(50): n is a, c, g, or t
  misc_feature (80)..(80): n is a, c, g, or t
  misc_feature (89)..(89): n is a, c, g, or t
  misc_feature (99)..(99): n is a, c, g, or t
  misc_feature (109)..(109): n is a, c, g, or t
  misc_feature (115)..(115): n is a, c, g, or t
  misc_feature (122)..(122): n is a, c, g, or t
  misc_feature (142)..(142): n is a, c, g, or t
  misc_feature (158)..(158): n is a, c, g, or t
  misc_feature (394)..(394): n is a, c, g, or t
  misc_feature (402)..(402): n is a, c, g, or t
aaccaactaaaccccancctaantttttatggnaatttttaanttaaaanttgggggttttaacccaagaaaggccccgngttggtctnaaaaatcccntaaacttgtnatttgnctcgcancccccagcctcccccaaaangctgggaattaacagncgtgaagcccaccgcgcccctggccctcctgggtttttaataaaagcttccatataggaaaccttacttcccttccccggggtatagggccaacaccctctctctaagagaggatctcaagacctacaatcagaaagctgggtaaagatcagaatcttgccttgggacacgtgtaaggagagcaggagaagatcagagattattttctgagacctaacgtaccctatattataacnaaaacacnggtaatggggttatgggtgttatgagccaggaaccgtggtggatgaaaaccagtatgtatcacaacaccacaagaggacacgcagatatgtccatttataaattatttcagaagcatgccaagtctttgtatctaaatgacataaaacgttattttgatcccctaataatacatttttatgctctaccgaaactactcagaaataatttcccacaataggaaatatatttctttcactattcttgagtaacagaatatttaaactatgttctcaagtttttcgaagccatttcccaggatcaaggcttcaccgaaggtagcttttcaaaagcgttcttgtaccaggttttgccactt

SEQ ID NO: 331150 - DNA, 312 bp, Homo Sapiens
  misc_feature (204)..(204): n is a, c, g, or t
  misc_feature (280)..(280): n is a, c, g, or t
agaaagactctgcagtcagggtgctgtggcgggttagtgagctctatgagtggtatccacgtccgggattcttgtgactgccgttgtgcccttttccagggctgcatgtctgccctgggtccacctgcagtggcacactcaggcctctaagcccccagtgggcacatttcctaggcagcaagaagcctgagcatgcccccaggnaccagcccatcccccaagccctttgtcccctgcctctgcccagggccttgtctctgaagggagtcttgagaagatnggcgctgttcagagaagttgatgggttacacg

SEQ ID NO: 331151 - DNA, 408 bp, Homo Sapiens
  misc_feature (23)..(23): n is a, c, g, or t
  misc_feature (106)..(138): n is a, c, g, or t
aggctgacgtgggaggatcgttngagtctgggaagttgaggcttcagtgaactatgaatcatgccatgacactccagactgggcaacagaacaagaccctgtttcnnnnnnnnnnnnnnnnnnnnnnnnnnnnnnnnnctatttttatttaatactcaaagttcaaatcacaaaagtactgaggatcaaacataagtaacactagcaaagcagccaatggcaggcaacaggcagttgcaagccacctctcaccatataactctgagatggagcaactgattgagagaaagtcctctaaccacagccatctacttgtcatagtttgtaacactgatcttccacacattttgtgtatcttccatgaactcactgtcagtgctgctcaatgagataaactaagtactaagg

SEQ ID NO: 331152 - DNA, 382 bp, Homo Sapiens
  misc_feature (359)..(359): n is a, c, g, or t
  misc_feature (368)..(368): n is a, c, g, or t
gttttaaaatgtgtattaaatttcatgggtatgcacagtagagaaggcatcctcacagaggcaagagttccaacctggtgacaatggcagtgagccacccgtctagttttcaaccatctaagatagcagcagctggctgttgccctggactgagatttcttcctctttgctggtggggggcggctggaacggatgggagacacagtgggaggctgaggcccttggggtcattcattctgtttctggaaggcagctttctcaaaaggctgctctggcaactgctgcttctcaacccccttgggcccttccaaggggcttgatgatggtccttaggtttgcagggtggcctggagtctttngatgggggnataacacagcccgt

SEQ ID NO: 331153 - DNA, 625 bp, Homo Sapiens
  misc_feature (47)..(47): n is a, c, g, or t
  misc_feature (529)..(541): n is a, c, g, or t
atgcctactttcttctttgtatctccctccttcccagcccacccggnaggcagactctgatggaaggaaggtgccgtagtgggcttttagaaactaacgggactggttttcaaagcagttatcttgggaaactgtttattccagcgatgtgacttttttcagaatatttcttggaatcatattcagagtctggggctgtgtgttgagcagccttaaggatgctagacactcatttagtgcccagggagtccagcgaatgacgtctgtggccaagcgaggtctcaggtgcaaagcaaaaggaccatttaaagtaaaatagcttggattcaatcatgtgacttttaaattggctcagaaagcaattttgtaatttcagagagtgttttgagccatggccacgttgtcattgtgagtctatagcttgactccttggagaacaatattcatttggttgtggagactgatttgctgggagaaatctgtcctgttactttctggtcatcccaggttctgacttttaccaggggcnnnnnnnnnnnnngcaagagggagataaatcccatctgtgagtttgtcttattggcgcctttttcctcagctgtcttccaagtattatttttactgt

SEQ ID NO: 331154 - DNA, 484 bp, Homo Sapiens
  misc_feature (184)..(369): n is a, c, g, or t
  misc_feature (448)..(448): n is a, c, g, or t
  misc_feature (456)..(456): n is a, c, g, or t
  misc_feature (469)..(469): n is a, c, g, or t
ttttttctttttaaaattctcatcaatgaacttgagcactttcaaagtattaccaagaagcacacaacaggagtgctggaacatgtggggaggaggagcaaaaagaatgctttaaaaaatgggccagaaaaagggcaactgttaactgcaggtacaatgttaaggttgtataaggaaggaggtnnnnnnnnnnnnnnnnnnnnnnnnnnnnnnnnnnnnnnnnnnnnnnnnnnnnnnnnnnnnnnnnnnnnnnnnnnnnnnnnnnnnnnnnnnnnnnnnnnnnnnnnnnnnnnnnnnnnnnnnnnnnnnnnnnnnnnnnnnnnnnnnnnnnnnnnnnnnnnnnnnnnnnnnnnnnnnnnnnnnnnnnnngggcagaaggattgtgaaaagggctaggactgggcttaggcctccccagggttacatcttttcttcccctggctgggtnacttcccngccctttgaaccntcaggcctcgggttt

SEQ ID NO: 331155 - DNA, 450 bp, Homo Sapiens
  misc_feature (39)..(39): n is a, c, g, or t
tttttttaagataaaattaatttatttgacttcacaacnttcatgggccacacaggggcccacagtcctagaagcacagcctgtggagtgggctggggaggccagttctctggactgcctgctcccttgtccagagctgcctttagccaggtccctcctgaccccatcatcctgttcccatatgcaagggctgctcaggtccacctgcaataaacccaggcctgcctctggccccaaggacagggcctcgtgggtggcagcagcactggtcctcgtggctgtggggtgtggggtgggtggggtaggtaggtggggaaggaggggcaggcaggagggtttggttcagtgcagagagctgctgttctgctctttcaaaggccatctttgcccagaagctggctgttccaactccaccccattttacaggcagctggaagaagttcattttca

SEQ ID NO: 331156 - DNA, 440 bp, Homo Sapiens
  misc_feature (52)..(52): n is a, c, g, or t
  misc_feature (54)..(266): n is a, c, g, or t
  misc_feature (396)..(396): n is a, c, g, or t
  misc_feature (406)..(406): n is a, c, g, or t
  misc_feature (425)..(425): n is a, c, g, or t
tgtttgttttggacagcgtctcgctctgtcgccaggctgttgtgcagtggcnannnnnnnnnnnnnnnnnnnnnnnnnnnnnnnnnnnnnnnnnnnnnnnnnnnnnnnnnnnnnnnnnnnnnnnnnnnnnnnnnnnnnnnnnnnnnnnnnnnnnnnnnnnnnnnnnnnnnnnnnnnnnnnnnnnnnnnnnnnnnnnnnnnnnnnnnnnnnnnnnnnnnnnnnnnnnnnnnnnnnnnnnnnnnnnnnnnnnnnnnnnnnnnnnnnnngtgtgagccactgagcccggccaattacccactattcttaaaggtcagcagtacttccccaaaggacaggaattgcaccccaaacagaatctctaatttgcttatttaaaaaaagttttaaatagccaantgcaaagatntaaaacaaagacattgtancatatattaattaac

SEQ ID NO: 331157 - DNA, 424 bp, Homo Sapiens
  misc_feature (353)..(353): n is a, c, g, or t
ttttcagacttattaaacatgatttattactttgggacaggagacgggagaaattgatagaccaataaatattgcacaggctgctggtggtggggagatccagaccgaggtagtttctgtagaaagggtgaaagacctgggcgaggaaggcacctgaggttgccgggagccaggttgggagcgagtcttggtggcgagggtggtttctggttcacctacctagcacaaggtctccaactccttcagcctagacaccctgatcagcagctgaccagttggcctgccatttaagcagcagcaattgatagcaagatcaggtttcctttagaaattcttattgggttccttccctngcagcgacaacccggctggcccaaagtttgatgggaacccagcagctttcacttggacgttttccagggga

SEQ ID NO: 331158 - DNA, 425 bp, Homo Sapiens
  misc_feature (386)..(386): n is a, c, g, or t
  misc_feature (391)..(391): n is a, c, g, or t
tgacttgctcactatcatgaactcactcaaaagaaactagcaattttttagacttcttttgggatccttgtaccgcatcctatactgcttttatgttcatgtgtgcatttgtgtacatgtatacacatattactccataacgaagcacagtcttcttttatacctttcctgggttggggtagtagaggaattttacagcctacaatcagacacatccagaagaagagtgggaatatgtatgataccttaaaaatcaggcacatttaacaaagtataacttacttcatgggttacaacttaaggtttaatgttttttccctttatttttccaaaagggctcattttttctcccttttctcttacttttcaaaggttcaaggaactgnccccntggggttctggtccagggggggcttcccggtttc

SEQ ID NO: 331159 - DNA, 170 bp, Homo Sapiens
caagcacacaaaaaaatgagagttttattatccaaagtctctcactaaaggaagttccaaaggacatattttaggaagaagggaaatggttccagaagaaacatctgagttacaggaggaaagttgaatagacaaacaaataacaaacagaaaggtaaacatgggtaatt

SEQ ID NO: 331160 - DNA, 438 bp, Homo Sapiens
  misc_feature (176)..(289): n is a, c, g, or t
  misc_feature (331)..(331): n is a, c, g, or t
  misc_feature (353)..(353): n is a, c, g, or t
  misc_feature (369)..(369): n is a, c, g, or t
  misc_feature (415)..(415): n is a, c, g, or t
tgaatgttgcaacttttcacttagtgcctacagtctcccactgtcaaccttagaggtggctgtggtggtgacagtttgtgcccccagtgtggcttgctagtgccagatggggataataaagaactctgttctatacacttgcaataacaattcaaaaataaaattaagaaagccannnnnnnnnnnnnnnnnnnnnnnnnnnnnnnnnnnnnnnnnnnnnnnnnnnnnnnnnnnnnnnnnnnnnnnnnnnnnnnnnnnnnnnnnnnnnnnnnnnnnnnnnnnnnnnnnnaagcctaaataaatggggaaagcgtcccatgttcattggacngggaaaacagtcttgtttaggntggggctcgtggccgnatttcttgggcctcgagggggccaaatttcccctttaggtggagtncgttttttaaattccgtaaatcc

SEQ ID NO: 331161 - DNA, 617 bp, Homo Sapiens
ttaatgctgcaaagagactctgcagatagtgaaaaagatggagggccccaatttgcagaggtgtttgtcattgtctggtttggtacagttaccatcacctcaactcaaaacttcttggagggaccatatctttttttcagagcctctgtgtgctgggttactgtatacttcccttgacagtagcaatgctgatttgccggctggtacttttggctgatccaggacctgtaaacttcatggttcggctttttgtggtgattgtgatgtttgcctggtctatagttgcctccacagctttccttgctgatagccagcctccaaaccgcagagccctagctgtttatcctgttttcctgttttactttgtcatcagttggatgattctcacctttactcctcagtaaatcaggaatggggaaattaaaaaccagtgaattgaaaaggcacatctgaaagatggcaatttcaccatgggagctttgtctctggcccttatttgtctaattttggaggtatttgataactgagtaggtgaggagattaaaagggagccatatagcactgtcaccccttatttgaggaactgatgtttgaaaggctgttcttttctctcttaa

SEQ ID NO: 331162 - DNA, 566 bp, Homo Sapiens
  misc_feature (19)..(19): n is a, c, g, or t
  misc_feature (32)..(32): n is a, c, g, or t
  misc_feature (44)..(44): n is a, c, g, or t
  misc_feature (62)..(62): n is a, c, g, or t
  misc_feature (84)..(84): n is a, c, g, or t
  misc_feature (97)..(97): n is a, c, g, or t
  misc_feature (127)..(127): n is a, c, g, or t
  misc_feature (133)..(133): n is a, c, g, or t
  misc_feature (144)..(144): n is a, c, g, or t
  misc_feature (152)..(152): n is a, c, g, or t
  misc_feature (164)..(164): n is a, c, g, or t
  misc_feature (174)..(174): n is a, c, g, or t
  misc_feature (183)..(183): n is a, c, g, or t
  misc_feature (282)..(282): n is a, c, g, or t
  misc_feature (382)..(382): n is a, c, g, or t
  misc_feature (403)..(403): n is a, c, g, or t
ccccaaaaaaactggttgncccaaaatccaancccaacttaaangcaactggaaaaaaattnaattcaactgcaaaaggttgcnatggaaaaaaggnccctggcaaaaatgaactcgaaaacatcangtcaantttctcaagcnccctcttnaaccgcttggcntctcgctctnggataagcngggcctgccgcttttccggggtttcattggcccgcttcacctcatggcctcccgatcccgctgagccgcgtgcccgctgctcgtctgtctcctgcaacnctgcaagcgcttggcttcacggtccctcatgcgcctcaccttccgctcctcgggggtctcattgtcccgccggctcttcttggccgtgcgctctcgttcnagccgctgcagccgtacttcnaaaggctcattctgtcgacgtagagcccacttgcgtacactgggagtctgggcttccagcagtttacggtaggcagcacagttgttgcacacaagcagaattccagcagggtacactggaggactaaaggcaatatccttcccctcagcactggagggaccct

SEQ ID NO: 331163 - DNA, 366 bp, Homo Sapiens
  misc_feature (326)..(326): n is a, c, g, or t
  misc_feature (346)..(346): n is a, c, g, or t
agttgtgccaagtgaagtttatttaatagttctttaaataagaataacaaagctgaaagatactgtgcattctaccagttccaataagcaataagcgacagccctcaagcgtcagatccctagtgaagactgcatgcaatcctcggcattttgaactgctttcggctccaatatgaatgatgcacagtgcaggatgaaaaactaagggagattaagatgcaaaatgggggcaagtccaaaggcctccatactccgggttgggcgatcatcggcaggaaaaacaggaaatagggatccctccactggggctgcttctttgggcggcnggaaatgtttgctggaggcnggatcttggggcttggcttt

SEQ ID NO: 331164 - DNA, 201 bp, Homo Sapiens
aagctgcaaggtccaggcacatgactgcactgctggtctccgtggtgcgtgcggagaggccgacacacttcacccgggacaggcgcaagtactcctctgctttcctcagcatgtcgggctcggcgaggcccaggcgcggggctaggcgcccgatcagctccgaccccatggcgccggcactaaagcgaacaattcccgtga

SEQ ID NO: 331165 - DNA, 427 bp, Homo Sapiens
  misc_feature (134)..(288): n is a, c, g, or t
  misc_feature (406)..(406): n is a, c, g, or t
gttacagcattatttaacagtgaaatgttgttctttatattaaattgtgtcttcctgtctctatagtgcatatacatagaccttgtgaccacagaatttttgctattcgaaacttttattgaaaagttttcttnnnnnnnnnnnnnnnnnnnnnnnnnnnnnnnnnnnnnnnnnnnnnnnnnnnnnnnnnnnnnnnnnnnnnnnnnnnnnnnnnnnnnnnnnnnnnnnnnnnnnnnnnnnnnnnnnnnnnnnnnnnnnnnnnnnnnnnnnnnnnnnnnnnnnnnnnnntggtgcactcctcctggggtaccagatgagaccgtgtctctaaaataaggaaaataaaataaagggtgtggggatttgttttttcagtagggcaggcgtttcacgggaattatggggncatcagtggaggcaatctaag

SEQ ID NO: 331166 - DNA, 600 bp, Homo Sapiens
  misc_feature (29)..(29): n is a, c, g, or t
  misc_feature (48)..(48): n is a, c, g, or t
  misc_feature (55)..(55): n is a, c, g, or t
  misc_feature (62)..(71): n is a, c, g, or t
  misc_feature (75)..(75): n is a, c, g, or t
  misc_feature (128)..(128): n is a, c, g, or t
  misc_feature (145)..(145): n is a, c, g, or t
  misc_feature (186)..(186): n is a, c, g, or t
  misc_feature (214)..(214): n is a, c, g, or t
  misc_feature (244)..(244): n is a, c, g, or t
tgggggaatcaacccccagttccctaacngtggtaattccaaggcctnagcaaanttttttnnnnnnnnnnaccncaatttttggcctacaggtaaaggcacttaaattccttaaggtctaaggatgngccaaccaatcccattntcaaacaccccaaggaaacgctgtctcaaatggagaacagncagtcttagaactggtgaatgttctccnacacctactcctcatgcatctcaatatgcncctctaaatgcatcttcccaggcccactccctccgccggccaagggcactcctgcagggatgtctgctgtattccttttgatgttcagtgggacactgcaaccagaacctaatccatgcctccctggctgtgcccttaccacacaccaccctcttaggtgacagtcagtgtcccatatcaggggtagataaaagcagtcaaggagtatcgctttaaggtccaaaagatttacttagaaaagtgctccttaaagttctctggaatacttggcttgtaaagtcttttgtgaaaaaaatgttttatgctcaattaaactttggaaaatgctataagttcgtaatacatagtaaagactc

SEQ ID NO: 331167 - DNA, 677 bp, Homo Sapiens
ggatttaaccatggtttattgcagacctattgtgtgccaggcatgagccaggtgctcccacaaacagcgtctccaggtacgagaagtgtaatttcgaccctggaacaccttcctgcactcagacagaagcatgtgcagactgctctcagcaacgcacctccttcactccctggccattggccccttctctctacctgtcccctgtcactccacttcctgccccagggcttctcttagggattttccaggctttggggagctgctgctttcagtttctggctgtggggtctcagcaggagtttgttccaaaacccagtagaaataaaatccttcaagagggagatgattcgtgggctgggtggattccagtgaccagaggacgtgcaaactctgccctaatgatctggggaacctagcccatccattgagctttctgttttcacccagtttcacttcctggttctcttccgagccttgcacaatgctgggagacaggcctagaaaagtgcccaccatgaggatggtggaagacacacataagatgccggcctggggaggctactctgggtcattacagcaggagcggggagagctttcttcactgccctgccctaggctgaggacgactaaggccaggtcttcccaaccttggggctgtccttgtccatagcctgagt

SEQ ID NO: 331168 - DNA, 225 bp, Homo Sapiens
  misc_feature (177)..(177): n is a, c, g, or t
gctgactcaaaagcaaacacacaaaagcctccagctagtcactgttttttataattagtcattaacaaaacatttatgaaaattcaagtggttttaaaattacttgaacctggttctcttaatagggtttgatttattcatcagaaatctaatttccagctggcactctctcacttnttcaggaactatttattcagtaaccaagagttctaccagatgcacaga

SEQ ID NO: 331169 - DNA, 439 bp, Homo Sapiens
aaaggaaccccgaaaacaacccaggtgcaaagggtggcaaaagactgggggaactgggtcctttcctccgcaaacttcctgtgccctccctttcaattcctcagaagaggactattaccagatgggggggaaaaaacataagccagaaagaaccccaaggacaaactggaaatttaattccttgatgcagatcttatcttcatctggtgcctcattaccctgggccccaagccttctaagtaggaagaaatactgatttctgttaggcaagtgcttatgttggtggcttcatcacatttcaaagctttggttaaacacatcggtcatttttgtgcaaacacatgccatttgaccaccatggcagctttttaaggtcatgaatgaccagatagtttccaaagttgggatcactcttcattggggttcactcttcattgcc

SEQ ID NO: 331170 - DNA, 533 bp, Homo Sapiens
  misc_feature (384)..(384): n is a, c, g, or t
  misc_feature (433)..(433): n is a, c, g, or t
gaataaatatattacatttttatttgtggagaaccaattaacagcagctggctaaatgtaactcacccaggacagaaggggaagttgaggggggtggtctgtgtgtggatggaggtgggacagtggctaaggagagtcaggtgttccctcccccaattcatttagcagccccagaactttccgattttatctttaatgaaactttaagtacataaataaccactctttcctgcccctggttgaggccgcgctgggtccgggaaatatctgctttccaacggggcacctgggtgggagccttccaagaacttcagctcagcggttcccagcaagggttcgctgagtctctgtcctaggaggtccgagctgggtatgctgtgcggnacgcagacactgcgggaaggaaacaggtgtcccgcggcggccaaaccantcggcagcagcccaggtgccttgctcaccccaggcggtctcatggcacgggcctctcgaaactgtgggcaagaaagggtcctcgtgagaactaggctcag

SEQ ID NO: 331171 - DNA, 439 bp, Homo Sapiens
  misc_feature (405)..(405): n is a, c, g, or t
aattgagtttcagtgttagagaattttgttttattgttttggtggcatgggcataattggagaaaccattggggtattcactagtaacctacattgttagtttccttggttccagcaggtaatacactgggttccgtcaccctgggagatggctacggggaggctgagtgacttcccaaagtaataaagagtttgggaatcagaattccagggtctgactcccagcagactgttctatttccttacacacctgcactttcatcaatcttctccagctccaatttcttgtgcccctttcaacagcatctgcagggcagggatgatcttttcccggattaaaaccagttgcaggaggttccctgtttgcttcccttttggggtttttccccagggggagggggaagnacagaggcagcttgcattcacatgggccccattt

SEQ ID NO: 331172 - DNA, 418 bp, Homo Sapiens
agcttgcaattcttattacatctttattatcagtcaaggtcacagtcatattaaaaatatataatttaattctcaaataatgtctttgttcctctttttcctaaagtcctttgtcaaaagaagtcaaagttgaatatattttgtagctgatatacatatgctgacagacagcacaatgttctgaaatggaaacagagatattattgctttataaaaagaaacttggtcccagagaggagaaaaatagatagtacacaagagtgacataagaaaaaaagcaaagcattatcggagaattgtttccatttaagtgaaagcagtatctgtgatttttggctgactgctccaagtaccgtgtatctcctacatcagtgctttgaatgtattcttctataaatgcatgttaaattaatgtaac

SEQ ID NO: 331173 - DNA, 760 bp, Homo Sapiens
  misc_feature (298)..(298): n is a, c, g, or t
  misc_feature (438)..(438): n is a, c, g, or t
  misc_feature (483)..(483): n is a, c, g, or t
  misc_feature (492)..(582): n is a, c, g, or t
  misc_feature (613)..(709): n is a, c, g, or t
aaggaaactattgcttgggaataattttcagtttacagaaaaattgcatagatagaaaagagaatattcatggtacccacacccagtttccctgcacattaataactgatgactaaactcccaggctttatccaaatttcacctattctttctgctccagaatccagctcaggctcccacattgcacttggtggatttaacttttgagccaccactcccagccccgtttgttttcttgaatagtcctttgcagaaaactggagacttatggacctaggggcccagctgccttcaaaangatgtttggggtccctttacaagtgagaggctatataggaatctgcaatttaagacaggcaaattcttgcttacaaatttgggcatttctggaagtccagtgtgcctctagattatttataaaaggacagtttgaaaccnaattaagacagtcacttaatatgtcatatcaggtccgggtacacntggcccatnnnnnnnnnnnnnnnnnnnnnnnnnnnnnnnnnnnnnnnnnnnnnnnnnnnnnnnnnnnnnnnnnnnnnnnnnnnnnnnnnnnnnnnnnnncgttgctacagaaaaattttaaattagctgnnnnnnnnnnnnnnnnnnnnnnnnnnnnnnnnnnnnnnnnnnnnnnnnnnnnnnnnnnnnnnnnnnnnnnnnnnnnnnnnnnnnnnnnnnnnnnnnncatgccactgtactctagcctagatgatggagcgagaatgtgtctctcttt

SEQ ID NO: 331174 - DNA, 802 bp, Homo Sapiens
cagagtctgagagcatttttattacgggcagcagaacgggatcgcagcatcttagaaagcctattctctgccgtggtggggagtagggagcagagggaaggacccagcacacttcaagaaaccaggcgggtgtgaattcctgagtgagcttggggcagcagtgggtggctgctccacagctcgcccctcctccagaggacccagctttttggttttggagcagccagggctgttcgccagcttgctcagagcctaccctgaaggcatggctggcaggagcaagccgcccaggcccaaaggagagacacccactggctcgaaagccaagcctctgctgacggggccaaccctggggtgccagtgccagggctgagagtccctgaggggctgccggcacacaggtatcctcccgtgatgagcagagtgcagtgaggggttgacaggcaggcagagctacgttggcagaaatacgaagcaatgggacagtttccaagaatggcaacatttctggatccagagaagcaacaagaacaaatggtggcttgtttggatagctgacagaatttggcattttattacaaactggagtgtgagtgaaataaaatccatcatcacttttctgctaatgaagacagatgtggaaacgccagcccggtgcccttgccatcccgggcacaagggagtctccagaaacctgcccttggcgtacctaggacaaaagaagccgagttcgtgtacacaccgcaggggccatgcgcctgaacaatgttaggctgccgaacctgcccatcactccccactt

SEQ ID NO: 331175 - DNA, 529 bp, Homo Sapiens
  misc_feature (459)..(459): n is a, c, g, or t
  misc_feature (472)..(472): n is a, c, g, or t
  misc_feature (495)..(495): n is a, c, g, or t
  misc_feature (515)..(515): n is a, c, g, or t
ttttctatgtattcaaactatttattcaaaatataaatcatcaacataatttgccactaatattcagtcccttcacaggacacgtgattcactgggagttaataaattagcagctggcaggcagtgacacacagcaaaaatgaaaaccaagaggtgaaatagttctgaaataaaggttttaaagctaacagaaatcactgaattactaaggtcattaggcactaattttgagccaactaactaattaatatgagatgatacaacgtcctatactttgggtatatacagactatgtttaaacaatgtctgtaacgtgactttcaaaatgctcctgggcttttacaaaggatgtggattaaggatgtaggtaatacatggcttaaaccattttccccctggcaaagcatgtggggtaacttttcatcagtcacattggggaggtcccggaggataaggggnaagggtcgtgggnttccgctgggggactttgcccgnggttggactccctcattttnccgtttccccggcc

SEQ ID NO: 331176 - DNA, 275 bp, Homo Sapiens
  misc_feature (26)..(26): n is a, c, g, or t
  misc_feature (59)..(59): n is a, c, g, or t
gggaaagccttcccctagctgtgaanggtgcctcctaggccaacttccagaagaaatgnaagataagaagttaatgccatgattaataataacatgaagagtttaatttttattacacactcaatttcccatgcccctgatttctccttagctcctataaacacatgtaaatcttctgcagagctttaaagagctctgaaagggaaaacacctttccatatatggaattgatagcatagtaaggccgtgtgcagtggcttatacctgtaatccca

SEQ ID NO: 331177 - DNA, 409 bp, Homo Sapiens
  misc_feature (24)..(24): n is a, c, g, or t
  misc_feature (33)..(33): n is a, c, g, or t
  misc_feature (62)..(62): n is a, c, g, or t
  misc_feature (98)..(98): n is a, c, g, or t
  misc_feature (198)..(198): n is a, c, g, or t
aaacagcagcccccgccccctgcncctgcacangcatctgggggttccataacacaggtgcnaatactgaccatgggccctggagggacgtctgcacncccgaagcccctgtacctcaaactcagagtttcgttcccttctttgattttctggaggacctgcagctggccttcctgagacaggctccattcctgttcncatcttccttcccggcagccttccctttagtgggtataggttttgacgttctgagttactttgtatcaaagagctaattaaaaatggtccttcaaaaacataagaaaaacagcttgaaaaatgtacatttctatttttaaaatcttcaaacttccacggggggtggcaaatgttaattctgattttaaaccccattcatacctgtgccgaa

SEQ ID NO: 331178 - DNA, 824 bp, Homo Sapiens
  misc_feature (764)..(779): n is a, c, g, or t
tgaggctctgtcgtgttctgaggttgttttctgaacacatcacatcttcccatctcccatctttccttggcacattaaccacacaaggatccctcacatttaattggtgggacaaaccttcattgggcttctacagaacccctaagcctactttttcatctcatggcagcatcaggtataaatgttgagtggctaaaataagtagaaaccagactgtgccaagccagtgggaccctctgactgtaaagctatgactagagaaatcaactggttcaggagctctccgagttggacttgtttagctgctcttgattctgactcagattggtttgggtgactggagagactggtcttccttcttcaaggcctgaaatgtcttaagggagaccccttttgtatttacctgaagcctagatcaaacactcacctctggcagatccaagcagataaagactcattagccaagagaaacctgttcatctggatttaggaaaagaggggaccccagtgtgggccacagcttcttcacagagctatgaagcaaactgctgagcaaaagcttccagtgctgaagcagagcttctgggaattctagaacctcagaagtaacccatgtttcttcacaatgggttgggctctgaggttcttgtgtacctgttcaggcaagttggcccttagcaacccactgcttatttcactagtgaagaccaatgattattttctgtgtgcagggtagtgtgttggggctatctgccctatctttnnnnnnnnnnnnnnnngtattaccaaaaagcacatattttttgtaataaagtttaaaagat

SEQ ID NO: 331179 - DNA, 162 bp, Homo Sapiens
atctttctgaatattttattagggcaaaaaaagatatttgcatgggatgcttcttaagtcatctcaagtagttccccttcagttcttaacatgcactctcaaaatcaacacacctaccccaacccaatactcatcgcttcacagtcatccagtaaagtacaa

SEQ ID NO: 331180 - DNA, 282 bp, Homo Sapiens
  misc_feature (136)..(136): n is a, c, g, or t
tcctttttgtatttacactgaacgccaagaagctatgaaatggatttttaatgaacttttctattcatggctgactttacttacacatttggcttctgttaatactgatttaaaactacaaataggccaggggggntggctcatggccagtttagtaataatcttaactccagctttaaaagtcataaatagaatgtacttgacaatcaggagaaaagtaagtgatgggcttatattgtcccttcaatttcaacatgtaataaacccaattttaattgtaaa

SEQ ID NO: 331181 - DNA, 509 bp, Homo Sapiens
caaattcagagcatttttattaaaagaacaaaatattaaggcacaaaatacatcaatttttcaaatgaaaacccttcaaacggttatgtcctacattcaacgaaacttcttccaaattacggaataatttaactttttaaaatagaaaaatacaagttcttaaatgcctaaaatttctccccaaataaatgttttcttagttttaatgaagtctcttcatgcagtactgagctccaatattataatgtacacttccttaaaaatctagttttgccacttatatacattcaatatgtttaaccagtatattaaccagtatattaaccaatatgttaaacttcttttaagtataaggcttggtattttgtattgcttattgcatgctttgatcatacaaagacacaagtaccagaactagtgattataaatctagcatagcatctgtcaactttagtcatgtacagcctagtgcaacagactcgaacttttttttaaaaaaaggatacata

SEQ ID NO: 331182 - DNA, 502 bp, Homo Sapiens
cctttttgttattgaatctgttatagtgatctctaatcagtgatctttaatgctactgttgtcattgttttgggaaccacaaatcacaccaggataagacagcaaacaattgacaaacgcgtttgttctgactgcccccccaacaggccatttctcttctctctctttttctcaggctgctttttattaatattaaaatgtggcccaattaataacccctacaatagccctcctatatgttccagtgaaagaagagttgcatgtcctgtcactttaacccaaaaggaagaaataattaagccttagtgaggaaggcatgttgtaagcaagacaggccagtagctagacctcatgcaacaaacacttagccgagttgtgaatgcaaaggaagtgttctggaaagaaatttaaagtactgctccagtgaatacatgaatgataaaaagctaaacaatcttgctgctgttatgaagaaagtttagttggtctagatagaagataa

SEQ ID NO: 331183 - DNA, 496 bp, Homo Sapiens
  misc_feature (353)..(353): n is a, c, g, or t
  misc_feature (481)..(481): n is a, c, g, or t
ttttttgttccttctcccaaattatatatgtaacgtgggaaaaagcaagttgaaagatgagtgtgctgctattaggggaaagacaggttaaataagggaaattattctaaggttgacttgtccatctctcaaaatctgattgtgtcttctcccgaattttatcttcgatactgagccactcttttccctgtgccttcccaaactctgtagctattccttttattttcaattgctccctaatgcatcttttaaacaaccattaaagctgtggtacattacttataataagtactcaatacatgtttcttcacgttttcagtgccttacattaattttaaaatttgaacttttangatgcactttcacttaggatgtttggacctccgtagcagctctgacaaattccttccgtaccactccattcactaaggttatatttagctagtgaggaaactaaaacgtaaaagttgagccacctcantccccaatcctcatg

SEQ ID NO: 331184 - DNA, 300 bp, Homo Sapiens
  misc_feature (242)..(242): n is a, c, g, or t
  misc_feature (270)..(270): n is a, c, g, or t
gtttacctacagttgcagtaccaatcctttcttgaggagttttaaatgcatggttgagcaattaaattgtatgaggatgtgacatggattagacaatgtcggtagtaccaaactatttcttggctgctccaacatgcggagatgacactgcttttatctcatgacagcccaaggggaatgttttactgactatggacttatagcttggtggaaattaacataggacgttaattagcaaaagnatccaaacagaagagtgaatgaaaattnaaaaataaaacaataatgggggtataaatc

SEQ ID NO: 331185 - DNA, 439 bp, Homo Sapiens
  misc_feature (233)..(325): n is a, c, g, or t
  misc_feature (328)..(341): n is a, c, g, or t
ttaaagaaatgaggttcactatgttgcctcgactagtcttggttccggtactcaagctgagtatgggaattaaaagcatgagcccaccacccaggcctatattcttttttacaatttatccctaaacgaaactttgtatctctgacataagtggaaaatcactttcacatggctaaatacaggtagctgtaaaaatcaaatacaatttatggccagtgctgtggctcacacgnnnnnnnnnnnnnnnnnnnnnnnnnnnnnnnnnnnnnnnnnnnnnnnnnnnnnnnnnnnnnnnnnnnnnnnnnnnnnnnnnnnnnnnnnnnnnttnnnnnnnnnnnnnntaaatcaaatacaatttacatcaaataaagtgatccagttctgaccagagagaatggtcagcagagagtctggcattctagacagggctgtgccgaat

SEQ ID NO: 331186 - DNA, 455 bp, Homo Sapiens
  misc_feature (17)..(17): n is a, c, g, or t
  misc_feature (367)..(368): n is a, c, g, or t
  misc_feature (372)..(372): n is a, c, g, or t
  misc_feature (416)..(416): n is a, c, g, or t
  misc_feature (419)..(419): n is a, c, g, or t
ttttttaaacaatctgncccatgtttctgtaagggctgctgtactttgctgggcttcttctccagttcctagtctccttggattttccagtacctggagctatcaccagtgaaggctgtgaaacagcaaagatgtcatcctgcctcttcctctgggagctccggcccagcgaggtacagacctgttgccagcccaaatgcgcctgcaggacaaggctggagaccctgggttgggaggtctcacccagtcaggaggaacgggatcagggaactgcttaaagaagcagtctgtccatgctttcacagatcagctgtgctggctggggcactgcttccacccctggttggtgtgggctctccaaaagctnnatanccggaacagctaagtcgcccaaacagcaaagatggtggcccctncancctccgggaactctgtcccagggagaattcaaatct

SEQ ID NO: 331187 - DNA, 441 bp, Homo Sapiens
  misc_feature (15)..(15): n is a, c, g, or t
  misc_feature (30)..(30): n is a, c, g, or t
  misc_feature (116)..(116): n is a, c, g, or t
cctcccagctccctnctgggaggaattccnctggcacctgccaaatgtgaactccttggttaaggggcccagtccctcgtgggaacaggatgcctggtttttccgcagcagtgttncacaagggcttccagtctcttcaaaacttgaccctgaacacggcgtcggggactctgacatgcggacgggagatgacttgacagggctctcctgagaagtgtcaaacataaggtacaaggcctgcttcttcggggcatcgtcgtcctgaggtaaggaggagccaattttctccatatattcaatttcataggagtttctgtaatccaactcctcagtgggtgaactgaatttggtctcgtttacaaaggtggacaggtccgagggctgcgggtagtcctgtttgtcagcctctaggtccactgtcatgcacgtccacttctggtt

SEQ ID NO: 331188 - DNA, 456 bp, Homo Sapiens
tcccctactgccagtaactacctgtcacatatttctcttaggacttttaaagatgagccattaaaatagaatgatccttatggaccaaaacttgaatcactgcaaaatgaatccagattgctgtcattttcttttccttttgggtggtggggccttgatgtagattttacctctatgtaccagaatttaacgttgaatatattaaaataacaaatctggccatggtttgcggaggttagatttactggaaatgtattcatactgtgaattgtgctctgatggttaaaagacaagattgtcaagcattccgtattaacagtggatgtagaaaattttttcagatggacaaaatgtatatggtacagatgtaaagttttctatgtaaaaaattctgtacaactttctgtacaatattgattcccatctggcatattctaatcaggttataggtcaata

SEQ ID NO: 331189 - DNA, 456 bp, Homo Sapiens
  misc_feature (286)..(319): n is a, c, g, or t
ttgacagttttcaagtattttatttgaaaagtagcaaaatgacagttgacatatttagattgaggataactataacattactgaatggattattattcttcagtgcgatacactctgatattcagccttgccctgagttaatcaaatcactggagaacaaaagcgaataacagcaggtctctcttttttattccaatttcttacatttattgtcaatgatgaattcagatgccagtggctgcctagaaagccactcttaagcaacaaggagtctgccaatccactnnnnnnnnnnnnnnnnnnnnnnnnnnnnnnnnnncctctatgttaatgaagcagcaactgtggccccctagcctcctccacttcaagtacaggtgttcctagcagattaagtcccttaatcctcccagcgacccctaggcatctggatgtggctatctggcattgggctcc

SEQ ID NO: 331190 - DNA, 477 bp, Homo Sapiens
  misc_feature (34)..(34): n is a, c, g, or t
cccttggtcccacccctgtgtgggggcacggccntcggacaatgggctctgctccccgtccgtgggctgaagaaaggagcagggtggggctgtgcccttgggaaaaggaggcccctccccgaacatgccctttgtgccgaggtcccctgtcccatgcctgttctcccatcccccgggaccttacggccgatgggtggcccaccagagccctattcccaagagtctggtttagggctgggtcttcccatcttcacctctgagtcttaggcgatcgtgaccacgcagccccttccaggagtctggtttagggctgggtcttcccatcttcacctctgagtcttaggcggtgcatgaccacgcagccccttcccggagtctggtttagggctgcgtgctcaagagtctggtttggggctgggtcttcccatcgccctggaggaggcttttgtctcatctcatgattcacattaaactctg

SEQ ID NO: 331191 - DNA, 230 bp, Homo Sapiens
gttctaaagaaaacattctgtctgatcagaggaagatgtatgtagaaaatcagaatctgactgaattcctaaaatctattacactgagaggaaaatggaaaagaaaatgtttgcataaagcttttccctgactctcagaggggttcagaaccagaccaattgactcctgggtctcactgcagttccactctgcactgttctattttcagcaccaactccactctatgaca

SEQ ID NO: 331192 - DNA, 340 bp, Homo Sapiens
caaattactcttgtttggaaaacttgtaatagaattctgatgattatgaccttctgataatgaacactttttcctttagagtgatttaaaaatttctgtatttttgaaatcagtactaattgtcatttttttctctcacagcttcatattctccaattcagcctcattctctaataaaacatcagcagattcctcttcattcaccaccttccaaagttttcccatcatcagctgatattacaacagcagcaacagcaaatttagccaatcacacttcagaattcaactcaagacccacccccatcccagcactgtataccactccagttctgtgccgaat

SEQ ID NO: 331193 - DNA, 447 bp, Homo Sapiens
gaaaattgtttttattttaaatcaaagtaccaggcagatacttgcaaaacaacatacaaagcaaaactcaaacatggcccttccctagggcgcctctgagcaggcacagagaagttctcaccctctgcaaaatccaatccaatcctatcttctcagaaaaccaaaccaaaggcagccatgaaaacccgtgttctgtacgtggttgagaaggtcctcctctctgagtactggctggccccaaggcggcagaactgggaggtccagggaaccctggcccccgaggagccagcaggacctggaggagccgggagtggtagctggacaacaaccttccccacccactggcagtgtggttcgcatgaggatgagggcttctccagggcccttccccacgctggggcttggagtcctgccaaaagcagctgggttggcggtagatgtccccga

SEQ ID NO: 331194 - DNA, 604 bp, Homo Sapiens
ccttctaatacactggcatcacagaaatgtgtgaggcacagaattcggaacatgcttagaactcacatttactgagctggtaaaattctaccttgaactgtagatcaaacctcaaagcagctttcacttggaatttaaaaataaacagttcaaagatactctagattatcaccctataaacttctactccagttatggtttctgacatatgattagactgtttcaaatgctggcaaaatggttaatgaagtaagagaaaccagatcaacaacatatgttcaccttaaaccatctgttcatgatttcacccgtgactaactggttatgagataggacttaattaggttatttctgtgggtttcaacaaggggccataaactcagatcctacaggggccaggcagatgacttacctaaatgaagtggaacaggtggggaccctagtgcactgagcacagcttgcccttccaaaggagccagctgctcctcagtggctgctgctggtgctagggaggacccaatcttgctaaatgtgctgatatttcaagagaagtcagaaagctgggactttgtaacataagctcatattttaatatgttggcaac

SEQ ID NO: 331195 - DNA, 472 bp, Homo Sapiens
tgaacttttttgctgcaattgttgagcgtcaaaggctgaaaccactattatcaccactattactgccctcctctctgcatttgaacacccatgctgcatcctgcatcttgcctcttcctttatacttgctgctttggatgaggtcccatgtatcatcctcagccccgggattttcaggctcctagaagacatttcctcttactgaggcatggacacgtgcaattgcagccaaaggtgaattggttgtcaggtgttccttcaacttggctcctctctgccctctcactgcctcctgccatctaatcagctctacttatctgccccttagagggaccatctcttcagttattagccattcttgtgtacacacaacctgctggttttcacttccttgtatttgctcagacagttttttccactaagaagcagatgcctcaaaacccagatggacactgcctttcagaactctgcc

SEQ ID NO: 331196 - DNA, 391 bp, Homo Sapiens
  misc_feature (66)..(66): n is a, c, g, or t
  misc_feature (371)..(371): n is a, c, g, or t
agctaaatttcaaattcatttgaatatgaattgatatttacataatctggagtgaggcagagctgncatagagctggacaccataagggaaaggactatagattaactagataaaatttcacatcgcaattttccaaacaaaattttatcctgtttagtaaacatcacttaaacacaattttaacattataaatatatctgcacatatacatgtacaaatgtgttatttatgtagaaagagttaaaacagatcaacaggcaaaacatggcatttttgtacataagtgattaacaagggagggtaatgtggcttctttttttcaaaaacaggtcactaggcttgggcacagtgggctcacacctataatccnaggcactttgggcagaagtg

SEQ ID NO: 331197 - DNA, 526 bp, Homo Sapiens
gccaatgcattttcagctcttgggatgctcttcatcacattttcccatcgtttctgcgatgcctttgtgccttattgttaatgaaagacaatctataaatacagaaaaggccatattttaaggatttctcattggacaagcaaatatctgtaacataatagagtactcgaaacttaatttactatcctatttctctaataacaagtctcagatctaagagggaaataaggaagacagggaacaatatcaaacatgctcatcaaataactcaaagcaaacaggctaactccagtcatttgttaacaaattttaaggatcgtccatatatacgtgtggcggaaagcatgtgtccaggcaatgcaaacctgcaagaagaggacatgccctctgaggtctgaccctgccttcatttccagcctcagctcacatcacttttacctcgtggtctttgaacatacattgcccttttctgtctctaagcttttaaacattacctagcatactcttatctccagcttttcacttg

SEQ ID NO: 331198 - DNA, 480 bp, Homo Sapiens
  misc_feature (80)..(80): n is a, c, g, or t
  misc_feature (209)..(209): n is a, c, g, or t
  misc_feature (211)..(211): n is a, c, g, or t
  misc_feature (249)..(249): n is a, c, g, or t
  misc_feature (253)..(253): n is a, c, g, or t
  misc_feature (354)..(354): n is a, c, g, or t
  misc_feature (405)..(405): n is a, c, g, or t
  misc_feature (452)..(452): n is a, c, g, or t
gacacaggtaacaccctgaggatctggcattggcagcttcaggcctaactttcctggtcagggccccttaaggtggccgngcacattggtttcatttcgatgagactttgtcagaggcctggtctggtcctggccctaccgccccagctgtccttcagcacagctcggggtggggactccaggatgctgggtctgccccttgggagggnanctctggaaggtcagggtgatccacaactgtgagctgangttngatgcagctgggagcttgggacagagagagcccagggctcccctgctgtggggcacctgccagcgggtacatgagatgacagagacctccccggcgggttnacttcaggtggctacgaacatgggcagctcttgtttccggctggagccatnggccagagcagggctcagtttggccctggaaattggtggaatggaancgacgagctgagcttgaaagcccagaag

SEQ ID NO: 331199 - DNA, 365 bp, Homo Sapiens
  misc_feature (298)..(298): n is a, c, g, or t
  misc_feature (322)..(322): n is a, c, g, or t
  misc_feature (344)..(344): n is a, c, g, or t
tttttgaaaaaaagaactgggaatggcagtgtactgagcagtacatgagagccacagatctgacgcccttccccagatggagtaaaagggccccacgaaagctgatccatgtaagacatatgggctactatggagggtgactccaattgggtgctcctataggtctgtcttctctggctccagtcaactcctgggaacctcagcttaagattccacttgtgtagttaggaaagtagcttataacttgcttaagtgcctgtccttccttttccccatctttttaagtgtctttgatttnattttttatttttgggaacagggnttcatcctgttatccagggctngaattccagtgccaaaatcca

SEQ ID NO: 331200 - DNA, 357 bp, Homo Sapiens
tctgggccataggttggcaaacttgtcttataaagggcccagatggtaaatattttaggctttgcaggccatacggttgccgtcacaactactaactctaccattgtggtgtaaaaccagccatagacagtaagtaaaataaatgagcatggctgtgttccaataaaactttatttacaaaagtaggtggcaagatggatttgacctataggccataatctgccaacccctagtttaagcatttgctgtccacttcctaaaatgccagctccaggagagtaaggattttgtcttttttgttcaatactctctggagcaactactaattgcctggcacgtggtaggcaatccataaat

SEQ ID NO: 331201 - DNA, 417 bp, Homo Sapiens
ttttggctgtatttatgctaaacctttattacttttagaaagctgtacacttttttaaaaaatttgcacttataaataatagaaaaaatattagaatcaaaatttcgtcattacagatgggaaaatatgtactataaggaattcaagttaacagaggcttgatttatataaaagaaagctgcagttttaaagttgtgttccttaaagaccagattatagcttatctgaatgggcttgacactttcaaatggaataaagttacaatattaaacagattagggtaagaaaatctaaatctggcacatctctattatttgacagtgtttaaccaaatacatcatacagaatagaaggtgagtgccaggcccctgaggaggagctctcgtgttccacagcaaagcgctgcccaaggactgc

SEQ ID NO: 331202 - DNA, 271 bp, Homo Sapiens
  misc_feature (14)..(14): n is a, c, g, or t
  misc_feature (33)..(33): n is a, c, g, or t
  misc_feature (52)..(52): n is a, c, g, or t
  misc_feature (61)..(61): n is a, c, g, or t
  misc_feature (109)..(109): n is a, c, g, or t
  misc_feature (128)..(128): n is a, c, g, or t
cccaagcccccccnttccctactgtcctccagnaggaagcccagacaccacnaagaccacnatattattgtgtaattcccacgttatatgaaatatcccagaatagaanaaagccacagacataaaangggagatcaagtggttgccagcggacaggtggaggggaagatagggagtgactgctagtgtgtacaggcatttattttggagtgatgaaaatgttttggaaatagttaaaggtggtggttgctcaacatcagtgaatgcaacc

SEQ ID NO: 331203 - DNA, 357 bp, Homo Sapiens
cctgactgaccaggggctcttgggctctcaatgcaatagaaattgacatggggccaaaagacttttcccagacaaagcacgcgaagggtagaggatataggttagcatcatctggttgtgatgatcatctcgagtaatgggccacctgggtggtctggccagcggcaacaaggctgtaaatcaattaattattcagcattccctcccaagatgggacactctgcaatcttggttccctatttggatctcctaaggccagttcctggaattgtttaagtaaaagacatggttaagcattatgagagcacagaagaacaatacagaaaggccattttctttgtatgactaaagcctcga

SEQ ID NO: 331204 - DNA, 417 bp, Homo Sapiens
ttttgaactttgggaaaattatttatttctccccacgggtttcagacaagtaatttcacatttcattgtaagtcaagggtaagaaaacattttttgtacatccatcactaatagagatcacagtatgtcaatgaaatatttaaatacactgtacagagattgctttttaatggatttctataagtagtattaataggaaaaagcatataatacaatctactctgtatctaagagctttaatttattcaaatattggaagaaattcatcttctgaatttttcttatttaaaaagcattatgagaactgattcaaggatggaggaatcaattagtactcagcaattcacagacatgacataaacatggacatttttaaagacataaacaaagactgcatgttggcagcataggggacag

SEQ ID NO: 331205 - DNA, 698 bp, Homo Sapiens
  misc_feature (56)..(81): n is a, c, g, or t
tctctgtggtctttcaatgacttgacagagagttccttaaatgcttagatccaatnnnnnnnnnnnnnnnnnnnnnnnnnngagtgttctctccctttaagttcacttgtctagtgccactaggtaggcaacttcagtcagggggtgtgcatgtgtgaaacagtggccagcgctctggcagctcctcagcaatcaaaagtagtgaacgaaacacataacttcaatttttggaggacaaagcccctatttcctgccctagcaccagcaagctgcagcagaaactgccatcccaacagttggttaccacagggatgggagctagagaatgataagatgctattccaaatgccaaaattcactaaaatttaccaacttttttcttcatcaagcactcttctggacactgcaagtgtttcattagaccccagagtcctaaaatatcacctcaagcagttcttgccatctcaatagttactttggtgaagatactaactcctgaagttcctactctgtcatcttgacctatgtccttaattttcagcaccgatttagttgatccaaccctccttctcagtgtatgcgcgcacacacactcatccaatctgttctctacacagaaagaaccctttgtaagtgccagtgcctatgtttttttcacttaaaagataatttcattcttaacatggaaaaagcggagt

SEQ ID NO: 331206 - DNA, 452 bp, Homo Sapiens
ttttttcattttcataggtagctttatttggtttttagaaaaatatatacaataatcggaacatcagttcttaaatagttttaagttaaaagaatgcaagtgagaggatgtttccacagtcagatcaatactgcttaataaagtagataggaatttctgcaacaagtcaaaacatttacaggaatggtaagaactctgcaagagcagcttgtggctggcaagtcagccagctcagaaaacaggtaggaagggaaggggtttgatctttcccctttagtttgaatttgagaaagtgataaaagatttacatattcacctatcctaaaggctagagctttgagtaaaaacattagaatacagggatggaggcctctagcgatatgctaacaagctaacttatatcaaacaaaatttgcatctcatttggtatcagttggattggataataggat

SEQ ID NO: 331207 - DNA, 179 bp, Homo Sapiens
agggttttattgggtgaaaaaatgtctgtagctataagattgttctatcactagtagatggtcgtttttatatatttgaggataactcagcctgatatttcatacattttttcaaactagtattttggaaggtgtttccatatcatcatgcttgcagttcttttaacagtgttcttttc

SEQ ID NO: 331208 - DNA, 369 bp, Homo Sapiens
  misc_feature (217)..(217): n is a, c, g, or t
  misc_feature (297)..(297): n is a, c, g, or t
  misc_feature (320)..(320): n is a, c, g, or t
  misc_feature (333)..(333): n is a, c, g, or t
gctgctttatacacaggaatgatttattttacatactagtcagttacaacattagcctgtaaaatgaaatccattttttaaggtctcataaggcagaataaacttcataatattatgctttcacattagccagtctgataaagcataaacaacttaagactatggtaacagtttaaaataaaatttacagaacaggcactttgaagtcagctactgntgtgtaacttcacagttaaccgttacttgggacatatctcatttccatcaaagggttatcacccagtgaaggcaaatgtncctttgatgcaggacggcacaancagatttagggtnccaaacactgtattctgggttgtaatacatggcagg

SEQ ID NO: 331209 - DNA, 258 bp, Homo Sapiens
tcaaatgcgatttattgtacataaaataaattaattacagtttaagccaaagcatgagtggctttttaaagtgcatctgtggaggggatgtggcaggtagcccctgttcacttgctgtaagataagtgttttagtatttcagccacccttaggcacaactcagccaggcctaggaagcaacccaacgtcattgccatgaaccatttacacaagtcacaccaaaatcaactgacacatttttttcctgatggaacagtt

SEQ ID NO: 331210 - DNA, 680 bp, Homo Sapiens
  misc_feature (259)..(275): n is a, c, g, or t
cctgtacatatttttaaaagtcatgacaaatttctttaaaaagtgaagatccttatgttaaattttaaataaacagatatttcagtctacttaaaagtacaataataattttgatgaaagttttggggagttttcagtagtaaaattagttttactataaagtatgttcttttggaggaaaaccacggcagacagaaagtactcaatgagtgtttattttaattagaaaaagaaggaaagggtcaggtgtggtggccannnnnnnnnnnnnnnnnaaagtggatactctagggcaggaatcagcaaatgacagctcatcttgtggcctgatttttgtttttgttttatggcccacaagttaataaaggtttgtaaatgtttaactattatccaagaaaagtagaaaaaaagagcaaaaatctgcaccagagactgcacatggcctgctatatgagttttctgatgctgcaggacaaattaccacagacttaggcagcttaaaattaattacaattatttaataggctcactagggttctctggggctctctgggtcaaattatcacaaaggctggaaatcaggggtgttaggccggggctgaggttgtcatctggggggctttgcaggaaaaatccactccaaacttcattctcacttttgggcaggcatttcaggttcc

SEQ ID NO: 331211 - DNA, 373 bp, Homo Sapiens
  misc_feature (25)..(25): n is a, c, g, or t
  misc_feature (77)..(77): n is a, c, g, or t
actttttgtgtgaaaaccacattgncgaggttaatagagaaatcggaaccccttttacattgcaggcgggaaatgtnaaggtggtgtaaccactatagaaaacagccctagtggtttctcaaaaaattaggcataggattaccgtgtgatccagcaattcccacttggattccacaaaagaatccaaagcaaggactcaaacaaatatttgtacacccatgtttatagcagcactacatataatagccaaaacgtggaagcaacccaagtgtccatcgatgggtgaatggataataaaatgtggtatatacagcagtggaataatattcagcctttaaaaaaaaggaaattctgggtgggcacagtggctcat

SEQ ID NO: 331212 - DNA, 138 bp, Homo Sapiens
gactgctaaatgaccttgaaattttaatactgtcaaactcaaatattagttaagcagtcatgttctaaagataactaagttgaacaataagaatatactacttacatgaccctccgtgcttgtcctgagattagagat

SEQ ID NO: 331213 - DNA, 131 bp, Homo Sapiens
tggggcttttctgtataaggaataacttgtccgataggtttaggatgagaccaccaaactcattttcacttgtatcttaacaggcattgaatccagctctccagaggtgaaaggctattggggtaatgatt

SEQ ID NO: 331214 - DNA, 435 bp, Homo Sapiens
tttagtaatacaaaattatttattagtaaaaaaggagacagcatttgttcgttatacaaaaagtaaaacaattgaaagtttcctacaaaaatttaaactatgagcatacaaagtaggagtggcgctgtgaccgggtctgaggacttcatatgaatgcttagcatcagaaaattggaaatagtgacatgtaaactgtgcttgggatattgtgttaccaagttgcatattttgcagtgtcatctagacgtggtagaaaaatagatatacccatgtcatgttctgaattactgtaatttctattaactatagcagatgtcacagtttgtttccctcttatagaaatcactggtggcggctgctgagggggcaaagtccacacagtctgtgctcgggtagaagtactctgctgcctggagagcatccaagtcctctgcc

SEQ ID NO: 331215 - DNA, 337 bp, Homo Sapiens
  misc_feature (304)..(304): n is a, c, g, or t
ccaggtttcttttcaacaatgtcagcctgggtagaagacccaatgagaataatgctgatcccactgtggcatggtggtagcgtgatgacggctgacagctagactagggaggaaggccagtttgaggcaatgaagactgtgttcctaggggtcacctggcctcattgcccaggaatatgagtttctgcaaccctctcgtgggcagaagaaaccaaaatctatttgcctagagaggagcaggaaaggctttaacctagaaaacattatcttccagctcgtgccgaattcttggcctcgaggggcnaaaattccctatagtggagtcggtaattaaatt

SEQ ID NO: 331216 - DNA, 378 bp, Homo Sapiens
  misc_feature (41)..(41): n is a, c, g, or t
  misc_feature (208)..(208): n is a, c, g, or t
gccctgagcccactgtaccctggccccaatatcttaggttngtttaccccatatagtattataggtctgccatgtagtagtataggttaagttcctgggaaaggtcattttccttacaaaagcattgttatgcctacagcgacatactccttgggccaaaaccttaatccatagaaatggacatcctaaatttattcaactttaaatngacaatcacactcagagtacgaagctttctcaataatattaactgaaaattatgcaattatttcatacggttcattaccatgtaatacttctaagagctggaaatggacgaaccaagagaatcttgtacccaagtacatcagcaaacaaggccgaagagtacatgggttt

SEQ ID NO: 331217 - DNA, 403 bp, Homo Sapiens
  misc_feature (382)..(382): n is a, c, g, or t
aaacaacagaaatttatttctcatagttctggagtctaggaagttcaagatcagggtgccagtgtggtcaggttctggtgagggtcctcttctgaatgcatactgcctcctcactgtgttctcacatggaggaaggcggaattactttccttaatagcatttaattgttaagtccgtcagattttggtggtttgaaaagatctttgttctttgatttcctccaaatattatttggatttctaggtttagattcaacatagaaatatatccatgattggttgttttttactattgagtatccatggtgtactaggtgtttggaatggcaagctagatttccagtactgttttagtctcttggagaatttcttttaagatttcntagatttttaaattagtatcc

SEQ ID NO: 331218 - DNA, 236 bp, Homo Sapiens
acttttaaaactttaccaaaaacaaagacacaagccggacgcaatggtgcacagctgtagccctagctacttaggaagctgaggtggggggattgcttgagtcctgaaatttgaatctagattgggcaacgttgtgagacctcatatttataaaaaaacaaaactaagacacatacacacaccttaacctaggcctgcacaaggtcagggtatgaagctcatggtgctagctctct

SEQ ID NO: 331219 - DNA, 728 bp, Homo Sapiens
  misc_feature (25)..(25): n is a, c, g, or t
  misc_feature (28)..(28): n is a, c, g, or t
  misc_feature (41)..(41): n is a, c, g, or t
  misc_feature (695)..(695): n is a, c, g, or t
  misc_feature (700)..(700): n is a, c, g, or t
  misc_feature (714)..(714): n is a, c, g, or t
ctttggtgagcttcggcctagaagngtntctcggaaatgtngaaagcagagaaaatactaatgtccacacagctgcagcctcctcatccttcggaacattccattctgacttagaattctgagcgctggggcagaagacaaaaagaatgtgaattagcattttaaaaataggggagtctaacaacaccattgctttttattctcattacttctctttcagtggcttaggatctgattgctccctcacctctaaagtgtttccaagtagagtctggcagtattagtttcccccacaaacaaattcaggtagagaagttgtagtcgaagggaatgttgggactcctcactgcatggtccctggggtgtctggctcatccccatcatgacatgagttggtagcagaggactaggtgttaggacagactctcctcacctcagttgctgctgctctgggccaggaaatctctctatggattccctcatctcctgccacactgctgcagcattcaagtgtgctatgagagctgtatgtgcccaggggtgggccctgccactggcaccccgagcccaggacgcattctggtcatctctgagcccacttgtagtgtagcttcttctgttagagatgttagccttttctctctgtggcgacttttctgccttcccttcttctggtttttggtaaatgcctcctnaggcnacctgtgcaaggtnaaagttagactacc

SEQ ID NO: 331220 - DNA, 659 bp, Homo Sapiens
  misc_feature (468)..(529): n is a, c, g, or t
tctcaaggaaacatccttttataatcaccctcacgcacgccggcaggtcagtagcagtcagtccatttcaacaagacaagattaagtgctggaagggatggctgtggcctcagacactggggaagggtctcagcttctgaatcacggatactccctatcctgcctcgtcaggccagcggctccggccagagcccgcgggccctgcacgcccagcacagtggtcaccaagaggcaggctgggagactggagggagtcggggaggcctgttttcccttcggttcatgaacaaacggaactacagtgaacaaactcattcataacctgaatcgtcctggtctaaagcttactttgagttcatttggtgtgcaatacgttatttttttaaaatgaagaaaaatgatttcaattgcacagagcttttacacatagtcatctatttaagtgctttccgtttaaagcaaagtacnnnnnnnnnnnnnnnnnnnnnnnnnnnnnnnnnnnnnnnnnnnnnnnnnnnnnnnnnnnnnnaaaagcagctccgtgccacttcaatgtgtcttgctgaatggtctcttgtttcaccagcagaagtcccaatgcttccgtacacactgtgcttctgattaatttccatagggatgtagccgtgacattggga

SEQ ID NO: 331221 - DNA, 400 bp, Homo Sapiens
  misc_feature (263)..(263): n is a, c, g, or t
  misc_feature (276)..(276): n is a, c, g, or t
  misc_feature (283)..(283): n is a, c, g, or t
  misc_feature (327)..(327): n is a, c, g, or t
  misc_feature (343)..(343): n is a, c, g, or t
  misc_feature (374)..(374): n is a, c, g, or t
tagcttcttaaggtccttttcttctgtcttagcttttccaaaattagttccttgactcatctctgctgatgaaacagggaaatcagaggtatccacatcatcgtaaacttcatctcccatgtccaattgtttaggaggagcagggaaaccatcatcagcatcttcctcttcaatcccatcataaatgtcatcatctggtggtggagggaatatccctccactttccactctgactgtggctgctaatatcatcctggctctgnaacatcatcatanacttctnggtcatcttcaataggtcttgaaggggcaccaagagagtctttnttcagtttcaaagaancataggtcaatctctaacagcagttggtttnaatataggccatatggaacccctggc

SEQ ID NO: 331222 - DNA, 445 bp, Homo Sapiens
  misc_feature (321)..(321): n is a, c, g, or t
tagtatgatgatggtcactgagagaccttagagataatttattactttgaaaggattatcatccagcagaaaagatttaaaaattatgtttaaattggcccaaagcagacagggactggtgaggggagttcaaaagagagacctcccttgcagataggcatgagtgacaatgaggtggaggttggagtgggcagatccaggaaggaggagaaggggacccttaagccacccttcccttatgaacagactcttatcagtggggatggcctcatcttctgagtcctattcaatgtggcaagactttctttcactcccctcctngctatctttcttcctgtttatgatcaccagaacaattttaggaagaaattgttctggcaatgttggttaaatagctccatctctggttctctatttgaagccgacttcttaattatgcaccatt

SEQ ID NO: 331223 - DNA, 265 bp, Homo Sapiens
  misc_feature (122)..(122): n is a, c, g, or t
ggcacgagctaggaaagaccccagcacgacaaaagatgaaaagatatcactaggaaaagagagcacgccttctgaagaaccctcaccaccacacaactcaaaacacaacaagtcaccaactnctcagctgtcgctttgccatcctgaaagagagccccaggtcacttctggcacagaagtcctcccaccttgaagagacaggctctgactctggcactttgctcagcacgtcttcccaggcctccctggcaaggttttccatgat

SEQ ID NO: 331224 - DNA, 378 bp, Homo Sapiens
  misc_feature (71)..(71): n is a, c, g, or t
  misc_feature (77)..(77): n is a, c, g, or t
  misc_feature (83)..(83): n is a, c, g, or t
  misc_feature (107)..(107): n is a, c, g, or t
  misc_feature (121)..(121): n is a, c, g, or t
  misc_feature (133)..(133): n is a, c, g, or t
ccaaccctcgttgaagcaatgcccaagtatggcaacaatgtggcccccaacaggcaacatccccaggtcantggganaaaganggtaactgtaagaaacttcctaangccctgaacccccnagtggatgttancctcaaaactttgtgaaaagaggacatgtcaatgacacacacagcttcccttacagcacttgacttcagactcccacgatgtcaaaccaatctggcttatagaaagtctttctctgctccaatgcccaggaggtctacggaatggaaaaatcacaaggccctgtagagtttagtgtagtccacgtggttctttttcttctgtgaacacattctagcccttgtcggggggaacaaagtactttggc

SEQ ID NO: 331225 - DNA, 385 bp, Homo Sapiens
ttaaccctggctgtatgtgggaaacactcaaggagctttaagatacaaaacactgccaggctcccttacccagtcagtcaaatccgattctggagttgggacctaggtgtgtgatgagaactgctgagtcctgtcgaaggttaagctgggcagcactgcttggcagccactggaggtgctgttcccacccatgtgcagctgggcagggtccctaccccagggcagcagttaatggcctagacacccctggcatatttgagatcaagaaatgtcagtagtggttaataatgtgaattccacagtctgtatctttcacacttccattctctgcttttaaggtgagattctaagtactgtggacccataatctgtcaggtagagtctg

SEQ ID NO: 331226 - DNA, 424 bp, Homo Sapiens
ttttccttcaactttttttattatggaaaatttcaaacaaacacagtagagaaaatagtatcatgaaccccatgtacccttttcagtcagcttcaataattatcattgtatggataatcttttcatctctatacccatctagccccctatttctcaaattcttttgaagtacatctcaaaccttatattatttcgtatgatcatctctcacagttctgtggcaggaatatattgttgggggatgggaatggaagcagagacggggggaagagaccattgcaacagtccaggaaggggaagatgacctgaaatatatggtggtaggagtgggaatgatgaggagtggtcaaattcaggtacacagtattttagatgtaaaactgacaggaacggctgatggattagatgtgggaggtgagggatt

SEQ ID NO: 331227 - DNA, 543 bp, Homo Sapiens
  misc_feature (15)..(15): n is a, c, g, or t
  misc_feature (42)..(42): n is a, c, g, or t
  misc_feature (77)..(77): n is a, c, g, or t
aaaaccgatgtatanggtgaagccagttttaaaattctaaantactaaccatgtatttttaaatatactataaaccngcttttcatccagtggtatttattttttaatatatcctcaactatcactcctgctttccaatatgccttagaactagttttcctaataggcatatgttcttttcttcataaataactgtttagtccttttcttcagattcaaactatactgctataaactcctagaaagcatatgtctgggaggaagttaaatttatttttgatctcttatttttaaacaaatttactttaattagagctcattaagtcggattttatatactaacactaccaattgaaaaataataaaaaatgaatgtgaagtaggcctaaataagtcaacgagattcaaaactacaattgaaccagatttttctgaaatttctccaatgtgttcagttatacaaaactggttttgggtaatatgacacctgtcattgaagttaccccttcatccgagtgcaaatttaggaggaattttaattta

SEQ ID NO: 331228 - DNA, 378 bp, Homo Sapiens
  misc_feature (37)..(37): n is a, c, g, or t
cagctttgaataaaatgcttgttccagagccccatgnaatcccagccaggcacccctcctttcctggggtaaaggttttcagatgctgcatcttctaaattgaagcctccggtcatactagttttgtgcttggaaccttgcttcaagaagatccctaagctgtagaacattttaacgttgatgccacaacgcagattgatgccttgtagatggagcttgcagatggagccccgtgacctctcacctacccacctgtttgcctgccttcttgtgcgtttctcggagaagttcttagcctgatgaaataacttggggcgttgaagagctgtttaattttaaatgccttagactggggatatattagaggaagcagattgt

SEQ ID NO: 331229 - DNA, 370 bp, Homo Sapiens
atcttttatttcatgtgtatgtaactactaaatttttcatgactgaagaggttatagcacatattagttagtgctaatattctactgaatataatttaagcaatgggctaaggtccaagaaacatggcaattatatctacaaataatctattaacatgatcttcagaatctctagtttttgttctatagataaagccataagaatcctttcctaccagtttttcctatatcatttagatattatttcctagaaaacaggatgcctgtcactgataagttagagaaaacacccaaattatacttgcactatggaaagacgacatgaatatgttgactgggtactttctactctcatttttgttagcctatg

SEQ ID NO: 331230 - DNA, 432 bp, Homo Sapiens
aaaaccttatttttatacatgagagtaaataaacatattttttttacaaaaataacttctgaatttatcagtgttttgccgttaaaaatattcctctatagtaaattatttattggaagatgacttttttaaagctgccgtttgccttggcttggtttcatacactgatttatttttctatgccaggcagtagagtctctctgcctctgaggagcaggctacccgcatcccactcagcccctccctacccctcaaggatttggatgaaaattccaaccatgaggatgggtgcatcggggaagggtgagaaggagagcctgcctgctcaagggatccaggctcgtagagtcactccctgcccgtctcccagagatgcttcaccagcacctgcctctgagacctcgctctctgttccagcaaccctggttgggg

SEQ ID NO: 331231 - DNA, 377 bp, Homo Sapiens
  misc_feature (246)..(246): n is a, c, g, or t
  misc_feature (296)..(296): n is a, c, g, or t
  misc_feature (312)..(312): n is a, c, g, or t
  misc_feature (336)..(336): n is a, c, g, or t
  misc_feature (363)..(363): n is a, c, g, or t
taatacaaagatattttattgaattgctgcacaaccagttgaagatgatttgtaaacatgtaaattcctacaatttgcattaaatgtcattgtagtttctataatttgctctttgaattaatgttttattcactagtattcttaaggtagtaaaaggaagatgtaagtttgtatttcttgcagaaaagttatgagtctctaatgctgtgctacagaaattcttttgcgagtacacactttattcangtattgcaaaaagctaaggccacttttttttcaagacaggaaactggacnaaaattgtttttatcnaataggccacaaccactcttatgnggcaatggaaatctcttttggaaaggntaatttctccgggg

SEQ ID NO: 331232 - DNA, 440 bp, Homo Sapiens
cgggtttcgggtttcaacacatctgggggaaccgagggttaaaccaaaataagtctccccatctgcaggatttatcagatcctttaatatgctaatgtgaaatgaggcttctccttgggaccctttgtcttagaaaactgcttttaacacctcccagaacaaacttcgagagtttgggaacagctgaggtagagatggagggaagattgcccaggaatgcacctactcccacagagggagctgaggaaggagggcctgagggagcctgggttctgtcattgtcactgtttggttttgaggcaattttctgtcattcttgtcatatggccataattataaccacctctgtagccactatttatgatttcaaaggccgtgctgggtgctttaatacactatttctatccttaaaaaatgtttctttagtaaggtaattgcta

SEQ ID NO: 331233 - DNA, 444 bp, Homo Sapiens
  misc_feature (17)..(17): n is a, c, g, or t
  misc_feature (43)..(43): n is a, c, g, or t
  misc_feature (52)..(52): n is a, c, g, or t
  misc_feature (108)..(108): n is a, c, g, or t
  misc_feature (116)..(116): n is a, c, g, or t
  misc_feature (130)..(130): n is a, c, g, or t
  misc_feature (143)..(143): n is a, c, g, or t
  misc_feature (347)..(347): n is a, c, g, or t
  misc_feature (350)..(350): n is a, c, g, or t
  misc_feature (434)..(434): n is a, c, g, or t
agccggatgcatctgantgtggactttttaaagattgcccccnataagctcntctgcaaaactttaaaatggtagcctcctgaatacagggcttacctgaagcaaagncctggaanatagaaacaattgnagaacttcatcantcctaagattctggaaattcaaatctgcaggcatcaattgaggcgggctctctcctccagggtctcccctcctgcaatgctaggactcacactggccagggactccatgtctcccggttccatctgctcgccatgaggaacactatagtaacaaaccacggtccatgaagcatttttgtaactttcagctggatggctgcaggnccncccaagggtgcacattcactccccaccctctctgcaggcaagcaacaccgatccgccccaccccagcctcagcgggaaggcttntcttcctcca

SEQ ID NO: 331234 - DNA, 526 bp, Homo Sapiens
ttttgggtttgatgcaaatctaatattggaacatacaaataaattgtataagtcaatagttgccaggatgtaagtgaaaatattactttgcaaaacgacattttaaaaaacaaagcaggatctcatttctatggtttatgcaatttttaaatattgtgttttccattttctccattactttttgtgtattatgcaaataatatattattctatagagaaatgaaacctgataggtttcttagcaatcatagaacagaatatcagtccccagccccttggaaagaacactttgtagatgaagtggcaagatagatttgacatgaatcaaatgtgttttctttgagaacttaatgggcaaaaacttagagattaaaaatgtgaatattaggtcattccaggtgggtgcagtaagggccctggagtagtttatgcacatgtgttccttgcctgggagatcaggggttttacacagttccgactcatgagattgatggcccagtttagacttctcttggaagacctactc

SEQ ID NO: 331235 - DNA, 334 bp, Homo Sapiens
gagagaagcaaaggtttcttggggttattaaccagtagtgtggaaatactagttttatgtggccaaggaaaagcaaaggcttttcttttcagtttgtgttatttggaagacagaaaaacatcttgtctacatcctttggctgtttgtaggatcacgttgtccttacgatactgaaacttttacagctgctgtaaattttttataaatgaatttcaaaatgttataatgggactgtaggttgtttttctacatcttcattatttggacctaaaaccagtttttaataagaaagtttatctttactctttcctgaaattatgactccagaaaaaga

SEQ ID NO: 331236 - DNA, 500 bp, Homo Sapiens
  misc_feature (171)..(171): n is a, c, g, or t
  misc_feature (383)..(383): n is a, c, g, or t
  misc_feature (427)..(427): n is a, c, g, or t
  misc_feature (432)..(432): n is a, c, g, or t
  misc_feature (451)..(451): n is a, c, g, or t
  misc_feature (457)..(457): n is a, c, g, or t
  misc_feature (468)..(468): n is a, c, g, or t
  misc_feature (489)..(489): n is a, c, g, or t
aagaggaacaatatcgctttttaatagtgtgacggtcggagagaaaaagggcagagggaggagaggggagaacaaaccagaggaggattgtgaatgcacataattccctgggcatgaacatttttgtgaaaaataaaagaaagaaagtagactaaaaaattaataacttgnaatgtgtgatcaataaaaataattatcatcttccactccatttttcataaggcactcagtggcctgaaagtaatttctgacatagacataggagcagagcattgcacaaaattttcctcttttaagaaagactttccttttccaatctcaatgtatttttttcctcctgtcttctacggctcaactgtttggggctaaagaccagtcagggngctaatttatatattcaatttggactccttgggggcctggcatncagtnaggcttccaatttttcccnaacggnctgcccattcngggggtcttggttagccttcntttttaatttc

SEQ ID NO: 331237 - DNA, 650 bp, Homo Sapiens
  misc_feature (418)..(418): n is a, c, g, or t
  misc_feature (626)..(626): n is a, c, g, or t
tcctcattctggtttttaatggtcaaggtgacaacaggtgtacagtttttccagacccatatgtaggttccataatctccacctgctggagaaaacaccgtgacagatgccattgccccagcaggccactgccgttgtgggaactttgggatcaaaagcaccaagccaagtcccttgctcaggatgggtcttggttgaaaccacaagcccttctgcagttctaggtggatgtagtgttggttcttggctcattgcaggggtgaagcaggaaagagaaagagactggtgaggcctgccttggaaagaggattgaggcacattacgattccaaacccaggagatcctgagtcagcactgattctgtctctggtttgtttaatacgggaaagggttccatccaagagcccaataggcctcnctctcccaaacctgcatagcaatcaaacttataggggtggtggagggtctttaccaggctaggactactgcctatgtttctgcaagtcacaagtcagcaggtcaaagaacaagtgtgaagcagaacctgctaagcaaagccaagtagtgacactcacttccaaaacatacccagcagaagcctcctgcaagtaccaacagtgacatgngcttgtagcacagaaaactccata

SEQ ID NO: 331238 - DNA, 314 bp, Homo Sapiens
tgaattgaaatgatgtgtctttatggtaggagctcaataaaaatcttagatctcttgttgacagtgcataaaagttacccagtagaggtcatacttgattaatattttccatatccctcttttctgtaagtatatagcttaataattattattcagtatatgaatataagctcagtaaaactgtatcttggattgttacaagtggtctgtttgctaccttctgtgaattaccaactactgtgtaaaaaataagtactggcttagtgaaatatttaccattaaaaccatactgagctgggctgggtcgcatgcac

SEQ ID NO: 331239 - DNA, 643 bp, Homo Sapiens
  misc_feature (277)..(277): n is a, c, g, or t
actaaaataaggttatttacttcaaaatgatacattggacataatctgtatatagaacaaagcaagtaatggtaaactcttaaggcaccttttaaaccagatgctgtacaaaatacatttagtgtgttacacgtcaaagacgaatctatatttttggtgttttacaattgcctgataaaactgcttgcttttacccttctttcaatgcctatgtacagtttcccctaatgaagcaataatgatatttccattttatacaatatatactacattttangtttttaaatgggccaggacaaaggtcactaaaagggcttaaataattccatagaaaacagaatacagagcataagctaaaattacaatagttaatcctttacaagagccatattcacatactttccttatgggaccatcattacacgtggcttcacaggatgctgtgctggattttggttcttaggaacacacctcctccctgcagtttccactgtgactctcacagcagcacactaaggcaagagacgagctgtggcactggctattttaacacctgactccaagtcagtaataaatatgaccacttttaaacactacaagggctatcataatcttttgttaaaataaaaatcatttctgctgt

SEQ ID NO: 331240 - DNA, 586 bp, Homo Sapiens
  misc_feature (112)..(112): n is a, c, g, or t
attgcttgtgatctgtccctctgattgtgttagaacccttccagccaggtccaggtccgttctgccttagcacagcgaatcaatcactgtgacatggagggtttccaaaagngaaaagatttgttcagaaaggtaccaagtgaggcaggagaacagctctcaaatccacctccctgaagacaaggctcggggatatttatgggttagggaagcagggtggtctaacgtgtggggaaaagtgattggcaatggggaaaaaatgaagtaaacaggttcattctgcacaagcatagtcggggttcatggcatctcaaaggaagtatgttcagtaaatggcagcattagcgtgatctgggggaggtggagcttttggccctccaatgtcaaaaggccacctctccggcacttgctcaggcccagttgaaggggcagtggtcctaactggtttgaactggacaggagcttgccctagtttctgaaaaacaactgttgcgaccattaccgtggtgacctatgaatgttatctgtaaagtagccagtgaaggtcaagttccagcattcaagtgcaaggcctcagcttcatgga

SEQ ID NO: 331241 - DNA, 644 bp, Homo Sapiens
  misc_feature (29)..(29): n is a, c, g, or t
gaaatattagtcagttgcatgcctttcantagatctcaacatgaactcctcttttctttaacacagatctgcataaggtattaccaaccaaatcctcttgatgagcaacacatttttcagctgccagtcagaccaactgctgtaaagaacttatatcaaagtgagaagccacagaaatggagagtggaaatatatagtggtcaaaagaagattaagacagtttggcaactgagtgacagctcacccatagaccatctgaattttcacaaacctgatttttcggaattaacactaaacggtagcctggaagaaaggatattctttactaacatggttacctgcagccaggtgcatttcaagtgaagtgtgctgatgaagtcctctataaggttcctgggaggcgggaggcggccagcctggttcatcagcatccagtcctctagtgctgccacctaatggacgcttaataatctctggatacttggaaattctgagatgcatttgtggccagtctccagcatgcacacaggacttggattatgcatttgtgtgtgacgtcttactctccctcccagctgctccttttgtctattattctaagacctgtctgaggtatgcatacacttctgcaagctggttctcaa

SEQ ID NO: 331242 - DNA, 467 bp, Homo Sapiens
  misc_feature (359)..(359): n is a, c, g, or t
  misc_feature (391)..(391): n is a, c, g, or t
  misc_feature (422)..(422): n is a, c, g, or t
  misc_feature (457)..(457): n is a, c, g, or t
atactgtttttaaacatttatgaactctttattgagtacctaaaatgggcattgtgggaatacaagatgagttagacagaatactgtccttgaagaattttctattggcgaaggaaacaaacatctgaagaactaacctaatgcagaatcaaataattgctacatataaatagagatgacattccatgggagagcaaagacaggcaagttaggtatgcctctgggaatcagcgtaggcgtcaaggttcagtggccctgtcaggataaggtaagtgattgagccctagcccagaggcctgaaaatgtacagtcttcagaaaaggacagacagtctgaagagcttaggagttcagaacatngaagggcagtagggagagagagaggaggctcntgatcaggtttaaaggtggttttgaacaacnttttaagacgttttggacctaagggtggaaacctnaggttgccat

SEQ ID NO: 331243 - DNA, 623 bp, Homo Sapiens
ttaagatgtgacaccagactttctggtttgtggcttccagaatccaatttccatcccttattgaaggtgatggtaaacaattgtgccagtcttcagtcttttggctcttcacccaattctttgtgatgcttcaaagtttaataacagtgataccatgataataaccataagaatcctcagtggccttgaatgtaactaacctgaacttggacctcatttttgtgacataccagaagagtaattctcttagcttttatttggtttcggtcagctgcttgcccataatacagaacagatattactctcagaagtgatgacttagcaaaatagggactatgaaaaaaatatctagatcaacttattaaacaaggaaaagaagaccatacttaagaaattatccaataagatccagtgcatataaataataatgtcatctttattttgggatattaattagaactctgttggagacactccgacttaacagttgctacataaaatcactgtgctcactatctaaggaaagcacatagttaggagtaaagaattaatctcattattaccattttaccttaactatataccaacactgagcccatacaggatttaggaacattttttgc

SEQ ID NO: 331244 - DNA, 361 bp, Homo Sapiens
ttttaaggaccagatatagcctttaattcctaatgttcaaaaacaatcctgtcttctaaatcacaacttttcgagttacaagatttatccacttcaaataaggataccttttataaagtactttcttgtggttttacagatttcaaggtgcttctacgtggcttcagcaattctcacaacaaaccctcagtgggtcagggtcttctaagattaaaatgttaacaccaatgcgtgtgaagtacagtgaagtacagtgaggttaaggctcagtggcaaacgttaaagaggcccacacaacacaccagggatcagagccaggtcaaattcttgctccccacctccaccccacctccaagaagaa

SEQ ID NO: 331245 - DNA, 727 bp, Homo Sapiens
  misc_feature (447)..(447): n is a, c, g, or t
gtgtggtagtaagttgccaagcagggatttgaaccaaagactgaagctaggaaccaaatgcttggtcaccagactatatggccttagctgcagaaattcagggcatactcatgtccttggtagagcactcggatcccccagaagagttttggcaaacattcctgtgcagcgcttgtcatcactccttggatccgcttcatttgctcttcgtgtgtgcgcgtgtgcgagggacagagtgggatccctgggggccactctgcttcgctattggccatcatactgctcaagtcggcagggatgttttcttgagggagagggtgggaaaaagaggatttcagtttgagtgtaccactggtctgtggcttgtttctgcttccactatgattctttatcttttatgaggtgatactaagtccagatatgtatttaaaggatataagaaaaagnccacgtgggtgttgaagttcacagatgggaagccaaagatcagggcatgtgcacgtatccagggtgctaacatgtacctggctctaaactactcactgaccgccgctcccatctggaggtccattggttctactcttttctctttcccttctgggctggttcttcacctaaagggcccttggtctagggatgggttcaattgatgagacgcacaaggagtggtaggcaggctaataatttggatccacttcatacagacttttcactgatgtcttggcag

SEQ ID NO: 331246 - DNA, 452 bp, Homo Sapiens
tgtgcatgttttaatttattaacacaaacatttaaagtacgctttttaaaaaaataatcatgtcttggcattttttcaggtactatattcatagcctcaaaaaatagaagtggttgggtctcttctgcccctggggttgggtgaagctgcagccgcaccggggccatgtccctccctagagggcgctcctcccttccagccagcaatgttgcccaacgcgggaggccagctgtgcagaacccagcatgcaggcatctcactcccaattcagcctgggaaatcggaactgagagccccacgatgaagccctgagctgatgctgacatgacactaattcactggaaacgagggtgatgggggcacagagcctctcatggtgtgcgccctgaagcccagcctctgggaatggaaggggagttctcacgcgaagctggagagttcagacattgtcc

SEQ ID NO: 331247 - DNA, 302 bp, Homo Sapiens
  misc_feature (57)..(57): n is a, c, g, or t
aaaagcccaaaacaatagttttccctaacttttcaatgccttttgaacatttggtcnaccactgcatggtcccatggctaaagaattcaaagcctgccagactgaagttataggcgcataaagtagtggttctttttctgaactgaatatcagacttgtaaaacttgctaaaaagaccacaaccttttaaaaatacagggtcttagcactagggttttcaagttgggctgggtactaattctctgtcacttcctagccacataaccatgggtttctctgagcccattttcctgtgccgaatt

SEQ ID NO: 331248 - DNA, 509 bp, Homo Sapiens
atatcttctataacccttcccctatctccagttattttaaaatcttactctgagggttactgtagtgtataaggttgtttgtctctacagtaaatgattcccagtcccttttaaccatgtggaaaggagacaggaacactagcatctgatcctcgtcatgggaccccagcctgtcttactacaattgccagctggagacagaacagggcctaagggcaaaggcagaatggcatatgaggaagagaaccaaaggtcagtcacagaacagctgtgtcacaggtgagatctaaaggaaaactgcgggactaaaagcaggaagcaaacagaagttcaggagccagaggaatgcaagaacatatcaggaagggggatatgagacaggaatagaatcagggctttggccatgaatgaggccagggtacctcaagctcattcttgttgagagcttgccctgtggtgcttgggtaagcaggaaagagttaggcagtgcaggttgggacagtctttaa

SEQ ID NO: 331249 - DNA, 619 bp, Homo Sapiens
ttttaatatagtctgtatttttcagtttaccatgtggcaaatgaaaattataaatgtatatttatgggagcactgagcaattccaccattttgagcatcttgtgtaatattatatcctctactgaggctcctgggattgagtcaagtggcagcaagggaaacagtcaccatgcccaaattaaagtctcatcgatgatatcccaacatgagcatttctcagttaagcatttcttatctgcacggaggcatccactgcaacacagggaaagagaagagtctcccatgcggaaggaagactgtgtcattgttttggtgaagctggcagtagaaggaatggcaccaactcaacaaatccacctctttgtggccatcacctttagtggggtggtctaggcaatgcataggtgaggagggctttttgtctaaggggtgttgttttgggaatttgctgataacattcactcccagaagagttccccaggaagtcatcttctgcaagggtgtccaagagaccacaggtaggcatggagagccactgacccagggagtaggttgtcagctcattctctggagttttctttaattcattctcttgcttcaggtcctgaggggtatatgg

SEQ ID NO: 331250 - DNA, 313 bp, Homo Sapiens
aacttgataccactgataggatctaactggactttagatataacttttgaaattcagttacaaactgttgtctccaaagctaccaaaactttggaactgtgatttgattcttccttgaattcctcccagttatctctctagttaaacttccttttcctaaactgtctatccaaacaaatttttctggcaaaagtggccctatcttaggcctctctaagagaccaggcttgcttagctagtgtgttttcccagcagatgttgctaccaagatcaattatttcttcctgatccttcagtatttttctttcttttt

SEQ ID NO: 331251 - DNA, 420 bp, Homo Sapiens
  misc_feature (322)..(322): n is a, c, g, or t
tttttagttttaaggagtggagaatttaacaggtaaagaaaaaggcagaaggacgaagctcctccatacagagacaaaaggaggggggctccaaagccgagagatggaactcccaaaattcttttattttacaaatatacagcccctaacgataagcagttaatatgatatatccatagggccagctaaatgtgtatgttagcatttctttctgagttttctgtattctttgtagcagcaaacttttacacttttgcccagaggaagggggcagaatacaactatagctcaggttttgaagatagttgctaaaatgtataanatccctcctggtattgctcaatgacctcgcacagtaagatgtgtatatggttaattgtgatcttgtgctcttctccctccagaaggcagttctttaag

SEQ ID NO: 331252 - DNA, 392 bp, Homo Sapiens
ttttttttcaactttaaatcagtttattgacacagtaacactgacattcctcccctttttcaagggagacagagtagggtccttcaaatcttatttaccaacagatttgacaactgttttaacatcaaatctaaggttttacttcaaatcaacttcagcaggaaggaaagaaggtccagttggacaagctgatgatttttaagtaaccaggggaaggcagacagtggaacaaataggtgggagaccactgtcaaagcttatttttgcccaaaaggtctgcttacttcagtcagctggccccataaaccaaggtcacacacaaattcaatgtcggtcaaattagtgcaaatcaagctcgtggattcaaatgactatagaaaacgggaagagta

SEQ ID NO: 331253 - DNA, 478 bp, Homo Sapiens
  misc_feature (25)..(25): n is a, c, g, or t
  misc_feature (64)..(64): n is a, c, g, or t
  misc_feature (109)..(109): n is a, c, g, or t
tttggacaactgtttttaaacttcnaaatcctaaggtttttacttcctaatccaacttcagccnggaagggaaaggaaggtcccagttgggacaagctgatgaattttnaagttaacccggggaaggcagacagtggaacaaaataggtgggagaccactgtccaaagccatatttttgcccaaaaggtctgcttacttcagtcagctggccccataaaccaagtcacacacaaaatcaatgtcggtcaaattagtgcaaatcaagctcgtggattcaaatgactatagaaaacgggaagagtagccaattcctggaagctgaagtcaggttaaccattaccaactccctagaggacacatgggaatacacataccaagtttccctactatttcccaggagtgggatcatcggtttcccttgcagagaaagaagtcttcacttccatgtttcttgcctaggatattaatgactccaaa

SEQ ID NO: 331254 - DNA, 430 bp, Homo Sapiens
ttgaaagagaacagacttttaatgatatttttaaaaacagttcaggttggtgaagcagaaaagggatgtgattacaatttaaatgaatcagtcacttgcacaattaatcctcttggcatcatacaaactgggttttaatggcaaatgatgacatcatagcatgaccaacactcatggaaggcagtctagagtccatcacgctcacacctgagggggaaggcactgcacccactgacgagacgcagagaccttggactacagatgacaccacatgcccacttctccttcctcaccttcctatggctactcctaagtcacctgggacccaggccttggcttgcaggaacagactttttccatcggcttttccagggcccaggtgaagaggccacttcagcaacagagggtacaggagagagtttaggggctg

SEQ ID NO: 331255 - DNA, 417 bp, Homo Sapiens
  misc_feature (171)..(171): n is a, c, g, or t
atgtcaaaaagaacttaccttttaaaaactataacaaagttgagttttgttctgtaaaaatctgtgaatctacaaataaagattcttgatagacactaaggggttaaacaaactctgttgttgcaaggaggcaggaagctgtcagcatttcatgctgctgccacaggaatngcccaaggcctgggtcaaggttggagaacttagccttacttttcccacccttccctcggtaacacattaccaagagcagcacagctacaggtcaattttcctgtgtatgacaaatgactatttgcaactttacgatctagttctgcaagtaaaaacaacatgcagaaaattctagacatacagaccttgcccatcttaaactcttcaagaaattcctttctctaattccaaggtaaggcctttcct

SEQ ID NO: 331256 - DNA, 387 bp, Homo Sapiens
taccaaaatatctgtattatctataaaaattgaactctaatgagtcactgatacgggaggcagcaatacccgactgtgctgacatgcagaaggaagacagctctgtccccccaaccctatagcagaacatttgtattgagtggcacgtgggctgagtcctttgtaaggtctcaaaaacctggacactttggaacgtcgcaatcggatgaacgatcttggccacatctctcgggactcctgggctgtgtacttgaaatagttctggggatgggccaggacatcaaacagagccttgataagtttcttatccttaagtatttcctgatggttctcagatgcatagagcctgccatctcgaactatgtcttcaatgagttcctggtagtc

SEQ ID NO: 331257 - DNA, 748 bp, Homo Sapiens
gtttgtttgctttgtaattttggaccgtatcatggatattttgaatattctgttttgagatgctggatcttatttaaatcctattaagaatgttgatatttttgttttagcaggcaatcaagctggctaggttcctgccacaagttcagactagtcttctgtaggtgagaaagcgcataatgatattaatatccacctcccaaaccccagagtgtgttacattccagggtgataaacctagaggggccttcttcctcttcccagaggaaattcacttacatttcaagataatgaataatttctctcctgaatgggaggaatgggtaggtcaccagcagctttgataaaagcttggaggcttctaaatttaagattcttctcctgtgatgcaacccactgcacaggaaacatctgttgccttacgggaaatggggcatggggaaatgacacaaggtgttgtaaatgctttgtgctttcagtagcaaatcttttatggcaccagcccagcagtctggtgtcttctggcagtatatgtatatgaaactgtggcaagctaacctattagcttgcaagaaggacaaactctaagacacttcacagtttctgacttaacaggggagagtggcaggatgtgaaggtgaaggagcaggcagggcaaattacatagcaccatccatagctaaggtaatagatgaattgttaatgttaaaaataatgacagctggccggtcacggtggctcatgcctg

SEQ ID NO: 331258 - DNA, 399 bp, Homo Sapiens
tgtttccagtgctgggattacaggtgtgagccactgtgcccagccaacttctcattttaaaagaatttcagatttaaaaaaattgcaaaaatactgcgagagaatcctcatatacttttcacccagatccaccaaatgttaacatcttaaataaccatattatgatgatcaaaaccagaaatactattaactactctacagacttgactcaaaattcaccaactgtctgcctaattttagtccagggtccaattcagactcatatattgcatttagtagtcctgtctatttaatttctttaaatctggaaagtaccttagtctttctttgtctttcataatcttgacatttttgagcagtactgactagtcatagaacatccttctaatatttcttcat

SEQ ID NO: 331259 - DNA, 290 bp, Homo Sapiens
gcctccccaaggattaccagactcccaaactagattctccatcactttggtccaaatcaacatcagcaggacttggtatttgttcacaattggttcaactcagattatttgctgagcttctggaattcagagagagtgacttatgggctcacctttttctctagattttaaataatcctttctccatttttttctaggagtgaaggcaattttgaaggcatgactacgacctgctctggccacaagagctaagagttgccaggtgttgtggctcaaacactttgagatgc

SEQ ID NO: 331260 - DNA, 454 bp, Homo Sapiens
  misc_feature (17)..(17): n is a, c, g, or t
  misc_feature (41)..(41): n is a, c, g, or t
  misc_feature (63)..(63): n is a, c, g, or t
tttttaatacccgaatnttttatgtccaaagttattggaanttatattgtgatttacccatanaaatcccatatgttgccttagtagaggaaatatttttttagttttacagatcaccactcattgtttttccaaccttttagaaaaatttgctactcatttattgaagaaactaggtcatttgttttatagcttcccgtgttcagatttttactgtttgcctcctgtggtgtcacttaatgtttaacttattgccaatgtcattgaaattttatttcaatgtaaatttcccctctctttcctgtaaattgatggttaaatctagaggcttgatcagattttggcgagagattttttggcaagaatacttcacaagtgttgctgtgtacttccatcagcaaacatgtaacaacgagttatttttttctgatgttagccatcaatgatctttgtc

SEQ ID NO: 331261 - DNA, 482 bp, Homo Sapiens
  misc_feature (31)..(31): n is a, c, g, or t
  misc_feature (42)..(42): n is a, c, g, or t
agagccttttgaggtcctcccccttgggccnacgctgtttancccctttccccttcctccatttgtttagccccctctccacccaactctagatctctatggaatttaggctccacattcgactgcccattcgtagctcataatccatttttataacaccttgctatctatatttacacctttaaagaacacgggaatttaagagggaagagtaactaggcttttgctaaacttgggctaataaaaccctctgtagagagatccttaatataggcatggggacaacaaggagtatcccaagggactcgccgctagggtgtcttttaagctattggagcaaattcaaatttggcttaaagaaaaagaaactcattttgtattgcaacaccatttgggttaaatacaagttagacgacgaatatatctggcctaaacatggttctatatactatagtgatattttacgattaggcttattttgt

SEQ ID NO: 331262 - DNA, 451 bp, Homo Sapiens
  misc_feature (419)..(419): n is a, c, g, or t
  misc_feature (436)..(436): n is a, c, g, or t
aaatagatagtagtacttacttcatgggattttgtgagaattaaaagataatgtatggacagagacctgcacagtgcctggtgatgattgggtatccaataaatagaattaatgatgcttatgatagcatttctgcgatgtcttgcaatttcctaagatgttcagtaccttccacccccgacagacaacagcaaaagcaatagtaacatagatccttccccagctgaaccgaagtgataccttcaggaatgtttcaaactgttttcagtctctctgaagctcctgatgcattaaggcaaatacccacaggatgggccatgggaagggaatgggaatagggagttcctggactgggcttattccttttctggaccctttctggagtggacttaaggttcctggcagaaattgtggacagnaaaaaggaaagtttccnttgggagatgggggc

SEQ ID NO: 331263 - DNA, 368 bp, Homo Sapiens
  misc_feature (152)..(187): n is a, c, g, or t
  misc_feature (338)..(338): n is a, c, g, or t
  misc_feature (349)..(349): n is a, c, g, or t
tgacacacacactcctagccaactcagttttgaactcttttctgagttttgaactcagttctgccaggtgccagaagagggaaggttttccagcagaagtaacaccatgagcaaggtgaagaggggaaaaaaatctatatatctatatatgnnnnnnnnnnnnnnnnnnnnnnnnnnnnnnnnnnnnatatatacatatatgctgcattgttacagaaagatttaaaacatcacaaaatatggatgtccccctacctccctctcctgaaaagacctgtgcgacagtagtgttggagggggcagggtgtcctgggggggctccgaatgccttgtggcanggggtgtcaanttgagaagcagtcctgtaa

SEQ ID NO: 331264 - DNA, 499 bp, Homo Sapiens
ggtacactccctgttgttcaaaggtttatcattatgaaaagaccattctaaccagagcctactgagataaaagctgctgccccatcctgtgccggggcatgtgagtgctatttcagtggctgtgtccacagctctgaaaatctataccttggatgaaagcccaactagagaatggaacattctcttatatatattctctgaaaaactgtcacatatgctcagacatgaaagaacagaaaggctgaccctggcagctccccacgctgcagaatttcaaaaatcctgaggcctcactaaaatgaactgtctgaacaaaaggaagtagaaagagtgaaaggagacagaatgttggccgatatggttgcctctcctccctctatccccagcctccatccctccagatgtttttgctgagcttctgtcagccttcttggcttaccctttagtccctgccccagggagctgaattcaagtaagtacagcaaatgtggcacaaatc

SEQ ID NO: 331265 - DNA, 475 bp, Homo Sapiens
  misc_feature (17)..(17): n is a, c, g, or t
  misc_feature (40)..(40): n is a, c, g, or t
  misc_feature (122)..(122): n is a, c, g, or t
  misc_feature (250)..(250): n is a, c, g, or t
ccaaaagaaattcctcnatattccccaaaaatcactttgnaattcctgagaagattagcaagccctcccctcatctccctcgaaagtatttcaatggccatcaataaacttcctgtaagaanatctgtgcccccataagaaatctgaaaatgcccttcctttccttggtcccagccccctgcaaactgagagagccgcagccccccagggatacagtgaatgctccccacaatatgaaattgccagaatngttgccagaaggccacatgtctgaggtttcatgaaagcactggaaaccatggtagttactgttcttgataagtatgtcggcctcaacaccagtgcccttcctggctgatgaagaaatggattgccacttgccctgaaaggatgtcagctgcccagctcagtggctggctgagcaatctggttcccctagcccaatcccacactccacgccgagccctatgcagtc

SEQ ID NO: 331266 - DNA, 444 bp, Homo Sapiens
  misc_feature (360)..(360): n is a, c, g, or t
  misc_feature (365)..(365): n is a, c, g, or t
  misc_feature (388)..(388): n is a, c, g, or t
  misc_feature (394)..(394): n is a, c, g, or t
  misc_feature (403)..(403): n is a, c, g, or t
  misc_feature (417)..(417): n is a, c, g, or t
  misc_feature (431)..(431): n is a, c, g, or t
ttttattagcattcctttattttagaagttcacacctataattttataacaatcgtgaaaatgttactcagaactagatgttttgatgacacatagcagaaatctgtggttcaagatggtcattgcaaacttaaccaatctcagcattctattctgccttttgttttgattgcacagaatcaatataattctgattcatatggaaaataacttaatatcttaacctccgctcaggatcttcatcataaatgtaggtcagtacatacctaaaaattgtcaatgatccaacatggtcacatgtggacatgctacacttggcacctagtaccaaacaagctggataccttccaatggagatcntgggntgggcatatacaccccaaagccntggtcntggcccccnccagaggcactggnaccacaggataggnggaaaagaacctt

SEQ ID NO: 331267 - DNA, 344 bp, Homo Sapiens
  misc_feature (120)..(120): n is a, c, g, or t
tttcttgccgctcctggtaaggctagttcaaccatcacacccatcaagtaaaatgcttagtgcgtgggaaaaggatgatcagttagcggaggcaattgccaagcaccttgtgggatgtgnagggtgtgcccagagtgaccaagaacctcgtgaggtttcttgaaattggaaaggtttgggccacttttgaagtggagtttgggaaggaggagtagaggggggactatttcatttagggatgaaatagtcaatgtcaaactcagaagcaaaacaacatcagagacactggttaataggtaatattgggaacttatcttcaatgagtcctcaatccttacaaaagc

SEQ ID NO: 331268 - DNA, 237 bp, Homo Sapiens
aagaaaatgaataaaaatgggcatattggctcctgaatgtctaaacctttattttatattgggaatttgaataaaagatccctgagcccatgtgtgatattttagctacgttgaaaacaagcaccccatgcagaccctgctgtgctattatttcctgaagggaacctcagatgtatcagatttactccctggatttggctagtatttccagtgaagtctcttcaactgctgtaaagg

SEQ ID NO: 331269 - DNA, 195 bp, Homo Sapiens
ccatcacttcttttgtaggtttgtatttgtttttatttttgacaaagacttttatttcacggtgactttcttcacaagtttcctcagatgctagtctgaacaaaggagagcagggaactagaaatgtagactttctgttttttccagctatggcatcactgatctcatccatcttactaaagtttgtgcagtctc

SEQ ID NO: 331270 - DNA, 347 bp, Homo Sapiens
  misc_feature (127)..(127): n is a, c, g, or t
  misc_feature (133)..(133): n is a, c, g, or t
  misc_feature (146)..(146): n is a, c, g, or t
  misc_feature (220)..(220): n is a, c, g, or t
  misc_feature (232)..(232): n is a, c, g, or t
  misc_feature (240)..(240): n is a, c, g, or t
gtataaatgaccacaacccagcccgaattaattcctttctgaatcaacttctggttgtggctgctatcttagtttcacctccatcattggtttggactggttggttctggggttctgtggcttcagnaatccnggatatccttccnattcacctttttttccttctcaggtccatggctaaaagcataaatttaaaagcaggtttggttcaaaaatcggnaatttattaaanggacttanccaggaatattacccttttcaattcaacttccttttaaggataggaaattccttaaaattccttggaaaccaatcctttccaggccattttcaaattccaaactggg

SEQ ID NO: 331271 - DNA, 399 bp, Homo Sapiens
tgaagcgccagtgatggagagagggccaggaaagttggagggaagtgtccccaggtagctgggcaaggccctcaggagtcctgcattggtaaatcctgctgtactccatcattttgctgggagcagcatgtgggagctgtggccttggcgcaaatgcagcagatggtttcagcggccagcagctgggcccttccttggtcagttagctccctgttattggagatctgtaaggtgcgtactcatggttgccttcctcccaccccacaatattgtactttatatattaaaagtgccctaggctgtgcgggcttgagacaggggccagtctccctgccctttgagttaccagtgcagactacctggaatcttcattgtttaagagggccctaagcttcctgt

SEQ ID NO: 331272 - DNA, 359 bp, Homo Sapiens
  misc_feature (256)..(256): n is a, c, g, or t
  misc_feature (274)..(274): n is a, c, g, or t
  misc_feature (305)..(305): n is a, c, g, or t
  misc_feature (324)..(324): n is a, c, g, or t
  misc_feature (339)..(339): n is a, c, g, or t
gcatattaaagataagacttcctctaccaccacaccaaatgactactacacactgctccatttgagaactgtcagctgagtggggcaggcttgagttttcatttcatatatctatatgtctataagtatataaatactatagttatatagataaagagatacgaatttctatagactggactttttccattttttaaatgttcatgtcacatcctaatagaaaggaaattacttctagtcagtcatccagggcttnacctggcttgggtctagnaatggggattttttcccgggagccgggaagnccagggaggggtaacttancacccaccacttaanaacattggttcttacaggct

SEQ ID NO: 331273 - DNA, 407 bp, Homo Sapiens
ttcttccatatattcaaaaacttacacatatgattataatctactggaatttactttctgttttaaatattttttaagttagtagttttaatctgcctccatataacttgtaaactaatttttgaaactctggctgatttaagagttctgcattaaaaaccaactactttattatataaacggttctcaatctttttctcctgtaaacttattccttgctaagtggtttcataaattatcggagatagcaagttaacacggaattctccagaattccttgggaggaaatgcaaagacacgtattatctgcacaattactccagtatcttttgatgaaacacttactgctctccaggtgagtttgatttttatctcagcttaatataggggaagatcagcttgaagaa

SEQ ID NO: 331274 - DNA, 1023 bp, Homo Sapiens
ttttgaaagtttaaataaagaatttatttccaaattcagcagaacttctttctttcttaaaaagccaactgggttaaaaaaatccaagtttgtgttttttggtggtgcaataattataaatgttgccagtcaatgccaaccagtgtctgattggcttcctgtgcatgtccaatttcctctgtgacactgtgttggtgccagagcttctgaatcttcttgaatcgctctttgcataaatgtaaaggatttccccgtctgagtccctggtcggtctccccatagtcatcaaggtaaggaggagaataaaaacagcctttggttttgccagctaaaaatagcacctgacattcccgtactctcaggaagatgcccactccagagccacaggagtaggtgtgagctgtgcaggctcctacatcctccccttccagttcagtctggcagcagtaactctgggagcacagcagagatccgcacacaaggcacagagttggggctctgctcttatcaccacctgatttcgggcacgagaaattggatgcttgattaatgaggctgctgtaatcctctggaaggtttattaatttgttagattctcttggatatcttatagcatctctttcaccttctagatatcttttaacttcactgttaccggcaccaactttcaatcagtgaacttcattatctcactattttcttgaaaaaggcaaatgaggttgtttggtagggaaagaatagcctacataaatgttccaaaatggcttgttccccaggaacttgaatgtcgggtggggaaggaactcccatttaagtaatgaaaaaataaagcagaacacttcaggaaaggcatgattccagctctgacactcctccacagatgccagccggatggtatttctttcaaggcacttcccgtatactggtgaagtgttttatacaaagcaagaactgctgattcttcttcacaagggggattttcttgatccatgccattctctgtacatgatgtaagctcgtgcc

SEQ ID NO: 331275 - DNA, 544 bp, Homo Sapiens
gattctaaaagataagtttattatccaatcagccgcagatatcaggagaaagctccaaaagcaagccctgggccctgaacaaaatttggaggtattatcaaaacctggcaacctcagtgttctataatagggaccaagaggaacaggcccaaaaggaaaagtgagattggagaaaggccgcagccttcagttatggccctcagactaacaaaccttagtggttcagagaggacagatagtagaggccaatcacccggtagggcttggttatcatgcggtttactaggacactttaaaaaagattgtccaatgagaaacaagctgccccctcgtccatgtccactatgccgaggcaatcactggaaggtgcactgccccagcggacgaaggttccctaggtcagaagcccccaaccagatgatccaacaacaggacagagggtgcccggggcaagcgccagctcatgtcatcaccctcactgagccccgggtacgtttaaccattgagggccaggaaactgacttcctcctggacactggcgcgg

SEQ ID NO: 331276 - DNA, 450 bp, Homo Sapiens
  misc_feature (55)..(257): n is a, c, g, or t
ctgggtcatacagaaaggaaggagactaagaggaagcttctattctcacttctannnnnnnnnnnnnnnnnnnnnnnnnnnnnnnnnnnnnnnnnnnnnnnnnnnnnnnnnnnnnnnnnnnnnnnnnnnnnnnnnnnnnnnnnnnnnnnnnnnnnnnnnnnnnnnnnnnnnnnnnnnnnnnnnnnnnnnnnnnnnnnnnnnnnnnnnnnnnnnnnnnnnnnnnnnnnnnnnnnnnnnnnnnnnnnnnnnnnnnnnnnatgacagtttcaaaagctgcctatcacccctttgaaaataccttgtatgctcacaattaagtcataacctaattaaggcttgttggtttcacctgtgacgttactttttgtaaagttcaaaagccgaaaaccttaagtgcttggcttggctaaactcaagtaacaagggagttcaaaggattttcttaaagca

SEQ ID NO: 331277 - DNA, 325 bp, Homo Sapiens
  misc_feature (28)..(28): n is a, c, g, or t
  misc_feature (34)..(34): n is a, c, g, or t
  misc_feature (69)..(69): n is a, c, g, or t
  misc_feature (88)..(88): n is a, c, g, or t
  misc_feature (94)..(94): n is a, c, g, or t
  misc_feature (108)..(108): n is a, c, g, or t
  misc_feature (148)..(148): n is a, c, g, or t
  misc_feature (162)..(162): n is a, c, g, or t
ttcaaatcctaaaactcaatctgtgctnccccanccgtcccaatgccctcttgcggaacctctctcccnatggcgctggctcccttgnaccccnagctatctgcttgnaaaaccctcttctcccctgctggaggaataaagcaccccnaagggcagtggccnagtccttaagcctactgttgtttccccccaggaccccacacagccctggcatggagcaggcaccgtggcaaatgactgttgcatgtttgaatcttcatccagagggctaagcaacacacacctttaaaaagtgagtgagttttggccaggcgaggtggcttat

SEQ ID NO: 331278 - DNA, 555 bp, Homo Sapiens
agggtgcctggaacaagcaccggcttatgtcatcaccctcactgagccccaggtacatttaactattgagggacaggaaattgacttcctcttggatactggtgcggccctctcagtgttaatctcctgtcctggtcggctgtcctcaaggtctgttaccatctgatgaatcctgggacagcctgtaaccaggtatttctcccacctccttagttgtaattgggagactttgctcttttcacatgcctttcttgttatgcctgaaagttccatatccttattagggagggacatattagccaaggctggagctattatctacgtgaggtatggggaacaagttaccggttttgttgtccccctgcttgtggagggaatcaaccctggaagtctgggcattggaaggacaatgcagaatggcaaaaatgcccgcccaatccaaatcaggctaaaagaccccaccacttttccctatcaaacgcaatatcccttaaggcctgaagttcataaaggattacaggatattgttagacatttaaaagctcaagtcttagt

SEQ ID NO: 331279 - DNA, 314 bp, Homo Sapiens
  misc_feature (17)..(17): n is a, c, g, or t
  misc_feature (46)..(46): n is a, c, g, or t
  misc_feature (93)..(93): n is a, c, g, or t
gagttttacaagccacngagtcgacctcatctaatctctaaaaganaggagttgcgcatgtcttaatgcccactgagctctgcttgctctctnttgaagccttttttgtgggagggtaggttactagcccaaagccacacagctgcttagcgaaagagaaagggagactaggacccagccctcctactgcccttcccagcacataattgtttcctttgctctttattcttaatgtccttctacaaaaacaaaaacccagtttgtaatgtcaaaattgagtggttttgaaaataagcttaagttggccggggcgc

SEQ ID NO: 331280 - DNA, 439 bp, Homo Sapiens
  misc_feature (59)..(59): n is a, c, g, or t
  misc_feature (79)..(79): n is a, c, g, or t
  misc_feature (127)..(127): n is a, c, g, or t
  misc_feature (133)..(133): n is a, c, g, or t
  misc_feature (380)..(380): n is a, c, g, or t
  misc_feature (392)..(392): n is a, c, g, or t
cttttatagagatgggccatcttggtatgttgcccaccgctggcttcaaactcctgccnctcaagcgatcttcctgccnttggctccctgaagcaccgggattacaggcatgagccccacacctggnccaccnccttttgaagtagtctgggcaatgcacaaagcagtccatggtggccccccagtcccccaggcttactaccccccttgttgcagagcccaaagtccagctcctcattcccccatcactcttctaactggggacccaggactcctgcactgccctgttcttaccccctatatcccaatcacctgtactgttagctttcaggttctttattggttcctccacttaaggacgggccatgaggggcaggganctttatcttgcnctttcaagggggaaaatttcccagtaccaagggcacgcagtagggtg

SEQ ID NO: 331281 - DNA, 378 bp, Homo Sapiens
  misc_feature (30)..(30): n is a, c, g, or t
  misc_feature (39)..(39): n is a, c, g, or t
  misc_feature (59)..(59): n is a, c, g, or t
  misc_feature (77)..(77): n is a, c, g, or t
  misc_feature (307)..(307): n is a, c, g, or t
  misc_feature (313)..(313): n is a, c, g, or t
  misc_feature (328)..(328): n is a, c, g, or t
  misc_feature (334)..(334): n is a, c, g, or t
  misc_feature (344)..(344): n is a, c, g, or t
ccagtctagcttttttggtcttgttttttngtttctganacaggattttgtgtttttcntctgtctcagacagctcngttgcccagactggagtgccagtggcatgatcacagctccactgcagccttgacttgttgggctcaagtgatcctcccacctcagtcttctgagtagctaggaccccatgcatgcaccaccatgcctagctaacattttcgaagagacgggggtctccctttgttgttcaggctggtctcagtcaaactcctgggctcaagcgatccctgtctttgcctcccagggtgtnaggatnacaggcatgagccangtaccnagtgggtctnctggctgttcaaatggaatcccaaaccttaccct

SEQ ID NO: 331282 - DNA, 764 bp, Homo Sapiens
  misc_feature (405)..(428): n is a, c, g, or t
ggcaggcgccggaggcggcactgcagattatcaatcagcagagtatccaagcgagagttctgagaattgtgaccgtagacggagtgatacctgcagtggctgtaacacagcagattatgtggttcatttgccagcacaaagctggggagaagcaccatcacatctgtggacagacactgcaggcccagcagcagggagacacacctgcagtcagctcctatgtcacgcaaaccaacgggactgggagcccgatggacacaccacaagcagccactcggaggtcaaccacgccgggaaccccttccaccatagagacaacccctcgctagacgtgaactcagaactgtcggaggaaagacaacacaacctacgcgaaaccaattcctcatcctcagatgctcaaannnnnnnnnnnnnnnnnnnnnnnnattagatgaattatcctatttcagtacttcagcaagagagaacctaactgtatcttgaggtggtagtaaaacacagagggccagtaacgggtcgtaatgacttattgtggataacaaagatatcttttctttagagaactgaaaagagagcagagaatataacatgaaatgatagatttgacctcctccctgttattttcaagtagctgggattttaaactagatgacctcattaaccgatgctttaccaaacagcaaaccaagagattgctaattgctgttgaaagcaaaaatgctaatattaaaagtccccatgttctttatatacaataatgg

SEQ ID NO: 331283 - DNA, 401 bp, Homo Sapiens
acagcgcgggccttgtgctggagtttgagcctgggacagggagagggaggcttggagacagtctgaccccagtgccctctaggccaccccacttctaggcctgccctgccgccgtggagccctgggcaagctctttcccctttctgggcctgggtctccccatctcttcaatggggctgataccttcacagcccacagcatgggcacttatgaggacaaagtgaatttaacctggaaaagaatgtatttgagagtttcttttaaataatcagcgggtgttggtgatttgtagcccttctgcccttaaatgcttccttgggcaagagctgtctgtcctccctgcaggaggctgagtgtaaagagtatcattcattgtttctctattaaattattttctctaa

SEQ ID NO: 331284 - DNA, 762 bp, Homo Sapiens
  misc_feature (283)..(283): n is a, c, g, or t
  misc_feature (305)..(305): n is a, c, g, or t
  misc_feature (315)..(315): n is a, c, g, or t
  misc_feature (325)..(325): n is a, c, g, or t
  misc_feature (334)..(334): n is a, c, g, or t
  misc_feature (341)..(341): n is a, c, g, or t
  misc_feature (468)..(468): n is a, c, g, or t
  misc_feature (687)..(687): n is a, c, g, or t
actcctggataacggaatttattacatttacatactctaagttcaagaatgatttactcacaatttagtaatgactttggaaagtacagtaaaatgtgtgagcagttttagttacattattatttgttggagtctaaagtactccacaggtgttttgatacatgcctgtttggggttagcaatgtacttttctggttaaacatcaatgggggttacacatttatcttctcaacaaaacgggctcctctaatatatgtaaatatgactggtcacctttttctcnttaagctaaatgtgaatagttnctggctttgncttaatttgnctttctagncagcctnccccctgttaagtcttgaccacatggtccagtcttctgtttggtaaggttttataaatccctaaaagttctagttcagaaacagcctctaataaaccgagcatggataatttccattcatttcttcntgaggttgcagaatttgcatccattttttcagcagctgtcacaactgttgcaaaagcctctgaccagtccacgaggttgatgagcctgctacactctaggtgcagtttgtatgctatgcagatgtctggggcgatattcggaatgcagccttcttcgcttttcagtgcttcattcttgagataatagtaaggattgttgagtgcagtatggagggcaanttcgcggagcagcatttaaatgctcacgaagggcatgggcagcactgaagtacaccacctcatggagaggctgtg

SEQ ID NO: 331285 - DNA, 407 bp, Homo Sapiens
  misc_feature (342)..(342): n is a, c, g, or t
  misc_feature (350)..(350): n is a, c, g, or t
  misc_feature (358)..(358): n is a, c, g, or t
  misc_feature (377)..(377): n is a, c, g, or t
ttgatagttatatatttgtgtttattttcctacattaccacattaattagaaaagatattgtaaaatattagtaatgatactagacatcctaatttgttcctaattttaatgtaaatcatggcagtgttttgctacaaagaaaatgttagcttttttcctttttaacataatgttaaagaaatattcttctgtattagtttttaatcgtatagcaatagttttatatagcaaattaccagaaatgacggactttcaaacaacatgaactcattatctcgcgatttttgtggggcaggagccccgtgcgctgcggccagggcagcctctccatctgcagtcangggccttntcccgggntccatgctggaggcggggnttcactgccttccatcctgctccgaaacgg

SEQ ID NO: 331286 - DNA, 466 bp, Homo Sapiens
gaatgattacttattctttattgtatattaaatatttatattatacaaattcatgtcataaaatatttactgtacattaaatgtttatactacacaaactcagacctcattgatttgtggctgaaataaggaacatgttcccacaatgtcatgactcagatttgaaccatggttgctgtggccacaacacagagtgctaaccactatacagtcactgcatgctactggggacctgacataagaaacgtgtaaacgaaaagagacatcttagttttcaaacatttcttaataagtaaaaataaagatacacaattgcaactcttggtttagttaggaaaaaaattataaagcagggaaagtgaactttccaaaaaggagcaattggtaattcttgatcagcctaattaagtagtagctggggttgtcaaatgtgtatacgcttaccttttccacaacatatctgcat

SEQ ID NO: 331287 - DNA, 291 bp, Homo Sapiens
  misc_feature (137)..(137): n is a, c, g, or t
gaggagagaagacttaactttttgaataatgacatattgtctaggtattctgagagatgggactgggccctggtggagtgaaacactgatatacatgttagtattgtgctcgactgtaacagctgctgtgaagaggngggctcccttgctcctgccggctcctttactcatgaggctggtccttcaaagaatagttagaaatttttcattagatttttctggcaatcttgttaacattctttgtatttgtctgaaagatcattttgagatatttgctcatattgggacttt

SEQ ID NO: 331288 - DNA, 582 bp, Homo Sapiens
  misc_feature (11)..(11): n is a, c, g, or t
  misc_feature (24)..(24): n is a, c, g, or t
  misc_feature (31)..(31): n is a, c, g, or t
  misc_feature (55)..(55): n is a, c, g, or t
  misc_feature (66)..(66): n is a, c, g, or t
  misc_feature (72)..(72): n is a, c, g, or t
  misc_feature (109)..(109): n is a, c, g, or t
  misc_feature (532)..(532): n is a, c, g, or t
  misc_feature (555)..(555): n is a, c, g, or t
aagctcctggnaccttcccccggnctccggnacctatgaacaaaacaaatttcangttggtttaanaagccnaccccaatgtgcctattttggttataagtagccctgnaatggacctaagatatatctcttttttatttacgaagttgagaagtgtttcaggaaatacatttaaaatgactcatattaatataagagggctctaaattagggatgagggttttgagggaaattgtgttcttcagttaaaaacatttaggtacagaaaaaaaggatgatactgcaatttaaagcaaatcaactttaagacacatcaaaaaagatagtagggtaaaacaatgaaatatttctgagtttcctgtcagaactttccatgcaaacttaccaaatacaggcaattggagaaaaattcataagcaaataacttagcatatgacactcagcaaaacctaatgaaatatcatcaagcttggatttcaatatataataaattactgtattaaaaaactattttgcaatactttactattcntaaaataagttaccatataaatngtgagcaggggctgggtgtggtagctc

SEQ ID NO: 331289 - DNA, 337 bp, Homo Sapiens
  misc_feature (275)..(275): n is a, c, g, or t
tggggataacatttcaacatgagatttgaagaggacaaatactcaaactatatcacttgttgtccatttttaatctttctctaacataccctaacttcttcttgaaaatgcttaattttctctgttttgagatgtaaatttgctatcctgttttcttaaaacttggtaagatcttcagccatgaaggacagacaaactgtaacctttccatttacaaagctgcatttgaattcaactgtccttttaaactaaggagttttactgggtctcgtggnctaaaattttaaagatgtagggccaggtgcaagtggctcatgcctgtaatcctatcactttt

SEQ ID NO: 331290 - DNA, 610 bp, Homo Sapiens
  misc_feature (16)..(16): n is a, c, g, or t
  misc_feature (35)..(35): n is a, c, g, or t
  misc_feature (62)..(62): n is a, c, g, or t
  misc_feature (68)..(68): n is a, c, g, or t
  misc_feature (79)..(79): n is a, c, g, or t
  misc_feature (90)..(90): n is a, c, g, or t
  misc_feature (113)..(113): n is a, c, g, or t
  misc_feature (138)..(138): n is a, c, g, or t
  misc_feature (150)..(150): n is a, c, g, or t
ctaaaggccccaaaanaccccaaggtttgcccaancccaaacccccaaaaatgggggccctncccccnaggcctcaaanaaaattttaanacctggaaaaccccggctgaagnccctacccaaggatcaggccagtanccccctacttanaagttgggtgaagcatgagggaggaggaatcatggctacccttctcctggccctgcgttccttaatattgggctatggagagatcctcctttaccctcttgaaatttcttagccagcaacttgttctgcaggggcccactgaagcagaaggtttttctctgggggaacctgtctcagtgttgactgcattgttgtagtcttctcaaagtttgccctatttttaaattcattatttttgtgacagtaattttggtacttggaagagttcagatgcccatcttctgcagttaccaaggaagagagattgttctgaagttaccctctgaaaaatattttgtctctctgacttgatttctataaatgcttttaaaaacaagtgaagcccctctttatttcattttgtgttattgtgattgctggtcaggaaaaatgctgatagaaggagttgaaatctgatgac

SEQ ID NO: 331291 - DNA, 445 bp, Homo Sapiens
  misc_feature (377)..(377): n is a, c, g, or t
gctaatttaatcagtaactttattataacaaaacctgtatattacccatttaaactcatgtgtaacattcagtgatgtgagctgtattaaacccaggtattagtgaaaatttgcattgtaaaacctggtaacaatagacatctatcgggtggtcagtaattcaaggacaccttttattttaaacaattttatataattcatatcaatatgcaaaattaccataaaagatacaaggattaatacatatttacatttttacgaaatagttactctgaggttgacagctggcacttttctaaatatttacagaacaaactgaaagagacatttttcatagtcagaattgttcgttaagtcttgctttccagtaacaattnatatagtgacttcttatggcccaacatggtggagagttaaagatcagtggggtggtgggggcatggtg

SEQ ID NO: 331292 - DNA, 142 bp, Homo Sapiens
tccaaatgtgttttttattcactatttttgatgactataaataagtgtttccactatggaaaagaaagttagcacagtacattttcatgactggggaatggattttctgaagtcatcttcaatagggcaaaaacttagaaac

SEQ ID NO: 331293 - DNA, 443 bp, Homo Sapiens
  misc_feature (125)..(253): n is a, c, g, or t
  misc_feature (310)..(383): n is a, c, g, or t
gagcaaaacaacaaagccaccagggtaccgagaaggacccaaacggtttgccactgccggctcggctaccagctttttattcctttatttgaccccgcccacatcctgctgactggtccattttnnnnnnnnnnnnnnnnnnnnnnnnnnnnnnnnnnnnnnnnnnnnnnnnnnnnnnnnnnnnnnnnnnnnnnnnnnnnnnnnnnnnnnnnnnnnnnnnnnnnnnnnnnnnnnnnnnnnnnnnnnnnnnnnngaaaagttctccaagtccccactagacccaggaagtccagctggcttcacctctcannnnnnnnnnnnnnnnnnnnnnnnnnnnnnnnnnnnnnnnnnnnnnnnnnnnnnnnnnnnnnnnnnnnnnnnnntgtgtagcggcgtcttctggcggtggacgaggccgggcgcacgattttccccgtgggtga

SEQ ID NO: 331294 - DNA, 359 bp, Homo Sapiens
  misc_feature (313)..(313): n is a, c, g, or t
ttttaacacattcagtgattttaatgtgtaagaaagattacatgcttcatgggcagaaccaaaggttaaaccttgcattttgttcatggttattacacaagtaattacacaagtccagtgtataaacactacctgaacacattgtaagttcttctaataataataaatattatatgaaaaaagttaacaagcattaattcaataattctcaaacagatattcatcgaaatgaggtaggtctaatgtgtcatttgctaaagcatttaatgctgaggaggaaaaaaactcatccgaaaatatcaggcctccatcnggctcctccaaggtttaatggtcctaccgccgggcataatttggcc

SEQ ID NO: 331295 - DNA, 424 bp, Homo Sapiens
  misc_feature (375)..(375): n is a, c, g, or t
  misc_feature (412)..(412): n is a, c, g, or t
aatgtatatggttatatgtgtatttttgttacaaggaatgattacaaatattttctgacaaggaagtatattatgagattatatcatttatggttttgtagagtatacaaatttcaggcagattcttcatctcaagggctttacttggttgaaatcaaatgttgacatttaatggagaacaggaagatacgtgatataacaggtgctcaagaaagttcttcctggcttggagctttaaagaggaagaattgagttggaatttggggaagtggttatgtttacctttgacaagattttgtgttcctaggcagaggccagagttgtaaatccagggcatgactggttgaagggtttcagggaaggtggccaggcccntggattccccaataagggtcccgaggaagggggaaangttggggttatg

SEQ ID NO: 331296 - DNA, 473 bp, Homo Sapiens
tattttaaaattatttttatgtttatttcacttgaacaaaagaaaaagcaactaataaaattgaaggaagagctgaactaccgaatatttttctttaactcaagaactttcagttacaggaagatttatctaatattaaaatgactaaattacaaaaagcataaaatgtttgaagccatttttaaagttgttttgaaatccatattagcactcagacttccccactccctaacttttgttaattgctgtaatggacatttgttgttttgatctacccaacatcctttcatcctactttggtaactgatattctttgggggaactgatctttccactttacatccatgttttgtgggaaatttttcaactaaggaacctgccctatgctagctaagagttgagtacggtatgcaaactaaataagtgcaactctctcactgtaatttaacctccttaaatcaagtaaagaaaat

SEQ ID NO: 331297 - DNA, 368 bp, Homo Sapiens
  misc_feature (258)..(258): n is a, c, g, or t
  misc_feature (289)..(289): n is a, c, g, or t
  misc_feature (295)..(295): n is a, c, g, or t
  misc_feature (314)..(314): n is a, c, g, or t
gcaaaattgtgattgttgatgatcagacagtatccccgaggtttgcttttcatttggtcaactttgtccaaagtctcggaaaacaaaaacccaaccccggagctgactctgtgggtcaaacactagagatgtaaccaaacaactccctagtaagcggacttgctttccattgccaccaccccaactcggggttcgtttcctcgaaggaactagtttcttacctatttccttcacccaggacctctcagacttcccgcnccatcgttgtaaagtccagtgtcccaatacntgggcntcctggagcactttgcacntatattaatattgttgtccatcacattgtattattgttctggttctcatttctg

SEQ ID NO: 331298 - DNA, 444 bp, Homo Sapiens
  misc_feature (359)..(359): n is a, c, g, or t
  misc_feature (369)..(369): n is a, c, g, or t
  misc_feature (426)..(426): n is a, c, g, or t
ccaacaaattttgacctaaaaatattaaacctagtcaaaatattattctagtacaaaggcagcacatgggtatttttgaacataaaagagttctagaaatacaggacccatgaatcattcttgaagaaaagttactcagtaaggaaatctagctaagcaagcaacatgtacaaataaaagattattataattggaccaaagttaagtttaaatccattcacatgtatataattaagatatataggaattataattacagaaaagaatgttacaaaccttcacaaagtcaaaaatatttttatatcagctagattcttctgtttcaatccataaaaccagggtttggatcattttaaaanaacaaacaanaataatttattggaatcattagggaggacctgatagaataaaatgaccagctgaccnaataggccttaggaaggg

SEQ ID NO: 331299 - DNA, 117 bp, Homo Sapiens
ttattcccatgatatactttgtctttttagatccttcgacactaatgaaaattctgtgtattattaatattacctcaaaaacagcattccctattttccatgttttatattttatag

SEQ ID NO: 331300 - DNA, 656 bp, Homo Sapiens
  misc_feature (472)..(472): n is a, c, g, or t
  misc_feature (526)..(526): n is a, c, g, or t
  misc_feature (542)..(571): n is a, c, g, or t
  misc_feature (583)..(583): n is a, c, g, or t
  misc_feature (613)..(613): n is a, c, g, or t
tttaatctttttaaaatataagtggttattctctgacttggtaactatgttctgaaaacactgcatttaagaatttttaaaaattggttttctaaaattaaaatgtccaaattaggcatattgctgagctcaaattgatgtgaaatgccatggttccagttgaattttaagcatattttcatttagatataaaatatatgaagtatgctttgttgattatagtgagaacccatgacatagttaaccaaagaatatgtttggttcaaataaaaatagaagcttaatactgggcattcatactttttaaagagaatgaatgaagaaatcggtttcctgctgtagttctctatgggtaagtcttagtaaagacgagaatgctgaagtcggccgtggcgattccctcctagggaactggggaggtgtgggcttgcccatttacccgcttggaagctcacattcttttaccctcctnctcccactgtgggttttgatctttcacctatttcccagggccctccccaggcanttgggagagggtgtcnnnnnnnnnnnnnnnnnnnnnnnnnnnnnnctcccccgtctngcattcttaggggcctcttagggctattanggggacctgttcaggatacatactaggtaggcccaattttccc

SEQ ID NO: 331301 - DNA, 516 bp, Homo Sapiens
  misc_feature (168)..(168): n is a, c, g, or t
tgaacctatcagtaatattactaacagggagaaagtataaaagtgcgcgcttcaagtgctctagtgtacatgtcagaattaaagcacgagttccacgggatggctcaccaccctcccttatttataaaacagaagtatcttttgagcccgctgtgccctcctcccccnttttctatgcctgtttttctgcctgggttgcctggtttttgctctgcttgttgaaaccctgctcatccttcaggctgcctcaaaacttttgtggaagaaggtagggaacacatatctcttcttttgtccagccttccttgattagccttcttcctctcccctctacccattgtacatggtttctgttgccatgtagtggttaaatctggtttacgttgtagttgtttgtgtgtaaggaggtctcctacaccgggccatgttttcttaaacactgggatggtgttttcttagtgcttgtgatgttctttgtaacagtgggtgccctataacttttgtttggactgaatt

SEQ ID NO: 331302 - DNA, 488 bp, Homo Sapiens
  misc_feature (50)..(50): n is a, c, g, or t
  misc_feature (52)..(52): n is a, c, g, or t
ggacattcatcacccagggaaccccaggtattaaagaagcccctgtggangnagcagacatagcaggggtgggcagtgctccctttatcctgacaatctctagtcgattcttgcctttttctcccgattgcggatttgggggccacctctaagatgcctctctccagccctgtctcaaccgatactccaaattagtgccaacccaggggcctggcacctcccacatcatcccattgtcttgctgcccaagtgcgaataaacggtgtgattggccaaccctggagggtcccctcttatcccttcaagccaagcttcctgctcaggattagtttccagctaagtctgcaagccctagaggagtttttccaggctgtctgtgaagcctggggaacacaacggcaactgggagatttgtgagtgaacactgtttcatcttaatatgcttctgaatttattttcatgtactaaatagatcagctcatcaaagc

SEQ ID NO: 331303 - DNA, 411 bp, Homo Sapiens
tctggaaaaaacacgctttattgggtagacaaataggcctgatgggaaggcctgagtcacagtgcactggggagtgaacaaaagtaggcaaagtgcttgaagcttcccctttgcccccaccttaacctcctggggaggcagctctggacactcagtacccagacctgggctcagcaaggcctggggtgactgtgcccctcactcctgctgcctgatctgggcagccccacccttcactggtaagacagaattctcaagggataggcgcagagaggagcccgcctccctggtttcattggagagtaacagggttttagcataatgctggccagagccagttgttgccaggtgctgccacacaggaagctgacagccctgctggacgggcgggacttcttcgggccctccgga

SEQ ID NO: 331304 - DNA, 402 bp, Homo Sapiens
  misc_feature (101)..(145): n is a, c, g, or t
cggcaaatcaattttattgtttaaaaaaataaacgttacatttgacatagaaaaagacatttaaaaaatgttcttaaaaggtttaaaaaggcatttgttcnnnnnnnnnnnnnnnnnnnnnnnnnnnnnnnnnnnnnnnnnnnnnttagaggcgtgacagacgtgcccggcccaatgctgagtttcattaaagaaacaaaatggagctattttccataactttgtagtcaattttagcctttttaaactttttataagtgatttcaaggagggcttctggctgcattttggaggtatgcatttataacttgtttgaagaaactttattcctatagtagctttcatttaagacaacgaaagacccctcatgggtcatgatctcgtataattaaaagaaacatt

SEQ ID NO: 331305 - DNA, 423 bp, Homo Sapiens
  misc_feature (353)..(353): n is a, c, g, or t
  misc_feature (378)..(378): n is a, c, g, or t
  misc_feature (412)..(412): n is a, c, g, or t
caataaaagctctactttttccctagcaatgtgatgtacaactcaggaatttgtagatataaatcttcctacagacccagctgcacactaaggatcatatcctagaaacccttataaagattgcctcctatattaaaagcaactgctgatctactgaagcattttataagtttgttcagttctcaaactttaatgagcctaggaataccttagggaagttagctaaaatatagattcagattcagtagttctggatgagggcaaagattctgcatttctaataaattcccatgtcatgacaatgctgccagtcatagatcacactttgagaagcaaggcattaataggcatcntgcattagtcccattctccacactnggtataaacatactatctgaggctggggaaattnttaaccaaggg

SEQ ID NO: 331306 - DNA, 142 bp, Homo Sapiens
ttaaaaaggtgatcagccatataagctctgcttttaatgtaaagcacacaccagacatagtgctttaaaacaatcaaagtaaagctgtggttagcaaggcttccaaagcccagagttctttatagactcaaacttacacagg

SEQ ID NO: 331307 - DNA, 415 bp, Homo Sapiens
  misc_feature (38)..(38): n is a, c, g, or t
  misc_feature (44)..(44): n is a, c, g, or t
  misc_feature (50)..(50): n is a, c, g, or t
aatttatccattttgaccacatccctgttttttagagnggaaancaaacncagtttctgcattggtaagtgtaaagcataccttgttaggaacgtgttttgtaagacacatttgggttgtcattctagagcatgtcaaactttgtacgttcaaaatatatttagtatgattgttagtggtaacatatatcaaggctttgaattaactgttttatttaattttcacaagaagcacttattttagccataggaaaaccaatctgagctacaaatagttctttaaaataagcccaggttatttagctattctagaaagtgccgacttctttcaagaagcaggcattgtaggacagctgagaattatcacatagcctaaattctagcctggcagcaagagtcacatctgagatgtccga

SEQ ID NO: 331308 - DNA, 397 bp, Homo Sapiens
ttgcaaacggatgattttaatgaggggtgagaagcactccgcatgtgcgggcagcggcgggctgcggtcggggcccagcaccggtgggagcggggccttctctggcctcgcgcgcgggggacgcggccctttcccctccggggggacgcgcaggaggcaccgcggccccgggttggaacaaacgcgtttactgcaggcaaggcggcgggcgcggggcggctcaccaggcgaagaggggcttgccgtcctccttggagagctcgcacaggcaagttgagcagcagcagcgagtcgcccaggaacttggggggcaccacgtcgatgaccagcttgcgcagcgcggccgggctgctgtgcagggggttggcgcgcaggtcgggccgctgcttcaggattc

SEQ ID NO: 331309 - DNA, 344 bp, Homo Sapiens
  misc_feature (185)..(185): n is a, c, g, or t
  misc_feature (236)..(236): n is a, c, g, or t
  misc_feature (298)..(298): n is a, c, g, or t
  misc_feature (330)..(330): n is a, c, g, or t
ttgataacaatgatgaggtttatttttgtcaaaacatccaagggaaacattaattgttgtttgtcaactgtgaacttcacactacattgtctaagggatagaaaattgatgggtatcactctgtcagaaaatcctcaccaagaagccaattcaaggattatgaaattgacaagcctttcaaacanaagatgtgttcggacttcactgatgcgatggtaggtcttttgggttacaantagatagggatgatataaaacacaatcttttcctgtctattccattttagaaaccggtgggngtgcacacgtttagtctgggcattgcagcacngcacaacatacatg

SEQ ID NO: 331310 - DNA, 455 bp, Homo Sapiens
  misc_feature (252)..(410): n is a, c, g, or t
caccttttagcaataacctttatttcagtgtttattatcactgtaatatctgatttgattgtatatttttctagatgtgattctcttaagggcaggcaccatgtttttcatctcagaaggtcacaaactattaggaaaatgggcttgcagatacatgtacaacaaagaataataattgaagatggctcatggaaaaagtattctgaaaagtaagagaggcacatgttctagagagacaagaaaaggcacaannnnnnnnnnnnnnnnnnnnnnnnnnnnnnnnnnnnnnnnnnnnnnnnnnnnnnnnnnnnnnnnnnnnnnnnnnnnnnnnnnnnnnnnnnnnnnnnnnnnnnnnnnnnnnnnnnnnnnnnnnnnnnnnnnnnnnnnnnnnnnnnnnnnnnnnnnnnnnngggaacctatggtggaccccgaaaaccttggtacctggatggcca

SEQ ID NO: 331311 - DNA, 429 bp, Homo Sapiens
ttttccttttagcatgtggtttttaaagtgccatttaatcagcaagataaaataaagattggaatgacggatctgaattttgtagatttggtggaaattctgaaatttccatattgaaaaaatcttcactgatgcaaggggtcagcaaactacagcacgtgagccagcacctatttttgtaaataaagttttattgaaacatagtcacagccatttgccaatgtattgacatctgcttttgtgctacaatggcaaaggtgattaatcacaacagagacaataatggcacacaatgcctaaaacacttactaggtggccttttgcagaaaacgtttgctgacagagccacaggccatgcatggtgagagaaagaccccacaagccagtcagggggcacaaagagggaacgtgcagcagcgatttccgaga

SEQ ID NO: 331312 - DNA, 537 bp, Homo Sapiens
  misc_feature (441)..(441): n is a, c, g, or t
  misc_feature (485)..(485): n is a, c, g, or t
  misc_feature (509)..(509): n is a, c, g, or t
tttaatgccaacacctaaagcatttatttggatatctttaaactttttacatatgatacattccaaattttacaagttgtccacagatattaaagttatagccaatttattaaacagatatgattttccctgatatggaaagcgtatgttatataaacatttctacaataaacataaaacatgcggaacaaatcataaaactaacatgatttgtaaggtaggaaagacaactagcttaacaccagaaaataaaaaggtgtgtatgttgcaatttcatgtaaattcatcttctcccaggctctgtgatattctcagagaatgaaatccagagacaacctttgctaactccaggctcctaggaagtcggaccggaaagctggagtattgttatgatttggtgaaaatgtttataatccacttgtagagagagaaacctggtcntattattttaaattttagcctggtgaacatatggaaaaaagccnaaagaagcttaccctaaaagcctnaagaaactggatgtgacagaggccaaat

SEQ ID NO: 331313 - DNA, 448 bp, Homo Sapiens
  misc_feature (394)..(394): n is a, c, g, or t
  misc_feature (403)..(403): n is a, c, g, or t
  misc_feature (421)..(421): n is a, c, g, or t
  misc_feature (427)..(427): n is a, c, g, or t
ttaataccaacacctaaagcatttatttggatatctttaaactttttacatatgatacattccaaattttacaagttgtccacagatattaaagttatagccaatttattaaacagatatgattttccctgatatggaaagcgtatgttatataaacatttctacaataaacataaaacatgcggaacaaatcataaaactaacatgatttgtaaggtagggaaagacaactaggcttaacaccaggaaaataaaaagggtgtgtatgttgcaatttcatggtaaattcatcttctcccgggggctctggtggatattctcagggggaatggaaatcccggaggaccaccctttgcttactcaggggggtcctgggggaggtcggggccccggnagctggggngtatttgttatggatttngggggngaatgttttattatccccctt

SEQ ID NO: 331314 - DNA, 423 bp, Homo Sapiens
tgtgatccatagcgggactacaagtgtgcacccacatgcttgtctacgaacctgaagtattctgatgcagtggagagagtgtagaactctggagtgaagagatctgcctggaaccctgactctatcactaggtaattcctataatctccctaggcctgttttctcagctggaaaattgattgatttgtggtatttgaagtgcctttgagcttgggatatccatgctggtgtttggctacagtatagcatagtggctagagcacaaactctggagttagaatgtttaggttaaacctcagcaactcacaccaaaggtatgtgactgtgggcaagttattagcctctctgagcctcagtttcttcatctgtagactggggataataatagtaaatatactgctgaacagttttaaagattcaatg

SEQ ID NO: 331315 - DNA, 484 bp, Homo Sapiens
  misc_feature (48)..(48): n is a, c, g, or t
  misc_feature (53)..(53): n is a, c, g, or t
aaagcctggtagtaaacataagggtacatagtaagcatcaataacccngggcncccggtcattggcgaccataggctcccaccccttcacctcaggcataccgtttacccaccccttcacctcagtataccgtttaattggtaccatggtcctacgtgctgggaacatgaagattaataagacatggtctctagccttagggaacttatattcctaacatgcatgtaacatatatgtaaaatgaaagttcttattctctcatctttccagctacttaaactttatccatagcccagtttactttcctcccatgtcagctaacttctgcatgataaaggacaggctttcatatcttagctatttctgtctaacagtgattcagtacttaccatgtaccccaaatgttgttaagaactggaatgcaaagatggtgtgtaagacagtctgtatctgtgagaagctaacattctgtaggcaggtttaa

SEQ ID NO: 331316 - DNA, 345 bp, Homo Sapiens
ctaggtagcgggccaaagaatgaagtagttaaatgtagtgattgagtcagaaacttcatgtatgtagaaggtagctatatggagagtgtagtgaaaggaaagaggtgaggaattgaaatgtcaactctgaattatctgtgtggccaatttactttgtattatatgtggcagtatttttgttctaatttgtcttcctgagaattgggccagttccccgtcatcactgcatttatagaagaaaactaattcttacattcataggtatgggaagagcatgaataacaagacaataaaagtgatatttaatatttaaagtcaattatagggccaggattggtggtccag

SEQ ID NO: 331317 - DNA, 438 bp, Homo Sapiens
agatttcaaggctgagatcacaaaactctagcaaatactgcacagacactgaccaatgacagcaggtgctgcctgtcaccctggagcaccaggcaggtttccaaagcacccttgctgtgccagcctctgattgctggttatagggaggtctggggtagtcccaaaagctgggatgtctaaggcagctggggtcagtcaggaggctcagggcagtggcaggaaaatattttcctccctggtagagccacagcggggtatccaggctgaatattattggcgagaaggaccatggcaccgcaccaagacctgcaggacaaactttgttggagctgaatccagaaaaacaatcttcttctaaaccactctcctgcccctcatttaattattgtgcttttgggtgcacttggactactctgaaacattcagaactctgtcaaa

SEQ ID NO: 331318 - DNA, 567 bp, Homo Sapiens
  misc_feature (25)..(25): n is a, c, g, or t
ttcttaacttattgaccttatatcntacatattataggactttgtaaatttaggctgatatggaaatgtatatttatatcaaatttaaatttttagaatgatggtgctactatagtctaattgttaatttgataattgtaattgtaatttgttaatttgttctaataatgttttcatgacattattcatttgctgcttggcttgatggcataacaagtatgggttatttaccctgaaaaggaaacagtatcacccttccagaatctctatttacagctacagaagatgcaacacacctgtttctggaccacttccagatcagatgtgatgcatgctttagatcatttactttgatctaggaattactgtctggcatttcgtggtgtagggtaggtgtctccagcactgtataggtgtctggaattgagataagaatcaatttcaatacaaaatacattttttgcttaaagcacgcaaggattctatgaattcaggtaaattcacagggtggaaaacaggaactaatgttatatattcctgtagttatcttcataatgaagcagaaaa

SEQ ID NO: 331319 - DNA, 547 bp, Homo Sapiens
  misc_feature (144)..(303): n is a, c, g, or t
  misc_feature (311)..(311): n is a, c, g, or t
  misc_feature (512)..(512): n is a, c, g, or t
  misc_feature (520)..(520): n is a, c, g, or t
actcatttatgaaacatttattgaattagacattctactaaccatttatttttacaaacagttaactaaacatcactggttttctttgataaatggtaatcttgcaaaggctcatttatagatacatcattatttcatgctgtnnnnnnnnnnnnnnnnnnnnnnnnnnnnnnnnnnnnnnnnnnnnnnnnnnnnnnnnnnnnnnnnnnnnnnnnnnnnnnnnnnnnnnnnnnnnnnnnnnnnnnnnnnnnnnnnnnnnnnnnnnnnnnnnnnnnnnnnnnnnnnnnnnnnnnnnnnnnnnnncttgcatngggtgaatgccagcagaaactaaggactagacattttcaagatggtggcttcatcttcccttctctgccagccacgtgttacacaagatggacccaatcaactgggaaaagcccatttggcctaagattaggggtgggggcgaccagcctttcccacatggcactttgccaaacgtccttaaaatgatggccacccattcnggaaccanctcctccaaacccggacctataaaatt

SEQ ID NO: 331320 - DNA, 601 bp, Homo Sapiens
  misc_feature (523)..(523): n is a, c, g, or t
  misc_feature (559)..(559): n is a, c, g, or t
accaagttccctatttctggatggtgtctggtcaccctgtggctgtgctgggtgtccctggccccaggagccataaggaagggacatgtcccactgccctggcctgtaagttctcagcccaccctgcccttactggccgccaaatcagtgtccaggcctctctggagttctgtggcctgaattctcatctctagttgatgccccttctgtgggctcctgaaactcagccttccctgtgccaagtcagtcttcacgtggccggctgcttcagtcctccaaggctggttcgtcgtttctgcctctccattctttgtctttttaattctttgtgttatttggagatggagtttgagagggaatatgaacaagcctgtgtgctccatctgctggtggtttgaactgggaatttctataccttgtatacattttttaaaactactagagcagcacctgtcatttgaaagaataactgtaaaaatgttgataaagggaaaaaaggaaaatcttaagtccctccatctangagaatcagtggtcttctaagcttggtttgtgccangtgtggaaaagttttggtccgtgtgtagacaagatgagtttg

SEQ ID NO: 331321 - DNA, 875 bp, Homo Sapiens
  misc_feature (51)..(51): n is a, c, g, or t
gccaaacagtaaatattttagactttacaggccacatatgatctctgtcanatagtcttaggtttttatatttttaaaggattgtttttaaaaaagattctctgctcatgggctggatttgggctgaatgctgtagtgtgtggaccccgtctagatcatcagaaggaaaaacattaaccttcagaatagggggtaattcgctgcaaaagtactatagaatggtctcatacataaattagtcaacatttgttatctcctgcaggtagaatattccgtggttgcttcttgaccaagggaaatacagtctggctgtgagagacttaaaatctcttgaggagcgctctggagaatggctgaaggagaggaaacaggagccttgagccagtgtaattacaaacaaataggttggcatagtcttaagtcctttgagtctagagaagatttgagttttgttttgcctgtggaggcaattgggggtttcaggtcaaagagagggtcagtggaaacaagggtgggccttgtgaggtgtggggaagccctgggaccctcactccccttccagtgtgtaactggattggctcccaccagcccagaagatttacgacgtgggaaatggtatacttggattaaaatatttcatccagatttgtttacatctagagagaaccccttgtaggttataaggaaactttttaacattcttccttgaatatattttctgtagctgaaaatgtttgtgaagtggctgtcaactacacatcgcatgagtagaggggctctgggtcggggtttcatatgcagcagagcagctcccttgctgccgtccatcaagagccctcaacacaagagtttgttataaatagaaataaacgaca

SEQ ID NO: 331322 - DNA, 518 bp, Homo Sapiens
  misc_feature (350)..(350): n is a, c, g, or t
  misc_feature (381)..(381): n is a, c, g, or t
tcttccacggcctcttttactgggagacctctgagtttctgatgtgtcatgacagataggagaggtcatatccttgtgatttgtggttcattgctggtgacatcagaaagtaaagtcaaccaggaaaagactccatgggcctggctcaggtggcttctggagcaccacctccatcaaggagcttttcctggggtcccatgtgtagtccatgttgcctgctctcccacccagggttgctgtgcttattatacaagatggccaataaagcatgacatatattcaataaatgttcatttctttttccaacccttcttattttaagttgagggtattcataaaagggattgagncatttccatttatggacgaggcaactgagtnaccaccccaggggcacgcagcgagatggctgtctgctgaacccatacaccagctctctaggcgtttggtcctgtggggaccggtgcatcagatgcttcctaagctggcgtcacctgcctggcccgatgcctcctctg

SEQ ID NO: 331323 - DNA, 572 bp, Homo Sapiens
  misc_feature (37)..(37): n is a, c, g, or t
  misc_feature (44)..(44): n is a, c, g, or t
  misc_feature (55)..(55): n is a, c, g, or t
  misc_feature (495)..(495): n is a, c, g, or t
  misc_feature (505)..(505): n is a, c, g, or t
  misc_feature (532)..(532): n is a, c, g, or t
  misc_feature (549)..(549): n is a, c, g, or t
agcaccatgataccctgtttcatgtatgatatcagangctgganactctatagtntgaatccttggttttcttatgacttacaaggaatttcacataaagtaagagaaaatcttgcttagtaacagtctgcactacatataataatagaacacaatttgtatgtgaaagtagtaagatatacttcattcataaaaagcaccatgcttctggctagataaatgaatttgaagtcccagagagaaattgcaatttttagttctgggatacccttatgctacttacactttttaaaatttaatacattcacgtgtttaaatgtattgagatttttaagcttgtgaatgaaattagcatcgtgctgtggctgtcaacgtggatgcactgcaattccccctgggtgggtaggggtttaaatattaattcagctcttggcacctggtttgcccaggcattcgggctggttggaatttcccaccaccatttaataaaggccncgggtggcgncaaccccatggcccttttggcctgggngccccttaaataatagnggttaaatccccaccccacctgg

SEQ ID NO: 331324 - DNA, 529 bp, Homo Sapiens
tcaaataatggatattctaaaggattgagagttaagtgaaactggcattttattttactgtgcaggcatgttggtgaagaactcaatgataatcagtatattctagtgtcattcccttggttcatgctaaggcacgagcagttttaccctccattgcctctgtaccaccttagagacccaagggtccacaggccacacttaacgaatttgtgagctagctgaaatggcttcttaaacaactaatatttagccaagccaggttttaaaccaagttgtatctgacactgaaatctataactcctcactatattacacagcttcaatacttctcagcacaacatgcttggctaacatggtttattcatactcataacccaatcctgcaattccagaacagggcccagaggaagataagtccccaagggtacattttacattgtatttaatcagtcaatagctatttagaggctcaaatcccatgtttctgattagcaatcttctgtttttcatttttttgagacggagtttc

SEQ ID NO: 331325 - DNA, 531 bp, Homo Sapiens
  misc_feature (454)..(454): n is a, c, g, or t
ttgcatgtaattgtatatttatttctctttttaaagaacactccttaaatgtaattcaatatacaaacttggtttcacagaattataatccactatatagcacaaagataacccagattgtatgtgtgcgtgcacatatttgcgtgcctgtgcacatgttgctgcacccctccctctctttcactcttctggacctacaaatgctcttcccaccttcaacactaaccaaaagccattgtgagtattacatacaacagacatcctcccacgagttctttgcccttgaaagattcttttccccattccccctggagatagccaggagtgtgacactcttcccctatgaaaaagggtaaggtgacctcccctaacacagatgttaaccctgttcccatggtaaaccggctgacaggaagagctggggagcaggtctcatccccttttccccttccanaccaacctcagagtccaagtggcgacctctgtgtagcctagttcagtcacatccggtgtagcaagactaagggattg

SEQ ID NO: 331326 - DNA, 509 bp, Homo Sapiens
  misc_feature (32)..(32): n is a, c, g, or t
  misc_feature (85)..(85): n is a, c, g, or t
  misc_feature (109)..(109): n is a, c, g, or t
  misc_feature (368)..(368): n is a, c, g, or t
taaggagcagccacactccgggggagggaagntggtaggtaagctgtaaccagatggctcccagtggccttaaactatgcacatngctaagtgaccaaacttctggttntgattggaaaaaagtgcattggttttcttgtccctccctttggatgaaacgttaccctttgacggggccttttgatgtgaacagatgttttctaggacaaactataaggactaattttaaacttcaaacattccacttttgtaatttgttttaaattgttttatgtatagtaagcacaactgtaatctagttttaagagaaaccggtgctttcttttagttcatttgtatttcccttgttactgtaaaagactgtttantaattgtttacagtttgttgcaacagccattttcttgggagaaagcttgagtgtaaagccatttgtaaaagctttgccatactcattttaatatgtgcctgttgctgttaacttttgatgaataaaaacctatcttttcaa

SEQ ID NO: 331327 - DNA, 623 bp, Homo Sapiens
  misc_feature (90)..(90): n is a, c, g, or t
  misc_feature (93)..(93): n is a, c, g, or t
  misc_feature (131)..(131): n is a, c, g, or t
  misc_feature (354)..(354): n is a, c, g, or t
  misc_feature (450)..(450): n is a, c, g, or t
ccagaccagaaccagcaagactgaaaccacctgttcattacaatggcccctcaaaagcagggtatgttgactttgaaaatggccagtggnacnagatgacatctcagatgacttgaatagtatccgcgcanaccaggtgagtttcgagccatcatggagatgccctccttctacagtcatggcttgccacggtgttcaccctacaagaaactgacagagtgccagctgaagaaccccatcagcgggctgttagaatatgcccagttcgctagtcaaacctgtgagttcaacatgatagagcagagtggaccaccccatggaacctcggtaagagaccacccaggaactgtaccntagggttggggtcaaggtgcttttgctccctgacgcagtcttggctgattttgtgaagcagtgctgtttggtggcgcctatcttttcctccttccnttctgccttttagctaaattcccccttgattgccctttctcccagatattgagcagggaatatagaccttggacccagccagaatcttggctgaacaagggggaggttgactctgttggctgtaatgaagcttctttagaaatgattggttttggccgtacgcggtggctcat

SEQ ID NO: 331328 - DNA, 635 bp, Homo Sapiens
  misc_feature (542)..(542): n is a, c, g, or t
  misc_feature (618)..(618): n is a, c, g, or t
ttacctgaggaagatctctttattccttccccttcccactccccatcaaccaggtccccctgcagcacccttccttgtgaaatcacagctgctatgacagtgaccagctccaaaccaccctgtgtcactgaaccttgggtgctgggtgacacatgggcaggaaaggcaggaagagcagggatctgagggcctgggggtgggcaagcctcaggggtggggtgggtgctgatcaatgccaggtgatcaatgccaggtgattggacccactgagtaccaggacaaacctggagtcacgcaactggcctacatcagttgccttggaacaacactgcccttgaccctacccggaaaagatttatttcagccggtagccctggtaacttgagtggctccccagggacaggaagtggcagaacctcaactctggcctctcctgacctgaggggttcacttttcatccctgtcaggacggggcactggttccagccctatggaagaatgttatgggtttggggaatcacgggaggagctaggtgttccangtgccctccttctcagctgaggcttgctcctctgttgaagcaaacagggacagagcacacatttagcctacctagnctgtccaatccttgcca

SEQ ID NO: 331329 - DNA, 365 bp, Homo Sapiens
  misc_feature (294)..(294): n is a, c, g, or t
  misc_feature (309)..(309): n is a, c, g, or t
  misc_feature (322)..(322): n is a, c, g, or t
  misc_feature (332)..(332): n is a, c, g, or t
ttaaagaaggaagaggctttattcggccaggagcatcggcaggcttgcgtctcaagaactgagtcccagagaaagagttcttggcccttttaagggtttacagctctaaggggtccacatgaaagggtcgtgatagattgaacaagcatggggtacatggctaggtgggggtggtgagcaaggcaagtgtttctccataccattgtctgtgatctatagatagcacaagcggttagggtgtgggttaatctttaacctacgggcctggccagtgggtgctgatcagtccggtantttttcaggttttanctcccccctttcntttgggaganaagggacaagtaaggagaaaatgggcctcctct

SEQ ID NO: 331330 - DNA, 483 bp, Homo Sapiens
  misc_feature (430)..(430): n is a, c, g, or t
  misc_feature (445)..(445): n is a, c, g, or t
ttaagtgatgtcgtttttcttgttacagttaccagtatgacaggtgggaaggggccgggtgtgggttctggccagagggacctaagaacattaggtcctggcaggtgcagccctgggagcagccacgagggggcatcaggctgcacaggcggctccaggatgtcggtccgggaccgggcataggggttagcgagtgattctcgggcaccgcaggacgagccctacacagagcaggtgggcccaggaaccccctttctcagtccaggactcccaggccctcagggcctggcttttgggtggcgcccgtctgtttgcagtggagttcggcggtcacagcctaagggaccggggtccaagcccaagccaagcttcaagcaagcaaggtcaacgcccttgccccttttccccgcgttcgcttggggacgccccngaagccggcttcaangttcaaccaaggcaaaaaagccctgggggtaaatccgc

SEQ ID NO: 331331 - DNA, 560 bp, Homo Sapiens
  misc_feature (24)..(24): n is a, c, g, or t
  misc_feature (40)..(40): n is a, c, g, or t
  misc_feature (47)..(47): n is a, c, g, or t
  misc_feature (52)..(360): n is a, c, g, or t
  misc_feature (414)..(432): n is a, c, g, or t
ccccatccccggatcataattacngacattgggtattggnatttcanaaaannnnnnnnnnnnnnnnnnnnnnnnnnnnnnnnnnnnnnnnnnnnnnnnnnnnnnnnnnnnnnnnnnnnnnnnnnnnnnnnnnnnnnnnnnnnnnnnnnnnnnnnnnnnnnnnnnnnnnnnnnnnnnnnnnnnnnnnnnnnnnnnnnnnnnnnnnnnnnnnnnnnnnnnnnnnnnnnnnnnnnnnnnnnnnnnnnnnnnnnnnnnnnnnnnnnnnnnnnnnnnnnnnnnnnnnnnnnnnnnnnnnnnnnnnnnnnnnnnnnnnnnnnnnnnnnnnnnnnnnnnnnnnnnnnnnnnnnnnnnnnnnnnnnnaactgttaaattctcacagagatcataaaacagtggtagtattggtgtaccaannnnnnnnnnnnnnnnnnncccgaaattttgttataagtagagaaacataaaaaacattgtgttttagctcagaggttgactttggacaaatggtaattatgaaactgtttttgtctttagctgctttttgtcaattcatagcctgg

SEQ ID NO: 331332 - DNA, 203 bp, Homo Sapiens
  misc_feature (140)..(140): n is a, c, g, or t
  misc_feature (171)..(172): n is a, c, g, or t
aacttgggcgaaagacttaacctcttctgttaaatggtaatagtgtcagtactacctctccaggtcattgcattgcatgagactttggcaactgtcagggcgttatatatatgttgtacattctaatccactggctgttngcttaagccaatactgtatactaggctctgnnttggagaatcagagccaaccgtcgtgccgaa

SEQ ID NO: 331333 - DNA, 524 bp, Homo Sapiens
  misc_feature (166)..(189): n is a, c, g, or t
  misc_feature (203)..(240): n is a, c, g, or t
  misc_feature (474)..(474): n is a, c, g, or t
gagttagaggcacaagtttcccctgactcccatctcctagagggaaaccatcattaagagactggtgtatatctttatacattttactgtcttatttgtagaaacaaatgtttctgtatgaaatcattttttatatccttttctaccatttcttttataactcagnnnnnnnnnnnnnnnnnnnnnnnngtatgtgtgtgtgnnnnnnnnnnnnnnnnnnnnnnnnnnnnnnnnnnnnnnctttaaacatctttttatggtgatagaggtgcatcgtttttagcaatttcgtagttgtcccctgtatgaagcagggggaaaggaagggctagtttcatgactgaagcagagctgctgtttgggcaagaacatcatctttatttagctttcataaaccatcttggttgtggaaaagacagcacagccaggatgggctgaaagtgcttggggatgtctaatctgcttagcataagnaccaaccaagattctggagaaagtcaggactcaagagtatgcaaatcagg

SEQ ID NO: 331334 - DNA, 270 bp, Homo Sapiens
  misc_feature (182)..(182): n is a, c, g, or t
  misc_feature (241)..(241): n is a, c, g, or t
ggcacgagcgactaaccagtgccatgtttgttgattggatctcctttatctctctgatggtcaacagaccccacccacaactcttgctgcctccatacaccttgctattttcatttatcatgtgttggaacctaaaaacaaaactaagcacatgggaattatgcatggaatatgaataaatngggcactgcatatgcggctgagatgctgtcctacaaagaaagcacatgctcttcatggnattaacttttgactttgggggattttctg

SEQ ID NO: 331335 - DNA, 465 bp, Homo Sapiens
  misc_feature (22)..(22): n is a, c, g, or t
  misc_feature (24)..(24): n is a, c, g, or t
  misc_feature (57)..(57): n is a, c, g, or t
  misc_feature (429)..(429): n is a, c, g, or t
  misc_feature (445)..(445): n is a, c, g, or t
tttcctttctgcttagagccgnangacgggaagctggaatctgttatggtgtattanggggaggagcctttctgttatttccccccagcttccatcacccttcccttaatgccaggagcgccgaggtttggaactgaggctaaaccgaaggcgtttctcctgcttctgtcaccctgtgctgtctcccggcatctcctcactatctgggtccaggcccgggtcctccctgcagactccctcccctccagcccacaaggactccagcctgctggctgttgagagctggaatgaagcagtaagaagttaacgccaggtcaagcctcgggccccaagggttccctgggcacaggctgacactaggagcttgctctccttgtccggggacaagctccagcagctcaggctccagcctccagtgagccgcctctnctggagagtagcaaanaatggagaaaggcctggctt

SEQ ID NO: 331336 - DNA, 373 bp, Homo Sapiens
  misc_feature (37)..(37): n is a, c, g, or t
  misc_feature (65)..(109): n is a, c, g, or t
aaaagcaatggattttattagtattctaaaaccaatngtagccacatggcatcaaaaatcactgnnnnnnnnnnnnnnnnnnnnnnnnnnnnnnnnnnnnnnnnnnnnngtactgatatcagtcaaactcacagtaaagatctaagaagccaaaatttccatttgccacccttacaatcaggaatgtttactacactgtacaacttattgggtacagattgtatattcatggcattcattctgtagatggtcttgtgtagcaaatctagattagaataagaaaacctatttttatattatgtatatttaattttgtctaacttcattatggttttattttttggaataagaggtagtcgatagagacagctgg

SEQ ID NO: 331337 - DNA, 563 bp, Homo Sapiens
  misc_feature (11)..(11): n is a, c, g, or t
  misc_feature (24)..(24): n is a, c, g, or t
  misc_feature (31)..(31): n is a, c, g, or t
  misc_feature (452)..(452): n is a, c, g, or t
  misc_feature (508)..(508): n is a, c, g, or t
caaaatccccnggagcatgttttngaaaaangactcggcacttgataaccatggccgcagttctttcttccagatcgccaagtttctgccctctttcatctagtgccagcctggctcgtgctaattcaccaacaactccagatgctgccccttttacgcctttcaatgcccacccagggccaggaatatgctgtgcaagggctccttgaagcctttcctgaggacgattctccaaatagttcttctctgtcaagagattgtgcaccacctccaaataagcctttaaagaatcccctgtttggtgcttgagcgtgtttctacaggagtgaagagttcacccaacatttcctgaagattttcacaggtctcttgactataagtaagtctctggatttctgtaggtgaaacaaggtataatgcttgtccattgttggtaaagcagaacgttctgntatccgcatattggtaaggggcaagtaatacacatccaacagaggtcttaaacttngcaaactaaaagtcgattatatgtcgcattggcacagaaacaggcaaggcagatc

SEQ ID NO: 331338 - DNA, 685 bp, Homo Sapiens
  misc_feature (212)..(212): n is a, c, g, or t
  misc_feature (651)..(651): n is a, c, g, or t
aaaatggattctctcaaaacactgccatttgaatagcgacagaagtgctcccccagcccccaactttggacagcaaagttgaggagaatgagcagacacagttgtttgcttgatctgaatctctctaaagtaaagtatttccaaactgtgtgacaagagcctacctaccactgtagcggtcaaagctgaagcttcttacagcagtgaaacgnggcaccacctcccccacactcctcattccccgcttaaaacatggatactttcaaatttgactgtttcttaaactgccatcctaagatatggaaaatttttatagtaaagtgtctagttagcttatttccttttctaaaacaagtgttttcaagataactgtattttacctttatatgtactgaatagctgtttctttttgaattatttgccttttaaaatttgataatgtctctggatataacaggacaggagttcttaaaaaatatcttaagaaattcactttatgggtaaacccaaggtttttgccaacttgttgcctaggaaaataagggctagtttcagtttatacaaataggaattaattaaacattttacagtccttggattagggaaaccagaccccaatctccttattaacaccacagcgtatcctggccnttggacagtggtaattcaccaatttctccccttt

SEQ ID NO: 331339 - DNA, 440 bp, Homo Sapiens
  misc_feature (11)..(11): n is a, c, g, or t
aataatgatgnaacccaatccagaacccaccttccttcaaaccggactataaaaatttgggcgcatttcaccaccaacccagtcttttccactcggagacacatccatgggccatgccttaaagccacggtgtcagtgcagacatctatagaggaagctgtttctctttcccttctcttctacctattaaacctctgctcctaaactcctcgtgtgtctgtgtcctaaattctcctataacaatgaaccccagggtatgtactccagacaatgtacccacttcaaaagggctgaaagttcttttaaaaatagaggaaaggggggaaaaagtgtacttagcacctagttttgcaccacagaaggaaactggcactcacagatcctgctggtgttactggaaagggatcctggttaagactccaagagagggttcttggatc

SEQ ID NO: 331340 - DNA, 414 bp, Homo Sapiens
  misc_feature (194)..(312): n is a, c, g, or t
  misc_feature (333)..(333): n is a, c, g, or t
  misc_feature (349)..(350): n is a, c, g, or t
  misc_feature (352)..(352): n is a, c, g, or t
  misc_feature (386)..(386): n is a, c, g, or t
  misc_feature (400)..(400): n is a, c, g, or t
atccattttaaaaactactagagcagcaccctgttcatttggaaggaataactggtaaaatgttgataaaggaaaaaagaaaatcttagtccctccatctagagaatcagtgtcttctagcttggtttgtgccatgtgtgcacacgtttgtccgtgtgtagacaagatgagtttggagctgggtgtgggtgcannnnnnnnnnnnnnnnnnnnnnnnnnnnnnnnnnnnnnnnnnnnnnnnnnnnnnnnnnnnnnnnnnnnnnnnnnnnnnnnnnnnnnnnnnnnnnnnnnnnnnnnnnnnnnnnnnnnnnngagcatggtggtgcatgcctntaatcccagctacacnngnggctgagacaggacgtgaacccgggaggcggagnttgcagtgagctgnggtaccaccactgc

SEQ ID NO: 331341 - DNA, 721 bp, Homo Sapiens
  misc_feature (56)..(56): n is a, c, g, or t
  misc_feature (92)..(92): n is a, c, g, or t
  misc_feature (257)..(257): n is a, c, g, or t
  misc_feature (367)..(367): n is a, c, g, or t
  misc_feature (516)..(516): n is a, c, g, or t
  misc_feature (614)..(614): n is a, c, g, or t
  misc_feature (658)..(658): n is a, c, g, or t
aagagtgagagtgtaaactgcatatgaggttgggctaaacctggacatgtgttaanaaaccaaagcagccaggaatctccggctctgccagntgatcatctgggcaggacatggggacgagtgtccaggctgaagtcagggcccggccagcagagggcattttgtattgagctccacagctggtcacattctgtggaatgtgcagacgtgcacggcccatcagacagggtctggagtggggctgccgtcttgggcanttcctcccgggtgtctgcaaaatgcagaggtcaccagagccaaggcagcaaggcaaggagcccggcttctaaaggaactctgagcaggtttggtccatggctgggaggcnagctggccccacagcacatagcacggagggcggcggcggagtcctggacgctcttggcaaggtcccctcatggaggaatgtgggggatttgcttaggccctggtcttggctggccttcctggaccgcagttggccaggagcttgaaaanccgtgaccccagtctccctgcagctgttcttgatggaatttctgttcgccagtcagatgcatttgcacaggacttggatcctgaactgtgtaacctgnagaggcaggtgtgagcggccatgctgcttgcccagcctgtgccngtgtctgtttctgttgtctctcggcccttctgtgagccctcagtaaagctcttcgtgcttcaa

SEQ ID NO: 331342 - DNA, 588 bp, Homo Sapiens
tatctttatccagcaagtaattttgagaagcccaaatgaaaacgttttttgctgctatggcctcagcacggagccatgctgctcgtaccagaggggcagtagagcttggatagaaagaaaagaaacttggtgttaggaaatgactatgcactggtatttcagactttctaatttaatatataaacacagtcttctgcccttctgcaatacatttgaaaacttgtttgggagactctgcattttttattgtggtttttttgttattgttggtttataccaagcatgcgttgcacttcttttttgggagatgtgtgttgttgatgttctatgttttgttttgagtgtagcctgactgttttataatttgggagttctgcatttgatccgcatcccctgtggtttctaagtgtatggtctcagaactgttgcatggatcctgtgtttgcaactggggagacagaaactgtggttgatagccagtcactgccttaagaacatttgatgcaagatggccagcactgaacttttgagatatgacggtgtacttactgccttgtagcaaaataaagatgtgcccttattttacct

SEQ ID NO: 331343 - DNA, 411 bp, Homo Sapiens
  misc_feature (148)..(248): n is a, c, g, or t
  misc_feature (337)..(337): n is a, c, g, or t
tcttctgataacaatttaaattgcatctaaaatgtcatctatttacagttatttttgaatacttcatttgcccaattaatgaacaagcatttatttattcatttgtttatttattttgagatagggtctcaagcggttgcccagactnnnnnnnnnnnnnnnnnnnnnnnnnnnnnnnnnnnnnnnnnnnnnnnnnnnnnnnnnnnnnnnnnnnnnnnnnnnnnnnnnnnnnnnnnnnnnnnnnnnnntgcctaaccctagctggcccgtcccttggctattaggtgccgcatgacccttgtaagtacctacacccaggcccctggctccgttgggnctcatctggcacagtttctccccctcctcttctccagatggcctgcacgtggcgctggtctatgtgcgcacctg

SEQ ID NO: 331344 - DNA, 624 bp, Homo Sapiens
  misc_feature (477)..(477): n is a, c, g, or t
tttcaagttacacagctttattggcccccagcagccacagttcccctaaggggcttttgggacagggagggcccgggcgtccagtgcaaactacagtacgtgagtcaggccctgaggggggtgcccggggtcctccttccctaccctgccaggagggccccgctggtgggagacaggtgtatgggctctgtgggctctgtccctggctgaatggccccagactggttgcagctgggcttgaggggctgacaacaggaagtaccatcatcactgccagagctcaagatcccacacccgacatgacataaataaaaaaataaatagtgttgtatctttcccctcatcccctccctttataaaaacacaaagtcctcagagctggggcgtttggccctgaggagccgccctgtgcgagggagccggagtgtgggctgggcgagctgggagcagaggtcgtccaggctgtggtcctgagcnatgcctcggccagggtgaacatggggtaccgctctgtggctgaggaggagctgaggacctggcgggaagagacagggtcggccacaaacagtgccaagccatattccttagcccaggtttataaagtaggtgcttctcaggaccacc

SEQ ID NO: 331345 - DNA, 478 bp, Homo Sapiens
  misc_feature (318)..(318): n is a, c, g, or t
tctgagatcgtggcattgcactccagcctagacggccaacaggcaacactctgtctcaagaaaaatggaaaaggaaaaataaccattttcacatgtactaatgcaatggattattaagcaggtactatgtgcctgaagggactgttacagagcactttgctgggaataacacattacatgatttaatcctcatagcaccttgggagctggtattaagtgtttaataattccctggatttagaaaaagggcccagcatttttatttcttttgtttctctgtcactgatttttttaaaaaatgtatagaattaaagctanaatatagacagaggagagggatacagaaagaaaaactttaatgcagcttagagaaatttttattgtgtttatatttacttttttctgacttgcagagcaacaacatctccaagaatagaaaacaggttggtaaatggaatgtctctggagcactggtttt

SEQ ID NO: 331346 - DNA, 511 bp, Homo Sapiens
  misc_feature (461)..(461): n is a, c, g, or t
agagccactgagcccggcctagattcagctttaatcagaaaggcaaggtctatcctcccactgtcctttgaaatatagaaaatgatatagaaatgtcatcacccaagctcacttgctatctaaattcatattcagatcaaagctgaattctgttttgctctcttcttaaaattaagccatgaaggtgaccctgaggacacatactagagcaaggagcttgacaccaaatttaagtcatgagctgaactgtttttaaaacatagacaatttatgcttacatttgcttctttttctgtatttccacttcatagaggaaacaagtaggaactatgatctggggtctcacctcttcagcaggagctcacacactctcactcactttgtaggggcctgcagtagctttctgtttctgagcagggtgggtgtggctgcttagtcaattataaaagcatttggcacantggttatacttcacatgtaagcaagaagggcaggcatgtatcatgtccag

SEQ ID NO: 331347 - DNA, 482 bp, Homo Sapiens
  misc_feature (15)..(15): n is a, c, g, or t
  misc_feature (404)..(404): n is a, c, g, or t
  misc_feature (447)..(447): n is a, c, g, or t
cattctgcttgtttnttttctttccaatggttaggtccctcttctgtagggctgctgcagtttgctgggggttcacttcaggacctatttatctgattcgctgctgtgcctggagatgtcactcaaagaggctggagaacagcaaagatgagtgcctgcttcttcttctgggacttctgaccttgagggcaccagcctgatgccagtaggagcactcctgtatagggtgtctgaacaacctctaattggagggtcctcacccagttgggtggcatggggaacagaacctgtttaacacagtgcctcacttgcggggaacccacttgtctgggctgcctggattcctcagaactaccaggaggaaaggctaagtctgctggtccacagagactgcagccatcccntccccctagggacacaggaccagggagatgcaggttctgtccnctgacctctggctggtgttactggagttggtgggg

SEQ ID NO: 331348 - DNA, 320 bp, Homo Sapiens
  misc_feature (212)..(212): n is a, c, g, or t
  misc_feature (292)..(292): n is a, c, g, or t
  misc_feature (295)..(295): n is a, c, g, or t
gccgccgccgcctccagagccacctctgtagcccccactgctggcttccggagccgtagctgccatgccgccgccgccacctccagagccatagctgccactccggagccatagctgcacagccgccgccgccgccacctccagaaccatagctaccaactccggagccatagctgctacctccagagccgtagccaccgccgccacctccntcggctgccacctccactgatggtggtgtggcttgtgctcacagacacactcacgttcggggcacattctccagacatcnaancattttttctcagcaagagtacaaa

SEQ ID NO: 331349 - DNA, 462 bp, Homo Sapiens
acaaaattttatttttcaaggttgaacaatgattcattgtaggctttcagatgaaacaattagcagtcttgaagtacacattgaatacaaattaatttgatttcagtaggcacatttcttggaacaaactgaagagtacttaaaagatcccattgaatgcatgtggcattattcctagtttacggatactgtttgaactaaatgaatcttgggagagggcagttagtaattaatgcatttagaaactgatagcgctaaaatattaaaacttatgcattccaatgtttacatgtgtatgtgtgtgtgcacatgtgattctgctttgcctgttttactatcttaatgattatcccttcttactgtttcctctgaggatcttatctcacttctactgacagtcagaaattttcttatcagcccttttatccatcattttctagttttcaaatatttccaataatg

SEQ ID NO: 331350 - DNA, 506 bp, Homo Sapiens
cagatcataccatcaatgtctgtgtccatataccccagctcagcagaagttctgagggcatgcaggaatctaggtaaaaatggcttatctaacagtagcattttgttggataaatgtccacctccaagaccaccatcttcaccataccctcccttgccaaaggacaagttgaatccacctacacctagtatttacttggaaaataaacgtgatgctttctttcctccattacatcaattttgtacaaatccgaacaaccctgttacagtaatacgtggccttgctggagctcttaagttagacctgggacttttctctactaaaactttggtggaagctaacaatgaacatatggtagaagtgaggacacagttgttgcagccagcagatgaaaactgggatcccactggaacaaagaaaatctggcattgtgaaagtaatagatctcatactacaattgctaaatatgcacagtaccaggcctcctcattccaggaatcattgag

SEQ ID NO: 331351 - DNA, 470 bp, Homo Sapiens
  misc_feature (368)..(368): n is a, c, g, or t
  misc_feature (373)..(419): n is a, c, g, or t
  misc_feature (438)..(438): n is a, c, g, or t
  misc_feature (449)..(449): n is a, c, g, or t
atttcggcacagcctgatgtagcctttttaaattggcttccttcacttagtaatatgctttaaaggttcctccatgtcttttcatgcttgatagctcatatggactcattttaatactcatcataaacactgccaacattgcttcctggaatggaggctggagagaacttgggttctaaaattatcctgggtggcaatgcagcccatagtttcccgagcaagctatagacaagactgtgctgactattagaggggaatctgtggtcatgctggctccattcaaaacaatgattgtagaaaagggtcccctcaccctttctggatagatgccaggataatgcttcaggaagtgaaggccccaggctgangtatnnnnnnnnnnnnnnnnnnnnnnnnnnnnnnnnnnnnnnnnnnnnnnnaaggattgcttgagtccangagtaatttgnaaccagcctggacaccatagc

SEQ ID NO: 331352 - DNA, 516 bp, Homo Sapiens
ggaaattacttcaaactgaggtgtttggccccaggatctacagggctctaggaagtagcttatgagagcatgggcagtgcagcctcctcctctctgcttgggtgtatgtagccccctttataaagtgcctggcctgtgagcagggctccaacttttatcataggatgtaaaatgatgtaaaatttcattttgaatccccatctccaagcatggcaagatgacactgagatgccagggaatctgaaaatttctcagtcacctcccagatgagcggacgcaatgactctcccctgcccagacagagacctccacccactctcaggcagagaggccctccctaggcaggtccctacaaactgagcacaaaggcaggactcctggcactcggagtcaagagtgtgggcaccctgagccaagcactgtcctagaactctttgctgggtctttatggcggtcaccagggcctggctctggaagcagactcagggtgatctgggggtacaccaatgcctcagc

SEQ ID NO: 331353 - DNA, 546 bp, Homo Sapiens
  misc_feature (145)..(145): n is a, c, g, or t
gtaaatgtagacaacttattattgtagataaacacttcacatatattatctcacttaatcctcactaaccactccgtgagatggatgctgctactatcctcattttacagaggaggcatagtaccggttaaatttgcccctggtncttaagggggacaagtggcagacatgtgtgttcaactccaagcaggctggattcgctatgccactgctcagatgaccttcatctcgagttcagttactttctaaaggaggaaacagagtcaatcgtgtgaggggaggtgaggaggggactgtcacgttcttcacctaattggcaactggcataggcttagctttgcatacctgtctggaattcaaatctcaaatcatacacatcagccacgaaagctcaggcaattataaactgtaccttagtttgctcacctaaaagtgggagtaataaggacctatgacatattgcacagcttatctatttagtacactgtgatgctacctttgagaagataatgcaaatattttctaaatcatcttaggagctaaatt

SEQ ID NO: 331354 - DNA, 471 bp, Homo Sapiens
  misc_feature (401)..(401): n is a, c, g, or t
gcagtgttccttagttcccgtgtgaaagcagaggaacccatgacatccaagggcgtgaaaggatcagagctgactggacatagtgagctgccttcttgcgttcgggtgcacccctgttaaacctgatctgtgtcataagtgactccggatgcatcagtgtccaccagttggaagcaatgacaaggatggctggctggtgtttttcagccttccggtttatagactgtatttatctagtggattcctgcaggccccatactgagcctggactgaaagtatccactcggaccatctgttatctctctacactgaaaataaaacctcttccacccaccccattcggttcttctgcctgaccttcaaatgcccatgttggcctttttacagcagtgccacgggcnccaaagccgagctggccacatctcaaactctaaaggggtttgaaactattaggttcttggtcattttttt

SEQ ID NO: 331355 - DNA, 243 bp, Homo Sapiens
aaagcttttgaactctgcttagttttaagttaaggatggtgaacttaccaatcctcatcagccaaaagcctcagggttctgtcagtgctatttctggtttagagaatggtcgtagttctgacagatccattatttctggactatgagtgacagaaggcatcctttctttatactgtgaaatagctccagtaggtgtttcacctaaaacaaaatacattaaataaactatgagagaaccttttt

SEQ ID NO: 331356 - DNA, 539 bp, Homo Sapiens
  misc_feature (216)..(425): n is a, c, g, or t
aatttccacgctaggtgttgcctatgttttgcttagataaagtggctatacagctaagctctgggatggaggttaatattactacgccggtatgaagctatgaatgctttactagcatcgtcaatagagacccttagaaagagtaactacttttacacacagacgcatactaccagtaaagactgaatccagaccacctggaatagaaatcaatgnnnnnnnnnnnnnnnnnnnnnnnnnnnnnnnnnnnnnnnnnnnnnnnnnnnnnnnnnnnnnnnnnnnnnnnnnnnnnnnnnnnnnnnnnnnnnnnnnnnnnnnnnnnnnnnnnnnnnnnnnnnnnnnnnnnnnnnnnnnnnnnnnnnnnnnnnnnnnnnnnnnnnnnnnnnnnnnnnnnnnnnnnnnnnnnnnnnnnnnnnnnnnnnnnnaactggactgaaaaacaaactttcactaaaaaaccttttagtggtataagattctgaggatttgcattatctgcctgttgcccagaacttatatggcatgttattattatttta

SEQ ID NO: 331357 - DNA, 219 bp, Homo Sapiens
ttaaatattaacgcacactttttattatattaaaatcaggcaatggtctgacaataaaaaggctgcttatggaatactgttatgttaaacttcacttacaggatgttaaatccttagaactaaggtattccccccagaaaaagattaatggaaacatcaattgcttttcagacttgatagttgctgcttcaaaaggtggttttacacaaatactaaatt

SEQ ID NO: 331358 - DNA, 437 bp, Homo Sapiens
cacaatcgtttgtatgccctgagttttctctcaagttaaaaagtcaccccaaagatgtcttaaatgggcaaaatcaccagtgtccaatgcaaggatttccttttccgttttgacatggtaattttcttggtaatataaatcactttaaaatcattccagttcaaaggaatataatctctcaaaaactaaatgacttttccttcacagaagttaatttaattttgtttggattattgtacaacctccctttcattacaccaggcacatatttcaacagtagaaactttttttaaaaaaatcattatagaagattacattttgcaacggttttgtttctccagagaaaaaagtaatactaatttaataatttacttggagaaaaacctctgacaaattggtaaatgtccatctatatacgtaattcttaatatcaatac

SEQ ID NO: 331359 - DNA, 498 bp, Homo Sapiens
  misc_feature (236)..(236): n is a, c, g, or t
  misc_feature (472)..(472): n is a, c, g, or t
tggccagagcaggctttattggggccgtgtaaaccccagggagaggcaggacgtggaccacagagagtcatgtacaggctgcgctttcacttgtcttctctgtctcagtctcctgaagagcccgaggaagtcaagtctccccaccatgagtgaggggtctggtctgacagttgggccttcagagccaggcacgtggaccgtgtcagaagcgccacctggtggtgactgggatgctngcagggaggagctgagggcaaaactctagtggaaatttcccaggtcggtcccacgccccggtgacagggtgaaccctgagaggagcccccaaacttggaggcaattgtctttgaggtaaccactcaccccagcttttcagagaccagaggcaagacatttctgctaagagccatggatagttgttccatgcgttttgtggtttcttatcccaaaagggcatgaagtcacagtaggnagtgacatggtaaatcagccatggcc

SEQ ID NO: 331360 - DNA, 638 bp, Homo Sapiens
  misc_feature (595)..(595): n is a, c, g, or t
  misc_feature (601)..(603): n is a, c, g, or t
cgggttcattcatttattactgttttcattgtcccctcctccctcccacccggtctctctatgaaaccggaaagggaaccgcgtggggaaaggggtactaaaaagggggcatccgcctgaggagcggcagacagaggaggacggtgaagtaggagcgctgcaaggagaaaggaaggacacgagggatggagagacagcgaggaccagggccaagggcggcgggcgggagagggttaaaggcaacaggagacaaggtcctccctccactgcctttcacactccggttgcgggagaggccaagcgagaaaacccaaatctagatgaaaaccgggggaggggaggggagcacaggttaggcggatctggactgtggcatctctcccgccttccctgtcgcgcagacatcacccagttttcctgcatccattggatggcttcattctcgttgaactgcttttcgaattcatattcttgtaaagtcaacactgacatgttcattggggctgatcttcggagtcgctacgtgttctctatacaaaataaaataatctgtaaagcgcttgatttcgagtgttctcctgtctgcttcccccanccaacnnnctaggtcttccccacgccgctcggtctccacggtc

SEQ ID NO: 331361 - DNA, 414 bp, Homo Sapiens
aacaacattttcagcctttattgagagtacagtcatcatgccaaaattcatccatcaacatacaaccttatttcccatctaaagttaatgagaatgtattttattttaaatgggacatagaggcaacatgccaagaattaaagtacaaccataaagttttagtttcacactttgaatatcaacaaagcagtaattcctaaaatcatgaaaacatgataaagtatctatacagaaaaaaatgaacatttaagtcatttcacgctttcttaatatcatatagtgaaaacagatgtacctataatttccagcctacagatagcatacttcataaggtcattattcatttaaaatagtaccaatgtttacaaagaacctttcacttaaatttcacagctggcttataaaatgggacct

SEQ ID NO: 331362 - DNA, 492 bp, Homo Sapiens
  misc_feature (34)..(34): n is a, c, g, or t
  misc_feature (56)..(56): n is a, c, g, or t
tcaggaaggtctttcccaggcaaagtgccccttngacagctagcccccccagtggnccccaagatattcctggttcgaagatactcattttcaaattgaaaaaaaccaatgggagtctaagtaatttttctgcaatttcatttacaaagatagtagcaaaaaagtgaaaatacattttctacagactaaatcgaaatggttctctatttcttctcaccttttaacatcatcaatctcctcataatctcatggaaaataaaatacaataatagtctaaatgcacaaagcaacgtataatcagcttactttactccatttcaattatgtgcattttaacatatttacattagaagcatgtattacaacccgaaaccttgtcagacagcttaaagaacccagctgagaatgttccatacctgcttgcttatttgtttattaagagacagggtctggctgttacccaggctggacagagcaagactcttgtctcaa

SEQ ID NO: 331363 - DNA, 491 bp, Homo Sapiens
  misc_feature (435)..(435): n is a, c, g, or t
  misc_feature (442)..(442): n is a, c, g, or t
  misc_feature (454)..(454): n is a, c, g, or t
  misc_feature (465)..(465): n is a, c, g, or t
  misc_feature (479)..(479): n is a, c, g, or t
tctttaaccgtgtggtctttatttcagtgccagtgttacagatacaacacaaatgttccagttagaaggaattcaaacggaatgccaaggtccaagccaggctcaagaaataaaaagggaggtttggagtaatagataagatgactccaatactcactcttcctaagggcaaaggtacttttgatacagagtctgatctttgaaactggtgaactcctcttccacccattaccatagttcaaacaggcaagttatgggcttaggagcactttaaaatttgtggtgggaatagggtcattaataactatgaatatatcttttagaaggtgaccattttgcacttttaaagggaatcaattttgaaaatcatgggagactattccatggactacagctaaaagaatgggcgagaaaaagggggagctggaagagccntgggaangtttctattacnaaatagagcancctatccttcatgnccaatctccaaa

SEQ ID NO: 331364 - DNA, 450 bp, Homo Sapiens
  misc_feature (229)..(229): n is a, c, g, or t
  misc_feature (354)..(354): n is a, c, g, or t
gtttcttttcctgataaaggaagacctagactctgagaggaaacctcctcccaagcctccggtgcacctgatccggggctagaacctatgctgtgtgactcctgagtgccccctccagctcggcccttgacttgcaagaagattcctgccaggactcacaaagcatttacccccagcatctctagactggcatgaagtggctgtgtcctggtttagaatactccttcangtgacaccatatgcttttgataagcatctcttgaaacaatcgattagccttactaaacctattgaactctgcagggagacccaaaagcaaggatttctatgacacaggagggagcctcttctctngaagctccaagttggcactggaatcagtgaacccacaattaatccaaaaactttggaggaatttttggggggctttggttcttccctggggctgtt

SEQ ID NO: 331365 - DNA, 584 bp, Homo Sapiens
  misc_feature (485)..(485): n is a, c, g, or t
  misc_feature (536)..(536): n is a, c, g, or t
aattttaaccctgttgaagattgtaacaaatatattctagttgctacagtctaaaacagtgcttggaaatactgatgcttagtgttatttctatgattactttaataacatttcctgagtttaattttttcattacccagctatctttcagaactggtatattgatttttctaattaatattctttgtacttgggatggtatttttattttgtacttctaaagaattgaatagcacaaccattataagtgatgtgcttgctaatgttatcatataaatgctcaaggtacaccttctaatgttgaaaaataggaaaataaattgaccttgatgaagtgtgtcttcttttgtctgttcccaggaaagtttatttcaggtatttctactgctgaaatgattagcgttaacagcttttcccctccattttattttacagggtctcttcatcttcctgatatatggggtgtacaacacagaggtaagtcngcttggagtatctcaaggctgacagagtgaatgagagaaatgacaggttcntatctggataactggaggaccaagttggctttccaaagagtgtccaca

SEQ ID NO: 331366 - DNA, 480 bp, Homo Sapiens
  misc_feature (18)..(18): n is a, c, g, or t
  misc_feature (41)..(41): n is a, c, g, or t
  misc_feature (92)..(92): n is a, c, g, or t
tctgtctgggaaattttncctttaaaggattatttaggacnggaaccaggaggcttgggaaccagggaaagaggggaaatgttgtattatangggtccttggggcctctaaccatcagtatagggttttttctttccttgatggcagtagaaagacctcattttcataacataactactcttgatactttctttaaaaacactttttattaaagattctatcatgaggtatttggctgggagctgggaggctaaagcgctcatgctcctggctcttcagtgaatttaactgtgtgaccttgggcaagtcacttaacctctctgtgcttcagtctccctgtcttgtaaaatgggagtaatacctacctcacagggttgttgtggggattaattagagataatgtctgtaaagcatttaaggttcttgaagaaggcactatataaatacaaaataatatctattaaagttggtttatttgtg

SEQ ID NO: 331367 - DNA, 125 bp, Homo Sapiens
gccctttggcttcttacatttttaatgaatgtgtttatgagtactttggactccactgaaaaaaattagaagaggccaagagagtaggatgaagggccttccagacagggggaatagactgaaaa

SEQ ID NO: 331368 - DNA, 398 bp, Homo Sapiens
  misc_feature (309)..(309): n is a, c, g, or t
  misc_feature (318)..(327): n is a, c, g, or t
  misc_feature (382)..(382): n is a, c, g, or t
caattcaatttagaaatctttgtaattttcagacatacacaaaagagaataatagcaaaatgaatctccaggcacctcacctagcttcaactgttaccattttgccagtttctcctcatctaatcccctatacttttttctttgctagaatgttttaaagcaaacactggacattataattgatacacattcttaaaagcaatttataacatgtaccaaaagcttttgggcttgggaaattccactgctgggggaatctaggggaaataaacaggaaatgtagggaaaatattttatggtggtaggggncttttctannnnnnnnnnaaaaactggaagggtaaccctaaatatggccaaaactggggggggaaaatggctnatgggccctttggggg

SEQ ID NO: 331369 - DNA, 478 bp, Homo Sapiens
  misc_feature (151)..(151): n is a, c, g, or t
ccccgatcaggtccctgggacttatagttctgaggggagtctggaatccggggtgaatctctggaaagttttccgttttttgggaccaggaattccagcttttccaggaagaagtcaggccaatgggaaaaccgaatttcaatccttggcntataccattaattagccattgggacaatgagaagtagagaagagttgaaaactatttaataagctaataagtattaatatttgagaacttgactcatgaatatagcatataggatggaagaagaacagtggaatcacagaggaaatgactatgtccatggaaccaattttctttcttgcctttagggttatagaagatggaagaaatctatttcttatccctgaagcagcttctagttttagtaatagaatgaatctgtcgcccctttggtgatagaagaactgagagtctaattgttgcttagggatgtgctctgttacatgtgat

SEQ ID NO: 331370 - DNA, 467 bp, Homo Sapiens
  misc_feature (88)..(88): n is a, c, g, or t
cgatgtggaaattttcctcctcccctcagttcaaatgagataaagatccctccctctccctcacagtggaacatgaggtccacagtgntccatgtaacctaactcctggttaagaggatatggatagaaggcacatgtttcaacttctggcttctgtccttgaaaagtgtgatgattcccatcctttgctgtcttccttcccgctgactggaatgtggacttggtagtgagctaccttggactatgtggatgaagacaaagataaaaggaaccaaggactctgatgattctgtagagaagaggaaccgtagctgctcaaacgttcatgtgaaagaagaataaactatcagatttaagccactgctattttgggtctttgtgataaacagtgtttaccatatcctaattcactattccttccatttctaggtcaaccatgttgaattaaatatagtgctctaacttgc

SEQ ID NO: 331371 - DNA, 361 bp, Homo Sapiens
  misc_feature (333)..(333): n is a, c, g, or t
  misc_feature (340)..(340): n is a, c, g, or t
actgcccattagaacatttatttctcagagagaaaataagtttcagacagtcatattatagtaggtaaaattaacttttgtattctttacaagcatagatttttctctgtttattacctctcttataccatctgttataaacaattctagaaagcaaataaagtcactctctacaataaatagagcatcatgtgcttcacagcagacgcgacagagacacataggccccgtgccacagcaggatctgagccgtttcccgttctaaaagagcattttaaaaaatgggactcagagagagactaaaatattcagagattgaaaaataaagagagngactaangaagagaaattgttgggggga

SEQ ID NO: 331372 - DNA, 508 bp, Homo Sapiens
  misc_feature (179)..(179): n is a, c, g, or t
  misc_feature (209)..(209): n is a, c, g, or t
  misc_feature (213)..(213): n is a, c, g, or t
  misc_feature (229)..(229): n is a, c, g, or t
  misc_feature (239)..(239): n is a, c, g, or t
  misc_feature (252)..(252): n is a, c, g, or t
  misc_feature (256)..(256): n is a, c, g, or t
  misc_feature (258)..(258): n is a, c, g, or t
  misc_feature (260)..(260): n is a, c, g, or t
gcggcgaaaaccatgagttatctgcctgcaggagagacagctcaggcctccaggagacttgaacatgcattctgtagcaggtaaacagtgactcttgaaaggtgcacataattggaaatggatgtgtttgtgagggggtggggagcgatggtgtacacctaacgatatactacaacacnaattggtttaaccttgggtagtttggttcnctgncttttaataatggggncacggcacantaattacacaggngatnantngttaccctaaccggggaaatttatttggaaaaccacaaactggtttacattgatctaaattcattgtaagcttcagcaaactttctttcccagatatcaaaatttgttgtcacatgagagttaaagggaaaaagctttcatagtttctcaagctatttaaaaaattccatagtttttgcttctggctctcctaacttttttaggttttgttttcatgataacattttattcaagatttaaatattatt

SEQ ID NO: 331373 - DNA, 652 bp, Homo Sapiens
  misc_feature (180)..(180): n is a, c, g, or t
  misc_feature (561)..(570): n is a, c, g, or t
ggcagaggaccttccccatcctccatcatgtgagcagccagagccgggcgctcgaacttgcgcaatggtggctgccgcaccaccggctcgggcgtcaggcagttatctgggagtccccgagggccgagtcggggccatgtgggcgggtcggggtcttgcgtttttggagcactgagtttngatcccctgcctacgttttcagttctggcaagtgtagggaagagcttcctagcagagtccctctagccttcctcgtcggttggcctggaagcgtttctgtgtggccaaagggcggggcgaacaggacggagaagggtgcgcacacggattccttcacccactcgagttctcgcccacctacgtggctggaggagggtgcgcgtgctctgtgggtttggactgagttggtggttaaaccgcatggccgccgtgcgtgctcacaagtgctgggctcccttgaatgtacccctaaagaagggtacatttcctcggatgaaattttggcctaaaagcaatacagctccctttctacgtacgcatttaaagacatggaaagagaannnnnnnnnnagattttcaggggctcgctcacattttcatcttttttcagttctgtgaaatgggaggatctgaaacggccatgattattaag

SEQ ID NO: 331374 - DNA, 702 bp, Homo Sapiens
ttttcaaacatgtaatcttttattcagtacactctcaaaacagcatttctgtatctagttccaagctgggtgatcctgcggccccaaaggtagtgatgactctgctgggaggagacacagacctcccagttcagtggatcccgagtgagtcagaaggtgagactggaagcagcagggtccttgagggaagtaggctctccttgaaggataagcaatggctgcatgaagtagcaggtattgaagctagggctttgaaggatgaataggagcttgccaaacaaagaaggtgggacatgcaaaccaagtggagggactgtggccccaaactcagggatacatggatggagtagccaggagaaaaacagactgggggagcaggaagagtcagtgtgagctttctccagatccaaaatcagcagcctgtcattcaaggccaagacattccacaatagttccccttggccctgtcaagcctatcaggcctggagcttcctcaaagcagctctgacaactccagccactgtcatctcccctctttgtgtcacgaggtacatcactttggtgcatggtgacattcagtgggggctgctttcctcggtgtggctgtgggaccttaggcccatgcctcagtttcccaacctggaaaatgggctgcaggaagccacttttgcaacttatgtttatctcaggccagggaggtct

SEQ ID NO: 331375 - DNA, 433 bp, Homo Sapiens
  misc_feature (346)..(346): n is a, c, g, or t
  misc_feature (369)..(369): n is a, c, g, or t
  misc_feature (394)..(394): n is a, c, g, or t
  misc_feature (407)..(407): n is a, c, g, or t
  misc_feature (413)..(413): n is a, c, g, or t
ttttaaactaaaaattaaagcagtttttatttagttttactaaccagatcaatcctttgcgctatattttcaaaagaaaatgttaaaagttttaaaagtgaaataatccataaacattataataagcatctcttcaaattgtacaatcacttaatacctccttctctatctagaatgtgattaagaacatcatcatctcccacaaagtgaacctccagcatcttgtcttcctttaattctggtttactcattgttgccaacctaaacaaaaacagtaagttactcaaaagtgatgaagaattcatatcaaccaccaaattaaacattcacataatggaatacatgncctttatctaatatttttaaagnccttttaagtttaaaaaatgcattntggcattaccggnattacnacatattcaaccgtgggtaa

SEQ ID NO: 331376 - DNA, 524 bp, Homo Sapiens
  misc_feature (35)..(35): n is a, c, g, or t
  misc_feature (69)..(69): n is a, c, g, or t
  misc_feature (113)..(113): n is a, c, g, or t
ggaattatttcacaggatgaaggatgggtttcaangaacttaatgggaattggaaatgcttagggatgngatttttcaacaaaaaactttcttctaaggtattggatgatttnccctgaaaactcaccaatcaatatagttcagactccaattcctattaccacctcagttcccaaacgtgcaaaaagtcagaagaagaaagctttagcagcagcccttgccacagctcaagagtattcagaaataagtatggagcaaaaaaaattacaggaagctttatcaaaagcagctggaaaaaagaataaaacacctgtgcagctagatttaggggacatgttagctgctctggaaaaacaacagcaagcaatgaaagcacggcaaattactaacaccagacctctgtcatatacagtggttactgcagcttcttttcacactaaagactctactaatagaaaacctttaaccaaaagtcagccctgtttgacatcctttaattctgtggacattgcttcttctaaagc

SEQ ID NO: 331377 - DNA, 239 bp, Homo Sapiens
tttaaacaacttctgtcactatttatttaaaatgttaaattgtacatttttcataatttctttaagagaatcttctttggtgagtttaaagtgagagtagacaaataacttagtggctaaatgatttaatgtcagatgacttaatgaccagtttttgcccttgatccagccccactctgatattctacctcctgtgtgcttgtcttcattgtccccatattaaaatggtgactgatacg

SEQ ID NO: 331378 - DNA, 413 bp, Homo Sapiens
ggtgttttaaaactaaccaccctcccccttcaaaaacagtaaaacttgtttcttctggtgaacaaagacttgggccttctaatggtttcatgcaagttggttttttaagacctggaaactgattgggtgacatttaatcttcgagattaaaatcacttggtgaatattgtattgttccactgttctcactgtcattttggcatttggggcctcgctctgctgcttctgctggagcacttaccagctaatgaaacctagcccaggagcaagctgcctgaatctatgtcaaactgcatctggcacccatctatcttccagtcatctaaattcacctcggaaatcatacaaaagcagccacatcaacacaccagtctttgttttatcaaggctgtaaagcaattttagactttttt

SEQ ID NO: 331379 - DNA, 444 bp, Homo Sapiens
  misc_feature (180)..(180): n is a, c, g, or t
  misc_feature (193)..(193): n is a, c, g, or t
  misc_feature (354)..(354): n is a, c, g, or t
  misc_feature (409)..(409): n is a, c, g, or t
gattttgaaaccagtctttttcttcctcataggtccctgaaaaactatagtttcagccatgttgtttgtagtgcctaactcagacttgagtgtttgcaggaaagggagggggaaattagaggagacctgacttgagtcctctatgtcagtggtgagtaaaggtgggctcaggtggagaanatagcatgtgtanaggaattgaggccaaagagcgtgttgaattctgggagccacgatgtacttcagtgtggatggagtatacactgttgggtaggatgctatgaaaagcaagagataaagtggttggcaaatcatgagagacacatacaacttctgttttgtaagaaagagatngttgattagaattgtagaattttaccttttaagggccttaatcttacatatgggntattgaggcttcaacgagactgagtaactagcaga

SEQ ID NO: 331380 - DNA, 891 bp, Homo Sapiens
  misc_feature (92)..(113): n is a, c, g, or t
  misc_feature (546)..(546): n is a, c, g, or t
  misc_feature (551)..(551): n is a, c, g, or t
tgaattctacccatgtataatgaggaattctctcataaccttttttgtcttgtctgtcatctctgttcatcccttcctataacctctaggtnnnnnnnnnnnnnnnnnnnnnntttcgagatattttcaacattgttagagtttgggctaaaatgagcaaggagaaaaaaaccaccaagaacatttcctggggcatgttccagttttgaggggtgatatatctgccagatagggggtatctgacccagtcttcttttcagctggtctctggggggagctgagaactcgcttgctacctcacatccttttccccagactttttatctcctatgcatccctttgctttctatagctggtgtttcttccccaaaatggcgttcccatgcttacctttctcacattctagacaatgatggacaaagacgcatgcaagactcagacccggggaatggtgtggtgctaatctcaacacctgacattcacagcaagcatggcccagcccaaccgcatgtctatctcaaaccgcagaaaggctttaatactggnaaaanaagaattcaagactacaggcagctcccctctgtaccccaactcatttaaaataggaggaatcactttttgccttacttaacgcttttttctgagcacagggatgggcacctgcaccccagaaggtgtgagctgtctctctgccaggagctaaggttcattaggggattggatggtttatcacttctttctttctgagtttacttttagtaacttttattgatggctacctttcatgtccctgtctaaagagactttctctttcatacgtcttaaatctcatcaatgaaatccagtgaaacagcaccatttcttagtatcattaaataactagaaagtatc

SEQ ID NO: 331381 - DNA, 667 bp, Homo Sapiens
gatcctcccttcctcagcagtgagaaggtctaggcctcagagtttttggagagtcactgctaccaaagagtctatctgggattgtagagtaaggatggattttgttatttcttgtaaactgtctgagaaatcctttgagagtgtgtggtagtaggatagtaaagtagataaactggcgattctggttcctgtagccagtggcccattcctaaccctataagtaaggttattagttgtatggccctgcactgacagacttcagctttgaggggcactaatatggtctgatttcctccaagattagaagttaggataaataccatgttacactgttaacttttagcaagctttacttttgtcaaaaaccttgtaagtttgggatttcaattattctttgctattaataagacctcgttcagtccatattaacttagaattggtatagatggctcctttctgatgctgtaagtactttaaggtttggctgagtgcaaacagctcacacgtttgagcagaccaattattaagcaactttcctaactctgcttctacaagagtttccttatcacttactgaatacccattgtgtctttttcccttaatagctttggaggaaccatctatcatcctgtccaaagggggttcctcctaggtctgttcagatctt

SEQ ID NO: 331382 - DNA, 402 bp, Homo Sapiens
tgcgcgcaacacctggccaaaggtaaacttttctaactggatgcagtaaattccaaagtttatcattcaaacactcaaacaataatatttattatgaaacatgagtacaaaccattttactgtgtttatgaatgattctactcagacttatcttcgtaacacaattcataattttcagcattccagacttcagcttttggaacaggactaatgttctgaaatcttgacgtttgcttatctctgatctgttttcaccagtggctgattttatcctaggtaccctccacgtaatgtctcattccctagggccctggcatagctcagcgccacagcaatcagacaaggactctggagctctggagctgtatagcatctagggtgtacccaggtcattcccagccg

SEQ ID NO: 331383 - DNA, 1141 bp, Homo Sapiens
  misc_feature (617)..(617): n is a, c, g, or t
ttttgtgtttgaaaaaataaagttttattagaataatccattttcccaagcaaccttgtgtactacagtgtcttcttcccttccccacaaagacaaggaagaagcagggtagaaggccacctaactgttccagccccttcatctaagatgtgggtcaacctttcaaaaaggggcagtatttggaccctaggccctttgccggccatggcaggatgttatactgtggcccaggcttctgctaaggccttggttatttttggcagtctggtttggtctctctttccctggcagttatacttgtctcctcctgcctgctgtcactctcacttccagcaagttgaagtcaagtatgaatgcattccagctccctgagaaatggtttatggtacagtcaggaacttgtctagattggtttgtaggctttgggaagtagggagaaggcagggtgggagacagccaggggatctttcttaagttttcacatgttacatcctggagagatagaaggtttagtcatcagaattcagattccatagacctaggcaatttttccatcctaaaaatactgcttttggaaaataatcctagctgcaaagcttctcttttgttgtagaagncagtattttccctaatgtttcctttgggagtgttggtttgccaaaagaagctatgtggctcactctttagacctttctgttccaccctttcttctctctatgttgacattcttccaatgtgtgtgggtgaagtgtagttgcttagagatccaggcaggagcctctgtctctaaggcttagcctttctttaccagttgtggtgctaatttgccaggcagcaagaagagtcaagttgcttagcttatgtcctggtttcctgcttcaaattggtggcactcatcattgaataccaatgaagtgtgtgcaggacaggactgacttgactacctggagcaggaatctttgcaggggtgcacatacaccctagaaaaagtgagggttgtcacctgccctggaaacaaaggaagggctttggggaagtggtgggcagtggcatgtggttaaagaagcttagaattacagggttttttttctttaaaactgatgtttcatttcacctactgcttgagcaggggtaaagtttg

SEQ ID NO: 331384 - DNA, 573 bp, Homo Sapiens
ttaatatttaaaatgtttaatagttaaaattttttaacaatttaactttaaaaaggtcacacattttctgatccagcaatgccccaatcagattgtttcattttattattattatcaacactgtcccctttttggcacctgtaaaatagttcctttcgggagtttggagccaggccaggcaccgtcggctgatggggatgagatgggcaggtttggagctcctctgtctagtgaggatcacggtctgcagagaagggttggcctccccgtctcctatcaaggcttaaagcaaggagaaccatcccaaatttggttccttttcccctaagtatccttagaggcaatccaccctgtgactaggtgactaggtgaaggactgaggtccagaaaggagctatcttaaacctggaatcccatttcctagtctgcagccttaagcagttaccctctcagacaactagccctctccttcctccgcatgaaaacccatggcttacagggatggttgttgctttccctaaagaaattcaggaagggagatgtgagggtcagttctcagcggtggcgttcttt

SEQ ID NO: 331385 - DNA, 479 bp, Homo Sapiens
  misc_feature (452)..(452): n is a, c, g, or t
ttttgagttatattattactttattttctttttttaaaatgtagcattaaagtcatccaacatacagatattcctatggctcctggcacattttactctctctaaagtcaggtattttaattatgagatgaagaaaatcatctcattaaaatggcaacatttctgataaatgtttcatatttatgtgatgggtaattgactccccatctacccctccagtccagagctacaaaagacagtgcacaaccacagctaacaggtggtgggggtgcccaagtagacagggctgcagaacaacaagcaacggggttaaacttctgaaacaacaagcaacttctttatttgtacagagtaagaatatagaagaaaagcatcattttcctttttagcccttttattagtgttttgcctccacccaagttactgcataccaagcagctaataaaaaccanctgacttaaagtctccgaaatgcatgg

SEQ ID NO: 331386 - DNA, 588 bp, Homo Sapiens
  misc_feature (463)..(463): n is a, c, g, or t
catatcagagctgtcttaaatcttttgagtgtttactgggcctgaattcaaatattggaataagagacctagctgtacagtttagctgtatagaagcagtgaacatggcttcaaagatactaaaaagctatgagtccagtcttccccagacacagcaagtggatcttgacttatccaggccacttttcacttctgctgcactgctttcagcatgcaagtaggtatttcattaaacattcagaaaagttaccaatttacaagtgggtttttcatccccaaggaatacttctaacttagttgatatcaattcagagcatattttcccctagaaataatattagggaatattggccaagtgactatattcccagtttatcccataatgtagctaacaacttggaactagtgttggccagaattccactagcaaatagcagctggtatatatatggctgggaattcntgatttcagtctgccttttgtaagagatgatatctgtcattaaaacagtcttcacatgtgatttttctgctcatattttttaaaaagtactggttgggccaggcgtgggtgcccgcctgtaatcc

SEQ ID NO: 331387 - DNA, 501 bp, Homo Sapiens
  misc_feature (59)..(59): n is a, c, g, or t
  misc_feature (90)..(90): n is a, c, g, or t
  misc_feature (103)..(103): n is a, c, g, or t
  misc_feature (113)..(113): n is a, c, g, or t
  misc_feature (129)..(129): n is a, c, g, or t
ggactcattggagaccttttccctagagctgctgttgtgggtccaatttaatatttgtnttgagaggtgattctcaaaacatctgacccncgaacaccaaccncccagcttgngggttgtgagctcccnaaagcccctgggatgtcttcgtttgcctccgaggcaaacctatatccttagggcctgtgtccacagtccattccatactaatgactatttgtagactaagcgatgaatgaggtgggctgttcttcctgtcttcctgtgactgccccccagtcgttctcacacatgctggaaatgcaggggcacctctgactcttcccagccctccatcctgagctggtcacaagctcatgttgactctatctccaaatccatcaatgtctctctgtttcttgcaccatatctgacatagtacaagtaactttcatcctgccctggaacactcctttagcactccctgtcccttctccatacagctttcagagtgacatattt

SEQ ID NO: 331388 - DNA, 456 bp, Homo Sapiens
  misc_feature (157)..(166): n is a, c, g, or t
  misc_feature (444)..(444): n is a, c, g, or t
tcggtcagttaatatttaattttaataatacttgttatgtttgaacagtcagcaatgcacaaagaaaaatcttccagtgaatgtttacacacagtgtgaacacatgctttaaatatgcagtggaggaggaggggtgaattcacagttaaccaagctnnnnnnnnnntccttgttataaattacacaaagcatataaaaatatttctctgaatgcatagattaagactttaaactcacctaccagcaactgtgcagtcttattccgactgcgatacgcagtagtcagttgaccacagaggattttataaaggagaagagagaccagcataggacagagatacatcaaacccacctctcaccagagacaccagtcccttgcttgcctctgtcgctaagcccagaacgtgccctgcagcgtgctcctctggaggccatcgtcccgancaggggctccac

SEQ ID NO: 331389 - DNA, 732 bp, Homo Sapiens
  misc_feature (425)..(425): n is a, c, g, or t
  misc_feature (466)..(466): n is a, c, g, or t
  misc_feature (525)..(525): n is a, c, g, or t
gaagaaatgtgactgcagtggaaattcagatcccaacctgatctttgaagattgtgatgaagtcactggccagtgtaggaattgcttacgcaacaccactggattcaagtgtgaacgttgcgctcctggctactatggggacgccaggatagccaagaactgtgcagtgtgcaactgcgggggaggcccatgtgacagtgtaaccggagaatgcttggaagaaggttttgaaccccctacaggcatggactgcccaaccataagtaaaaataacagtacatgattgactaaccccactttctctaatgtgctgcaggtgtgggattaagaaaagctatgcaatatcactctctaagaaactctggagtccccaccccttggactttaaccctttctgcacctcagcaaatgggagccttgcaccnaagtactttggtgggtccactttgattccctagggcaaatngggtggtttacatttgcatagctctattttatccagtctttacattcagaatcttaccntaatggctaaaggcaaagtcagaaacacaactcccagtgacagagctcttttcagctccttttcctatatcgtctcttcaggtccctgaaaatacgacgtacaaacaatttacaacacctggggaaactgagataccaagagatttaagtggcttctcccaagttacctcaaatctgaagtgggagcagaagtaaatattcaggctt

SEQ ID NO: 331390 - DNA, 477 bp, Homo Sapiens
  misc_feature (145)..(145): n is a, c, g, or t
  misc_feature (438)..(438): n is a, c, g, or t
  misc_feature (464)..(464): n is a, c, g, or t
gttgggttggtttattatgcatcagacacttgattcgctgaggaattctgtttttcagtaattcatccaccacaaatatcacgtagcattttgactccacagacctaagagtcttaagtcttaaaaggattgtaaaatcctaagntttttctgagctatctgagagtaagaggcttttttctattgaaaataggttgcatttcaaactttatctgtaagagctcacaacactttctccaacatgcatgcccatgtgctcacttaaacagaactctgagtgagacagtaaatacctcatatggccttgaaaattttaccttggcatagaaaaaccttgttaagaacctaaaaataattttcactttgaaaagtctttaggggttaagaccaaatggtaaaccttccaacctggcagtacaggggcagcactccaggccnagcaagaggttttggttggggccaantatggtggaaaag

SEQ ID NO: 331391 - DNA, 232 bp, Homo Sapiens
aacaaactagacacagaagaaacataccctcaaaataataaaagccatatacaacaaaccccatagccaacatcatactgaatggggaaaagttgaaagcattcttcctagaactggaacaagacagggatgcccattttgaccacttattgaacatagttttggaagttctagttagagcatccaggcaagaaaaagaaataaaaggcatctagccaggcacagtgctcat

SEQ ID NO: 331392 - DNA, 457 bp, Homo Sapiens
  misc_feature (363)..(363): n is a, c, g, or t
  misc_feature (411)..(411): n is a, c, g, or t
  misc_feature (437)..(437): n is a, c, g, or t
tagctgtttttactcctaaaacagctaccactactattactactatactgcaagagagcaataacatttatgggacctttaccatgcatgagacacagtggtacatgcttgggatagtccattacaatggtgttctataatcgaaccttgtcaacgtttataaatgcccttgcatagtcccttccctttggatcctggctgagtctgtgacttgctttagtcctgaaaatgtggcagcagagatgctgaaccagtttcaggccaatgccttgagaaggcttggggagtctctgcctttgccctctcagatgcttaagggccacataggggaggctgggttactttgctgaagggggccctttnggaggatatcacatgggagacagagggggccttcaacaactggggatnagggaagaggcccgccttcccagaanctgccagctgaatgcagtca

SEQ ID NO: 331393 - DNA, 186 bp, Homo Sapiens
ttttttttcttcaatttaattgaagttacttagaaaaataatcaggcttgaatggcttttcctggaggaaggttcatgaacattttcacgcttttgttggcaatgtggaattcagctttctttaacagtacagcaagatacagggagcgttttctacaacaggccctctactgcatacaaatatgt

SEQ ID NO: 331394 - DNA, 329 bp, Homo Sapiens
tgacaacccgtgcccagcctctgattgtaaactttattatagcctaggctatagtgaaggcatggtaaaatatttctagctgttacttggaaaagcagatgtgaccatacagatcttagatacctttagagacccgtggttgggatctgaagaaaacaagacacttaccacaactggcctctggataaagggggaatgctcagtttccccaaaccagtgagtatgagagctattaattgtaaaaatacacacagtcctcagatggtgagggcatgggttagggtaacaaaaatacaatggagaaaaaagtggcatttccaatgtgacac

SEQ ID NO: 331395 - DNA, 318 bp, Homo Sapiens; identical to SEQ ID NO: 296667

SEQ ID NO: 331396 - DNA, 427 bp, Homo Sapiens
tttttgcagttgcaagatttaatagagtgaaatagcatgaaaacagagctcccatacaaagggaggggacccaaagggggttgccgttgccggtcgaagacttgggtttatatcccgatcattgtccctcctgctgtgctctcaggcaatagatgattggctatttctttacctcctgtctttgcctaattagcattttagtgagctctctgattggtcaggtgtgagctaagttgcaagccccgtgtttaaaggtggatgtggtcaccttcccagctaggcttagggattcttagtcagcctaggaaatccagctagtcctgtctctcagtcccccatctcaacaggaaaacctaagtgctgttggggaggttggccgacgaccgctctaactgcttcctgctgaattggggcgtagtagaggttg

SEQ ID NO: 331397 - DNA, 214 bp, Homo Sapiens
tgtctaccccttgtcaacttgaactgatacacatctcctgaggtcatacataatcttcaaataaagccaataataaggtcataattatgcctaacataatacaactatcctttgtacaactagaaactcaccaatccctaacccaaatactattacatacatttaacaatacttaaatgctgatacaaagtcagtaaaccttatgtcacatgat

SEQ ID NO: 331398 - DNA, 694 bp, Homo Sapiens
ttttcttttttgtcttgatgtattacctgcacttctgtgggcagcctcagaatgttttttggggaaagactgaagtgtaaatgagtgtaacaggaaggcccgcagactgaaccgcgctgctgagggtggtgagcacagctccaggtgctgggactcagacttcacagagcgaagaggctctgcatccctcctgcgcctggcccgccttgcacgcagcagggcacgtgtgccagtcccaaccgtcccttaccccgcatcgcagccgtcgcagagcaaaagcctgtcctcacggtcgctcctgccgcacacctcacagaaggtcgggtcctcctcctcctcgctcgctttggtgttctccactgggatctaggacagaatcgtcggtcaccaccacacaggacccaaactccccgcagtcacttcccagcgtgaaacgcagttaatccagaatccacccattgccttagattcatatttgggctccacaggcccagagggtctccctccacgtgtacacagggatttttatgttttctaccatctcagggtggtgatctaagaggaaagtattcaacagaaaacaaagtatgatgcacggaaaggagcgggtagaagcctcgcctccaaagtgggccgcagtagggcgaggcagcaggtgctggactgccacggaagagcaagatctgcctcttaa

SEQ ID NO: 331399 - DNA, 423 bp, Homo Sapiens
  misc_feature (235)..(235): n is a, c, g, or t
  misc_feature (322)..(322): n is a, c, g, or t
  misc_feature (349)..(349): n is a, c, g, or t
  misc_feature (355)..(355): n is a, c, g, or t
  misc_feature (373)..(373): n is a, c, g, or t
  misc_feature (380)..(380): n is a, c, g, or t
  misc_feature (400)..(400): n is a, c, g, or t
  misc_feature (408)..(408): n is a, c, g, or t
tttctaaataactcattaaagtttattacattaaaaccatatatcacttttatattgtatttgccatttctgaacaatacaaagtagaggcaaatagtaacacttaataaaaatgttgcttccccattcctttccctaagacccagccctccctcaaatattccctcccacccctaacagaactctgtccttaataaaacacttaaatacatcataaatagtaaattatgaaaancaaatagcaagaattctttccttcttgtaaaggcatggcagcaaagacaggcagccagaaactggctgggggggtgtctaatatagncagttatttgggggtatggggctaacnatattntcaaggcaggggtggggntaggagnaggggataggaacaggggtnttccaacnaatctgcctgaggat

SEQ ID NO: 331400 - DNA, 602 bp, Homo Sapiens
  misc_feature (70)..(70): n is a, c, g, or t
  misc_feature (515)..(515): n is a, c, g, or t
ccgacaaatcctacattcatggttttattggcactgaggatgggaaatgatgtcaacagacagcagcatntttattaataagagcaagttataccaaataaacctagtttccttttttgatattatagattcgcagccttacatcaggggaaggattttggcaggtgtctgaaaatgtgtctcaaaacatctctgtagacaagactgagaaaggtgagctagaggataatataattcaacaaattaacgaatgcttgaataagtttacccaaagagtctggcataagataaaggtcaacctggaaagaaggttctacagatatgctgcagggcttcctaactaatactgatcttcacaacattttttaaaatcgaaaacacaaactagttatttaactaaaactattatcaagtttgccaactgaaagagctggaaatggtagtcaatacactgtacggcaggaaaaaaactaaaaagtcctagaaaatcagaaatgtcaggctgatataaatcngaatatggtcaggctgatggtaatacagaatgaatcctttcatccagcttctggaaaactgcctgcaaatggctgatttcagctggg

SEQ ID NO: 331401 - DNA, 733 bp, Homo Sapiens
  misc_feature (155)..(155): n is a, c, g, or t
aactataggaagtctctcttagtcttcctttcagtcacttgttttattaagacagtaaaacactctgatccagaggttttaaatagagatgctttgttttcaattaaagttgaagatttaagttatttaaaactgaaccgtaattattgaagggnagggagagtttgagggcctattcaaggattcgtagaaaattccccattttggtgtagtagtaccattaaataatgcatatctaatgtgcataaatacttgtctgcagaaatcatgtctgctataaataggtgtcagacatggagaaatgccaggtccttcatgggtgggaacagccttcggtggtgttcctgggcttctcttgtaatgtgttaatgacacagccgtgaaagtatcgatttttcactttcggactgtcggaagcccagcttatattcccatatgcttttgtgtgtctttgtagagcactcttagggtggatttttgcaatttcatcacttttcttactctgccttcaggggccagaaacactgaagtttcacatgtgacctgtacactcttacagctcttatacatggctgaggggccaggagaggaaaacaccacagtccatttgtcaggaaaaaaagacatacatggggaaaaaggtcctgaaaagacccactttacactcttcatagtgattacttcaggaggattataagaaataatattaatatggaatatggcctgtgtacta

SEQ ID NO: 331402 - DNA, 329 bp, Homo Sapiens
  misc_feature (238)..(285): n is a, c, g, or t
ggaggagatgaggtctcattatattgccctggctgggtctcaaattcctggcctcaagtgatccttctgcctagccaaagatggactttttaataagcggtttgtgatgccagatagccatgttgcaaaaattagatccattctccataccatacaacaaaataaattcatacatgtaaatgttcatgataaaatcacacaagtactaaaagaaaatacagatgactgtctctacaannnnnnnnnnnnnnnnnnnnnnnnnnnnnnnnnnnnnnnnnnnnnnnnccttgaaacatagatagtgtgaccgaggaactaaattttcagtt

SEQ ID NO: 331403 - DNA, 621 bp, Homo Sapiens
  misc_feature (505)..(525): n is a, c, g, or t
acaaagtgctgcttgggttgcagaggggtgggtgcctgtaagtgtggtgcacatttacacacatttctacaaaatgactctaccttgtggcacattgaagataattgtgtaagtagttatctctgaaaactaatatgccacctaatgctttaacacctgactctgccaggggtagacgattgttggatttgtccagccgtggtcctggtttcatgttcagtgtctgcatgtcctgccatcatcactgccacacttactgttgacagctgtccctgctgcatgctcttagccagctccatcctgtgctctcagctgatatttcacaggctgggcctggtgtgctctggtgactcagtttactgtttcaggatgcacctctctctgactgtacggaaactatcgaagggctcgagcttacagagcagacctttagtcccgctaaatctctctcttttagaaaggtactcactgccctgtcctcactacctgtctatgcgccttgctnnnnnnnnnnnnnnnnnnnnngtctcctctcttcaggcattgtcttagttactgaagtagcttcaaatggatctttaacctgtttgtgagattgtacgagaaggttctgttctacct

SEQ ID NO: 331404 - DNA, 948 bp, Homo Sapiens
gcagacagggttccccgctgcccggtctgcacctgccgttgtgaagcccgacattgtgttctttggggagccgctgccccagaggttcttgctgcatgtggttgatttccccatggcagatctgctgctcatccttgggacctccctggaggtcggagccttttgccagcttgaccgaggccgtgcggagctcaagttccccgactgctcatcaaccgggacttggtggggcccttggcttggcatcctcgcagcaagggacgtggcccaagctgggggacgtggttcatggcgtggaaagcctagtggagcttctgggctggacagaagagatgcgggaccttgtgcagcgggaaactgggaagcttgatggacccagacaaataggatgatggctgccccccacacaataaatggtaacataggagacatccacatcccaattctgacaagacctcatgcctgaagacagcttgggcaggtgaaaccagaatatgtgaactgagtggacacccgaggctgccactggaatgtcttctcaggccatgagctgcagtgactggtagggctgtgtttacagtcagggccaccccgtcacatatacaaaggagctgcctgcctgtttgctgtgttgaactcttcactctgctgaagctcctaatggaaaaagctttcttctgactgtgaccctcttgaactgaatcagaccaactggaatcccagaccgagtctgctttctgtgcctagttgaacggcaagctcggcatctgttggttacaagatccagacttgggccgagcggtccccagccctcttccatgttccgaagtgtagtcttgaggccctggtgccgcacttctagcatgttggtctcctttagtggggctatttttaatgagagaaaatctgttctttccagcatgaaatacatttagtctcctcaaaggg

SEQ ID NO: 331405 - DNA, 455 bp, Homo Sapiens
  misc_feature (77)..(135): n is a, c, g, or t
ctttgttctgaaatctgcttaagttttctctaggaagtaaccagagggtagaattaattatttagtattttcatcannnnnnnnnnnnnnnnnnnnnnnnnnnnnnnnnnnnnnnnnnnnnnnnnnnnnnnnnnnttagatcacagctctgtgaagtaggggcacaaagtggtcaacctggaagagctggactttattttgcttgcaactttctgtccatgcactctctccagcagttgacatttgccctctttgatggctccacgaccaatttcccttagtcatggcatgagtcagctgtgagggctgatggcacaccgaccgaatactctgctgtggcgccactagcctccatttaccttcttctccaacgttttccagcctccctcataccttgccccccagttttatagcttctggattttccttattaaagagcttgtttctgagactca

SEQ ID NO: 331406 - DNA, 637 bp, Homo Sapiens
  misc_feature (468)..(468): n is a, c, g, or t
  misc_feature (492)..(507): n is a, c, g, or t
  misc_feature (590)..(590): n is a, c, g, or t
tttcataggatggagttttattgggaggacattctggacgggctcccagcaagagtctggcaatggagcatgaaaatgaatgagcctggaatgagggagggtgcggcctcggctacacaaagttcacccgcccccaactgcctcccagcgtgttagctcctgtggcaactccccacttctctctctgtttttcaacccaaatcctagagcagagggctcttcgctcctcacaccatctccaccaggctgcagggggagtcactaagcccactcaagagctctctcctgttggtccctgattcgcaggggcacgtcattccttctttggtaactcattctctttaacagcccgacacagggtctccaggaaaaggacaggagctcacacagtcatgaacagagatgcatctggagcaggaataaggatgctgacaacatctgtgtctggccctccactcttgtaagggncagtaaggtagtacccagtccctnnnnnnnnnnnnnnnntggtggtgggaatgagggcatctcttctttcaggggccaaatctggcacaaggatgtctgcttaaggaactccactggctggnaggtctctccctaggaaacaccaaaccttttttaattcctaagctta

SEQ ID NO: 331407 - DNA, 458 bp, Homo Sapiens
  misc_feature (11)..(11): n is a, c, g, or t
  misc_feature (67)..(122): n is a, c, g, or t
  misc_feature (254)..(254): n is a, c, g, or t
  misc_feature (306)..(306): n is a, c, g, or t
agtaatattanagaaactatggaagaattatttttgagtcgcagagacaagcctttctaataatgannnnnnnnnnnnnnnnnnnnnnnnnnnnnnnnnnnnnnnnnnnnnnnnnnnnnnnngtgactttaaaaatggctagagatgagaaaacacaaaccaaatcaaaaagataaaaagataaactgatttaaaaggttttatttcatatcacaaagggtaatttccttaaaagatatagataggacctctantgttcatgtagagatacagacaaataaccaaatacacatataaaacgcaaangggctcaaacaaatatttcagagagagcaaaatactaaggttcaacaagagaaatgcaaactaataaaacgagatatcacgttcacacagcaggttgggtaatgacaaaaagttttgataaaagtcttgcagatggctgggtgcgtgtgtca

SEQ ID NO: 331408 - DNA, 501 bp, Homo Sapiens
gctgatacaaatggccgctgtatttttgctaaagtgacagtgacacagataaggcaaagagctgaagggcaggacacatcagatgggaagggggagaccgtgcaaaatggcagtctaacagaaaatcatccttgtaccaacagccccttccctcccaagttaggtgagcccttgggccagtgtatgggcagaaaagcagatttgtgtccttcagaagggaaatgtaaaaaggtgaaagctctagttgaagggcagtgagaggggctggagtgggagagaaggtctctcctggccggtggtctgggtgcagcaagggcactctgagaaggcagaatggaaacgcagggctggagggggcatgggcacaggtttggggggctctttccagccctctactatgtttgccccctttccccaaagcccttacaggggcagaagcacattccccgtgaccctgagtctggcctcattttgggaagtcttctggggtgtatggatgcc

SEQ ID NO: 331409 - DNA, 300 bp, Homo Sapiens
agatattgtaatacaatattacaaaaggtattacttttgtaatacccaaaggccaagtaattttcctttctatactgattgagacttgagtgattttttttgaaaatgaaaaattcttttagatttgataattagtgaaaaagctgaaggaaatttttgttttccttggcattatatgcattcgcctctttgagaagaaaatttaaatttcacagaaaaaaaagttacatgtgacctataacttgttggcctgtgttaacttttttctaggaaggattgaaaaaccaactagaaacttga

SEQ ID NO: 331410 - DNA, 576 bp, Homo Sapiens
gaaaacactttactaggccagacccccaccccggaactatcactgtttgtattctctgcaaggtgttggttgtgaaatcaggcttccatcttgttttacatcctgagggcatggcttctaactccagtggcaaggctttgtttagcaatcctgccttaggggatgagccctctctggttccatatctgcatgtcttcctagccctgtctcttaaagggccccacccagtgactgggttttcttttgcctgtctgtgtatatactgtgtgtggtatctgtaaaaagagctctaattaatttggcctaaacaaagacaagcacttggatctaatattttttaaagggaagataaaaactgtgatacctttcagttcacgtgactttaatcattggagaaaccaaaaacagccttaaaggattattgggtaaagagcagatgttgtcaaaatgtaaataggtggactaaacaatgcaggtcagatacaaagtttgctaagtattttgaggttacaagctgctttttgagttttaagaactatttgacttgctggcttcacaactggtaagggctgggga

SEQ ID NO: 331411 - DNA, 551 bp, Homo Sapiens
  misc_feature (125)..(133): n is a, c, g, or t
  misc_feature (411)..(411): n is a, c, g, or t
  misc_feature (416)..(416): n is a, c, g, or t
  misc_feature (422)..(422): n is a, c, g, or t
  misc_feature (485)..(485): n is a, c, g, or t
  misc_feature (501)..(501): n is a, c, g, or t
  misc_feature (520)..(520): n is a, c, g, or t
ttttagcggtatctagaaagtatcttctctttatttaagttaaacaattttcaaggatggtttccatctataaaatggacaaagtacaagctctgtacagcagttctttttaaaaatcaactggnnnnnnnnnttaccaaactatattttgaatttgcaaaacatactcacagataccatcatctgagcttttatgaggacataagaaaggaccaccacagagaagacaactaacttcggcacgctttgctcgaagggctcttaggaaagaattctgagttttaaaaacaggagtgggagggtgagatagtcctgatgactagaaactaacgcaacccgcagtaagtcactttgggcacactgtgtcatgtaaacctagctcaccgcaaagggacccctccccgggcccanccctngcttcntgacgccccggaccatccaaagccggcctcccaggctcggggacaggacgccggcccccaggnaatggggccgcgcaangggtcttggggtagacacnctgggatgataggaaaggctttagaggggcc

SEQ ID NO: 331412 - DNA, 396 bp, Homo Sapiens
  misc_feature (57)..(57): n is a, c, g, or t
gtagcccctaacctacttgggaagctgagggtggggagggatcgccttgaacccccngggggtcaagggctgcagcgagcccatgattgcacccactgtactcccagcccctgggtgacagagtgagtatttgttaatttgggttgtgagtacataaatgtttattacttcattatttccatgtctgtacgtttaaaatcttttagaacaaaaaatcaaagatgagtcatgctagctataccaaatatcacaatttagtataaaactgaggtaatgaaaacattgtgctactttccttgaaaaagaaaggtagatcaatgcaacagcacgaagatagaaaaaaaattagacttcagttctcatgaatttttaaactcttgtagtcagtatatgcaa

SEQ ID NO: 331413 - DNA, 524 bp, Homo Sapiens
  misc_feature (229)..(229): n is a, c, g, or t
  misc_feature (250)..(250): n is a, c, g, or t
  misc_feature (266)..(266): n is a, c, g, or t
  misc_feature (304)..(304): n is a, c, g, or t
tgcgccggcctacaaatttttatcttaataaatgttcctgattacaaaatttcaaaccaggccaaaaaaggtgtatgtgtaaattaaatttatcctttcatctgcctgactctcactccctgaccccaaagattttccactgaaaataggtgccatgttctcccagatgtgtttatgtacacggtaatttactactgtatagctacatataaaggaaaatatttcaccnttaaattttccaaattccccntattcttcaaaaacgngtagtcataacatattcttctggcaattttcctatttnacttaatatatctctgactttcattgatatttcattagcaatgtttactgacataaatattgctctttcagtgaattttcttttgacatcattgacccactgttggtcagtaagtctgcctaacatatcacaaatataagccccattagtttgcaaatattctctctacttttcacataacttttacctttttttctgcaatacacagtgttttaaattt

SEQ ID NO: 331414 - DNA, 699 bp, Homo Sapiens
  misc_feature (218)..(227): n is a, c, g, or t
  misc_feature (585)..(585): n is a, c, g, or t
  misc_feature (617)..(617): n is a, c, g, or t
  misc_feature (663)..(663): n is a, c, g, or t
  misc_feature (675)..(675): n is a, c, g, or t
tcaaagggctttgcaaaattttaatatattaaaacaagaggcatctgctagaaaacattctattgtataaaacccgagttcttaaaaacatgttttctttggcactttcgttccctccctcccctttccccagcatattgcaaaaagctctccagtgctaaggcattggcagggtgtgtaaacagcagccagcatatgtggaagaataatacaaagcnnnnnnnnnncttctaatatgtctgtgcagcaagcataaataacaggacccattccaaggagtgtgtgtgggttttccccctcccctgtgtcctctgtcaccttggtgatgaggccagagtgatgtgaagactgggagggaaaagacgggtgctggtgtttaaaaggagtaaaggcataggcccctcatgacctgcagggaccccagccactgcctctgggcttggcttgagctcctgggagtcgggaagctggtttgacattttgtaggtttctctctactgtggagctgggagatcaaatgattgggatggttcttcctctggccttacggaggctaaggaagtgctcttccttagtcccgtggtnttgtaaggctgagactagggagatgggtcttntaactgaaaagtaactgcttctccaaacaccacctgcagctttctnggggcaccattntttacaggactagctttagggcat

SEQ ID NO: 331415 - DNA, 821 bp, Homo Sapiens
  misc_feature (399)..(408): n is a, c, g, or t
agggggcttccctctgcttgtggagtggttggcattcccagcagtatcaaccctcagaggagcgggaactggggatttctggccctacgtgcattcacaggcaatgatgggtttgtgtgtatggtgtcatgagatcctctacctcataacaaaaggacagtgggtagactaaggcagtagctcaaagggctttgcaaaattttaatatattaaaacaagaggcatctgctagaaaacattctattgtataaaacccgagttcttaaaaacatgttttctttggcactttcattccctccctcccctttccccagcatattgcaaaaagctctccagtgctaaggcattggcagggtgtgtaaacagcagccagcatatgtggaagaataatacaaagcnnnnnnnnnncttctaatatgtctgtgcagcaagcataaataacaggacccattccaaggagtgtgtgtgggttttccccctcccctgtgtcctctgtcaccttggtgatgaggccagagtgatgtgaagactgggagggaaccctaggtcagaccttggtttcctgttgttcttcccaagacccagggttccctcggtttccatttggtcctgtagtgaaatgctggtggttggttttaggttggggaaaagacgggtgctggtgtttaaaaggagtaaaggcataggcccctcatgacctgcagggaccccagccactgcctctgggcttggcttgagctcctgggagtcgggaagctggtttgacattttgtaggtttctctctactgtggagctggagatcaaatgattgggatggttc

SEQ ID NO: 331416 - DNA, 333 bp, Homo Sapiens
agtctggctaaaggtttgtctcttttgtttaacttttaaacagccaactgtttgtttcattgatttcttgtattatttctcatctcaaattcatgtatttctgctcgtatctttactttttcttctactaattttgggtttggtttgctcttgcttttttagttaagatgcattgttatttatctgaagtttttattcttttctatgtaggcactaatagctatgaacttccctcctagtactgctttcgctatatcccacaggtttgggtatgttgtgtttccattatcatttgtttcaaggaatttttccatttcttgacctttggagctt

SEQ ID NO: 331417 - DNA, 369 bp, Homo Sapiens
cgatccgcccacctcagcctcctaaagtactggggattacagggcatgagccaagggcgcctggccagaaaattttaacttttcatattttaacttagcaaagcctaaagttagacaatatctttatcctgttctagagcattacaaatgaacccacagaaaaaggctatctggaacccacagaaggggccaactaggtcaggagaaggaaaggggatgttggtcgcacttagaatactcaccagaccagtttaaagatgacttccgagaaactatttctacatgacagttaggcccaggcacgatgggtcaacagtgcctcactggcaggacagctgcagagggacatcagcagagaccctcagttct

SEQ ID NO: 331418 - DNA, 494 bp, Homo Sapiens
aaaataaaaacacaaattttattttagactgataaaactttggttcagggaacacagacaaaaatcctctgctgtcatttcagcatgtaccgtttgggctatgaggaaaagcatgtcatctttctctgtataacagaggcagttaatattttatcctaattctcattaaaatgtgtacgttcaataaatgtcggctattaaactgttggtgagaaaagtctatttctggaaaccttttcattatttccttaataagactatttatggtttttttaaggaaacaagacaaaacgtaaccacttagcaggttaaaagggtagctggagttgccttactttcaaggagctacctcaaaataactagggttcatttatctaatattttaagacttctattaatattgaaacacaatttgtagttaaagagaaaaatttaaatcacctaagaaaataattcagggcctttatagttttacattaatatgccctttaata

SEQ ID NO: 331419 - DNA, 738 bp, Homo Sapiens
tcttgtgtttacagtttatttaatggaaaagagattggcctattctggttttgatgcctgctttgccccgggatgagaaggcttccaacatgtcacttagaagaaaagacaagggttttccctggtttctgacaccagaggggcttaggcttcttgatccacagcagagttttctgggatttctttttttagagaaagaggacttgtttgaggggttactgagttgacagaggaatggtttccatagatgggaacaaagcggttgtcaaaagctagaggagtttgttcccgggagctggatgacagggctggaggacagcatcatcctgttttcagcttccatctgaagacccaagttacccatcctgggctgagtgcccacctcagaagtcaaattctcccctcttaaaggcatagtctgcccttcaggggtgactgatatgtttctggaggggacagtcaccttttcacgggccacagccttccttctaggggccactgtattctgtctaagggtctcagtctgaaaatggacaggggtcatagtcgttcctccagggctcacagactgatgactcacaggggtcagggtctttttccccaggggtcacagactgataacccacagaggtcagggtcttctgtccagtggtcacagattgatgaccccccaggggcaaggcccttctctccaggggtcatggactgatgaccccacagagtcatggtcgttgcccc

SEQ ID NO: 331420 - DNA, 262 bp, Homo Sapiens
gagggaacatttcttaacacatttaaaaaattattttgatgccaaaatcatacagacagtacaaaaataatacaactacagacatatacctctcataaatttagtagcaaaaatctttaacaaaattcttgccaaatagaaaacagtcatgtaaaaagtatacaccataataaccaagtgggatttatttgagttatacaagcaaggctggttcaacattcagaaatcgatcaatgtaattaacccgagcataggctaaaga

SEQ ID NO: 331421 - DNA, 416 bp, Homo Sapiens
  misc_feature (11)..(11): n is a, c, g, or t
  misc_feature (31)..(31): n is a, c, g, or t
  misc_feature (52)..(52): n is a, c, g, or t
  misc_feature (350)..(350): n is a, c, g, or t
ccggttttccnggtcctaccgggaaaccccntaaatgaggttaaaatgaccnccaaagcaaaataatgtgtcatttgtaggttggcaagaggcccctcattttttaaaaattttccttaattccccatcaataatatagtgataggaatatattcatcacttttgattctagttttaaaagggaaagagctaactactaaataatcattgaaaatgtagggcttcctcagaaatgtgagtaaggatattggaggcaggagcatgaggcggcagtggccaggcgcaggccaggaccccactccttccagtggcaccatggggaaggccatgagcaactcaaatgcaggcanctgccctgcgtggccaagttgcggacaagtccacatggaggtgcatcagcacagaggcagcactac

SEQ ID NO: 331422 - DNA, 139 bp, Homo Sapiens
atttatcaagttttattctacagctaaatttcagatttcttttacatatagaccttgcaagggcacggtaagaactgagcacttgttttatttgagggataaaggtgtagaaattttctctttgaattttataaggaaa

SEQ ID NO: 331423 - DNA, 414 bp, Homo Sapiens
ttggtcacatccaaattattttttaatggttgtgcttaatatttatttacaagcagtcctccagaaggcatggatttcactgaggagctgaccttggtgaggagctgtactcccaccatgatcgcatgactctggctgctagggctgctttcgagttccttttctaaagggtgttagtgctggccagtgagaaattataaatggttattctcagacacagcttggattgatccaagacctagttaacaaagatgctctacattaggacagaaaaggtaactgtggaaacttttctttagttctgcaaaactttttccaaactattatctcttcacatagactttcctagacccatatcctcaaggcttttaataagtaatgattttctagtctggattcaaaccaagaccctaa

SEQ ID NO: 331424 - DNA, 965 bp, Homo Sapiens
  misc_feature (272)..(273): n is a, c, g, or t
  misc_feature (278)..(278): n is a, c, g, or t
taaaatttggagaaaaattcttctttatttaaaaataccagtaatactgacagacttcaaaagcaattcacgcttccagaatacaaagtacttaatacatattttcaaacctgtttgcatttcaaacaaagttagcgtttttgtaaatcaaatttgataacccgactaaaaatattttccagctttattatttaaggagctgcacagcctttaaagtggggaccaggaggcaggcagaggcagagagactgaatgcacccaggactgcgcanngttanccagcaacatgtcccacaactttggtgctggaaacacaagtaatgcacaagacagctgccctccagtgtcaggatcctgtgaaacagcatatcaaaagatcgccagcttcttataatttacacactttcatttaggattgctttttgaagaaaatctttaagaatgccattttaatttaatatccagaaccctgaatttaaaaaactaatgaaagaaattaactgttaccatcaaaatggttgttgctgagctgtgtgagtaggaattctatgcttttttagatgcaagaaaattaacacataatgcaagtttaatttgaaatcacacaagttatgtatgtaggctcagatagtagcaatgttcacttttattactaatagcttaactgaaacagccatctattcattcctccagcaggaatagcagcaccaagatcttctaaaattctttacatataaagcttaagtcattatccaagtcccattctttgcatgctccaattcttgttatcttatttaacataaaagcaacaggatttggagagttactatttgctgtattaaaacagttacacagcatcttgtactgtcaaaaagcaaaatactgtgaatggcagcctgtcttcacagctctaaacttgaagctgccaaacagtcactgcttgtgccagcagtggttttccacag

SEQ ID NO: 331425 - DNA, 194 bp, Homo Sapiens
tttactgtgaaaatctttcttttattactgtctcatgtggcaaaataacattttatacaaataagtcacctagtttactttggacacaaagacaataaaaactggaatgtgattttgggggaagcgggaaggaggaggaaggacagatcaggtcattgatgtttcttatattctgtaaaaaatagatttacagg

SEQ ID NO: 331426 - DNA, 522 bp, Homo Sapiens
  misc_feature (325)..(325): n is a, c, g, or t
  misc_feature (510)..(510): n is a, c, g, or t
atatcacaaaacatgcacttccctaaaatgccctgtgcacatgaaaatatttctattacttttgcccctactatattccatctaagaatacggtcacagaagaatgaaagtggagtgaaaggtaagaaagaaaagtgagatgataagaaagggaggaggaaagggaatggacaaaaattagatggtcttttatccaatttttagcacaggcacagaacaatgaggttggcatcactctaaactaatccacgttaactgactacaaagatgataggaaaatgaaattaatgcatcccataaaaatgcagttctaatagatgccaangatgggcattatccagaaagcgactgtagaaggactctgctgtttctcagtaggtgggtcaccctttgccttcagaacacatgggtcttcttaagtgatatttccatatcagatggtgagatttgtggttttcccaaactcagtcctgaccataagaacaggtaggtgaaccttgttaaaatatngcagctcccagt

SEQ ID NO: 331427 - DNA, 199 bp, Homo Sapiens
  misc_feature (62)..(62): n is a, c, g, or t
tggaaagcattttcaaactttatttacaactgtcacagtgacaaaaagtagtttggaaaaanaaaaatgctagtttctccctgagcctcaaaaaagaacagatagaagttacaggaggttcatctcacaacaggcatttttactgaaatactaggaattttttcaatacaatcagttagaaatacacacaaattacttg

SEQ ID NO: 331428 - DNA, 498 bp, Homo Sapiens
  misc_feature (320)..(333): n is a, c, g, or t
ttttatctgcacatactaagttgcttttattaatccagaacggcatgctacagatactgtacagcatgaacatttattcattacaaaaatggcttccaaaccattaaaaatgaacttggaataagagcataaaacggaacagtaacatcacaactgttaggaaacattcaaagtattcacaaaaaatgttatagttagcattttaataaaccagagaaaaatcggagacagttttacaatcgcttcatgtcaactacaatggcactgaatgaacaggtttcagctttatacagcattttgcaacatcaacatgcctaggnnnnnnnnnnnnnnaaagtctgctgcctactcgtatgtaatatgtgtacataaaagcggcctgggtttttcgtttaagagtaatctaatatacagaattttggcccttaagggtttatacctcttcatttaaaatggctttctggacaatctgctaccaaacacattttgttataggtg

SEQ ID NO: 331429 - DNA, 589 bp, Homo Sapiens
atttaatgccacattctctttctgaactcggactctggcccagtgcagttggtacatcaccattttacagaaaagtgacctgcccaagtgcctgacttagccgggggaggtgggttctgtctgcagagcccacgctgaccgtggcagccagtccggctctgggctgcctgagggagggtgctgcaaaccgtgcctgtctgtctgcagccacctgtgtctgactgcctgccttcctgcttgcctgcagctgccaccacctgtgaccccgtggtggaggagcatttcccgcaggagccctgggcaagaattacaaggagcccgagccggcaccccaactccgtgtccatcacgggctccgtggacgaccactttgccaaagctctgggtgacacgtggctccagatcaaagcggccaaggacggagcatccatcagccctgagtccgcctctcgcaggggccagcccgccagcccctctgcccacatggtcagccacagtcactccccctctgtggtctcctgaagggagcgcctcctccaacaacacgtggatctgcatggtttgcctgagctttgaacagtcagtactt

SEQ ID NO: 331430 - DNA, 563 bp, Homo Sapiens
  misc_feature (66)..(120): n is a, c, g, or t
  misc_feature (204)..(204): n is a, c, g, or t
  misc_feature (444)..(444): n is a, c, g, or t
  misc_feature (516)..(516): n is a, c, g, or t
  misc_feature (527)..(527): n is a, c, g, or t
tcttaaccatgaaaggaagaaaataaaagagtatacattatcttaacagcagaacagtcatttccnnnnnnnnnnnnnnnnnnnnnnnnnnnnnnnnnnnnnnnnnnnnnnnnnnnnnnncacctagcacagtgtgtatattctattcatcagggagagttgggtgaggacgtggtgatggggccaatgctgcggtggcccctntggatggtcctgggtgaattcagggactcggcattcagacgcctgtccccacctcctggggcccagtcctcagctccgtacctgcttcactggttttctacagggacagggtggggaagagggggacataggtgtggtaagaaacccccatgatccccatcttgtgacagatgagaagtccagggagggagggagtagttggaagcaagctgtggagggcaggctctggagcaggtggtnttgggagcagaagaccttcccactcacagggacaggaaagcacagcaggttttatccagatgaactgagaanggtcagattanggtccggagaagagcatccggcatgaggggtgagat

SEQ ID NO: 331431 - DNA, 868 bp, Homo Sapiens
  misc_feature (316)..(355): n is a, c, g, or t
  misc_feature (856)..(856): n is a, c, g, or t
gaatatgtcgtatatacatatatataatattttattttaaaatgtcattgaacatatacatttctttagctttttccaggggacattgcacctaagtttcaaaacacacaaaatagatcccctttactaaacagttttcattttggggttacaaaaaagtcaatgtttcacaatcacaaagcataaaggtacatggttctgaaacaatttccaggcagatttctctcattcactgtactagggtagttttggaaacccagaccatgatccattccttacaaatgatctccaccatgggcctccctgggtctccagnnnnnnnnnnnnnnnnnnnnnnnnnnnnnnnnnnnnnnnntaataacctcaggactcaggaaacaaacacaaaatacttgtgggagatcaggaaagtagaggacacaggttctccttcaagtacatcacagtagaaaactacagcacatttacagccttatttggtcactgtctacctggttgctacatgaacaaaacttcacctaagacacagaagaaaaattaaagctatttacacagataacactgtggattcgaaagagcagtcctctgcagaccggcactccatctgacaaaagccacagtgctcacagaagaggcaagtcagtctgcttgcgtagcgtcctttgaaaaatcccagtgtacaaacatgtgccacgtcaccacacaaaaccaaagtctgctcagagaggtgggctatggtgtgcaggctgcaacctttctctgcaattgttaagtcttcaaaaatctgagttcctcacataaaattctgtgctgtggccagagctcgttttaccattttcttagattggatcacttntcgtgccgaatc

SEQ ID NO: 331432 - DNA, 668 bp, Homo Sapiens
ttgccattagaaatgcttttatttataaaagaactacttaaatataaacatctctacatagaaacactcttcacaaaaggactcttgcattactgccttctgaccacgaccagcagacactgtggatgtaaggactccacggtgtctcccgactcccaggattttaaggctaaatgtgcacttggaggaacaggggctgtaaggctatttcttccctttcttttaaaagacaaatttcatggtttcccattccaagataggcttcatagctggggaagatcttaagattcttggtctaaggggtaagcaaatatcttcctgagactgggaggtatgatcaggcacttgggaatctggctttgaatatttttttctcaaatgaattttttcagcccagatctctctccgtaactccttatttttatatccagttgcctatgttgaatggctcttaaacatctcacactcaacatgtccaaaatggaattcttgcttttccctcccaaacctgctctctcatacctactctgtccacatagccttcctcatctcagttcttggcagctttccagttgctcaggccagaaaccttggagtcattcttgactcttgctgtcttatcttcttatccaacattcattccttcaggaagttgttggctgtaactt

SEQ ID NO: 331433 - DNA, 453 bp, Homo Sapiens
  misc_feature (140)..(140): n is a, c, g, or t
aaatgggctcaagcacgttttctcaccggctggctgggcacacagacactgtcactggagtggccttcaacccatcagcgccccagcttgccacagctaccttggatggtaaactccagctctttctagctgagtaaccnactgacctgtgagctgggtccaggaatgctgtgaggaacaacttaaaagtaagaagtagtggttcatccatcagggggccagaagcagcaactgtttttcatattttgagacttgcctcagatttcccccgtttgcaagctcctcccctctgtgtgtgccatgtcagagttttatgtctttctgctcctcaaaagggatccccttcattgggaaaatggaaatggtgtccagtacttctgcacagaatttggtaaagttaaaacaaaatatctttcaataaaacataatatagtatttgtttgataattagaa

SEQ ID NO: 331434 - DNA, 446 bp, Homo Sapiens
gtaattaaacactttttattcttaaatgcaatacatttcaaatttataagttattttataaaattttataaattaaattctttaaattgcaaaagtaatatagattcagtaaagaaaatttgggaactacaagaaagcacaaagaataatataaaattcatctacagtcagcctatgcaaggttgaacatttgacacattttgatatatagccatctgaacttttagttgttatatctaaatatgggatcatggtgtttaaatatatgtgaatatgtatataatgtttacaagtctgactttctacttaatatgccacagatatccctatgctgtcaaatattcttctatgagaagatttttatgactgcagagtattccattgtatgaatgttctgtggtttatatttcaatctcctattctgtgcattcatgtgtttttcactc

SEQ ID NO: 331435 - DNA, 736 bp, Homo Sapiens
  misc_feature (229)..(238): n is a, c, g, or t
  misc_feature (245)..(245): n is a, c, g, or t
  misc_feature (275)..(275): n is a, c, g, or t
ccagttttgaaatgttcattcatctgtgacaagctccctttttgtttactaagttagcaataacactccctgagagcaagcagcaatgaaattcattgtcatctaaatttttcaacatttcttcttttgtctgatagttcttcattgtttaaagtaggaaaactatgagtctggtaactagatatttgtgaacctggacagtgattgaagctgttttcaaagatttccnnnnnnnnnnccaaggntcaggttttgacctggaataatttgaaaangttagaggaaaatcaaattgtttctggagctttatcttttcccagaaattgggcaaacatcactgggcatgaggtttacatgagagaattacgaggaaggtaagaaagaaaaaaaacaaggagctgtgagttagaggagttgaagggatgggggagcaggtttgggcccagccagtcctgctctgtggtggtcctgctggtgactgtagctagttaaccctttctcctccctagagaggataaagtgtgttttgcttacagatacttctgtagtgaacgatgatttctgtttcaaagcagggggaaaactgtggattacatggagaaaccccttcttactgatttttctttctgaatctgtgttacgacaggtctaccttagggaaaacataggaaatatgttatttcccatttccttattcatctttttgaagaaaatgtacttatgattacaagtttcc

SEQ ID NO: 331436 - DNA, 707 bp, Homo Sapiens
  misc_feature (564)..(610): n is a, c, g, or t
  misc_feature (630)..(647): n is a, c, g, or t
ttatctctgacactttacacaggcctggcgtatagtaaacatttaatagattttcaaagaagcaataaaaggaataaatgaatgttagcagccaaacctctgttcacctttctctggaacaggagttggcaaactatggtttgagagccaaatccagcccttcatcaaattttgtaaataaagttttattggaactcagtcacacccattcatttatatattgtctatggctactttttcactatagaggcagagtagttgcagggtagttgcaacagagatactatgacccgcaaagtgtttactgtttggcccctttataaacaatttgctaattcttactctagaaccatgtgagctcaaactaaaaaatgggcttctgagcatggaaacagtactaacctatgctgactaacaagctaacctatgcttcttttgttaggtgtttgaaatgatcattaatccctggagataatgtcctcctagatgaacctgcttattcaggaactcttcaaagtgcagaagactgaggtgtaaggattgcttgagcccaggagcatggtnnnnnnnnnnnnnnnnnnnnnnnnnnnnnnnnnnnnnnnnnnnnnnnaagtgagaccttgtcacttnnnnnnnnnnnnnnnnnnggcttaaaatggcaacaattttaccacaataaaactaaaataaaataattactttttctc

SEQ ID NO: 331437 - DNA, 500 bp, Homo Sapiens
  misc_feature (14)..(14): n is a, c, g, or t
  misc_feature (23)..(23): n is a, c, g, or t
ttggcattaggatngtaaatttnccttgccacttacgctggttgaagtcaggatgcttaattacttggaggttaaaaagcaccctagctgaaatagcccatccctgaggctgccctgttgaggataggagatgcttcatcccatcctttaagatccctttcttggaaacgctgagcctggccagccatgcaggcttttccaagctctgatgctgccctgtgtccacaatagcatccccacagcctggatccatcattcccagcattatgatagctcctttgtctccttggaagagcccaaaacccacagctgaggcctcagggcttttctaatgtgcttagaacaggggtaaaggtaatgccaaccaaaatggggaaacctgtattcttgctcagtcactgcttagtcagcataaatcactccagaggatagtttgttactgacctcaaagactcagttacaaagatgatcaccatagcattgtttacagtagcaccgaa

SEQ ID NO: 331438 - DNA, 406 bp, Homo Sapiens
  misc_feature (258)..(258): n is a, c, g, or t
  misc_feature (263)..(263): n is a, c, g, or t
tgacaacccgcgcccggccaacaaagtttttaaagtatgatcgtaccagtgctggcaatgatgtggggaagaaagcactggtcatacactgttgggtgggaagtatatatgattacaataatctttggcaggaaaaccttagcaatatctaactcaattttaaatgtgcatattcttcgattttttagcttggctgctgggaatttttcatatatacctgcgcaactatacaacgatatatgtacaaggatgttcacngccantaccttttgtaatgactaaaaactggaaataacatacatgctgcccaccaactgaagagggataaatacttacggcacatctacataatagaatgacacacggccattaaacagaatgaagcgcatcttcatgtgctaatgtg

SEQ ID NO: 331439 - DNA, 469 bp, Homo Sapiens
  misc_feature (353)..(353): n is a, c, g, or t
gtgtgaagtaagacaaaatggacctctaccaagttgtagggaaggacaaggaaaagaccaggggtagaaaaggagtgtaagttttagaatggtggcattggcatagatgtgggaagagtataaaactagaagaagtctccagataaaaatatgcaaaatatgtctgtttaagtataaacattttctgtccacatgcaaagaggtgtttacccacccaaaaagggtatatgttggagtggggacttcactcgcgctggatatgtattaccctccagcctggaaactttgtcttggtgcaaccccctaaactgtatgttaaggtaagaaaaggaacattcgcttccagccttatnaaaaatggacagactccctctttggtgtttggttaccttcacagctatacgccagccactgagcagctttcttgtcctcttaagttctaaactctgctcctatgctggtgtcctcc

SEQ ID NO: 331440 - DNA, 496 bp, Homo Sapiens
ttaaccttaactaagggaaataagcttcgcccgcttaaattaaacccaatataaaatagactctgtcctctacccccaacaggcacctctttcctcttggtcccctaagctctagcctgggtgagcagggctggatactcctatacctagagtcactagccactgcccagtctgtttcaggagcaggcctcagattcctcaggggttaaagtgggaagaacccgtgtgtgcacattttttgtgcttttccagaactgggtaccatttggcagttgatcaggcaatctcccccgctaccccatttctacccctttgtttccagcctcttttttcctctgcaaccaaggtttcttgtttatccaaggtggggagctgaactgagacaaggtatggaaagggtgcctgggcaggttaagcaagcacctttgtagggggtcagaaatgttgcaccttctctgaactcctccattgaccctacagattccctcgtggccga

SEQ ID NO: 331441 - DNA, 501 bp, Homo Sapiens
  misc_feature (316)..(439): n is a, c, g, or t
gcttagtttggccctctccctccctcttcttatattccccagtggctgttgttcccatctttatgtcgaggtgtaccatatgtttagctcccacttataagtgagaacatgcaggtatttggttttccattattacaacattataataatgttgttatttctggcatagttaactggataggagttcacgtttcccaggaagtttcccccttttaacattttaactaagataatgaaaatgtggcaatatacatacttcactttttgtgactgattctcagtaataaaaaaacagctgggcctggtggctcatacnnnnnnnnnnnnnnnnnnnnnnnnnnnnnnnnnnnnnnnnnnnnnnnnnnnnnnnnnnnnnnnnnnnnnnnnnnnnnnnnnnnnnnnnnnnnnnnnnnnnnnnnnnnnnnnnnnnnnnnnnnnngtgtcacacacctgtggtccgagctacttgaagggtcaaggtgggaggattgcttaagccca

SEQ ID NO: 331442 - DNA, 445 bp, Homo Sapiens
  misc_feature (11)..(11): n is a, c, g, or t
  misc_feature (119)..(191): n is a, c, g, or t
  misc_feature (201)..(245): n is a, c, g, or t
  misc_feature (335)..(335): n is a, c, g, or t
  misc_feature (352)..(352): n is a, c, g, or t
  misc_feature (411)..(411): n is a, c, g, or t
  misc_feature (417)..(417): n is a, c, g, or t
tcttaaggtantatctaatttctcttgtaattctttgttagctcatttgtatttaagagtgttaatttccggccgggtgcagtagttcatgcctgtaatcccaacgctttgggcggtcnnnnnnnnnnnnnnnnnnnnnnnnnnnnnnnnnnnnnnnnnnnnnnnnnnnnnnnnnnnnnnnnnnnnnnnnntacaaaaatnnnnnnnnnnnnnnnnnnnnnnnnnnnnnnnnnnnnnnnnnnnnngtaacaacctagtttgaataataccagcttaagatccaatagtatatactatgctcctataaatctgtctttccctctttaatatgttanttgtcacagattacctncgtgccggaatttcttggcctcgaaggggcaaatttcccctatacgtggagtcgtattnaaattnggtaaatcatgttcataggctgttttcc

SEQ ID NO: 331443 - DNA, 499 bp, Homo Sapiens
  misc_feature (470)..(470): n is a, c, g, or t
ttgcattaagtggtctttattgatgtttcacattcagttattatcaattcttcagttaattgtacaagtatgataaattattttctatttgctgtgggaatttaaatgtaaaataaatacaaaatacatgtgtggtttaatgaacactcaatgaagcatctcttctgaggtattcctttcagtctggttttatcccagatctttttacttcccctaggaatagtctattaaaccacacaatggatctgtgaacttgtaagatcaagttcactggtaaatctgtgaacttgtgttttaattacattaagacatattttttggatctcatcatacaacaccaataccaaaagcaccgcccatggcctctcagcacattgggaccaggcacctttggaaagaaggccttggctccttcgtccttttgcaatcttccctccagcagtcaactgtccccgtggacataataatcnggccctttccggccggactgcatcatcat

SEQ ID NO: 331444 - DNA, 489 bp, Homo Sapiens
  misc_feature (164)..(164): n is a, c, g, or t
  misc_feature (417)..(417): n is a, c, g, or t
  misc_feature (436)..(436): n is a, c, g, or t
  misc_feature (451)..(451): n is a, c, g, or t
  misc_feature (466)..(466): n is a, c, g, or t
attgtgagttatctcggatatagatattgatagaaaccttgacatagataatatatatagatgataacagtttgatggaaactgtagagtgagatgagaaaagcactaagacaaatattgggaaatcaatcttttggtaacttggtaagaaggaaataattttngaattagatatcaagaaagggagaaaaactagagggtgatgatacattacataaggcatgtgaagaagatactttgaggaaggaatagttaacattgttgaaatttgcaggtaaatcaaataaaatgatgaataagtatttttaggtctagtatcccaaaggtgtattattccattctcacactggctataaagaaatacccgagactggggaaattttatggagaaaagaggtttaattgactcacagttcnaccagctgtacaggaggcntggatggggaggccncagaaactaccatcntggcataaggtgacgggaagccg

SEQ ID NO: 331445 - DNA, 441 bp, Homo Sapiens
  misc_feature (199)..(219): n is a, c, g, or t
ctatcagaagaacaaaaatcattacatgaagggtaccacgggtgtcagaccccattaggaagctctgcatatagtagcatattttgtatgagatttttgtatttttttaaagaatagaatagttctagttataggaagatttttatgagttactttgccgtatttgctttatttttccctctccatccatccctattcnnnnnnnnnnnnnnnnnnnnnacatacacatgctttatgcttttttgctgaaccatttgagaataaattgcagacatcatgcctctttacccctagatacttaagtatgtatgtcctcagcttaagggtattctcctaatacccatgatacagttattacccttggggaatttatcattggatataaaaataaaatggaacatctaaatttcccttaatggggccaggcgctatggctcacac

SEQ ID NO: 331446 - DNA, 373 bp, Homo Sapiens
  misc_feature (222)..(222): n is a, c, g, or t
  misc_feature (342)..(342): n is a, c, g, or t
  misc_feature (352)..(352): n is a, c, g, or t
tacaattttaacaggtttatttgagcattcagcaattttatcaatcaggcagtggcagaccgccagcagttcagggcgccaccaccgaggaaaccagaggggacacttacaaggtgtctctgggagcaagacaaagaaactattttgattggttagagtggaaaagttcataatttaagaggttaactggaccataaatcccttgttagaggttagtcgggnagtttctgactggttaagctgaagtttcctgctcccaaggttacacacaacactttcactctgagttgagtttcagtttgctgacttaggaaccccaaagtgcaggagccatttcaagcntattgggctncccagcgaaatttttattaac

SEQ ID NO: 331447 - DNA, 426 bp, Homo Sapiens
caaaattttatttttatggaattttcagcatgtttaaacttaatttttagaacaaaatccaaaagcttaaaatcagatatcttataatgtgtcacaattaagtatggagagttctgtcatttttgaggaaaatctttcataattcttaaaatgcagatatttacaacatttttaaatacagacatatacaacatggcatatttaaatgtacaaaatagttgaaattatattttatcacagaacattccaaaattcaaactaatttttaaaagtccacaaacactggatagcatttggaaaaaaatagcaacaagtttatcaataaccatgccatatgtttagtaactaacttacttatacacaacccctaatttcacatgtcaaatccacaaatccaaaaggatatatggaccaaatcccatttaa

SEQ ID NO: 331448 - DNA, 460 bp, Homo Sapiens
  misc_feature (227)..(342): n is a, c, g, or t
  misc_feature (421)..(421): n is a, c, g, or t
cttgagacacgagttagaaaaaatgcaattgaataaaccaattgtaagacccatctcaaaacaacaaatttaaatatgaaccacatattagatgatactaagtaattattgtttttgttaggagtaataatatcactgtggattttttaaaggccttactgaagtattataagtgaaataatttgtgtgatttgctttaaaatattccgattttaaaaattttgtgnnnnnnnnnnnnnnnnnnnnnnnnnnnnnnnnnnnnnnnnnnnnnnnnnnnnnnnnnnnnnnnnnnnnnnnnnnnnnnnnnnnnnnnnnnnnnnnnnnnnnnnnnnnnnnnnnnnntattttttttaaaataaagaaaaattgtatgttgagggaggaggggtgtggtggtgggtggtgatggtgtggatagacnataaatatggataatagatcgcagtactcctaacactgc

SEQ ID NO: 331449 - DNA, 478 bp, Homo Sapiens
  misc_feature (275)..(275): n is a, c, g, or t
ttctaacctgtggttcaaacctgggtgtgtttctggcatctccctaacccagatcagcaatggccaccctgctcctctgaggtcagcagaagactgggaagcagaggtgagggatgcaggccacactggaatgggaagtcttttccccactggatgtgcctgtctggtgggttttggaccttcccagactacatctctaggagaggcctgtttgggagtacgtacactgagagaccctggcctcttctgctggaagactgtccaagtcttggggntttcttgagctggtgattcctctgccctcctgctctctctcttcatctcaggcagcatggggtccccttttgtccccaaacctaatgttttaatccaaatgcaaattggttccacatttttactggagggtaatcagtttttaaaattcacacacatgtaatcgaaaccgcaatactataaagttctactggtgagactcctg

SEQ ID NO: 331450 - DNA, 261 bp, Homo Sapiens
  misc_feature (149)..(149): n is a, c, g, or t
tgtcatgtcttttgatggagcacatgtattcaaggcctttttcctccagattctgtgctttttacattctatgctacaagactgatattttgtctgtttgtaattaccccagttgtggtcatttgcattaaatgacatgagaatttagnagtagaaatgccattttcaaaaagcgctgggagtcatcatgtcaaagttcattcaactcattgggagttttccctcaagcagcaaccaaaggctgggtgcggtggcacgctg

SEQ ID NO: 331451 - DNA, 493 bp, Homo Sapiens
  misc_feature (307)..(307): n is a, c, g, or t
  misc_feature (315)..(315): n is a, c, g, or t
  misc_feature (319)..(319): n is a, c, g, or t
  misc_feature (324)..(324): n is a, c, g, or t
cccgagttgtttttaacatctaggttgcttgagtactactataattttgatggtaatgtagttgactgtggaatttatttatagtcaacattagcctgatttctgataataaactataaagattcgtattcctctacttgctagcttgttcccaaagagtcccaatttcttcctgttaataaaaataaactttttgttgggaagataatgttcatttgctgaatatttatgttgtagataagtaattgattgaactttatttcaacagggaaaatcatgaatcagaaaagccagcactgaacacacntagcgganacanacacngtagcgatggaggtgacgtagcttcctccgagtggaactgcagcctggggacttgattaggtgctatgcatcagtagcattttgaatgcaagggatgatggaaagcagcacatgcgtttctgtggcagctgtggggacttgacagcaatgctcatctctcatgcttcaa

SEQ ID NO: 331452 - DNA, 308 bp, Homo Sapiens
acagagtgaatgtgtggaagacaatttttccacagactgggagtgagggaataatttcaggatgattcaagtgcattacatatattgtgcactttatttctattattactacatagtaatatataatgaaatgattctacaactcactataaccgtagactcagtgggatctctgagcttgttttcctgcaactagactgtccatctggggtgatgggaaacagtaacagaatatcaggcattagattccccataaggagtacacaactagatccctcgcatgcacacttcacaacaggtttgtgctt

SEQ ID NO: 331453 - DNA, 634 bp, Homo Sapiens
  misc_feature (107)..(194): n is a, c, g, or t
gggtggaatcttcaggttttctacatacaagatcaagtagtctgaacagagataatttcacttcttcctttccaattttgatgccttttatttcttcctcttccttnnnnnnnnnnnnnnnnnnnnnnnnnnnnnnnnnnnnnnnnnnnnnnnnnnnnnnnnnnnnnnnnnnnnnnnnnnnnnnnnnnnnnnnnttcgacatgagatttcggtggggacacagagtcaaaccatatcagtggacatgtaatgaaaatgaaagagcctagcacactttaaaaatgctcttcatatctcggtgcactgactaagatggcagggcaggtttcaaatgcctgctctatcgggtcactactgtgcagctaggcatccactaaactctttgtgcctcagtgccctaacctataaaataggcatcattccagcttgtacacaccataaggttttgatgaggatgggatgagatcaggtttctaaggtacttggtgtgtaaataagctcttaattgaaaatcatatagtattattaatggccagtgattttgtttcattgcttaactctgccaggatgtaactgtggggcagtgattctcactcccccaacctcaggagacatttggcaatgtccagagaca

SEQ ID NO: 331454 - DNA, 460 bp, Homo Sapiens
  misc_feature (390)..(391): n is a, c, g, or t
ttttcttgctgagacctgttttatttgtaaaacatctcttggagttgctgtgaggataaaatgacaacatatataaagagccaggcttcttctagaagaatgtccttgggtagcatgtacatttccatccttccttttagagagtgggggtaataggataccccctcctccaggggtatcccctctttctagggacctacccaagctaggcctttcttccagtgaaacgttgcatcccgagggcttctaggatgaagtagtccactggaaggcaccagctcttccttttatctctccagagctggacagtgcaccaggggccggtactggttccccagctaggagacaccttgggcggggctttgctcgccggaagcacgcagaatgggnngaggaggtgcccctctgcctgtgtttgtgcaacagacccgcgctgccgcgtcgggttccggcggccgga

SEQ ID NO: 331455 - DNA, 785 bp, Homo Sapiens
  misc_feature (566)..(566): n is a, c, g, or t
tattgatattttcattgaggtttatttataccttaactctttccacaaactatttgagacagcttcaagaaaacacccttactgaatctatatgcatagggaaagatatggaaatgtgtaagactggtgaatgctttctggcttcccttagctaggtgagtccatgtaactaaattctggtcagctctggaggggtagatctaatttttgggaaagctccttagagggcagggagttcaccctttgtctgcccttttcccttcttgcatccctggaatgcagaaaacatggctgcaactctaacagccctcttggggcatgaagtgaccttgaagtctctctaaggagcccccattaagatgaccagcagggcagagagacagaaatctgaattcttgacaacttaatggagccaccatatcagatctagactgcctatctcaggacttcttttacatgagagaatgagcagttgaagccactgtgacttctagactgttttacttggcaatttctaaagatatagaaggaaaattatatattcaaatctttatgaatgctaaaantcactgcgttataagagtattggcgacttctttttttctatttcccaaaattcataatgactacaaacatttttattattagaacaaagctttaaaatagcaactagagaaaatctaaggagaaattttaaaacactggaaaggaaaatacgtatgtcaacatacacaacaattatatatgtgataaagctttaatgcatgtgattatgctttaattaa

SEQ ID NO: 331456 - DNA, 672 bp, Homo Sapiens
aactgaactctctcaagaaaatgttttatgaaaaatttcatttatagtttcagccatagcagggagttttaagggatggaaaagttttcacaaactttagacaatgaaactatacttttggatgtatgtgatcaactcaacagttgttgacaacacaaccgaacatcagaaactaaaccagcaaataggcacaaaataaggcaagtgggttaaatagttgaaaattggttagaaaacatgcaaaaataatactgagttttcttttaaaaagttttaaaccgtcattaaatgtttctttttgtagaaatctgaagagttctgcgtctgaatttgaaattggactttataaagcctagaaaacagaggaggcggtgccctgcccttgtcagttgttgttctctttggtggtgatggtaaccagctgcttggcagccttggcgatgtcgtacgcacactggatgacctgctgcgtgaccagctgaacgtctgtgggtgagccggggtcccctgggagggtcttcttgcactctgactgcagtcggtaggcactggacgtcagtaaacgaagggaagtcctcaccatatcagacttgggttttttggggaataatgctgccatttctgtaacagctacgtgtatcctctctgagcagggaatataactgtcatgtt

SEQ ID NO: 331457 - DNA, 417 bp, Homo Sapiens
tttcaacagaaaatatatatttattataaaataaagttagtttcatgaagagagtagaaaaataacactatgagctactaaaaaagttgtggaactcagtctccgaggattggggtgagaggctttcacatcactctggaaacccaccaacatgaggctctccgtgctcatgtgggacaggtatagcacagctcgtacagggagcatgtggctcaggtcctgcttgaagcccaaggagcctagatggtccacacgagatgctctggccacggtgatcaaggaggagaacttgaggtcagcaggggactggttctgagaaggggcaggatgggaataaccttgcccctccctatactggagttttagaagagtctcttggggctgatggtcctggtttagaagatgggtacccactgg

SEQ ID NO: 331458 - DNA, 500 bp, Homo Sapiens
  misc_feature (143)..(143): n is a, c, g, or t
  misc_feature (154)..(154): n is a, c, g, or t
  misc_feature (160)..(160): n is a, c, g, or t
  misc_feature (317)..(426): n is a, c, g, or t
ttttttgtgagaatatagcctctcctaattcatagcaagaatttgatatgatgttccatagttttaagaaagtcattatatttctgtttctgcttattaaacgtgtgtgtagcaaaatgatgatgattacaccaaagtgttanaaaaatccatnggcatnaagggtgttttctgatttattaatttctcatggtggccctgtgcccctctctactgatttgttattatgttaacttcaagcattagtctcttggtcatgggaagttgaagatgattgtgggtaggaaagagtgaactggccgggcgctgtggctcannnnnnnnnnnnnnnnnnnnnnnnnnnnnnnnnnnnnnnnnnnnnnnnnnnnnnnnnnnnnnnnnnnnnnnnnnnnnnnnnnnnnnnnnnnnnnnnnnnnnnnnnnnnnnaattagccaggtgtggtggcccactcctgcagtcctaactgcataggaggctaaggcaccagaatcttttgaac

SEQ ID NO: 331459 - DNA, 380 bp, Homo Sapiens
atgaacagttctctcagcactgtccattaacggaatttagtaaacgcctacaaggcctttcctggtaccttcctagtccagctttctagagtcatctcgcggctgctgctcctgccgcatgaattctgaggctcaggagtcacctaagtcacttgaagttcttgaacagtctatgcttgttttgtttgttctccccttgcccctgtgccttcgtataagctattcattcattctctttgcctagaaggccctcgtctccctgccacattctgttttttcttaagactaaaagtcccattcttaagaatcttccataatatcttggggtagaacacagcactttctttccccatgggccaaagtctgggtctggctatttt

SEQ ID NO: 331460 - DNA, 453 bp, Homo Sapiens
  misc_feature (330)..(339): n is a, c, g, or t
ttaaattcaaaaatgcctagggtttattggaatagtcagggtttatcagaaatcatccaatataagcatcggacatggggaaaacgacaaaaccaaaactggaactaattaacaccttgaaaatagaaatacattcctgtgggaggagaattctatgcctttgtcactaggattaggaactgggggcaaaggaatctggaacaacttgtgtaaggcctaagggtgtcttgtgagatcccaaatccttatttaaaatataggcagcattctagctgctaatttaggtaacaaagaaaatcaggttaaaagtagcagagaacattattccannnnnnnnnnctccgtaacctagagcaggggttagaaaactttttctgtaaagggccacacaggacatattttaggctttgcagaccagccagtctctgttgcaactattcacctctgtcatcc

SEQ ID NO: 331461 - DNA, 633 bp, Homo Sapiens
  misc_feature (180)..(303): n is a, c, g, or t
gtgtttttttaagacagggtttcattctgtcacaaaggctagagtacaatggcacaaccacagcccactgcagcctcaaactcccggggtcaagcgatcctcccaccttagcctcccaagtagctgggactacagacaggtacatgccaccaaccctgggctaatttttgtattcttgtnnnnnnnnnnnnnnnnnnnnnnnnnnnnnnnnnnnnnnnnnnnnnnnnnnnnnnnnnnnnnnnnnnnnnnnnnnnnnnnnnnnnnnnnnnnnnnnnnnnnnnnnnnnnnnnnnnnnnnnnnnnntcggcccaaaattctagtttttctctgaagctcacattttattgttattggaaagtactatcaattgtttaccttgaagttgacaggctcactttgttcattgttctagacagtggtctctgaatacccaactgtgaatagccatggattgtcagctgtgcttccaggcaaaattcatgtttcctgaaaggggagctagttcagctcacaaacaacagcacaaatgcttttctcaagatgactaacagactttcatctgcagcagaagggctttatgttcactttccatccgattacaccaaatattaaaaaggtgtgtacttaaggatc

SEQ ID NO: 331462 - DNA, 532 bp, Homo Sapiens
  misc_feature (341)..(341): n is a, c, g, or t
  misc_feature (363)..(363): n is a, c, g, or t
  misc_feature (401)..(401): n is a, c, g, or t
  misc_feature (409)..(409): n is a, c, g, or t
  misc_feature (475)..(475): n is a, c, g, or t
  misc_feature (490)..(490): n is a, c, g, or t
  misc_feature (500)..(500): n is a, c, g, or t
  misc_feature (518)..(518): n is a, c, g, or t
ggtactaacttcgtttattaaagatgcaaaagatttgggtgaggtatgtcagagccccaatccttcagaaacattttacagggctgggggtatgacccacccagtgagtggaacttgagccctgagtggagagggcctttggggactgtatcagggaggaggacacaaagcccgtggatgagaccggtctcatcgtggcctctgcaaagacctcgcaagggaggacaatcacaacataatggcattccagagcagtggaaggtattcattagcactccagtgaggagagagaaaaaacagaaggaggaacagagaggaacagactcaagctcagggaaatnggacattatccagctttgtttnacagagacctcattcccgttttcattctttgactctgnctgtccanctttctcgtgtgtctctgttctttggcatccttccattggaaacaccgggatgagaaacagggttnaggctcccaagagcngttaaattgnattcccttttttggaaancctagttgaaatcc

SEQ ID NO: 331463 - DNA, 455 bp, Homo Sapiens
  misc_feature (427)..(427): n is a, c, g, or t
gaaacttttgaatttatttattattttaatttaggtccagggatatatgtgcagatttgttatataagcaaattggatgttgcaggggtttggtgtgcagattatttcatcacccccaggaggtatttcttgatatgaactcaggccaaagaaacttggaaatgaatcctgctgggcaacctcaggtcttttcacttacaggatttgtctcaataaagaaaaattttgttaataaaagatatgtagtgctacctgaaattggcaatgatcattcaattactttccactgatgatgcaaaggccattaaaattattcatggtaggtctgctttgactgtgccatcttctcttggcaagggtactttaacactggatgccaaatgacccactgatgtctgccacagtaccaagttattttaacataccnttttaaaataccatcatctggaccaagt

SEQ ID NO: 331464 - DNA, 487 bp, Homo Sapiens
  misc_feature (209)..(209): n is a, c, g, or t
ttatattttgcaatgtgagaaagacattagatttggggggctgggggtagaatgacattgtttagatgtttgtctccttcaaatttcatgtttaaatgtaatccccagtgttgggggtggaggtggggcctgatgggaagtgtttgggtcatggtggatgatccctcatgaatggcttagagccactggtgatgagtgagttctcactncagttcgtgtgagatctggtggctttaaaagagtctgcttcccccttttgccttccattgtgattgtaaccttcctggggccttcatcaaaggccaggcaaatattggtgccgtgctagtatggcctgcagaaccgtaagccaaaacaaaccttttttctttataaattacccagcctcagttattcctttatagtgatgcaaaacgggctaactatataaatttgtaatttttaagttatagattgtttttattaaacacttatgaatactgaaaaa

SEQ ID NO: 331465 - DNA, 453 bp, Homo Sapiens
cacaatttttttcacaattcatcagcttaactccatgcagcacttccaataaagattcatcactttcagcacatctaatgattattgtctcaattttatatcaagataataaactttctcataactagatgctttcatttcccctttttccacttgttttgttaaaataaggtaaaaagcaataaaattttccaaataatttttgaaatttttgccaaaagtggcaaagtcacagttctgtagcaggtgggggttacttggcaagacagcaacacaaacagcccaaaaaaggcattcatcaaatgatgttcgtaagtcaaaatccagtatataaatgggcatttcagaggtgacacgtatagtattccatgtgccagttatttgaaaagtcaatgatataaaagccaagggctaccagtacctgtttactaaacagtacatattaaacacact

SEQ ID NO: 331466 - DNA, 923 bp, Homo Sapiens
ttttcggtgtttgtgtctttatttggagaccaggagacagattacagcttaatgagaggaacaacgactcaagtgatctgatgggaagggtgagtttcctggcccttaggaagcaacagatgtgatttctaatcaacaaaaactagtaagtctggaacttttcagacaggaagctgagaggctaccaaaactaaaagtgaaagtgtctgccatcaatgtgtaagtctaaattacaaataaatacattaataaagcccctaacaggggttacaaaatttgtatgactgtaataaagcacagaatataaaatctgaaaagcttaactacgctgggctttttgcaccccattctctgagacaggaaccacacatgaaaggtcactggaacccccacatgcacctctgggaactgtgacttaagagaaaatggagacttcttgaaagataaagcagaaaccacaatttggcaaggacagcattttatctcaattcctttacttttcactcccttggcctacaagggccactgacgtaaaaacccaagcctctgtgtctcagaaggcttaccatcagctctcagcgctgctataaagtcacataacagaactgttccaggaagccagaggtaaagcagaaacaaatgaaagatcggcctgtggggacactcgaggagacactctcatgggaagggctcactcaggaaatcaaccacagataccattcactagcaatgcctcacagactgattcaggaagcatcacaggtcctgtctacatcaactcaccagttaagggccaacatctcttttgggccaacatctcttttagcccagacacatggatttgtgggggactggagtgatgatggggagggaaggaaaccagaaaggagactgctagaatcccagacctcaaaggcctattc

SEQ ID NO: 331467 - DNA, 537 bp, Homo Sapiens
  misc_feature (108)..(230): n is a, c, g, or t
tccattggcgcgatcatagctcactataccctcaaaccacctaggctcagtcttcccaccctcagcccttttggaaagctgagactgcaggcatacacccactacgcnnnnnnnnnnnnnnnnnnnnnnnnnnnnnnnnnnnnnnnnnnnnnnnnnnnnnnnnnnnnnnnnnnnnnnnnnnnnnnnnnnnnnnnnnnnnnnnnnnnnnnnnnnnnnnnnnnnnnnnnnnnatacattttttaagaatattaattgtgacagattgaaagtgtctgagtattattcagacacagagattgaaatataaattattgatctatttaatgaaaaataatttttaggagtcaaaaacagcatataatatatttgacagtgaggtttcctaacggagcgcttacttaagaaacggggtgttggctcattcaccaagtcagttgttctcaaggtaagcatgtgggcagtgggatgcagatgtcatcctactaattactcccaaggatgatgttgacattatttatgttcttaactccataataa

SEQ ID NO: 331468 - DNA, 482 bp, Homo Sapiens
  misc_feature (27)..(27): n is a, c, g, or t
  misc_feature (46)..(46): n is a, c, g, or t
  misc_feature (51)..(51): n is a, c, g, or t
  misc_feature (96)..(108): n is a, c, g, or t
  misc_feature (407)..(407): n is a, c, g, or t
gaagcgccttttccacaaccctcaacntacatttgaattggcaacnacacngatatttcctagagtattaacctagtgaaccccttttattattannnnnnnnnnnnncctaccttaccaacccattgaagaaaaaattgcaacaaaaaatgtaaaaattgacccgtctcccaacttgtcccctttactattaacaatgtgaccaacagatctgtggcacggacacagtacaaagagttgtcatggcaatgagtttggctgatgcaaaggtcattgtgcagggtcaaagggcaaaatcagtggtccatgttaccccccaactgcagggctccactccacccacacaattttagggaattagaaaaaacaggggaactaccagaaagtgcaaaatatgaagaaggcantttcagctccttcagcatggagtagaacattcatttttgagcttttactattgaacttgaatagcctgcacatta

SEQ ID NO: 331469 - DNA, 589 bp, Homo Sapiens
  misc_feature (12)..(12): n is a, c, g, or t
  misc_feature (105)..(232): n is a, c, g, or t
  misc_feature (339)..(439): n is a, c, g, or t
cctcccaagtangtgggattacaggcacatgctaccatgcccaactaattttttgtattttagctgagacagggtttcaccatgttggctaagatggtcttgatnnnnnnnnnnnnnnnnnnnnnnnnnnnnnnnnnnnnnnnnnnnnnnnnnnnnnnnnnnnnnnnnnnnnnnnnnnnnnnnnnnnnnnnnnnnnnnnnnnnnnnnnnnnnnnnnnnnnnnnnnnnnnnnnagtacagtggcacgaccacagatcactgcatccttaaatttctgggctcactgatcctcctacctcagcctcctgagcagctgatcctacaggtgtgcactgctatnnnnnnnnnnnnnnnnnnnnnnnnnnnnnnnnnnnnnnnnnnnnnnnnnnnnnnnnnnnnnnnnnnnnnnnnnnnnnnnnnnnnnnnnnnnnnnnnnnnnntcagtacaatttctaaaacttactatacaaactataaacttgtatggaatatgaagaatactagtgaagagcgggggaaaaaatggcaaatgaattgttgaacagacttcctaggatgccgaacttttgccaaacattgtgttaattcaa

SEQ ID NO: 331470 - DNA, 288 bp, Homo Sapiens
ccaacttttaattcttccatccatccacttatctgcccacacccttccttgttgtagaatggttttctgaagcctggagagctcagacattcttttcttatgcctctcatcctatgtagcaagagttagtaagctaatcagcccttattgatcatttaagatgcaaacaattcttattggtatttcatattattatgcaaaactataataagccagggctagggagtagcaagaggcacaaggccgagttcagtcaggctggtgagatagacagagccatctccaagg

SEQ ID NO: 331471 - DNA, 448 bp, Homo Sapiens
ggcagcttgcttacccgatgtagcacttggcagctctcagaggcagccttggtggtttcactgcttccatagttccagtgcccccagggtgagtgcagcatccagggatggacctgcccacgtgaaaccagagaggctggtctttggcagtggctgtgaattgttgccaccagccgtgtgtagacaaaagtcaagttggagtaagtggggagaggtctgtataatgcaatgcaagtttttatgacttgaattagttaaatctgcagcccaaaatttcatgaaaataaatatttaaaacattttattaaaaattaaattgacaaagtcatattagaaattagtatttcaattttcccaactctaagtatactggaataaattgccttaaagtgaaagagtgagagtgtatttagtaagtcttggttaagcctttttggtttacattcag

SEQ ID NO: 331472 - DNA, 450 bp, Homo Sapiens
  misc_feature (11)..(11): n is a, c, g, or t
  misc_feature (67)..(67): n is a, c, g, or t
  misc_feature (98)..(98): n is a, c, g, or t
  misc_feature (144)..(144): n is a, c, g, or t
  misc_feature (306)..(306): n is a, c, g, or t
gttcggagggnaggagacccagctttcccaaacatgcattctaaacttctttccggccctgcccttnactgcagaggggtcggagctacacatcatcncttgggttgttcggccttcctgctgttgctcacctgcctctgtggnaactgcctggctctgttgcagccccaacaggaagaatcccctctggccaagtgtcccagacccagctcacagcagccttgggctccatgggtgcccacaatcatggaggaggatgccttccagctgcccggccttggcacgccacccatcaccaagctcacnagtgctggaggaggatgaaaagaagccggtgccctgggagtcccataacagctcagagacctgtggcctccccactctggtccagacctatgtgctccagggggacccaagagcagtttccgacgccgagccctatgcagtctc

SEQ ID NO: 331473 - DNA, 475 bp, Homo Sapiens
  misc_feature (443)..(443): n is a, c, g, or t
  misc_feature (460)..(460): n is a, c, g, or t
gcagaggaagagcacgcgctccacaggcgtcactcttatgggtccatctttaattatgttaaatattaataaaagtacagcgtaactgcgattcacttaacataccttacaggactaagggagtacaatttaacacggtcacaacttttgagaacaaaaaggaacttcaataccatgttgtgagaaatgctccaatttgctttggttttgaatggcaggctcgagaaccaccgcccagaacggaacctattctgtcagcaagagccgggcctcgaatgagaggaagcagaggcagccgaagtgccctctggaagaagaaaggcccctggagggaaaaaccatgtctgggatgggcatttgagtgggcacagaagggattgggactgcatatataaaaaaagatcccgcataataaacccaaataatatttgggaataataccnttcaggtaataccttcncgtaagaaagcccga

SEQ ID NO: 331474 - DNA, 413 bp, Homo Sapiens
gattcaaagacaaatatgaatgactctacctatttgtaaaaatgtgaacattaaaaacagtacaatgactgggctctcacaaaccgtgcaaattcaatttgaaatgttcatctggtataatattcagctgtcaagaggaagcaactcaaaggacatcacacagtctataaaccagctcgaaggagccttccagactttgccctgccgaaccctctctgggtgataattacacaaatcttcatagatgatatactgtgtgcagaagcgctgatcagaatcgggtctcgcatggtatgcgactgtattgatggtctgagtcacgtcactgttggcttggggtttcctatgagggtctgtggccccactgcagtggcgagctttataggttgtcccttggatggtgttttggaggt

SEQ ID NO: 331475 - DNA, 505 bp, Homo Sapiens
  misc_feature (404)..(404): n is a, c, g, or t
  misc_feature (427)..(427): n is a, c, g, or t
  misc_feature (447)..(447): n is a, c, g, or t
  misc_feature (472)..(472): n is a, c, g, or t
gttggaaaggagatgtttattttcttcttcccatgctatggaaggacattgtattccgcagttttatttcctccctcaaggagaaaaaggacagcaggtctctgggcctcagggctaagctgcccctacttatatagagctaaccaagacagtacagaaagactggtgactgattccaaatctaccagctaacacatccaccaccactgcgggcaggcaagtgactagaaggcaagttgtggacttggcctcagggacccaagaatttaaaagactacaagggtgattccaaatgtaaagggtaaacaccctacatgtgcattttgacccatggggaaccccaccctctctgggtatttctgggcccactttacaggtaagtggggcatcttaaaaggggcttncagccttccccagcctggggggngcaagggggtcagcttcttntccctaaggtcttcctattcatttnttcctttagggcctttgaggttttcaggacaaa

SEQ ID NO: 331476 - DNA, 489 bp, Homo Sapiens
  misc_feature (21)..(21): n is a, c, g, or t
  misc_feature (42)..(42): n is a, c, g, or t
acccttccgggcttctcttgncaactttctctgcctgagggnaaactgaagctctgaaatgcgatgtaatctgtacccaggtcacccagttatgctgcaaagtgggtttgccaaggccctttgcactgcatcaccctggtgcccagcaacatcgaggtaaccttcactgagcacccaagcttatgccgaggtctgtgctggccactctcatatacctcttcagatcctctgcttgtacccccagcccttgccttccctggattttgggcacccaggactttgctctgcctggtggagggtacttgatttctctgggcttccttcatctcaattctgacagtgtggaaggaaatctgtaggtacccaggtcctcagctccagactgggtgatgctggagacccaggagcaagtcagcagcagctctgcccacaggaggcatgcacaatctggtaggagaaacgcacaagtacagatagcttgctctctga

SEQ ID NO: 331477 - DNA, 529 bp, Homo Sapiens
ttaaagatctaattggcttttattagcgattcatgaactgggtagcatccagcctacaaaataaaacagaagccccgccaggtattgatagaatggtctgcatttgtaaagcagcactagcaggaacaaggaaacagcatagtagacacagcagattggttaacatcaggttacttcaggttacgttccttgtgtggattaaagcagagggggcttcctcatcataatcacgcttgctcacgttgactggactccctttgatcagttgctgtgaatctcctgacttgttgaaactgtcctatttttaagttcactttgattacatgggactccattcctgggatgggagagggtgaggatcttgggagttccatttcaacataaatgtattgtaaagtttttgttaggaggggcttgttaatgttgggccttggggtaagtcctttcccatctctgatcctctgcttcctaacttgtaaaatacaggttaaatgctcctaacattatggaatctaagggaatgtcaggg

SEQ ID NO: 331478 - DNA, 565 bp, Homo Sapiens
tgcataaataccaatttttccctgatgtaagtttagtcagtttataatctagaaatgattgataacagcaatatatcatattttctatctgtagtgttcattattttaagacaagcaataattaaaggaagttgggatgggatgctactttaaatacatgtaaaacatactgtacaaacatacttggctttactatttttttcctaaccatcaagagtgcctcccaaaataagaccagtgaagacaaagtatactatcaaatatggcttccagaacaaaaaccctctaacacgaatcaaacctatttacaaaatttttcagtcttttaaagtttcatttggaaacaaaatgtctatatagcagttggtaatttaacatagaattttcttagtttccttcttcctctcttttaaacagatgtcacaagataagacccagaatggcgcttaggactctgcgttccactgcattctgtgctgtcagttatagaatctcgcttctttgtgttgtattcactggagtcggatctgagatgacgagctgagtgcatctgcgctctttccta

SEQ ID NO: 331479 - DNA, 529 bp, Homo Sapiens
  misc_feature (326)..(326): n is a, c, g, or t
  misc_feature (336)..(336): n is a, c, g, or t
  misc_feature (344)..(344): n is a, c, g, or t
  misc_feature (465)..(465): n is a, c, g, or t
  misc_feature (477)..(477): n is a, c, g, or t
  misc_feature (512)..(512): n is a, c, g, or t
ttttcacatttccaaagcagagtaccaacatttattaatcctcacaacacccctgtgaggtaggtcagtatgtcctttagagtcgagaactgaggcagaggtcaagcaaacctgccctgggccacagagcagcagatgaagggcctagacctcggatccagaagctagggctctcggtccagcattcatccactggtggacatcacatgggcttatttttaccagcgaaggttacgtgaaggacaaaacgcactcagccagcaacggaaacttcaacagttcaaacagcactgggggaacatgtcagtttaaagagacggaaacgntttgaccagnttcatgantgagggcaagacaacatgcggctttagggaagttttggaattcattcacgacttgggggttttaggacccaaggacggggcgcttcagggagggtttcagggaattttttaaaccaacttnggggaccccttnccagggggtttacagggcccaattccttacgggtntttccaattgggtaggg

SEQ ID NO: 331480 - DNA, 283 bp, Homo Sapiens
  misc_feature (52)..(62): n is a, c, g, or t
ccctggttttgtgaacccatctaaaataaaaggctttcctaaggcagaaggnnnnnnnnnnntcactagatttagggcatgttctgagaaagcactccctagaggcagtcatgagcaagacaagtgttttcgaagtctgcttctcagtttgcccacatcagaatcccctgggatgctcatcacaaatgcagatttctgggctcagtcttacagaagtaagtgtctggataggagcccaggattttacgtcacaacagggtccccaacttatgcacacacaaac

SEQ ID NO: 331481 - DNA, 501 bp, Homo Sapiens
gcgagcagacagtgaacgtgttggcccagatcctcaagcgactcaaccccgagcgcaagatgatcaacgacaaaatgcacttctccctcaaggagtgaggcttggtccaatacatggctctgcccccagaacttaaggctctcactgccccttcgccatcctagagtgaggctctgtccaatacatggctctgcctccagaacttgaggctctcagtgacccttcgacatcctgcttgctccctgactcccagggccccgtagttagcaattctggaaaagttaagccatctcctcctctgggcccttccttctggaattcttcagatgcctgttaggccttcttattgtcctcctcctcctggctcggcctccctcacactgaccaagggcctgtgctgcccactgggtaacttctacagttctcccttccacttccctaagtctctcttcagctgtgacttatccaccacatagcccagtaagtcttcagttttggctg

SEQ ID NO: 331482 - DNA, 660 bp, Homo Sapiens
  misc_feature (643)..(643): n is a, c, g, or t
agagcttaaattaactgacaaagtaagtaaccctaccatgctagagatttctagaagatttgttgtgtaatatttttatatcgattacttatttctaactattttcgagggggcatcaaattagaaattagtatagtcattcttggaaatacttccatctttagccagattgtggcactgtttcacggatgaagataaagggaaaagacagtagccaggtgaaattttggggaaactgtaggagaaatcttaaaattctggtatttaattataggtcagatttcattacaataaatacccaggtgagtttgttaatgataaaagcattccttggccttagttattggccctttgtttaaaagtacatttgaaacaaccatatttcatttcctcacgtaaagattgaatgtcaccttggtattctttgtaatggaattaaacattggctgttcttctcccacaaaatcggagcctcccaccctatctgttgcaagtagcaaggccatggttggagctataagcagggaaggctgactggctcaaattttggtaggatttgctccatgttgtgctcctggcacgttcaacagtgctcatcccatctggttttaggagggtgacagcaccctgccttaagcactgngaccagattcagtctgg

SEQ ID NO: 331483 - DNA, 167 bp, Homo Sapiens
ctgtgagccaccgtgcccagcctgaaagctagaggctgttttcaatatgtcattattctcatttgggttagggataagattgaagggagggggtaggaaaagtttcaaaaggcggagagttttcaaagggcatcatgtttaacagggcagcaacacgatccagcccc

SEQ ID NO: 331484 - DNA, 522 bp, Homo Sapiens
  misc_feature (302)..(302): n is a, c, g, or t
  misc_feature (463)..(463): n is a, c, g, or t
gttcgtaggtccacagacaggattctctcatgctcaagtaaccctaaaattaaatgcagaattctacaagtatggatctatgcaagatggaaatgtgaagatgccccagagcttccatcagatgtctgaaagggtgcagggcttcaaaatgtagccaccacatggatcacggtactaaaatagtatctggatttttatgcttctttgtagtggagcccctgccatgctgagcagagttccagagttaggtgttgaaccatgtccttgccctcctgccaatgagcatgtgtggcatgctcagnaggtgctcagggaaccctcagtccctctggtgaagtacaggactgagctgcattctactgactttgggtagactcaaggaatctgaattctttctttatgaacccaaaagaaactccagtacacggaaccaccaccttccctctgtccatcactccctcantctctggctctccccaccaggctagacccaaagtcccctgctatcatcccttcttccag

SEQ ID NO: 331485 - DNA, 326 bp, Homo Sapiens
gagacagagtcttgctctgtctcccaggctggagccgtacagtgttttggtgatgaagaggaaagtgttcaggatcttcaggacattgacattgcatcgtggttcttcttgaacatcccctctgtggctataatcctcggtgcctaagtgagccttcacttgtatggccaggttggggagagactggcataatctttctattagtcacttcctggcaggacattcatatccttgtacggttcttagaagaacttaatagctaaatgatactaataatagctactgatatatactttacaaaactcttaacatctgtcatccttttc

SEQ ID NO: 331486 - DNA, 428 bp, Homo Sapiens
  misc_feature (338)..(338): n is a, c, g, or t
taaaaattctttatttaaaataaagtttaaaaataatgtgggtagtgtaaaatattaatacagaaatgtataaagttgaaagtttcatgtgatctacactgttcaaagaaagctgtgaatagacctttctatgcatttataaacataagcacacacattttaaaatgagttcacactgtacacttttctattaataacttgtttcacctaatgtatcatggccatttttccatacacaatgaatgtactttattcattttaacagatacgaggatattcctatatgggctggaaccacacctttaaccctatccctttaatgacaggacatttagggntttctattactttctacccatggtccatttttacggcttctgtgggggatccttaaatattcccctcaggttcccggtttccattttgtt

SEQ ID NO: 331487 - DNA, 734 bp, Homo Sapiens
  misc_feature (73)..(130): n is a, c, g, or t
  misc_feature (608)..(661): n is a, c, g, or t
gtagagctgatggaggagtaagggacagagaacttaagctttgggctttcttctaccagaaatgccactgcannnnnnnnnnnnnnnnnnnnnnnnnnnnnnnnnnnnnnnnnnnnnnnnnnnnnnnnnnttgcctttgccaactacaaaagctcaaataagaagcatttggggcaaagactgttttgtacaatagaaatgtaagagaacttatctttaatatttaattgcactccattaggtctcttcatgtccccatggcgtggtccccaagtgacttaagatacatttggatgccatctgctcaacaagaagactgactgacaaatttcaagcacacagacagcaacatccaggggacctctctctctccccaaccctggtggcttttgattttacagaaaagccaaaagcatctgataaacaaaagccctgaggtagtcctgattcctcaattccccctaagtggcaccagattctgcacagagggacttgcttcagtgaccaatgctctcagtaattagacaatggagggagaaagtaattaggtaaaccacaaagaagtagaaataaactgtatgggatatgttggtcatggatgaaagacnnnnnnnnnnnnnnnnnnnnnnnnnnnnnnnnnnnnnnnnnnnnnnnnnnnnnnttgcttaatccatgttgaataatcaatttaagcctgtgaagttaaacctgattaaagatatcccttaattaag

SEQ ID NO: 331488 - DNA, 519 bp, Homo Sapiens
ttttgagtttcaaaacgagaacatttattatttgttttttcctcattaaagtttcacaaataaagcacagcaagacttgtctgcagacacacaggaggcacacggacagcccgtcaaccagagatggagacgaaggccagcatggctctcacagggcagcgcttctcagaacccctggcccccctcgtgccaaggctggcctgtgtcaggcctcgcccacgccgccttatgacaaatagaggccggtgccaaggaggtggctacagagcaggggcaaggaagttatcctcatgttctgataatgaccctgcaaatcccaccccaccctcaggcacctccgtctaaggtgtccggttactccaggtaaggaggttcccaggagggccgtgttttccctagggctgatgaaacttgctccgacaagccaggccactgggaggcacctcaggatggaaaagatgctggaggctttgctggctttcaggatgccgggagccccacgggggcaaaaggggagga

SEQ ID NO: 331489 - DNA, 525 bp, Homo Sapiens
  misc_feature (112)..(139): n is a, c, g, or t
  misc_feature (158)..(158): n is a, c, g, or t
  misc_feature (160)..(160): n is a, c, g, or t
  misc_feature (175)..(175): n is a, c, g, or t
  misc_feature (396)..(396): n is a, c, g, or t
  misc_feature (402)..(402): n is a, c, g, or t
  misc_feature (420)..(420): n is a, c, g, or t
  misc_feature (454)..(454): n is a, c, g, or t
  misc_feature (475)..(475): n is a, c, g, or t
  misc_feature (484)..(484): n is a, c, g, or t
cagagaagttaagtgttttatccgaggtcacacagcaagcatgtgcctgggctcaggtctctctgagcctgagccttgcttatgctccctcccctgcacattctgggataannnnnnnnnnnnnnnnnnnnnnnnnnnncctccctccctccgtcaantnccaagagaccagggntctgacaggatcctgagggattcctgccagagggttgccatctctggaagcccctacccccacgccgggtgaatctttttttctgtggagtgcgggcctggagctaaggtgaaggcctgagcctccatttcaggggctttctgtagaatctggttggctgctgttgcctccagaagaagtctgtttcaaggaagaggtttggcctggcctggggcgggaanagcggntgccattcaataactggnaggaagggcagaatccgggggtttggggggccgnacgttcgaaaagggaaggggncaagggggnggcccccttgtgaacaagccctgaagaaaaggtcaggaaaa

SEQ ID NO: 331490 - DNA, 1117 bp, Homo Sapiens
  misc_feature (59)..(112): n is a, c, g, or t
  misc_feature (991)..(991): n is a, c, g, or t
  misc_feature (1004)..(1004): n is a, c, g, or t
  misc_feature (1047)..(1047): n is a, c, g, or t
  misc_feature (1067)..(1067): n is a, c, g, or t
agatgtgaggtctcgccatgttacccaggctggtctcccaacacctgggctcaagcagnnnnnnnnnnnnnnnnnnnnnnnnnnnnnnnnnnnnnnnnnnnnnnnnnnnnnnagcccatttcattagggaggacaaggatagtagacaggtgcacctagggtcttattactgtaaattgttccagagatttaaatttcagaagctgttgagtaactggaagtgttgacttactacaatttggggtcaccaagtgggtggcagatggattgggctgtgcaggggctgaaggactcacccgcaggcccagagtcgctggcctccctgaggctgtgctgcctccatgggactgagtgctgggacggggcattttgggagcctggcaggaccctaccctgcacgtgggccctggccgtgcgtttcctccagatcgtggcaggcggtctcgggatgctgttaatgcagttgaatcaccacctcaaaatgctacaaaatctaccctttacaacaatagtagtacaaataaacgtttagacacttcacgctcaaagagggcttttgctcgggctttttatttcacaattgatgcttaaaagtgcttttaaaggcaatattgcaactacatttatttatttatttatttgctgcagaaatgaagttatttattaaaacacacccatggtagcaagttctgatgggtctgaagaggaggcaggagcaaggtgttgagcttctaaacatcgtcctgccagggagggaccctgacaggtgcttggctgacatgctgtggccgaggcaggaaggaagttgcagaattccacgaaggcagaagactaccagtaggcaggtcccatgtcatcacacccgtgagagtggcagtggtctggtggccacagagatgtctgacagcgtgggtctggagccggtgatcgctgggctttgagaggttccttcaggaggtgcctggaccctgatggacagccccagcctcangctcccccttgangtttgcagagggtgccagaagtgaccccagaaagggtttctcngaaggtgctgcggtccctanccagcagccaggggctctgtctggaagtggcccgtgtcgtggccgtgctg

SEQ ID NO: 331491 - DNA, 475 bp, Homo Sapiens
  misc_feature (32)..(32): n is a, c, g, or t
  misc_feature (205)..(339): n is a, c, g, or t
tcccaaagtgctgggattacaggcgtgcgctngcgcccggcatacgtttctattcttaatatcatgcatttaaaaatacgtccactgtctagattatatattttctcctgacacttcagagttcagcttttcttatatttgtatcttcttacctacttagctacaagggaaatggttaaagaaatcatgcagtggccaggtgcannnnnnnnnnnnnnnnnnnnnnnnnnnnnnnnnnnnnnnnnnnnnnnnnnnnnnnnnnnnnnnnnnnnnnnnnnnnnnnnnnnnnnnnnnnnnnnnnnnnnnnnnnnnnnnnnnnnnnnnnnnnnnnnnnnnnnngtggcatgcacctgcagtcccagccacttgggaggctgaggtgggaggtttgcttgagcctgtaaggttgaggctgcagtgaggcaagattggccacagcactctagcctgggcaacacagtgagaccctgtgtcg

SEQ ID NO: 331492 - DNA, 507 bp, Homo Sapiens
  misc_feature (40)..(40): n is a, c, g, or t
  misc_feature (117)..(117): n is a, c, g, or t
  misc_feature (163)..(163): n is a, c, g, or t
  misc_feature (267)..(267): n is a, c, g, or t
  misc_feature (270)..(270): n is a, c, g, or t
  misc_feature (427)..(427): n is a, c, g, or t
atgagcactgcacccggccccaactgctcttctttcagtntcctcaaatgcatggtgctgcttcctgccttcctggactttgcacgtgctgtgccctctgcctggaacaccctttanccctctttacccggtcccccccagtaacttgtacttcctctgtcanagccctctttatgctgacctgcagcaaacccaagccacctgtgggtccagggactgtgtcaatgttttctgccatctccctgaacctttgtaaacacaaaagcnacnagcattactgccccagggaccttgatccaaactccagctctgccacttaccagctgaggaacctcatgcaacctcttccgtgattggacctcagcttcctcatctctgaagtgaggatcacagcaccagcctccccgtgctatgtgaccacctttcnataggggaatgacacaagatctgtgctgccctcacacatgggggagcagcaggggcttgcatgggccaatatgggcattc

SEQ ID NO: 331493 - DNA, 684 bp, Homo Sapiens
  misc_feature (25)..(25): n is a, c, g, or t
  misc_feature (315)..(315): n is a, c, g, or t
  misc_feature (618)..(618): n is a, c, g, or t
  misc_feature (638)..(638): n is a, c, g, or t
tacaccttatgaaactggtagctancactttctgtctcttggaacactctctctggaaacacttagtcactatgtaagaagttctactaccctaaagccaccctactagagaggccatgtgtagacactccagacaacaagcccagctgaaccccactttctagccagtggaggtcatgtgaggaaagccatcctgaccctcctgacaagccgacccaccagctgaaaaccattgagtgtcctcagtcaatttgaaatgggagcggaagaatcacccagcagaggcatgcccaaatgcccaagcaacaaggtccntgatataataaaatgattggtttatttttagccacttaagttttggagtaatttgctatgctgcagtagataataagaacagaatttgatacctggaagtggagtgcttgccataactatcttaaaacatgtggccatggttttggaaccatacaatgagcaaacgctgcaaagatcttgaggacactgttaatgagaatagaaaaacctgaaggagacttctagtgaatacttagaggaagatactacaggaattactattggaggctggagaaaaagtgaccctggttatgaagtggccgnaaattttgccaatactgttngcctgttgtgatcttgaccaatagaatatatacctaatgaactgaa

SEQ ID NO: 331494 - DNA, 457 bp, Homo Sapiens
  misc_feature (362)..(362): n is a, c, g, or t
  misc_feature (417)..(417): n is a, c, g, or t
  misc_feature (443)..(443): n is a, c, g, or t
aaccattagtgattttattgaagacttattcacagtattttgacctgagaaatggtgattttaacatacccttttaggtgcccacattgatcttagttaacagtcttgtagttccctctttaggcttcaagataattgtgatttcatccgcaccccagatacttccaagtggagccaggcctcagactgttctcagtcactgctctcccacagctgattgcagacattgcctgtgcttcctaccccagcagctgtctagtgcacttgaaccacaaaatgggccctcacttctttcctaacccagctccatcttgggtaaactgtaacagacagacaggagtccccaaagggcacaaaaatangttttctttccagaatgattttaaaagggaaggggggggaaaggggaggcataangtggctaatgggagcctctaaggggntgaaagcaatttat

SEQ ID NO: 331495 - DNA, 501 bp, Homo Sapiens
  misc_feature (291)..(341): n is a, c, g, or t
  misc_feature (476)..(476): n is a, c, g, or t
taatatgctttattctgcatattagtatcacattacacagtttggtcatggtatttgtaacctggagagaatactagtgcagtcggtcttcataccaccccattcacaaccagcttaaatggcagtatccctctgtgaactcaactacccctcctgtgggtccaggctgagctctacaggtcagcctcttcatctcagcccttctaggtcctgctgtcagggctgagctgtcacttcacttttttcccagagtagtgcagcatcctctctgaaacctgagctatcatgacnnnnnnnnnnnnnnnnnnnnnnnnnnnnnnnnnnnnnnnnnnnnnnnnnnnagagacagtctcattatattgccgaggctgaccttggaactcctggggcccaagcagtcctcccacctcagcctctccagtagttgggactgcaggaatggaaccactggccaggctaaccggaacatttcctgngggtgaataaggcacccttaagact

SEQ ID NO: 331496 - DNA, 418 bp, Homo Sapiens
cttaaactcttcatggattcttgaaattctctcatgttcctgtcggctttccgaatgatgtggcaatctgctcatcactgcatccagctcatcaaacttcctcaggacagcctgaacttctgcagacagctctttgtactctgaaaactggtcttggaacacagctttatagcgttctcgctcatcatctgtctgaatcacagggtattttgccacatagtcgggcatcacgataggtttaggaatgtggcctggggggatgtgtccactcagtagttcaggtttcatttttgctgttctcagttccttgaaattaacttctgagtctctttgtctgtcaccactggtggccatttcacacattttccttttccgatgacaatggatggctcatttatctcctggttgttccatatat

SEQ ID NO: 331497 - DNA, 639 bp, Homo Sapiens
  misc_feature (525)..(525): n is a, c, g, or t
  misc_feature (537)..(537): n is a, c, g, or t
  misc_feature (573)..(573): n is a, c, g, or t
  misc_feature (617)..(617): n is a, c, g, or t
  misc_feature (624)..(624): n is a, c, g, or t
ttcttcttaaaattttttattgtggtaaaatatacataccataaaatttacaattttaaccatttaaaaatgtacaattcaacgtcattaagtatattcccaatagtgtgtgcaaccatcaccaccatccatctccagaactctgtcatcatcccagtgtgaaagtgttttagaaaccatatatgtaaaggcaggtcaattaggaatgtgctagctgaagtcttgaccggacagcaaattcatccatccacctacctactgtgtttatgtaccaggcttgataaatacagaaacaaatgagaccagaacttacaaggtaagaaccttgtcgtctgtgatgctgggccccctgtcctacttcaaaacagagtggggaagatagaaaggattcttagatgagtctctaattgaaggaattcaagttttacttattctcctttcccaggggaaatgggaggtgctctcacccatggcctcagcctttccagttacccagaggtgtgggattttccccccctttggtanatggtttggtcnggtccctgcatggggagcagaggacgatgtaatacnatcattggtttagagccttcagctgctagcccttcccagagtcncctttgnccttcaacggccggg

SEQ ID NO: 331498 - DNA, 447 bp, Homo Sapiens
taatgaacgttcctttccaatgggaccaggtttgtgttctttgttttctactggactcaaatctggaagcttctgggctttgataggtcctgctcgtggctgcttctgccgctgttctttaggttcaggtattttgtcagcagatttttccgaaagcacaggaacaacttcattttcatttccatttgaggctggagcaccaaactgaattgtgtcagttccaatttcgagtccactttcttgaccattcttcgctccctctgatgaaggagctgatccaaacgatgttaaggggcttattccatgcactgactgaaggtgggctgtgggtgggactaatggggaccctaattttcttaggaggatatcattcagcacagcttggtggggggccaccttgtttatccccataaattcagctgtcagagtgccatgtgactgtggggg

SEQ ID NO: 331499 - DNA, 460 bp, Homo Sapiens
  misc_feature (148)..(148): n is a, c, g, or t
  misc_feature (335)..(335): n is a, c, g, or t
acctgccccagctgcaaaccctcgatgtgacgcagaacccctggcactgtgactgcatcctcacctatctgcgcctctggctggaggaccgcaacgcccgaggccctgctgcaggttccgctgtgccagcccccagcctcgcatgccngcgatcggctgggccggctgacaggctaccagctgggcagctgtggctggcagctgcaggcgtcctgggtgcgcccgggggtcttgtgggacgtggcgctggtcgccgttgccgcgctgggcctggctcttctggctggcctgctgtgtgccaccacagaggccctggattgagccaggcccccagnataccctggctcgcaggccagggggccagtccctgaggcaggtccccagactccaccaagcctggtcagcccaaaccaccagaagcccagaataaactggcagctcagctgttttatataagctc

SEQ ID NO: 331500 - DNA, 405 bp, Homo Sapiens
cagaggattttatttcaagataaaacataacttctacccatactattgattccaaaggttagaaaaagtgtttttcctcatcttatccttcaaagaggtcacagcaatgcaaacatctataaaatgcctctgcataattggtcagaagctatagtccagaaatcattgaaaatgcttttccattttaagcttaggtgaggtgtcttaggaaacctctatgacaacttactctatttattgggaggtaaactcccagactctcccagggtctcctgtattgatctcattttttaggcttcctaagcccttgaagcacaatcgaaaaagccctggatctcttttctgcacatatcatcgcggaattcattcggcttccagcaagctgacactccatgatacaagcgg

SEQ ID NO: 331501 - DNA, 703 bp, Homo Sapiens
cctctctcacacacatacacatatacattgttattccacacacaaggcataatcccagtgtccagtgcacatgcatacacgcacacattcccttcctaggccactgtattgctttcctagggcatcttcttataagacaccagtcgtataaggagcccaccccactcatctgagcttatcaaccaattacattaggaaagactgtatttcctagtaaggtcacattcagtagtactgagggttgggacttcaacacagctttttgggggatcataattcaacccatgacagccactgagattattatatctccagagaataaatgtgtggagttaaaaggaagatacatgtggtacaaggggtggtaaggcaagggtattctgggactgaggggattgaactagacacacacagacacatgagcaggactttggggagtgtgttttatatctttcagatgcctagaacagcacctgaaatatgggactcaatcattttagtccccttctttctataagtgtgtgtgtgcggatatgtgtgctagatgttcttgctgtgttaggaggtgataaacatttgtccatgttatataggtggaaagggtcagactactaaattgtgaagacatcatctgtctgcatttattgagaatgtgaatatgaaacaagctgcaagtattctataaatgttcactgttattaga

SEQ ID NO: 331502 - DNA, 260 bp, Homo Sapiens
  misc_feature (236)..(236): n is a, c, g, or t
tttgaaggggaggcagttctcaatttatttcaataaatccttatgatgtgccagtgaccagaatttctgtctgctccagttgttgggttggccggactctgctgggccctgagtatggtgggacaacaggtctgtcaccaggtgctgggccatccggcgttctgaacagatggctttgcccagtgttttactcacagtcctgagctgggccggacgtccccggtggcgtcaatgtngggggcaaaaggggaaccgaaatt

SEQ ID NO: 331503 - DNA, 584 bp, Homo Sapiens
  misc_feature (514)..(514): n is a, c, g, or t
aaggaaaagataaaataggtgatttattttgtaactgtgaaaactatgtttattttgaatacaaatcttgaattatctatggatgagtttgaaataaatcatagaagagaatcactttttggatttttaatccaggtccttgtgtgtgtatgaaatacacacatgatcttccttattagtcatggaagggcaaaagtggaccaaaaacaggtcagctaagacaggcatgtctggcttctgggctgtagctcagcatgttgtaggctagagtccagtgaccttcactggcaggctgcctacagtccatgagaccctaggcagtcaggcactgagctctgtcctccagctgaaaataatgaagagcacacggcttctccccggtcatcgtcagggtgactcaatcctgctggaagcctgagggcgcacatgagagaaatgcttttcaagggagccaaacttgatctataagcttatctcagggtatagtccaaataacacttatgactccaagcantaggcagccatgcttactactctctaaagaagccagtacttctgatgaggaattgaaagtcaagatggga

SEQ ID NO: 331504 - DNA, 287 bp, Homo Sapiens
  misc_feature (201)..(201): n is a, c, g, or t
  misc_feature (251)..(251): n is a, c, g, or t
  misc_feature (258)..(258): n is a, c, g, or t
tgcacatcgcacccagccctgggcgacgcttttataacacagacgctcatgtggcacttgccatgtgccagggttctgccccaaggccctttgcaaatgtcagctcagttaaacctcccaacgactctaggagacaagcactattgctatccctgtcttgcagatggggaacaggagacgcggagtaaacgggacaagctnggaggccacttggggtagggaatttggtcccgggccggggtaccccggtnctcccanaggggaagccctaaaatcactggtttcaa

SEQ ID NO: 331505 - DNA, 655 bp, Homo Sapiens
  misc_feature (542)..(542): n is a, c, g, or t
  misc_feature (548)..(548): n is a, c, g, or t
  misc_feature (600)..(600): n is a, c, g, or t
  misc_feature (606)..(606): n is a, c, g, or t
  misc_feature (632)..(632): n is a, c, g, or t
  misc_feature (642)..(642): n is a, c, g, or t
ttactcataagtgaggatgaaatttatttttcaacaaccaatatgccaatatccaacttctaggttttattcaattctaatgtcatgggtttctcctaccccagtcaaaactcctgccaaatgtccacaaaattgacaccaaaatcaacaaacacaaagaaagagagggacagggagagggaaagagaaatagagagtgaggaaggaaggaacgtgacaagagctaccatgcaaaatgaccagaagaactggagttcagtggcacagatcagcaggagcagaggaatgctgcaaaagatgatgctgcatagagtctaacttggagatgcctgtatgatgctggatgaccaagtactaaggtcacaagtgtgttcatggacccataagaaccaggatcttgacccaaacttataagatcttctaaaaagaaaatacttcatctaaattgaagccattcctaaagtccaacaccagaagagttccttatttgatgtaagttgtgcctaaactttggctgatccaagaacccgtccactaaggcncctgangcatctggcaatgtgtttgagagacttgttggccgttcccctccttttgggngtccgngaccggttcccccggggactggcttntttggccagncgtcaacatttcc

SEQ ID NO: 331506 - DNA, 440 bp, Homo Sapiens
  misc_feature (106)..(122): n is a, c, g, or t
  misc_feature (125)..(217): n is a, c, g, or t
  misc_feature (240)..(240): n is a, c, g, or t
  misc_feature (259)..(259): n is a, c, g, or t
  misc_feature (371)..(371): n is a, c, g, or t
  misc_feature (381)..(381): n is a, c, g, or t
  misc_feature (401)..(401): n is a, c, g, or t
gtgatcacagtcactgtagcctctatttcctaggctcaagcaatcctcccacctcagcctcccaagtagctgggactacaggcacgttccaccacactcagctaannnnnnnnnnnnnnnnnaannnnnnnnnnnnnnnnnnnnnnnnnnnnnnnnnnnnnnnnnnnnnnnnnnnnnnnnnnnnnnnnnnnnnnnnnnnnnnnnnnnnnnnnnnnnnagcataagccactgtgcccaagnctccaatctttccacaggntataaataatgtcatggttcaacaattttttccggctttttaagctttttcccaattttggaaattaattccttaagggaaaaccccccagaaagtaggaatttaacagggntaaaaaaganggtagaaagccttttttaangggttttgaaacacaaggctgtttttaggaaaagggcca

SEQ ID NO: 331507 - DNA, 389 bp, Homo Sapiens
  misc_feature (199)..(214): n is a, c, g, or t
aaagtgaggctccgtcaagtcttccctcccccctcccccaacaattcttttgaatttccctccctcccaaacatggtagacctaaggacggaaacacacccagtgcaaacaaagttaaaaagctattttttttcagtatatatgtttcttagcaacaacttccatataacatgaaaaaagtgaaaaactagaaactaannnnnnnnnnnnnnnngtgtttaaatttaaatggtatgtgtacttgcttcacattgtctttctaggttggcgttcatgattcaagtatttcaagagtgatatgttctctttttggattcatattccaaacgaaaaaactgaagttataagggaggcaactatgtgctcagacagtctgtcaatgacccacc

SEQ ID NO: 331508 - DNA, 529 bp, Homo Sapiens
  misc_feature (153)..(153): n is a, c, g, or t
cataaaacaaatctatgcaggagatgtagatgttggaaaaaagaaggcagacatctcttacatgaggttcggggagcttgaaggtgttagcaaatttacgtggcagctgaatccatcaggagcttatggtcttgaacaaaatgagcctgaaangagagaaaatgggtgtgttgagacctgtcccacagaaggaagagcagcaccaggacaagaagctgcgcctcggaatccactaagaaggcctgtctacactgcaggggaacctcaagaacttttcattgcacttctaaaattcagccttgttcattcagaaaataaggatggattttgtgaataattgaaaagattttttaaggaagctaatttatttctaggatacaaatggtgttaataagaatatttgtcttttagatttatgtgtgggttttccataatgtagtagtgtgttattttattacacgaaatgagggagcaataacttcaaccaatgtaatcaccaacagggtattgaagctcatggtgctagctc

SEQ ID NO: 331509 - DNA, 462 bp, Homo Sapiens
caacaatatcttaaacacttaaatatgatttagggagccaggccatagtggtatgttcgtgtagtcccagctactgaggaggctgaggtgggaggatcccttgagcctaggagttcggaggcaagcctgggcaacatggcaagaactcatcttaaaataaccttaaaaaaaagtttggcctatagagttacctactcagttcactttaaagaaccagcatgttgagtcttatgttaaacacatcttataaaacggtgggcctattttgtatctatttgtcacattttacttaactttttttctctgtctcataaagacatgcttttattctatttatttctgtttattaagttttctcaacagtcattgaatgccagctatgggcactttattgcaaagggatgactaaagttgtggcaaaggtcaaagacaatttctttttcagttagtatcactagggct

SEQ ID NO: 331510 - DNA, 599 bp, Homo Sapiens
  misc_feature (23)..(23): n is a, c, g, or t
  misc_feature (96)..(96): n is a, c, g, or t
  misc_feature (129)..(129): n is a, c, g, or t
  misc_feature (147)..(147): n is a, c, g, or t
  misc_feature (444)..(444): n is a, c, g, or t
ggaattggcctcgaggccaagantcggcacggggaccagatggattcacagcggaatctatcagacattcaaagaagaattggtacaaatcctacngaaacaattccaaaggataaagggggaaatccntccttaaaatcattatgngaaacccagtatcaccctaatacccaaaaccaggaaagggacataacaaagaaactgttgactcgctctttctgggtttctctctgccccggtgctgtctcccctgcagtctctgcagtccaggccctcttctctctctatgaatcatctttgcactctgtctgtttctctgttctgtctgcctctgctcacccacacgtgcacttgtgccccacatggcccaccctcggttctctctggttcccactgtgtctgttgtgtgtctctattcttcttctgattactctttcctccccnacccttatctctttaatgttattgctatgtttgtctctgtgctttctctgtgtgttttcactctttttctttcctgtctcccttctgcagttctgtttcttggtgtctggttgtcttctggtgggggagaagggatagtttactattgtcagtac

SEQ ID NO: 331511 - DNA, 599 bp, Homo Sapiens
  misc_feature (540)..(540): n is a, c, g, or t
  misc_feature (548)..(548): n is a, c, g, or t
  misc_feature (561)..(561): n is a, c, g, or t
  misc_feature (586)..(586): n is a, c, g, or t
ttaatcggctaagttggaaagtggctcacccgtatgctacacatttccactatgtcggaatctcacttctagtttccagctgagcccatctgaggtgacttgggcaaagtccctttctctgaatgtttcatttcccataaacgagaaaataggtggagggccttagagagttttgatgtgaataacagctattagatatcatcaagagctttttctccagacgacactgacacaggcacactgggttctgctttccttatatcccccttctgagcccaggcccttgttcctctcactttcaatcccaattcgggcttcaaaggactagcaaaaggagtccttttaataatatctagtgctcctttgtcccgaaatctggctaagggaagatttcaggggcctcagctgggttgaggaatgggtagagacaatccatccttggccatctacgcacccaagcccagagcaagtgtgtacttgggggctcgctgggtacctagatgtgcaaaggtcactctaacaaggggcccctgtgaaggnatgggatncccaatttccggncttttcctcgggcggaattcttggncccgagggcaaat

SEQ ID NO: 331512 - DNA, 1067 bp, Homo Sapiens
cctttgtatttcctttattatacagttttctttttaaccttatagtgtggtgttacaaattttatttccatgttagatcaacattctaaaccaatggttactttcacacacactctgttttacatcctgatgatccttaaaaaataatccttatagataccataaatcaaaaacgtgttagaaaaaaattccacttacagctgggtgtagatctgtgcccatttatacccacaacatatatacaaaatggtaacatttcccagttagccatttaattctaaagctcaaagtctagaaataatttaaaaattgcaacaagcgattagctaggaattgttttttgaattaggactggcattttcaatctgggcagatttccattgtcagcctatttcaacaatgatttcactgaagtatattcaaaagtagatttcttaaaggagactttctgaaagctgttgcctttttcaaataggccctctcccttttctgtctccctcccctttggcacaagaggcatcatttcccattggaccactacagctgttcccatttgaatcttgctttctgtgcggttgtggatggttggagggtggaggggggatgttgcatgtcaaggaataatgagcacagacacatcaacagacaacaacaaagcagactgtgactggccggtgggaattaaaggccttcagtcattggcagcttaagccaaacattcccaaatctatgaagcagggcccattgttggtcagttgttatttgcaatgaagcacagttctgatcatgtttaaagtggaggcacgcagggcaggagtgcttgagcccaagcaaaggatggaaaaaaataagcctttgttgggtaaaaaaggactgtctgagactttcatttgttctgtgcaacatataagtcaatacagataagtcttcctctgcaaacttcactaaaaagcctgggggttctggcagtgtagattaaaatgcttgcacatgcagaaacctctggggacaaagacacacttccactgaattatactctgctttaaaaaaatccccaaaagcaaatg

SEQ ID NO: 331513 - DNA, 289 bp, Homo Sapiens
tctggcttctttcatttagcatgttttcaaggttcatgtatattgtagcatgtattagtacttcattcctttgtaaatattttacctgaagtgttttctaaataaaaccttttaaaaagtgatagtgctgaagggaagcaaggtagaatttttaggagataggtaatctgtattggctctcataaaactagtcacatgtgaagcctgcattggctttagaacagggatttccaaccttttggcttccctgggccacagtggaataagaattgtctcatggctgggcatg

SEQ ID NO: 331514 - DNA, 301 bp, Homo Sapiens
  misc_feature (255)..(255): n is a, c, g, or t
gtcactttagactttttaatatttcatacagcgattatggtgcattcaggaacccaaccccccaaacccactaggagggctcccacccctgccctcccaccccatttcagggccccagggcttagggtggaggaaggggaggtaaccacccatccagggactgaccctgggagactgtccctgccctgcctcaccctccccaggagatagggggcaacacctggggcacaacccctcacacccccctcccccaancctgcttgtgcacatatgcacattatgggtcctcgctgagctggtc

SEQ ID NO: 331515 - DNA, 262 bp, Homo Sapiens
  misc_feature (251)..(251): n is a, c, g, or t
ttttaaaatgtcaataacaagttttatttacaaagtaatcgtcctctcacatcacatttggggttacatgtatcactgttgtacgctggtagcatggctatttgaaagattataatttatgagctattactcagtgggatttttgcaataaggtacttccatgagaccaaaatggaaaaaggagaattaaattaaaatgcacaactaatatttatctactacagacataatatttctcagttgtgaactanttactatgctt

SEQ ID NO: 331516 - DNA, 324 bp, Homo Sapiens
  misc_feature (286)..(286): n is a, c, g, or t
ggagagaaaacctttatttgcataacaacaaacatgggtgaagtaagaagaggcatatgaaaacaagattaaggtggaagaatccttggtgggaggagaggaggagaaagcagaggcactcttgtagccataaacgcatttccttgttggcatctggactgctccctcctcatgctccactgagacttctctttgcttggctcatagtctcactgctggccctgcttccttgtctcacagtcccagagtgctccctccccaaacccgatggaggagcgcacttcantaccctattgtgtgggacaagcagctactcagaaggtg

SEQ ID NO: 331517 - DNA, 431 bp, Homo Sapiens
  misc_feature (207)..(207): n is a, c, g, or t
  misc_feature (216)..(216): n is a, c, g, or t
gcgcctggcccgtatgttgtattcttaagatccaaagcatgtgggaaaaagaattgtaaatttagatataaatgacttgctcagtgatacctctaatttacctcctgaggttggggaaagaaggagaaagagaaggaaaggtttctaaggctgatgatactgagaagctgcagggcagggcctggcattttaaggggttcctttccntcttccagntcgactttctcaggatactggtccctctcccacagaggagctgaaggagtaggacagaagaactgtcaaattctggaatccttaaagccatgtccaaggtaaggaagcatttcttctctcttccctaaaatgccatcttattttttaggttatacgaacattttgattttcttccaaaactctgcaacctaataaggttccatccatccagtttc

SEQ ID NO: 331518 - DNA, 865 bp, Homo Sapiens
  misc_feature (757)..(790): n is a, c, g, or t
  misc_feature (793)..(793): n is a, c, g, or t
aaaaatcataactaacatttattgagtgctaactgtgtgccaggcctttattaactcatgtgatcctcaaagcgaggttggctctgtcattgtcatcgttttacagatgcagaaactgaagaacagagaacttagatagctcatgcaagatgacaacacagcaggaggtgacagacactttatttcgttaccgtgaggtaatatttcaaataaggtgtatgggaaagaaagttagaaaggggaaaaaatggcagccggaaagattagggagagccaggtgaggtcccaactccaagtacaccatgggaggtcctaagcaagggacatgcagaggggagatctgagcttcccagcaaccaaggcaaaaaagtgtcaatcagtcacactcttcacaagtgcctgccagagactataacccacatactcatgaaagggccagacagccctgacgttaagatctgggagaaattttaggagaggatcctatgcctcagcaagttcgtagaagtttcagaggctgtcagaaaacatcccaagtgttagcggtagcttttccctccagcagtggtcagtacttaaagcatttctgttgggtgacagcaaagttgttaagcctctctgggcctcatggttgggggagggacttgctgttggagactccacaggatggttgggagccaacagcgcttacaagggaggctccttctacagttgggagctatttctggtgctctggctgggcatgatggctcacacnnnnnnnnnnnnnnnnnnnnnnnnnnnnnnnnnnagnatcccttaaggccaggagtttgataccaaaccaggcaacatagtgagacctggtctctacaaaaatattttt

SEQ ID NO: 331519 - DNA, 465 bp, Homo Sapiens
ctcaaaaacatcttttattgattttgtggcaagtactccacagtcaataactcgcacatctgcatatggtctgcttgcagcatcggtcttcagattttcaatttgttcgattacttcaaaaccagaaataaccagtccaaagactacatgcaccccatccaggtgtggagcaggctttgtggtactatgtaataaacatcaacacaaagatgatgtcaaacacgatgtgttcaggtgaagagagcagaaaggtttaaacacagcatgtagagaacaaagaagtaaagataaaaagataggggaaaaagttaaacatgatatatatctaaccttaaaaaccccaaaacagcaatagtagccatcttactaatttaaaaaactcaagattataatgaattacaatcatctctattagactatatgtatgcatacatatgaaatcagtttgacttgtagccataaata

SEQ ID NO: 331520 - DNA, 396 bp, Homo Sapiens
  misc_feature (48)..(48): n is a, c, g, or t
ttcccccaattgccctttctggttccttacccaaacttgtcccagtcnacaggccttcaggtaacaccttttctgcccagcccttgtggtagcggttggcctgcctcctttgcctactcaagtaactgctttaccactaatttattgttttgtgttttcatcttataggatcttacctagccatatggcctgctgcctctgccaatttaaaaatagcattgaggctgtctgcaagacagtcaagctgcattgcaacagtgcatgtctgactaacagcatacattgtcgtgagtccaaattgcctggtgataaattgttacattattttaagtatttgtttttaaatttatttttaattgatgataaaattttaagctaatgatataattgctttat

SEQ ID NO: 331521 - DNA, 460 bp, Homo Sapiens
  misc_feature (212)..(212): n is a, c, g, or t
  misc_feature (347)..(372): n is a, c, g, or t
  misc_feature (389)..(389): n is a, c, g, or t
  misc_feature (402)..(402): n is a, c, g, or t
  misc_feature (439)..(439): n is a, c, g, or t
gccatgcttacccttcagttgggcacctgtgtcctccttcccattggccttctggtcctacccaagtgtccagtccacgggtctcagtaacacctctttgcccagccctgtggtagcgttggctgcctcctttacctactcaagtaaccgctttaccactaatttattgttttgtgttttcatctatagggatcttacctaggccatatggncctggctgcctctgccaatttaaaaataggcattgagggctgtcttgcaagacggttcaaggctggcatttgcaacactggcatggtctggacttaacaggcatacatttgttcctggaaggaaggcatctgtannnnnnnnnnnnnnnnnnnnnnnnnncgttttcatggaagggnggttttacaaggncccgggaaggcagggcacattgagggacttcaggctngactattttgaggtccgggag

SEQ ID NO: 331522 - DNA, 770 bp, Homo Sapiens
  misc_feature (636)..(704): n is a, c, g, or t
  misc_feature (708)..(708): n is a, c, g, or t
  misc_feature (729)..(729): n is a, c, g, or t
ctcagcctatcgttgtttgaatggctcttcagaatctatgtgcttcctctcattcttagtgccccctatgaccatctacactgaacaagatttatacagttatgtcatatctaagccccgcaacaaaagagtaccccttcttccttttgttaataggagcaggagtgcctaggtgcactaggtactggcattggcggtatcacaacctctactcagttctactacaaactatctcaagaactaaatggggacatggaacgggtcgccgactccctggtcaccttgcaagatcaacttaactccctagcagcagtagtccttcaaaatcgaagagctttagacttgctaaccgctgaaagagggggaacctgtttatttttaggggaagaatgctgttattatgttaatcaatccggaatcgtcactgaggaaagttaaagaaattcgagatcgaatacaacgtagagcagaggagcttcgaaacactggaccctggggcctcctcagccaatggatgccctggattctccccttcttaggacctctagcagctataatattgctactcctctttggaccctgtatctttaacctccttgttaactttgtctcttccagaatcgaagctgtaaaacnnnnnnnnnnnnnnnnnnnnnnnnnnnnnnnnnnnnnnnnnnnnnnnnnnnnnnnnnnnnnnnnnnnnnccanggatctggatggttaaatggncatcaaaagggcacccctccctggggggaaaatcttaggct

SEQ ID NO: 331523 - DNA, 546 bp, Homo Sapiens
ttttttgccgaagtgaaacacgcagctttattaagacaggggcggtagaagaaggtctccatgctgaacagattacattatggagcccgggagcctgggaaggatggggcaggagagtgaagggggctttgaggagaggtcctgccaggaacatctgtccctgttgggggtgaagggtaagggggccagggcctcagaagcggccatgccagtgatcaggggaacaccgatggttcctctctcggggatggtggccagtatggaacctcgggggtgacctgcgcctgggtccccgcccatagagctgcctctggaggttctgggaaatgggccgcagatgcatgaagttgcagaagccacctcgggtacattcccgtgcacagcctgcccgttgaaccagcggttactgagttcagccacggcccgctctccatcctcctccctccggaacttgacatagacgttgcccacgaggtggtccccaaggttgtcgcacacattcatctcttcaatctccccattacttttctgcagttctgtgaacac

SEQ ID NO: 331524 - DNA, 440 bp, Homo Sapiens
  misc_feature (186)..(186): n is a, c, g, or t
  misc_feature (190)..(190): n is a, c, g, or t
  misc_feature (399)..(399): n is a, c, g, or t
agcgcctccagcctgctgcccctggactccaatggctccagcgacccctttgtccagctgaccttggagcccaggcatgagttccctgagctggccgcccgggagacccagaagcacaagaaggaccttcacccattgtttgatgagacctttgaattcctggtgcctgctgagccgtgccgcaantggnggcatgcctcctgctcaccgtgctggactacgacacgctgggggccgacgacctggaaggcgaggccttcctgccgctgcgtgaggtgcccgggctgagtggctctgaggagcctggtgaggtgcctcagacctgcctgcccctcacgtaccccgcacccaacggggacccaatcctgcagctgctggagggccggaagggtgaccgangaggcccaggtcttttggtgaaggctgcggcggaaaccggg

SEQ ID NO: 331525 - DNA, 372 bp, Homo Sapiens
  misc_feature (328)..(328): n is a, c, g, or t
  misc_feature (339)..(339): n is a, c, g, or t
  misc_feature (347)..(347): n is a, c, g, or t
  misc_feature (353)..(353): n is a, c, g, or t
ttttggcccagctcctacctcccggcagcctctccaggcccagaactttctccagtcagcctctacagaccaagctcatgactcacaatggcctatttaggccataccctacctcacggcagtctccgcagatgagcctactgcctcacaacagcctccacaggcacagctccatcgttacaatggcctctttagacccagctcctgcctcccagccttctctccaggccctgaactttctcaagtcgacctcaccaggcccagctcatgcttctttgcagcctctccaggcccaactcctgcatcttggtggccctccaggcccagnctggtggcctnccgtcggnctctanaaatcccaacatctggctc

SEQ ID NO: 331526 - DNA, 426 bp, Homo Sapiens
  misc_feature (376)..(384): n is a, c, g, or t
ttttgttcttgataaggacaggtttaatgaagaatgggagaacagaaaacaactacttggtacatatacattttcaggaatgaatttccagcatccttagctcatgattactagaattcttctgttctcaaaaagaatattcatcttttggtagtgtgggtgacttactcaaactgagcatctgcagtactgctatcgacatacctattcaccatcaagtctttatcactgttatcagaatatctggaaatataatacatcttttgaactagcctacccattgctggtttccctttatacttaccattgagtacaccctaatatccggtgataaacattcatcaccctatcttatttttcaaatatctagaattannnnnnnnngagacacagtcttgctctatcatccaggctgaagtgcagtgg

SEQ ID NO: 331527 - DNA, 401 bp, Homo Sapiens
aactcctgggatgaagcaatcttcccaccccagcatcctgagtacctagaactaaaggtgccactatacatggctaatgtctttttaactacttttttttgagttggggtctcgcaatgatgcccagtctggccttgagctcctgtcatcaaacaatcctactgcccaacctcccaaagcactgggattagaggcatgagccaccacacttgaccagttatgattttcgaatcacagcaacccttgggtaagcaacactttagattaaccttttggaaaccccagcccttcccctacttttcagtccctgctactttcagtggggttgaccagccttcaaagatgaacacttcacccaagtctctataatctgagttgttatgaatggttataggatgggc

SEQ ID NO: 331528 - DNA, 490 bp, Homo Sapiens
  misc_feature (36)..(36): n is a, c, g, or t
  misc_feature (57)..(57): n is a, c, g, or t
  misc_feature (62)..(62): n is a, c, g, or t
  misc_feature (85)..(85): n is a, c, g, or t
  misc_feature (197)..(198): n is a, c, g, or t
  misc_feature (204)..(204): n is a, c, g, or t
actcggccaaaaacgctgcctaaacaaaaatccccngtggaaaaaacatctgaattnccccnaaattcctcctaaaaggtttttnaaagggctgttccagcctccgaagtagcaaccgtgaatgtgaaggtccgctggccgtaaatgaagaaccccgcgggttaaagttgccaggtgggagctccccggatgccagnnaaaggngccgcggcccactggaactgttgttttgcccttgactcctaatcctaaggtgcccctgggcgtcggcctgtatgctggtgctcagtgaggtttctccatgactctgtatgagatctcctgtgctgaatgggacccttaaatgtgcccttcgctgccatcatttaaggagggaaaaggcaaatcagaatgtcataatgtaaaggatggcaggcaaacacatgtttttagaaccacactatgatttcaaaaggcacatcaacattcagttgaatttcatgtctattgg

SEQ ID NO: 331529 - DNA, 463 bp, Homo Sapiens
  misc_feature (400)..(400): n is a, c, g, or t
  misc_feature (408)..(408): n is a, c, g, or t
cagaagatagtgaccaggatgggtctgaaaatcatgtcatatgagaaatggttgaaagaaagaactggggataattagcttttactttaagcctcggtttagacccttcaagtcttggttaggttcccttgctatgtgctccacagtcctctgaacaagcctcatgccttccccactagaccaaggactttgttagggcagggtaggggctctgtgaggactttgttagggcagggtaggggctctgtgttcactatgatatccacaagacctagcatggggacaggatgtgtcctcaggcaatggtcagagaatgagtgagtgaaatttccaattgtgagggccttacgtaaaaatgataaagaactgtagtgcctggcatctatagtcattaaattanaaaacgancaaggaacttagaagaggtcctaaaagtttttgaatggtgctttttgttttttgg

SEQ ID NO: 331530 - DNA, 429 bp, Homo Sapiens
ttttttaggaaacaaaggatattttattccttttttctgttgttgttgaggatagatcacgatacagagaacagcaatgggtcacagcgcacggtttggttggtttccgcgggaacacagaggacaggaggggcgggatctgggttgagttcccactctcgttatgaccttcaacctctcactgttcccaagggctgcacggagcctgctgagtctccaacccacctcgctcaccgctctgaccaccgacaggcagagcaaaggatgcgggagttgcctctgctgcccatctaaggggacgtaggcagagaagcaaaggcctctgctctccctccatccatcccggtgtgctggccccaacggaacaggagtccttcaactattgcctgccagagacccaattgcagggactgtagtctgcatctggat

SEQ ID NO: 331531 - DNA, 480 bp, Homo Sapiens
  misc_feature (27)..(27): n is a, c, g, or t
  misc_feature (30)..(30): n is a, c, g, or t
  misc_feature (43)..(43): n is a, c, g, or t
  misc_feature (56)..(56): n is a, c, g, or t
  misc_feature (63)..(63): n is a, c, g, or t
acagtccaaaataataaaaggtacacntgnatataaaaccagnactgccgaattgncaaaacncagagaaagcgttgtccttactgtcgttttcaaaaatgtctaagtgttggaatgaagctagaagctgtaagggccgaccgaatgcgtggaggaaggaataagtttgggccaaatgtacaagagagacagggccctgaagcaacagaaaaaagccctcatccgagccaatggacttaagctagaagccatgtctcaggtgatccaagctatgccctctgacctgaccatttcctctgcaattcaaaacatccactctgcctccaaaggcctacctctgaaccatgctgccttgcctcctacagactatgacagaagtccctttgtaacatcccccattagcatgacaatgcccctcacggcagcctgcaaggttaccaaacatatggccactttccacgccgagccctatgcagtctc

SEQ ID NO: 331532 - DNA, 439 bp, Homo Sapiens
  misc_feature (177)..(177): n is a, c, g, or t
cctggctcagggaacttctttaccctctccaggccagtgcccagcagagaccaatgggagctcaaaggcactagataaacaaagcaggctaaataacactgcaaaggctctgtaaattagtctgctattggaacgatagcctagaaaagtagaccaagatactcgtgctaaaactanacagggtggcttaactgttaaaagattttaatagaagcctatgttagagacttctaacataatagaccaagatgttcatgatataatagcaaatcacttgtcataccatcaacaaaggaaaccacaaattgaatcagaaaagacaatcaacagtcaccaatacaagatgaatcagatgttggaattttctgacaaggattttaaagcatccatcataaaaatgcttcaaaatcaattaaaattatcctgaaacaaaagatat

SEQ ID NO: 331533 - DNA, 209 bp, Homo Sapiens
tttttcactttttgtacaacttttaatttctaagacatttaaaaagtcacactaaaagtatctcatagaaacaaagactaacaatttgtaaacaaaacaatctgtaaacaaaaatcaattactagtgtgtccaaatgttatttttaaaagttaacattataccagttttttcaagtttaaaaagtcggtgctgcatctatgttcacatt

SEQ ID NO: 331534 - DNA, 629 bp, Homo Sapiens
caagaataccaggtgataattttattcacaaataaaaaaggtattacaaaactaagaaaatgataatttacacatttataaattccagtatgcaaaatagtaatgatgaaatctaaattgatataagctactataaagcaatgatggttttcctttctttttcttactagcacagacaatagtgcttaacctaggtaatagcaatattaacacattatctaaagtagaaaaatctctatttaaaaatatattccatatacacaaaattagaaaatgcatgactttacttggttgctcttgaaatcctcctcagtcttgtcaacgagcttctgcagcacaagaagccacagtggttatgcccattcagccacacgcattacccgacacagccctcctgacatcggcactctagcagctgagtttattgagtgctatgggatattccaacaaagtgaagtgcaaattgcatttttttcctcaaatgtttccaaggagtgtaaaatataacattgttgtatatttctagagtaggtagggtaaaatgtcttcatcttgataaaagttacccaggatttaccaaattcagtagcaaatgaaatcaattttcaaccctaagcacttctctactg

SEQ ID NO: 331535 - DNA, 453 bp, Homo Sapiens
  misc_feature (184)..(184): n is a, c, g, or t
  misc_feature (230)..(230): n is a, c, g, or t
  misc_feature (241)..(243): n is a, c, g, or t
  misc_feature (245)..(245): n is a, c, g, or t
  misc_feature (424)..(424): n is a, c, g, or t
taaatgccaggcatgtttttagaaagtactttccaacctcccaaactagaagttacctctctcttccattgtattttgtaattttctaataccttctgccttaaattatggctgtggtcatctcacctcctctgctggatccaatacttcttagggggcttgggactgtatttggattccatcnttgacttccaccaagggttgacccagcttcttccctcaaaaagggnaagactatggnnntnagatttgctaaaccaaaattagcacctgtgatacagtgaaatatgtatttgctcttcatcctgtttcctggcaaaggaatctcgaaaagtaatgtctttttgtatactaatgacaaactattgactgatgctgatagccccccaggtagtttcaggatgggggctggtcaccagaaagncaaggcaggattagaaggttgggacttgc

SEQ ID NO: 331536 - DNA, 347 bp, Homo Sapiens
  misc_feature (54)..(54): n is a, c, g, or t
  misc_feature (74)..(74): n is a, c, g, or t
  misc_feature (327)..(327): n is a, c, g, or t
acactcagcttccttttttcattttaatgcccctttcttctaagttaattgcanaagaaagttgtttaaataanaaaaaggtcaaacacaattagtaaatattctattgctcaaattccatgatctaattatatacagtacctaattaaggttattatgagaactatgttacacacttattcttaagagatgcatttctgttagatattcccaggagagtttccaaggtggcagttctagaaagagaacagtatgagaatgaaaacaaaagggctagacacatttctaaaaagtagtgggaaatggcagtctatcattcttccaatnccattgttattccttccccc

SEQ ID NO: 331537 - DNA, 622 bp, Homo Sapiens
  misc_feature (18)..(18): n is a, c, g, or t
  misc_feature (27)..(27): n is a, c, g, or t
  misc_feature (35)..(35): n is a, c, g, or t
  misc_feature (42)..(42): n is a, c, g, or t
  misc_feature (47)..(47): n is a, c, g, or t
ccggagctcaagtaattncccaatctnggcctccnaaaattnctggnattaccaggcatgaacccacccacccccaggcctaaaattttccttagtgaaatgggaagcaaggccccctccctctgccagcagttaggggaggaggttgtgaaactagccattcaggcaagtgggagagtaaaccagagccaggaatggatcataggaacaccaggtagcattcaagctccccactttgaggatctgtttctgatgtgttagttcaggggccagtccttccttgaaacagccaaagattaaatggcctcgtgaggttctttcctgcttgtgtgcccacttgagggtgcatgtggtacaggagcactggacttggtgtcagatgggatgagccctggctctgtttcctagcagcaatctgatcttgagctagtcactggacgatttctgaacctcagcttctgcagaatgcaatgacatcttccaatgtagctctgtagtcattgtgtagaccacaaggttgtacagacggcaggtaatattctggagagccaattaagaatgtgagccctgaagtcacaaagcctgcatttgaatcatagtttacccgtgtaacaccgtctgc

SEQ ID NO: 331538 - DNA, 414 bp, Homo Sapiens
caggattcagtggagtccattaatgcataccaggggcaaagatcagcccagggtaaggcaagtctgggaggaagcccaccctgccctacagcagccctggaactcagaataggtggtgagtctgccatggtttgctactgggcagcacactagaccaacttgggaatgtggaagagtgagtctatgttccctcagccatccccaagtttacacacaggcatagcagccctactgtgagtcagcaatcattcctgacttgcagtaaggacaatttgcatttacggaaagcaaactggagggggtagcctaagtccgcactgcccatgttattaccctttgcaatgtgaaaaaccatggtgaggtaggttgggcaggttttatcctctccacaaaggtgagcctttgctccacagc

SEQ ID NO: 331539 - DNA, 407 bp, Homo Sapiens
  misc_feature (37)..(37): n is a, c, g, or t
ggcaatgatgcttagaaaggaactgctgaccgagtantaaagggtctagtttacagcataaagttattacagtgccacagaagtgctaccatgctacaaacaaatttaataactgaatcgtgtttgactaagaatatatttacacggtaaatctttagacaaagaatagtgtgtcagctaataatgaaagaatggttatactttgaatgtatatctccttcatgaagctaggtaagtttttttaggtgtttttcagctgtaaggcaaacaatgataggaagtatatgtattttacttggcacaatgtcttatcagttacctctaatcctgctatatattctaacagggttgaaagaatttcatttctttccattaagaaaacctaactagctgggcgtggtgctcat

SEQ ID NO: 331540 - DNA, 449 bp, Homo Sapiens
gaatttttctcttctcaaagttctaggcagtaattttaatgccctcaaaattagataaagctgattacttagagcttataaattagcttacactttatgacacttaagaatagagctatgacttatgcatatcatacctgtcaagctacctagcaccacgaatagaacgtaatattaatggatggacttaatacaaggatcttaatatatgacagtgatagtcttaaaaacaccgatttgttattttccttatatataatccaaattcctttctatccttctggcaatgtttctactgcctgactaccttaaataactatatagtgtcaatttcttgcttgggccaggtggtggctcatgcctgtaatcccagcatattgggaggattgcttgagcctaggagttcgagatcagcctgggcaacatagtgaaacctcatctctatttaa

SEQ ID NO: 331541 - DNA, 370 bp, Homo Sapiens
  misc_feature (274)..(274): n is a, c, g, or t
  misc_feature (285)..(285): n is a, c, g, or t
cttcatacttgtttgtattttccaaatcttccctaaggtcatttattacttttagaatttaaaaattattttataaaaatatgtaaagctctggttttttaatgactatgtaatgactatgtctactcaaaagtatcttcaaaatgacctatttaaaaatctatcccctcaaaacatcctgataaatcctttcatctttttttgggactaaaaatacagtgtaataactgagggacagggttaaaaaatgttaacttaaactggtaatttgggnttggatatggnttaatttatatccccctttggggaatttctatggctggggggccgggtgcagtggggctcacggcctgggtaatccccggccctt

SEQ ID NO: 331542 - DNA, 282 bp, Homo Sapiens
  misc_feature (37)..(37): n is a, c, g, or t
catggcagagttaggagtcgaacttggaccctttctngatgtcaacactggggtttttatttattggcccaaataaaagtaaagaaccctttattagtatgatagctaactttcaacttgtccatctcaggcgatagaatgcctgaattcagctaaaatatttgcctggttaacaaatgtggtgctctgaagagaacttgaatgagatgcctttcctgtacttcccttttcctgttctatttctttggctctgcagaacatctgatgcaggtcaatggggga

SEQ ID NO: 331543 - DNA, 456 bp, Homo Sapiens
  misc_feature (423)..(423): n is a, c, g, or t
gcatttcaatttttatttgttgccattgggtcacttttttggaccataagtcattcccagagctttctctgaatccatgaatgaaggacaaaagtatacatcccatcgctggtatacaacaataactttgaccacatgataggagaagtgagaaatgtagccaattttttcctgtagtttccatgtaaacatatggcagtttacacagaaactacagaaagtacagaaacctaaaatgaaaactaaaatttgttcccaggttgaaaagaggaaagagtttcagtgatagccactaaagccacagaagactttattctctgggaagatgtttttgctaattataaggctgaaatttactgggcacagactttttttgccaattggctgatataatataataaaacaatgggtgtcgagcggganccactgtggaaagtttttaaggtgggtcaaagg

SEQ ID NO: 331544 - DNA, 405 bp, Homo Sapiens
  misc_feature (331)..(331): n is a, c, g, or t
  misc_feature (345)..(345): n is a, c, g, or t
  misc_feature (353)..(353): n is a, c, g, or t
  misc_feature (358)..(358): n is a, c, g, or t
  misc_feature (364)..(364): n is a, c, g, or t
aaattttaaagttcttttacagacagggtctcaccacattgcccaggctggactcaaattcctcaaatgatccttccatcttagcctcccaaatagctgggactacaggtatgagccactgtacccaagggtttttctttcaatatgtatgtgaccagctgacttaccgccttcacagtcttatatcactgtattcatttatcagggttattacatatagagggtaaaagacataggcctatatatttactgaggatgttacaataatttcaaagcacagtgtcaccctggggaaaggcacatgggcaagtttgaatgatttttccaaagnccccgggggccccnacaatttnccctnaacctncttggggggcctcttgggagggcttttcccctcggggcttt

SEQ ID NO: 331545 - DNA, 180 bp, Homo Sapiens
  misc_feature (16)..(16): n is a, c, g, or t
ttactttttgtgacantaatcaaacattttaaagactttttgacttgataagtgataactataaagcaatgatttatttttgcattttatttggagctcatacagagcttagaataaacaagtatgtcctacaaagaagtcatctcattcagaatttttatcaatttgtaatacatagtt

SEQ ID NO: 331546 - DNA, 551 bp, Homo Sapiens
gttcttcaatttgtttctgatctacacttgggtgctgatatgagaggggcacagcagctgcagcagcgtccacatgagacatatccccggcaggagaaagcccgcccatttccaactgccttggcatgttccctgcagattcaaaagatgattcaaactcctcattatccttaaaagctagcttgtccacatctgaaaattcacttttgtcttgaagttcagtttgtcttcgataaagacccactttctgctccggagggctggagacaggagggatggagaggctgtgcctagactcagtgggtgatggtaggggcattctgtcaggacaaggactgggggaagcaatgtgtgatctgcccagaccttccagatacatttcactttcgaggcttctttttgcttttggaaggggtgtggaagagaggcgtctggaggaagtgcccccgcggagcctcgaggctgcactgcctgtcagtgcttccacgacgtcattcctttcttcaagtgtgcccacttgaggctgctcagagacaactctgtcctctcca

SEQ ID NO: 331547 - DNA, 405 bp, Homo Sapiens
ttgcttttacttaacatgcaaggtaggattttagtccctcccttttgccttctgtcttttgagagatataattcctgagtgtgttcgtgttggctgatgctatttcataagacataatattaatactgcacctgaaatacctcacaccctgccacccttccccccgcagcaaacttgagtttccaacaagagtaaaaaggagataatgtttttatttccaccaaggacaactttcaaagagattaagttctgaacacccctggcaagatgagctagctgcactatgatggaactacaacataagctatagagtactgagtgagcttgctaacaggaacacatctttactaagacaacaatgagggaggacaccatctgagggcggtcaccagtctgcagcttgca

SEQ ID NO: 331548 - DNA, 507 bp, Homo Sapiens
  misc_feature (27)..(27): n is a, c, g, or t
  misc_feature (451)..(451): n is a, c, g, or t
  misc_feature (491)..(491): n is a, c, g, or t
gggatttggccccctcctgcccagagncccaagtgagccccctccatcaagcacccagcatggaggcagaaacagacaccccagtgataaatgaagataagaggaagaacatgtagctcactttattttccgcaaagatgtcttgaagttttaatcagttcagtcatccctatctttcttcttacatattaatcctatagattagtgactcttgtataagacaagaaaaactaatgtgcttgtttgatatcagcacagatcagtctctaagcagaagtgaaaatatgggaaaatgagttggaaaggaaaatgttatagaaaatagtaaagacaaaccatgggaccaccttttctcagtgagagatacattgtcgggggcagagtgctggagagctgggcagagaggaacaaaatgtctgacagcaggagccggagcccagggaggaaaccnagatggaaagggctctgctcagactgactccatgtgggcnccttatgggataaagg

SEQ ID NO: 331549 - DNA, 751 bp, Homo Sapiens
tagaatagagacagggtcttgttgtgttgcccaggttggcctcaagggatcctcctgccttggctcctgaggtgctgggattccaggcatacaccactgctcccagcccagatcctgtttcctccctgtgacatttcccgcacttgctgcagccatttgctttcttagacatcacagagtcctagcccagaatctgatcagatggtggaaggagaacttccagcaacagcatagagtgccctgcattgagggtgcaattcctcccggctctccacaggatctcaggggacaggccccgtgtcctgctgaccctctcaacaagggcacccgcttaccttgggtttattgcagtgcgcgaccaactcgcaagattcttctcttcagatcttcccaagttggtcacactgagccctgggaatcacatccttccccaggacgagtgacacgatgaagctctgagaatattcctgcagagctttgctgaaattccaaacagagagaggatgttagctttacgatgacacctcccacaagggcttccatgaaagaaatcagtaacactgaggggttaggttcccaggcctcagctctgttctctcttctctaaagggagggtaggggaaacgtcagttatggcaactcactggccagatcctactaaagccacaatatgtgttcaacagagacgccccgcagctaaaaccgcaaactggacaccaaggcggaccaagcacatggatctgtcctttgc

SEQ ID NO: 331550 - DNA, 845 bp, Homo Sapiens
  misc_feature (259)..(259): n is a, c, g, or t
agtcccaatatttcttaccaaaaataacaaatgtcggcatatgttccacagctgcaacccccccttttagcctaacccattatatcttggagagcgccaaagtgaccttccgcgcttgatccatttagacaagacatgcatcaggagttcgagttccacgcgtgttagatgcatactagtgtgtaatctgacatatgcacatgttcataactacgattagacatgattctgtccatcgatcctgtgatgacatcctgtntgcgtcatcgactctcggatgtaagtcagttaagacacaagcgtagtccatcgttcctggacagtttccagtgccctggtcaggccacgtccacactggagaccccttgtgctggacaggagacgcaggccgctctgtcggagaccacgctgtccaaggcccgcatcaggatgtctggcatgtggtcggtgagcatcttcggacctatgagtattttgctgaattccgcttcgtgtgaccacttggcgctatagtgagcagcagagcagcagccaataccgccccgaggcgccctcctcctgcaggtggatgatcctgccgggagggtagagaggggggtacttgggagaagagtccagtggggagtcgctggagaagctgtaggccggggaccagcgcgtcagtaggctctgctcccccagaagaggctgtgtcaggacttcctggtcgcccccgtccagctccgtgggcaagttgttggggtttcctccaaacagttcgtaccacaaaccgtgcagcaagatcttgtacttgggtttattgcagtgcgcgaccactcgcaagattcttctcttcagatcttcca

SEQ ID NO: 331551 - DNA, 668 bp, Homo Sapiens
  misc_feature (161)..(161): n is a, c, g, or t
gggaaactgaggaaaactgacggcacgaatcgcctcagaatagagcagggccaggctttggatatctgttctaaatctgggggtaaagcaagaacctgaacattttggagcctttctgctgagctagaccatctttataacactgggctccgtcatgatcntatgtgggaataaataacattccttcaaatctgaggcttgcctgctggtgacaagcagagcgcctgtgatttggctcaagactcctatatgatgcaggtgccattgaaaatgctgctcttctaagtcctttgtggcttgtaagtggagaagaatttcatccaaatgttacccctgtaatactggcatttaaaattcttatttaaccttcctcccttcatcttcctcaccttttttacagtgggaagaaaggctgttaaaatggattaccaattaataattgggaacatcctgtcccttgtccccactcccttcccaaggttcctttttcctcttttccaatcctagttgtctaccttcttttcttcctcatttccttcttttattcctccccaccccaaccccttaaaaaaaaggtcagaaggacaaagctggtttgtttgggaaatggactgatcgaaagaaaacttgccaaagtggaaaggtggcttttagcattctgtgtttcc

SEQ ID NO: 331552 - DNA, 466 bp, Homo Sapiens
aaatattgctcccattatgcccaagaatcaaagattcttttgtttgggtggaggactctctgtccacttagctccctcccaactcagctacagattaggtttgtttcaataacataaggactgttctccaaaagctctggcaactgtggacaaaaagggcttcttcgagctattacacaacatgtgactttgctaaatcaaacctttatttataagatatggaagaatcagttatttgtgtgataagacatgcgaattctaggatagtaggacctaggcagatgtccacatgaacttgagggactttaaaaatcttaggattttaactataacccactttactccaacaaaataggccaaatagctaatacttacagaatacttaccctggtaccaggcactaagtactttatatgtgcgaaattaatcctctcaggctctaactttacaaccgaggagaccgggg

SEQ ID NO: 331553 - DNA, 426 bp, Homo Sapiens
gtccacacaacccacaatccaaaaagttatttctgctgacctataaaactcatgcaaggaagcaaatggataatgcttaaaacagtcttttaatcttatcttaactgacacctgacaacccattacttatagattattaatgcatccactaaaaagtttgtcatgttcaaaattactggagaaaaagattgaatgcctgaggaaaaaacaaattttgctgtacaataacttcagaaatttcgagcctattatctgtcatgcccttcatagactcatagcacactgctaaaaacaactgatttatctttattatgaatcctaaaatgacagcacacatctttttcatgtcttgtgataatgtttaatttcatctagtttttattttacagtgtttgatttgcttatgtaagatgaggaaagttacaa

SEQ ID NO: 331554 - DNA, 758 bp, Homo Sapiens
  misc_feature (203)..(239): n is a, c, g, or t
  misc_feature (421)..(443): n is a, c, g, or t
  misc_feature (448)..(448): n is a, c, g, or t
  misc_feature (531)..(531): n is a, c, g, or t
tttttaactgaatgcataactttattaaataaatgctttgtcatgacaaaagacaaagatcaaggagtaacataaattataagttgaataaatagtatacagcaatcttcactttttaagaaaatgtgagatcctttgttggttttttatttccttaagtacaaaatgctaaacgggagccgagctcttccgcattcaggtgnnnnnnnnnnnnnnnnnnnnnnnnnnnnnnnnnnnnnctcacaaactggttgcatttgttgatttatttttccatccttttcaccagtaaagattatcatcgtttatttttgtttttaaagttgaaaacaaaaaagaggagagaacagagttatggtatgaatgtatgtaaaactatagagaactacagtaatatgtactgtggttattgctgtcttcnnnnnnnnnnnnnnnnnnnnnnncaacnaacaacaacaacgaaaacaaccggtaggcaactcggaaatcttgaaggaatcttgtcttacaactgtgctatccatttgggcntacggtgtgacagtggccgtagagaggagaactccggctctggcgaccggggactggtggagtggggtgagcgggcacagggaagctggggtccccttcccctcggaccctccccaccttccctttccccatccaaaaggatttcaggagaggaggccagagtctgtgaaatgactaaactatatactccattagaaaaccaagaaagtatgtttgaaatagaaaca

SEQ ID NO: 331555 - DNA, 372 bp, Homo Sapiens
  misc_feature (62)..(114): n is a, c, g, or t
ttgttataggtgggctgtataaaagaaacaatcatctgggagggttggttcatgcctgtaannnnnnnnnnnnnnnnnnnnnnnnnnnnnnnnnnnnnnnnnnnnnnnnnnnnncccttctaatctctctcattcatgtctcttttctacttcatgctatctcatatttagagccaacagcctttcttctagtgagatacatcttggagatcgtatatgccctagaggcatgacctgaatttatgtttgaataaataattctcagcaagaactggcttactgtaaaacttgttaatatgtgttcaaaatactatggtgtataactcaaagcaactgcattctaactcatgttctcagtcatttagctgccta

SEQ ID NO: 331556 - DNA, 429 bp, Homo Sapiens
tcagctgtggaatacccacagctaagccactagaccccatttgaaaaaaaggaaaatggaaccacaagggaatgaagtcaggtttttccagaaaggtctcaatctaccagctggtcttttggctgctgccctgccctaaaagccagctttcagaatgcttagaatttcccctggatttacggtcctaatcctttatatggtactttccaatagcttccatccttacaaaggtttttgtttacgtttactgattaaaaagaaagaaaatgctgcccatgggtatcattgtgtcacctcctaagaaggcacaaggaagataattctacccattttagagatggaaaaaccaaggtgtgaagtatatctttttctgttttaatcataatcaaggttgggcttgcattcaggaccttacgttagtctcctagc

SEQ ID NO: 331557 - DNA, 185 bp, Homo Sapiens
  misc_feature (174)..(174): n is a, c, g, or t
agatatcagggagtagtgaaaaaagaatgcgttttgcagaaagatgcgcctgagtttgaattccccacctattagttttgtgacctcaggtaaatcacttaacctctctgggcctcatttttctcatctgtgaatcgggagagcagctaaatacacataagggctttactaccnatattagagct

SEQ ID NO: 331558 - DNA, 428 bp, Homo Sapiens
  misc_feature (272)..(272): n is a, c, g, or t
  misc_feature (311)..(311): n is a, c, g, or t
  misc_feature (323)..(323): n is a, c, g, or t
  misc_feature (338)..(338): n is a, c, g, or t
  misc_feature (370)..(370): n is a, c, g, or t
  misc_feature (385)..(385): n is a, c, g, or t
  misc_feature (397)..(397): n is a, c, g, or t
  misc_feature (402)..(402): n is a, c, g, or t
tacagtattgatgtgaaatctattttattggatatcaccatagcagctcctgctcttttttgccctctgtttgcatggaatacctttttctctccattcatttctagtgcaggtgtaattttacaggtgaagtacaattacttgtaggaacttagagttgggccttgttttttaacccattcagctatttcatgtcttttaattggagaatttagtccatgtacattcaatgcaattaataggtaagaatttataactgccgttttgttatntgttttgtggttactttgtaagccctctatataccttcntcctttcttttntgtgtataaggactntgtgtggtagtatgttttaacttcttgctttncaattttatgtatcnattagagactanttgcnttgtgggtaatatgaggcctgcaaaa

SEQ ID NO: 331559 - DNA, 250 bp, Homo Sapiens
taagtgaaagaccccagatggcacgtattttatgattccatttataggaaatatccagaataggtaaattcatagagacagaagtagattagtagttgccaggggctggtggatggtggtggggagtagggaatgaatggtagtgggtatgagtttttctttcaaggtgacaaaatattttggaactagatggtggtgatggttgcacaacattgtgaatgtgcaaatgtcagggaattgttcactttaa

SEQ ID NO: 331560 - DNA, 444 bp, Homo Sapiens
  misc_feature (29)..(29): n is a, c, g, or t
  misc_feature (65)..(65): n is a, c, g, or t
ccatgggataagagatttggcccacagancctcctagagaaaaaccccaaatgtggagggtgcanttggtttcctgcaccccaaacaaatacccttttggagatttccttaataggcattccctctcaaagtctcattactctgatcagttattgatcggaggctacccctggctcagtcaccagctgctcactgtgtccttctgtggtctcaggagctgcagttgttgctgttgtatgaatagacgatagttaattagactggatgtgtctgtactggcagtgattttgcaacttcctctgtataagcgatacatttgtaaatcatgggaatgtatttgatggtaattgcctgtggtggttgtatcatgatttaattttattatgagcttttggctttatatatttttctgcctttttatgcattcattaaacagtttaacag

SEQ ID NO: 331561 - DNA, 216 bp, Homo Sapiens
ttcaggccctggtttcatgtgccattgctatgtttagacaggcttccttactggaagaaggggctgggttgtctttgtggctggttcctgctctcccttcatctgcctccccggtcaccaaggaggtctctccatctttgttatttgagtaggagatataagagtagcggagccacttgtaagctttataaatttttcgctcaactgattctagtc

SEQ ID NO: 331562 - DNA, 459 bp, Homo Sapiens
aattcagtctgtctgtctgaatgtttcttccacactgcagagtaaatctggacaagactacaagatacccattgacaacatgaccaatgagatggagcaaagggttgaacctcataatgattacttcagtactcgaatttctgttgaactttgctatccttggaacacacaacattacagtggaatcttctgtgaaagatgccaatggtatagtatggaagactggtcccagaactaccatatttgtaaaatccctggaagacccttattcccagcaaattcgcttacaacagcagcaagcccagcagccattacagcagcagcgaggaacgcaatgcctacacacggttttaaccatggaatgaatgcactgcagactctcaagagatcaatcaaattgccagaaacagtttggtttttcatatggaataagtattaaagttacagtgtagttcattt

SEQ ID NO: 331563 - DNA, 426 bp, Homo Sapiens
  misc_feature (50)..(50): n is a, c, g, or t
  misc_feature (70)..(70): n is a, c, g, or t
  misc_feature (156)..(156): n is a, c, g, or t
  misc_feature (254)..(254): n is a, c, g, or t
  misc_feature (257)..(257): n is a, c, g, or t
ttttaacccctaatttggtatctcccctctcccgggggaaaaaaatgtangaattttttaaatctcccangtgaaaaaaatttttttgctaggtattgctcttggcacaacccagcaaataaaaccaatatacccttgtgccacagtcactgcaantagtagttaatggactgatttcccaagttactctttaagaaactcttaaaatataaactactcagacagtatagagtgctcagtccatgattttcacnacntttattctcaagtcaataatgtcaagggtttaaatgataacatttgaagatgaagaaaaatataagattctaccttggtcactaccactatatgtataggaaagaataaggttagaactagtgaacttgtaatcattaggtcttcctgcttttttgtagggcattatac

SEQ ID NO: 331564 - DNA, 450 bp, Homo Sapiens
ccagaatacgtgttttattgaaactgtgcttatgacttgcatactatttcaaaaatccaacccagaaacactagttaaatctttgtatccaataattataataacctacattggaaacaatcacttcggctgttcagtaatttcgtccgaatgaaatgtaacgtctgatgcccctctatgtgaaataaagcacgcttatttcaaataaatgagctttgttcacagctcttctctgctccattttccctaaaggctgccactcttggtccctttacatactgttgctatttttttcatgatagttattttaagggaatgacaatgttcccctcaaatcccacatccgtctcatacaaacataagatgacccaatgttaacgtaaagtggactgtgtaatgggattttcaacccctaaatagtagagacagctcagtctgaaaaggtggatg

SEQ ID NO: 331565 - DNA, 429 bp, Homo Sapiens
  misc_feature (256)..(369): n is a, c, g, or t
ggagagaaaggcacatgttcactaggtatttggagataactttaacataatttagggatcaaataaagcactctgtaaagattttgcaaatgacacaattccattaaatacgctatctagtgttttttctggtagactttattgcactgcaatgagtttaatgtagacataaacttactgtgatacatagtatacattgccagggaaatgtttttattgtttttcatttttcccctgagttaaaaatagtgattcnnnnnnnnnnnnnnnnnnnnnnnnnnnnnnnnnnnnnnnnnnnnnnnnnnnnnnnnnnnnnnnnnnnnnnnnnnnnnnnnnnnnnnnnnnnnnnnnnnnnnnnnnnnnnnnnnnttagctgggcatgggtattcccagctactccagaggctgaggcaggagaattgcttgaac

SEQ ID NO: 331566 - DNA, 433 bp, Homo Sapiens
  misc_feature (39)..(39): n is a, c, g, or t
  misc_feature (52)..(52): n is a, c, g, or t
  misc_feature (55)..(55): n is a, c, g, or t
atgcgtgtagacattttatgtcacttattaagccgctgnacggcctgcgtanacnaccagccggccccacccctgctcgcccctatcgctccagccaaggcgaagaagcacgaacgaatgtcgagagggggtgaagacatttctcaacttctcggccggagtttggctgagatcgcggtattaaatcccgagaaggagagagcaagtcgcggccacagcgagtgagtgaaccggagcccagatgagagcgctttaatggggctgcgaggtggcggagacagggtcgggatggggtgcagcagttggagacacagggtcagggcccctcatcctctattcactccaccggggcagtgaaagggtcccggcagcgagtgggtctggctggggacggggcgcagactttgagggaggtggggccagaggtggggtc

SEQ ID NO: 331567 - DNA, 317 bp, Homo Sapiens
  misc_feature (111)..(111): n is a, c, g, or t
  misc_feature (282)..(282): n is a, c, g, or t
  misc_feature (293)..(293): n is a, c, g, or t
aactctgaattcttttaattctgaaaccagagacatgtacaacacttacagcattcacacaacactattttcaaaataggtttttgacccctaaaaatgaaaattcttagngacaagctttagatatgaaacttagcccagtgggtattcactttgtcacaaaaagcaactacagacaaatagtttttccctctccccgacacaaaaactgaaattacagacttttaaagcaggaaaaattttctccaaaatgcaaatggttaaggtccaagggacaaatgnacaggagatcnccaattattccaatttgagcggag

SEQ ID NO: 331568 - DNA, 609 bp, Homo Sapiens
  misc_feature (212)..(212): n is a, c, g, or t
  misc_feature (281)..(281): n is a, c, g, or t
  misc_feature (301)..(301): n is a, c, g, or t
  misc_feature (473)..(473): n is a, c, g, or t
tgtcccctaaatggtaggatttatttcaatgctcacatacaattgaatgagacaaactatttacataaaacataagtacaaaaaatataatacaatttatactgtacacaatcaggattcccttgttttgttccccccacaaatggcagctagagatggtaagaagggggttggtaggaaagtgtgactgcacactcagcagtgctgaggantagatcttcagaatgcttttttcataaagatgaaatagggttgagatacagaaacttgtcaatgcaccnaggagcagtaagagagcacnaacatattcaacttctgtaataatagctatatattttttcttataaacgtgtttgtttctcaaagctgaggcttggagcaggtgtgagttgccttccattgattggttaggtgacctccgcccacccctgctccaacttccatagttgatccaatgcagcaggtaatgagtntccagttgccacaattggtgtcttaagctgatttcagaaaacaatgcatctgtcagatgtcattaagcaacaatctgggatacagacctaaacagctctcaggaagcatttacaaccagtgaattgatggacagga

SEQ ID NO: 331569 - DNA, 544 bp, Homo Sapiens
tttttttattttgcttaaaacatattttgcctaaaaatcattcttgaaattgtatttcttcacagatgaattttgataaggcaacatgaagcaagaatccagcaaatggagaatgaaattcactatttgcaagaaaatctaaaaagtatggaggaaatccaaggccttacagatctccaacttcaggaagctgatgaagagaaggagagaattctggcccaactccgagagttagagaaaaaggtaggggagacttagaaaatgagacacataagtacctgctgccagtgtcctgcccactggcaactaggtcagctgagatgggtgtgatctgtagtcacctctggctgcattgctggcacagtgctgaacctgacctaggtgggacctggatgcatgtcattgaatcaagaagctaagaccatgtgttgtggtagatggaaacgagaattgagaatgtaaggagtgactttcaagttaattaggtggtacttaacaaatgatattgggaggagtttgactcctttgaaacctcttgtccagt

SEQ ID NO: 331570 - DNA, 274 bp, Homo Sapiens
cggtttttgttgcctgtgattttgaggtctcagtcatgaattatctgcctagaccaatgcccagaagagatttccttaggtttttcctctaatatttttatagtctcaagtcttacatttaagtatttaatctatcttgactttacttttgtatatggtgagagatataggtccactttcattcttctgtatatggcaattcagttttgtcatgtatattgcagatgtgtagttgaagaagccagcaatctggaaatgtcaatgacgtgcagac

SEQ ID NO: 331571 - DNA, 463 bp, Homo Sapiens
  misc_feature (427)..(427): n is a, c, g, or t
  misc_feature (438)..(438): n is a, c, g, or t
tgccattagtccatttctttattaattttgacattggttcggctggtgaagggagaatggtctatacatcagagtagggtaggggattctctcccataacagagcatgtgggagagtcaagaaaagatccattttcataacaattaaaaaaatcaaggtaatttcaaaacttctaaaaagcgtctaatgtgcagactgcagcattctctaggcatcgtgtggagaccccaaactcctcccctaacggctcctactagcagccggagcgtgcagccatgccagccggagcagaggtgccaaagcggagtctggagcttcggggtccgcgggggcgctaagggggctactgggttggctgcagcagcgacctgggagaggaaggtgcaggatccaggcgggagaggcgagccctgcgcccagcttcccntgggccgtcancgaatcggtcccagccgcgctgttg

SEQ ID NO: 331572 - DNA, 214 bp, Homo Sapiens
cactgtttttctcttttgtccctataatttggacccaggaacgtatgttctgcaacttcccagctcgctttggcccttgttctgctcacttagatttcctcaaggtattccctgagttttacgtcagtcgaaggctaactctataggccataatgtagaatccatagtagaacatctattagaatgggaacagagggctgggcatggtgctcat

SEQ ID NO: 331573 - DNA, 480 bp, Homo Sapiens
ttttcatttttgtcatttgttaacctggaagcaaatatgacaaaacagtcatactagtaagtcatctgaattttttaaatctcttaataaaacaaccaaatcccacgcaaatcagtccacaagggaggcccccgcctccacagtgcagggtgactgagtgtacaactacgggccaacccccgcctctcaaccggaagggagggcactcaaaagaggaatttagagaaaaggcggagagggcggacctcgggaaagggtctgggcgggagccccacctggctccccacccctcccgaaaccaggggaaaagcctgtggcgtggcgctgctgtctcccattagcagttacagggccgaggcttcccgctgattggtggaaattccgatcttctgatccctgatttgcatagagactggggcctgcacccccgccccccaccagcagcaatcggccaacgccaacggtgctgcgccaggagcg

SEQ ID NO: 331574 - DNA, 459 bp, Homo Sapiens
  misc_feature (21)..(21): n is a, c, g, or t
  misc_feature (33)..(33): n is a, c, g, or t
aatagccatcattttcatccngaatattttcangaaacataagcccagtttgctcatttgattttatcaatggttctttaagttgatccacaaacccatgagggtcctggagtacctttcagggcttgacaaagtcgaaaattattttagtaatagtactcagacattatttgccttttttgctacgttgacatttgcactgatggtccaaaatcaatggtggattgacatcctagtataaattaaggcagtagatccaagtagtatgaacaatcactgttctattcactgccatcttctgtttttctttttaaaaaagctagtttgaaatactgtcctcaatgacatagtaaatttaatatttactatatcctcaatgtaatatttacatttacatgagtaattacaatattatatgacaatattaatacacattaaatttactatttaatattagtt

SEQ ID NO: 331575 - DNA, 416 bp, Homo Sapiens
  misc_feature (30)..(30): n is a, c, g, or t
  misc_feature (135)..(135): n is a, c, g, or t
cccgatttggtaatgtagtttaacagttanggaaaattaactcttccttttattcagtgttcggtcctaattcttttgggtccccaattcactttactgtctggttaagatcaacattttctaacttagttcacntttaataccttagattcatcagtttcttttacattaataattgctttggataaaattatttctaaatcatgttaattgctaaaagatcacttcaggaataattattctaattggccttattgcagaagaagcgaaaataggagagcccagggcattacttttacaaatattctgagtaataaggggaatggacaatattgtaaaccagtattgttgtgtgctatcttgagtcctggtcctcagtgtgagctctttatacagttcaaacccagaaatgagcg

SEQ ID NO: 331576 - DNA, 580 bp, Homo Sapiens
ttttcatttttataataatcattttactaaagcaaagattaagtacacattttcccaacataacaatttcatctatggataggcattagctacatgatttttcattttaaaaccccacaatgattatttttcagacataaataaaaaatacactggttctagatgccaacaaaatcacatttgcaaaccttaagagtttggtaagttacaacattaagatgactaacgatatgtgtgcagtattctcagtatagaatacccaaaattcccgtgtacatctgtgttgcttgagtgtcccagtatgggaggaggtagacttggcacatcgaaagccactgctatactaaagaatcatacaaagtctcagggattcttcagagaatcagctattataaaatccatcttgataattcattttgtgcgagaatgtgagaatgaaatgcaaaggaggttaattttacccaggagagcattcatatccttttccacttgtcagaatatacttgattcataagtggtcttttaccgacctacgactacatcacaagagcatgccacccacagtgtcttcccttaacac

SEQ ID NO: 331577 - DNA, 590 bp, Homo Sapiens
ttagcccttgttgtttatttttcaataaacaaggtttttttgcatgtctggactggtagtaaacgggaaagctaaaaagagcgccaaggacattttttttaacattttggtgacaaaattgatactcctcttcctcctctcctaatttgggaccaaattgctgatcatgtcttggatcgctgtctttgagcttttccgtttgtttcgtaaactacacactacaccagacacacacaaggtgtggctgggcagtcaaggatcccgacactctcagcagaatctggtggccatagaacatggaatgaccatttctgcatgacgtgaaaaccgtggcgaggctgctgacactgcttctgtggcacggggggggtagtgcgagtggtgggcactgtggaatttgggagggacggcctcatcgggtgctggtaatagataatttgttgcgtgggaaggtgagatggtggctcttctccaagggaggcgtctgctcaagaccctccactcccacggcatgtgaccggcaccgcgctgggctccctggggacagctgtgtgtccacccccctccagactgccccctcgtcctgcctg

SEQ ID NO: 331578 - DNA, 509 bp, Homo Sapiens
  misc_feature (341)..(341): n is a, c, g, or t
  misc_feature (358)..(388): n is a, c, g, or t
  misc_feature (438)..(438): n is a, c, g, or t
  misc_feature (444)..(444): n is a, c, g, or t
  misc_feature (471)..(471): n is a, c, g, or t
aagaaatatttaggaagttgagaaaaggtatttgtagagcttttgcatcacatagcaccacccatttgctgacacacaactgagatgttagttatgagacttccttaaacagatcagtaacactagctcagaaaaggttttctcaacctcagaccactgacattttaggctggaagattctttgctgcgaagtctgtcctgtgtattgtgggatgtttagcagccttcttggcctccacccactagatgccagtagtgtaccttcctctgagttgtgacatccaaaagcgtatccaggcattgactaatgttccccctacagggcacagtcagttgaggantttggcttagataatcnnnnnnnnnnnnnnnnnnnnnnnnnnnnnnngagataaggcctccttggttgcccgggtggtcttgactcttgggcttaanagtctnctgccttacctccaaactgtgggattncagcatagtaccatgccgccccaaacccttttattaag

SEQ ID NO: 331579 - DNA, 366 bp, Homo Sapiens
cagcgtgagcaccatgccgggctcacacgtttgagttgataccattgtgcccattcctcttttggcctcttttttgtccatagaggcttcaagatagataggtaagagcccagtagtgttcataagaagcccaatagagagcaggagccactttatcaggtggcaggtgtcctgggcctccctgctggctagtcccaagcggtggtgttgccaggatgtcttggaggtgataatgggacacacagaggcactgagtctccataggttaaaatgccaccaaaactggcctttgcctaatatccctcattgactatttagcatttaatttatttattttcctgacatttctgcaagctttgtatttat

SEQ ID NO: 331580 - DNA, 256 bp, Homo Sapiens
gtagtgcaaaacaataaatttttatttgttcacagttaaacacaagcaactgccttgacattttagaacattctaagaaggacagcaaactcttttgattccaattcccattcactaagattgtaccattttatcctgcagttcatatttatggcatctgatgtggattgttgacatgcttttaggattgaggcgggaaagtttagaccttttgacaagagctgactttcttcaatttaactaaaagcagtccgtt

SEQ ID NO: 331581 - DNA, 500 bp, Homo Sapiens
  misc_feature (480)..(480): n is a, c, g, or t
  misc_feature (489)..(489): n is a, c, g, or t
tcagtttacaatgcataatgatatgtctttatttcatcaacagaaatggtgtctagacaaaattcagttaacactagcaattcaattgagtgaaaactttttttgcacaatagtgtatttacaatgagtaaatgaagtttcaattcattagttcatagcaatgcttttttcccccaaaaggtaaaaattcttagttacagagaataagcatcaacagcctttcattttttacaataaaaaccacgggaaaaaccacaatcacttagaaaaaaataaggacaagcctaagaactagtacaataaaatgatgcattgaattaaattacattaatcgcatagaatctgtgtaaaaagtatgtagaaaaacacctgatgtaacctgttacagtcgttgaccagttatgagaggtacagagggttatacaggtagatatgtgtgaaaactgtccgtattgttcaacctggggaggaagagaagangggctgcanccctggcatac

SEQ ID NO: 331582 - DNA, 265 bp, Homo Sapiens
ggggggcagggttgggggaagattgtctatatacctgtatcatttccggttaccatactgaccagaagaaatgagaagtaccgaaattctaaccagcatgcttagataaaaggattcaaatggaaggtttctacatgccttcttgggttattgaatacttcctgtgatttttaatttctctgtaaaagataactctttttttggcatcctccctccccacttcatttctttcgagcatgggtgcttatcaaatatctttaattaa

SEQ ID NO: 331583 - DNA, 453 bp, Homo Sapiens
caccccagcctttctctgaccatcagtttcgcttcagaaagccaagcgccagaacaacaccttccccattcttttctgaaggaattcacacggaaccgaacttgccccaggagaaagtggcagccttggagcaacaggttctgatgctcaccaaggagttaaagtcttcagaaggagcttagtgaagatcctgcacaaggcactggaggccgcccagcaggagaagcgggcgtccagcgcatacctggcggcggctgaggacaaggaccggctggagctggtgcggcacaaagtgcggcagatcgcggagctgggccggcgggtggaggccctggagcaggagcgggagagcctggcgcacacagcgagcctgcgggagcagcaggtgcaggagctacagcagcacgtgcagctgcttatggacaagaaccacgccgagccctatgcagtctc

SEQ ID NO: 331584 - DNA, 241 bp, Homo Sapiens
tttaagcttcagacgggtaatacatatttattgaaaattttcttcaccgacaatggtgaaatcaagacctcaaattacaaaacatggtggcaggtgatacttacaaaaataaagcgaaggtctatgttttacagatttgtgcatgtttccttcaaatctcagtctgtactgtcattaaaaagatcatggaatctatgttgttcctcatgatggaatagtaaaaaaactgcattccactgac

SEQ ID NO: 331585 - DNA, 618 bp, Homo Sapiens
  misc_feature (205)..(484): n is a, c, g, or t
  misc_feature (558)..(558): n is a, c, g, or t
tatggagaactggctttcactgtccgtcttgtgttttctctttcttgtacagtagttttgattgcctctagaccccaattctagaacaaagtttagagttcctgctccttagagatactgttgatattgtggatattgcagatccagtcacagaactagcaggtggcttggtctcttttcttgtttggtttggtttttttctagnnnnnnnnnnnnnnnnnnnnnnnnnnnnnnnnnnnnnnnnnnnnnnnnnnnnnnnnnnnnnnnnnnnnnnnnnnnnnnnnnnnnnnnnnnnnnnnnnnnnnnnnnnnnnnnnnnnnnnnnnnnnnnnnnnnnnnnnnnnnnnnnnnnnnnnnnnnnnnnnnnnnnnnnnnnnnnnnnnnnnnnnnnnnnnnnnnnnnnnnnnnnnnnnnnnnnnnnnnnnnnnnnnnnnnnnnnnnnnnnnnnnnnnnnnnnnnnnnnnnnnnnnnnnnnnnnnnnnnnngaagctgtgtctgggtcatgcaacttaagagttatttcctgtaagcaatagctccaggcagagttggccagttntttcagccttctttataaataagggaactctacccccacgccgagccctatgcagtctca

SEQ ID NO: 331586 - DNA, 456 bp, Homo Sapiens
ccagctgtttcaccagaccattttgtttaattcttagagcaattttgtaaaatcagtgtcatcattcccctttaaccgttggaagacatgagtctgagttgaaagttaaagagaagcttctgattctaagtcaagtctctctctgttgccttctccgggcaggagggctgtgatgtatcctggcgagcctgggggcgatccagtcttaggaggtgggaggcctgcattgcagagagcagaggtgaatgggcctcccaggttgagcttgtgatgggcaagtagactggcacgggatgaggttggcagtggggagaggtaggatgcagtgcggggaaatgggcctttccacctgagaaaggcgagtgtgtctgcgtttgataatcctttgatatttgcgtatctgttattttcaagaatcacatttcacatagaaagccatgtgacagtttttaaatt

SEQ ID NO: 331587 - DNA, 439 bp, Homo Sapiens
  misc_feature (344)..(344): n is a, c, g, or t
  misc_feature (354)..(354): n is a, c, g, or t
  misc_feature (365)..(365): n is a, c, g, or t
  misc_feature (373)..(373): n is a, c, g, or t
  misc_feature (394)..(394): n is a, c, g, or t
  misc_feature (422)..(422): n is a, c, g, or t
tgcatcaccacaccaatcatagctgtgacttctgtctccctccccaaaacccactcagcactaaggtccatgggaagacagatatttttatctcatacaccactgaatcccagtgtatagtgcctgggcactagcatgtgttagattatgtgataaaaaataacattataaaagagaaatacaccttatcacacaatgactcacattggtttcaggataggctgtatccctgacatctaacttgttaagaggcagaaaagtaacctctccaggaagattcattttattaaactccattaaaatcttcggggctggactttcatccgggatccacaatggggggnaaaattaccntaattttaacngggttagnccaatccttaatgggaccccngggctccccatggtggcccaacttttcnatcctccaactcagccc

SEQ ID NO: 331588 - DNA, 647 bp, Homo Sapiens
ttttcagaggaaggaacagcaccttttatttcagatttacagaaaaagttagcacgtttccacttggagagatttcctacattaacaaagtctgttttgaggaaataaacactgaatacatattttgaatggaaatatataaatgttaacgacacacatgaggctcatttcctgatcagggtctgggaccacatacagaatatagaccttacaatagtacagtccatgacacagattgcagagattccgactttttcccaccacaccccctcccagccaccggacagacaactagccacagtcggggaggatccaattgctctcggctcggcaaccacccgcaaggagagcaaagtacgagggcgtccccacagcaagccttacgtcgcagcgcaggctccacctccacgcaccaggtgacgtgactcactcggagaagccatttgtggaggtggcacattcacctgtacggtcccaacatagtcccaaatctcagtctacaacatctacgatctattccatatccaacgagatgcatttgaaaaggaaaagtgcagggactgagcggacacagactctgtcaagaactttcccgttgtttcccgcgtccgaccacagccatgctgcggcactgagctccgagcagc

SEQ ID NO: 331589 - DNA, 384 bp, Homo Sapiens
  misc_feature (182)..(182): n is a, c, g, or t
tgcctgtttttagaggtcccctgaacacttcctgccttcaactttaccaccattggtgtgaatgggtctgagaaagatgtcttctggcttggaagatctcaccgtcatagtaacaggggcactggccttgggcacgcagtcccccctctcatccatgtaggaccctggggggcagaagccancctccaggcaggcctcattgcattcctcatccgggtaagagagagagcggcaggtcaggttgcagggggtcccgcactgcaggtacacctggctttcgggcagttcagctctagaagagagaggagaagaagtaaggcctcagcgggaatgttggacagcaaggactgtggttctaggacttgccaccccttgtagctgtga

SEQ ID NO: 331590 - DNA, 439 bp, Homo Sapiens
ctcgaggccaagaattcggcacgagttctaatctccctacaaatcagtatttttaaaaaccagagtcatcccaaaccaactgaccctctagattgccttacttcttgcagatttagtcttaccgtcttccagatacttacaggctgcctttgggcttttcatcatcccttatccttagccaccaagtcctgctgagcttcttttgtaatacttctctcctgcctcctccactgcacacttgtaccactgagacagtctcttaattctgcccagcacctccagccccatctacacccctctagtttgtcctccagcatgttgttttaggactgttgctagcctaattatttgaaatgaaatttcagttcttaacttggcatccaaacctttcgtccattgcatttctagctttaccttctaatttctagctttaccttct

SEQ ID NO: 331591 - DNA, 480 bp, Homo Sapiens
cttcttaaaatgtgtattttcagaattacaatgcttacattttaaagtcttaatacaatggttttaatctaacaatatattacataatatgaaaaatgacttttcatagtaaaccatgaaaatggaatacctgcagtgtcaaagtcaccaacttgtcaccttttccagtcacagaatcccaacacattgtattaatgatgactggggggggtcttacagcctgatgtatataggatgaataaatgtagagaaaggagcattttcatgaaaaataaaatttaaaaaccaggtaggatttattttaaagaacacagttgaaagtaaaacatttacatcagcccagtttgcccttacaacggaaaatggctcagatctccacatagccggaataataattaaacaagacaacccttaggtttctaattccctaacctcctacattcagccctgcctcaggtcaggaaagagttggcagggctt

SEQ ID NO: 331592 - DNA, 471 bp, Homo Sapiens
cgttaaatatcttcacactttttgttgcataaaattttcaagttttattatgatacaggcagtacattccatcaccctcatagcaacctcagaagtgaacctgtcatttgggatctgaggaaagggaagcaaatcagggtatcttgtttttaaactgtctacaccataagcttccaatgtgtgaacatcatttgtcagtccttcaagttgctgactatattcctctattttctgagcaagtgcagttggttttacatctttatcagactttcccctcacagcatagtcagctgcaatcaaagctaacttggtagaaaggtaacatttaaagcacacccactcattggcatttttatgaaggtcattcctgggcagctgagaagtttgctctgggcttgtcttagccatctgcgtgcttccactggattgccaaccgacttgaaagtgggaggaacaaagaacctttgagag

SEQ ID NO: 331593 - DNA, 515 bp, Homo Sapiens
  misc_feature (51)..(51): n is a, c, g, or t
ttatgatacaggcaagtacatttcccatcacccttcatagcaaccttcagnaagtgaacctgttcatttgggatctgaggaaagggaagcaaaatccagggtatcttgtttttaaaactgtctacacccataagcttcccaaatgtgtgaacatcatttgtcagtccttcaaagttgctgactatattcctctattttctgagcaagtgcagttggttttacatctttatcagactttcccctcacagcatagtcagctgcaatcaaagctaacttggtagaaaggtaacatttaaagcacacccactcattggcatttttatgaaggtcattcctggcagctgagaagtttgctctggcttgtcttagccatctgcgtgcttccactggattgccaaccgacttgaaagtgggaggaacaaagaacctttgagagtaagtctgtccggctgaaggggggcatttttctttgttctgttgctgtctttcagatttatggctcgttgcttcttgat

SEQ ID NO: 331594 - DNA, 427 bp, Homo Sapiens
  misc_feature (84)..(84): n is a, c, g, or t
  misc_feature (311)..(319): n is a, c, g, or t
aggacagaagggggctctcaaatccgcccatgcattgagatcttcgctcttcacagaggtgggatttagtagctttagtcctcnagtttcaagtggatgaggttgtgtaatttcaagggaaaattacatccggcaatacctcttttgctaatggaactcaggaaggaaaggccctcagaaaggctggagtctggaatctaggcaggtagctggcctgacagtaaccttgatccaggtaaaccaaagtggaattctcgagcctggaattgatgactcataattgttttcatttaacagctcaggatgtgtgnnnnnnnnntgctgtttaatttgtaagacctaagtttacgactgattttggagaatacatttgtgataatgtatctatgttttcctggggtggcggaggaaatgatttctacctaaa

SEQ ID NO: 331595 - DNA, 727 bp, Homo Sapiens
  misc_feature (415)..(415): n is a, c, g, or t
  misc_feature (496)..(496): n is a, c, g, or t
  misc_feature (628)..(628): n is a, c, g, or t
tttgccattattttgatttattgcattctgaagtactccggggggagggcctgagaacgatccgctttatcagcagttctaaagccttattacctgagatttatattctggggggaaaaatcaagattggattatcaatacgtatttcacaggagatttgagttttggccctgacagaagaacacgtactaacctgaaaaaggctacgtgagattaaagagagaaacagctaaacaccaaatcctggtgagagagacgtcgatttaaaaggccagccactcactgtagcgtgacaactccctctggggtagccaggagcagagcttgaccactggcatgggagcgtgggccacgagggccacctccccaggagcccacagcagcccagggaggccttgggagcagctttgcctcnagccgcagtaacttctcatcatcccgcccatagttaatcgtctgtaaggcctgagctatgagcatcgccatctcccgggtnttggccgcaaccactctgcaagccatgaggtcgaggggtccacccgaagtgtctatcacgatgccgcctgcttctctgatgatgactgtgcagccgccagatcccagcagtgcaggccaaactggtaatagnatcctgcgcccctgaggccaggtggcagagtgccaatgtggagcttccaatcactcggaccccatgcgccttggcatgcagcagccgctccatgttact

SEQ ID NO: 331596 - DNA, 124 bp, Homo Sapiens; identical to SEQ ID NO: 296669

SEQ ID NO: 331597 - DNA, 419 bp, Homo Sapiens
  misc_feature (373)..(373): n is a, c, g, or t
cctcagttatattcttatacacacacaatttgaaaatgtgtagtctttcatatagtctatatttacaattgtaaaactgtagaattacagtcatatttattatttagttcaaatttgtttcaattgaaactaaagtctgcaagatatgtggggacttcccagaaccactcccagagctgaaaccacaccaaagtttcctgatttctggtctgtttcttctgtataaataaaactgagagaactaaatatttaacacttcacatgctaatttcttatcttttaacattcaaatgtcttcaactgctctccacggtcttggccatggattcattgggtataatgcctaactaagttacctaagaaagagtctggnccctccaactcccatcccctgcccctggagaatccttaaaatggcc

SEQ ID NO: 331598 - DNA, 420 bp, Homo Sapiens
  misc_feature (42)..(42): n is a, c, g, or t
ataccagcccgatttattttatattgtcatattgtaaatccntataaaaatggtagattaagtaaaccatagataccaacatgggtatgtaattatgaataatatttggagatctttagtttaaattcttccataaaatagctttcagggccaggcgtggtagctcagacttctactccaagcactttgggttggtgacgcaggaggatcgcttgaggccaggacttcaggaccggcctgggcaacatagcaagacctaacttctaaaaaattaagataaattagcgggcatggtcgcacatgtagctactccagaggctgaggggaggattgcttgggcccaggaatttgaatttacagtgagctatgattgtccactgcaatccagcttgggcaacagagtgagaacctgtctcttaa

SEQ ID NO: 331599 - DNA, 546 bp, Homo Sapiens
ctccttcttagttttcttcccaaatggttcctcagccccagtgctgggccctgaaataggcccagttccctgtatagttcccacagagctggccacaccataagtcaggggcaaactggaactgtgggaaggagctgcagcctgtacttccccttcagttagagcctgaagctggaggagcttctttagcaagtacctgagatcaggaaggaaaggagcagagaaatgaacttccgtattgtctcaattcagtattttactcaagtactgggaaaagccagaattatatacaaagattactatactcataaaagaaaggttcttattaggccctatgaatcataaagccctgggaggataatcaatacttcaagaggccaaggataagaactgtagcttatgtcttgcatctggacggttcctctaccttgatgttggacggtgttaggcttctgaaaggcacattatttacacatgtatatatacccattgtgctttgcacagaatagtacgtacagaataaatatttgtagaacgagaggcagt

SEQ ID NO: 331600 - DNA, 521 bp, Homo Sapiens
ttaaattttctcgtgtcaaatattttatttctctcattaaataaggagggatctaacagtgatgttacaattcttgaattcaaaaaatacaaactcatagaaaaccaagagtgcctcaatgaattaccaacagatgcaaaatggactattacaagggcagtcagtaatccactgcatctgtgacacagttcatcttcatttctcaatggcagtcctgtgtccttgtcatccatctggatcctcaggatgcaggacttgagagcttcatggagggtgaacagctcaagaataaagcagtgatctactcttaatgttcaggcaccaaagttcctaaaaaagagccaagctctttcagctgacccagaaccaagggaactgctaggacgctggcatttcttgggcccattatgtggctgagtcagccaactaataactccagtctttggacaaggtttgggaggaccaacctgagaccccctcctagtggtggccttgctgtgctgtgagggaggagtggtgct

SEQ ID NO: 331601 - DNA, 390 bp, Homo Sapiens
  misc_feature (65)..(79): n is a, c, g, or t
  misc_feature (109)..(213): n is a, c, g, or t
caggatccttgagcccaggagttcgagaccaacctgggtaaaatagtgagatctcatctctaccnnnnnnnnnnnnnnntttaaatagccaggcatggtggtgtgcacnnnnnnnnnnnnnnnnnnnnnnnnnnnnnnnnnnnnnnnnnnnnnnnnnnnnnnnnnnnnnnnnnnnnnnnnnnnnnnnnnnnnnnnnnnnnnnnnnnnnnnnnnatagagagatgtcctgcctccagggggaataaaaaaagaatcatgttaaagtgacactaacttcaaccagatcatattgcagttttacattcctgtgattcattgattcattttgtgttgatttcctagtgtgcttctcacttcaggtgttccaaagcctcaatactcttaatgcga

SEQ ID NO: 331602 - DNA, 483 bp, Homo Sapiens
  misc_feature (80)..(80): n is a, c, g, or t
  misc_feature (256)..(256): n is a, c, g, or t
  misc_feature (387)..(387): n is a, c, g, or t
gacacacgtacataccacacatacttactgaaccatatttaatattaaggacaaattaaatctactcgctgagatggacnaaggtcccctggagaaggaagatataggttgactggaatgtgtggggaccttttccagcagctccaagtaggacacacagccaggtcctgaatcaagctttagctccgggacaaagagaaagaaaagctgaaaagacctgcatgttgaacagatcatagtttatatgttcttgggnagttatttccattatcatttttaaaaattctaaatttttagcagatttgtgctctattctcgatctgcatttatcatgtcaccaacaatgcatttgttttataaaaaccctaacttccaaaagactgtcancaaaggctctattggctttaaaacaaggctttagaaccccaacttcagggtgctctaaaatgaaaactaagtagacaatctactcaactaagagtt

SEQ ID NO: 331603 - DNA, 481 bp, Homo Sapiens
  misc_feature (117)..(413): n is a, c, g, or t
taaccgtgtgatgtaggtctttaatttttgaaactgcaaaacaggttccaagatgagctcttactgatgtatatggtataatacggtatggccaaaaccactgcttatgacctctcnnnnnnnnnnnnnnnnnnnnnnnnnnnnnnnnnnnnnnnnnnnnnnnnnnnnnnnnnnnnnnnnnnnnnnnnnnnnnnnnnnnnnnnnnnnnnnnnnnnnnnnnnnnnnnnnnnnnnnnnnnnnnnnnnnnnnnnnnnnnnnnnnnnnnnnnnnnnnnnnnnnnnnnnnnnnnnnnnnnnnnnnnnnnnnnnnnnnnnnnnnnnnnnnnnnnnnnnnnnnnnnnnnnnnnnnnnnnnnnnnnnnnnnnnnnnnnnnnnnnnnnnnnnnnnnnnnnnnnnnnnnnnnnnnnnnnnnnngtctggccaacaaacaaatattcacacatcacccagtatttaaggaaggggtcatcattcagagaggt

SEQ ID NO: 331604 - DNA, 340 bp, Homo Sapiens
  misc_feature (256)..(256): n is a, c, g, or t
  misc_feature (269)..(269): n is a, c, g, or t
  misc_feature (290)..(290): n is a, c, g, or t
  misc_feature (315)..(315): n is a, c, g, or t
ttagcaccatgaaaacaggtaatattttactatgattttgatttgtattttcccagttattagtgatattgagcatattttcatatacctgttggtataagaaataaattctttgctcattttaaaatggagttatcagttccaatatgcttctaaagattagttggggctttgctgtaaccatctagacatgtatatcctgatttggaacaaatccacttccctctctgtgtagtccccgggccctaccttggcnccctttgtccatnccaaataggcacactctcccngcttccccaggggtagggaaccctntaggtccccagctaccttcagggag

SEQ ID NO: 331605 - DNA, 569 bp, Homo Sapiens
  misc_feature (362)..(362): n is a, c, g, or t
  misc_feature (394)..(394): n is a, c, g, or t
  misc_feature (413)..(413): n is a, c, g, or t
  misc_feature (420)..(475): n is a, c, g, or t
  misc_feature (489)..(489): n is a, c, g, or t
  misc_feature (517)..(517): n is a, c, g, or t
  misc_feature (527)..(527): n is a, c, g, or t
  misc_feature (551)..(551): n is a, c, g, or t
tttttccttgcaaagttggctttctggatggagagaatgatgtgtctggcaatagggatctgtacatttcctatttcaagagcacacaaagtattgacatctgaaatgaaaacacaaaaggaaaagcttaaacttgccacataggaagttcttcatgcttgaatagtgtcttcataaccataatgggatttttttaggattataatagttctttttaaatgctttatttacttaacaaatagtaatcaaatcattgcaaattcttatatggaagatttaggtgctggcagcaatagttacataaattataatgtcaactatggacaaactttctatgtgtctaggagcctaggattataaantaggaaggtgtgcccatcatgggcttaccaantgggttagggattataggnttctagnnnnnnnnnnnnnnnnnnnnnnnnnnnnnnnnnnnnnnnnnnnnnnnnnnnnnnnngaggggtgggatcncctgagggtccgggagttcccaggaccngcctgaggcnacctggggtgaacccgtgtctctnccttccaaattccaaatt

SEQ ID NO: 331606 - DNA, 445 bp, Homo Sapiens
gtagagatggggactcactatgttccccaggttggtctcaaactcttggactcccatatagttcaatctaatgcttgcttttcaattcttcctatttctctgaagcttaaaataattaaaatacataataatccttcactgttaaaacacgtgcgtgaaaaataccaaatttatttattttatatttgttagtagtcagtaggattcttactccagttttagaatgtaatgaaaaggaaaggtacaaaacacacatgtcacgcacttactgtcaagctaattacaaagactatgccgcagatgaaatccatctaaccagctctgtctgagggaaagagcagggagcatgtgtgaagtacaactgtggggtcaccacactcaccgatatcctggtcctggaactctgcccgtgggtacaatggggaatagtttccaccatggcctt

SEQ ID NO: 331607 - DNA, 749 bp, Homo Sapiens
  misc_feature (415)..(477): n is a, c, g, or t
  misc_feature (479)..(480): n is a, c, g, or t
  misc_feature (513)..(513): n is a, c, g, or t
  misc_feature (606)..(606): n is a, c, g, or t
gtctttgaaggatttactaatatttattaagtgccaccaacatttcaacgggccacaggcagggctgggagttgggggagaaggagtggctcccctcccgacaacaggtgaccctcacccccggctcagggccccgaggggtcctggaaacactcacgctcaaggagcggaggtgaatggcttcctgttctcacctccgggtccaggcactgggggtgaggaagtggctgggaggccaggaagctggaggaggggaggtgctggggcccagggctgtgcgggaggggatgggatcctgtgggtaccttgcgcccgtgtgccagggtcgggggaacgtgacactaaggtgagaattgggtagaaagtgtgtgtgaaagggcatgcgtgcatgtgatgttggtgccatatctatagnnnnnnnnnnnnnnnnnnnnnnnnnnnnnnnnnnnnnnnnnnnnnnnnnnnnnnnnnnnnnnnannccatcgccgcgtctgtgtgacattaatatgtgnaacgtcgacatggcccgtgacgtcgttgctgcatctcggtgtgacgtcatgccaagttccccatgtctgtgtgcgacgtgctgcatctgcacngacgccatcgctatatctcttcgtgacgtctacatggccacgtgacgccatcaccacggtgatatgtgacgtcagcgccgttgcttgcgtgacgtcatctccgcggccgtgtgctctgggtgagggatcgtgaggcgctgggc

SEQ ID NO: 331608 - DNA, 348 bp, Homo Sapiens
tagaataatatccaggcaattttactcatagttctgtttagttccagatagcaacagctgattgttcaaagtgcagggtttttggatattcaagtaccacaggatcggagaaaaggagtacttgaaacctagagttgcgttttcacttgagaagacacactttggaaacacctatccaacagactacaaatataggctattaaattaaaaatctggtttcaaaataatacccacttaggttggaaatatctttctccaaactcagatccaacttttgaattgtttggtatcaaaggcaaagttagagggacttgggtttaaaaactaaaattacaagttgagtggcct

SEQ ID NO: 331609 - DNA, 571 bp, Homo Sapiens
acttgaaatccaagaatggttttaatgtgttggccgagaaaaataaactgtaaagttctgtgaggtcttctaaaaatttacaagaaaaactgatgggcagttctaatcagacttggatgttatcttttcccccctttttaaaaatgacaacagatacagttccacaaaatacaatagaaactgtttttttatcttgactgccagagacgctcctttgcaatgccttccggtaaccaaatttttgggcacaacacacagctggccttcatttcttcaggggctggtaaacagaggcattggggtcaagtccagaggggctggtctccacaaatttggaagagtagtggggggaaacagggctcagggggctggtggcggcactgtatgttatgctgggcatgacggccatgacttcggctatcttctgttttaggtccttgatttcctgatctttctgaaggatttgtccttgggccaatcttctgactgccgctttgcatcgccccagtgcggagaacaaggtccagcttgattctcgtctctgcacttaagctgttctccaggtgcatgt

SEQ ID NO: 331610 - DNA, 487 bp, Homo Sapiens
acaagtgtaatttggtggagtatacacattttggcaaacagttggcattaactgtatttgccaatattaaatttagtaacagatcaggcacttggccagcaggtgaggaaagtttggtcatgtaaaaaaactgaatacaggaggagaaagaaaaccagattcgttaagcacccacaatatcagatccattaatttttttatctccataattcctcagtgaagttggtaagtattcctgctctacaaggtggggagtctgaggtctaggtattttaggtaaattggcttggattacatgtatgtctaataaatccagatggatattaccacacagcttatctatactatttctagtaaactgcatcctgtgataaacttgtagagaatcttactgttgtttttctttatactcttccctggttcccataaatcccaggatttaaagcctccaaaaaaacgactttcggccaggcacggtggtcgcgcg

SEQ ID NO: 331611 - DNA, 727 bp, Homo Sapiens
  misc_feature (548)..(558): n is a, c, g, or t
  misc_feature (561)..(650): n is a, c, g, or t
  misc_feature (679)..(679): n is a, c, g, or t
  misc_feature (693)..(693): n is a, c, g, or t
ttttcggtatttgctttattaattcatttaaaataataaacccattacgttaatataaacatcttatgaaaaacagaattttctaaaacaaagtcaggaatcagagtaacactgttttacatcttcacaaatttctcttaatgcctagcttaataggagacagctggattcccatatctgcttctgcattcaatctgctatgatatgttgttttgtttaaagtacatgaagaaaacgtgtctcacatggacagctaattggaagagaggagtattttaacagccttctcagaaaacaatggatattcatcttttattcaacaccaaaactcaagtggcaattctgaaaggttagttgcaatgtggaattcactgtatcagtgaacttttttggctctggtgtatataaaaatccatttgtctatgttgtactttgaacgggatcgcctacccatgcacgattttgtaacatgaattggtcatttgggaaaatattggttcaatgagttacacagatcttcccagtgttgacacacttcctcatactgnnnnnnnnnnnacnnnnnnnnnnnnnnnnnnnnnnnnnnnnnnnnnnnnnnnnnnnnnnnnnnnnnnnnnnnnnnnnnnnnnnnnnnnnnnnnnnnnnnnnnncaccctcctgagcagctagaactacatgncactacacctaatntttatatgttattgtagaaacagggtctcgaacc

SEQ ID NO: 331612 - DNA, 343 bp, Homo Sapiens
  misc_feature (130)..(130): n is a, c, g, or t
  misc_feature (223)..(223): n is a, c, g, or t
tttgagttttatcatcttgcattaaattgttccacctggatttggggttcatctctgtgccctaaggatctgctatgaccaatcctctttttgtaggtgggtctctggcttaagtattgataggcttcancggtttgtgtctctgtcttagcttggtatcaagccagtagtagctcacttcctttgtaaattcctgcttcagtctgggatccgtaggagtatngtgagaacttctgaaacgtctccaactcttaacagtcaagatatctatatccatttggaatagagttctggttttccaactactagacttaaagaaattctggccgggtgcgggttgtca

SEQ ID NO: 331613 - DNA, 573 bp, Homo Sapiens
  misc_feature (136)..(136): n is a, c, g, or t
  misc_feature (302)..(529): n is a, c, g, or t
ctgaattataaccaaaagggatatatgaatccaaaaagaaggaaaaagtaaatgggccctcaccaagaatatgaattcccacagggccagagatctttggtttgcttggttttacttaatctgtcccaaagcactnagaacaatagccagcaccccagtaggctaccccatagatactttttgaaaggttatggtactcatgtcactgtttggaaattgagatccaacatcatacatgtagggaagtgacaaagtggggatcaaacctaaggtctggaagttgcctagatagattagattcnnnnnnnnnnnnnnnnnnnnnnnnnnnnnnnnnnnnnnnnnnnnnnnnnnnnnnnnnnnnnnnnnnnnnnnnnnnnnnnnnnnnnnnnnnnnnnnnnnnnnnnnnnnnnnnnnnnnnnnnnnnnnnnnnnnnnnnnnnnnnnnnnnnnnnnnnnnnnnnnnnnnnnnnnnnnnnnnnnnnnnnnnnnnnnnnnnnnnnnnnnnnnnnnnnnnnnnnnnnnnnnnnnnnagctcaagaccagcctgagcacagtgagacctttttttctacaa

SEQ ID NO: 331614 - DNA, 442 bp, Homo Sapiens
  misc_feature (300)..(300): n is a, c, g, or t
  misc_feature (380)..(380): n is a, c, g, or t
  misc_feature (411)..(411): n is a, c, g, or t
  misc_feature (418)..(418): n is a, c, g, or t
  misc_feature (430)..(430): n is a, c, g, or t
ttttctgatttctgtagcaatgaaaatttttaatttgaataaaaatcacgtaagcatgaggttgttggggaacacggaaaggaagggctcagattagggggtgtagcacatttatcaggaggtaagatctccatagtctcctacccctcctgggcctggccttttactgtggtatccagcctctgggaagaccttcgtatggacagtatctccactggggctatcactaggtgaccaggtaggggacagagtagagcagccaatgaccttaactcaaaatcttttctctcccttcaaccntgtgaaaaaaggatgactcgggcacatactcagatgtcccctgggccatagccaccatctttgttggcccagtcaccaancgacccagcctcttagttaagaggggccctngggttanagtttttccttnaccgcttttctc

SEQ ID NO: 331615 - DNA, 471 bp, Homo Sapiens
  misc_feature (81)..(81): n is a, c, g, or t
  misc_feature (148)..(148): n is a, c, g, or t
  misc_feature (419)..(419): n is a, c, g, or t
  misc_feature (427)..(427): n is a, c, g, or t
catgttccattgaattttatattagtgatagcacagtcacatgaccacatttaactgcaagaagtacagaaaacggagtgnctagcttatcagctatatgccccagaaaatgggcagaatggattttgaaagaacaactagtcatctngccattatgagatgggagggtaagttggctagcagacttttggaaaagatttccattttcctaaactaataaagaagcacatataatactagaccaaaagtttgttgttaatattttgataattccacttgtatgaaatgtttcctctataatcttacatatcttcttttgtgtattctaaaacattattctggagaaggggaccatcggcctcaatagactgccagaggggcctgtagcacaaaaacagggcctctgccctgggcagagnaaggccangattatttaacaggcctggttaattccagaccaggcaataatgg

SEQ ID NO: 331616 - DNA, 489 bp, Homo Sapiens
ccaattttgcctaggttggcctcgaacgcatagcctcgcctccttgtgtgccaggacaaccggccggagccaccgcagctcccgataccgatgtttttaaaaatatgttttaaagtaattgcttaccacttagggaaaaaactgttgaagtataaaacagccagaacacattgctctttattttggtagcttatgtttggctgacttgcatatgttaaaaaattctcagattttacgtctatggattttaatactatatgaaaattcttttatagtttctgaagacctatgttatacgctttctatgagaacttctaaattatcgttcaaaaacaaacactaccctttacgatatacctttagcattaaacatttagatcatgtacccaaccattctatttttctaaacttctaacctgaagctttggttatgagggaaaacaaagtttgtaagggttcagttctctgagatttttcagaatgtttcca

SEQ ID NO: 331617 - DNA, 612 bp, Homo Sapiens
  misc_feature (20)..(20): n is a, c, g, or t
  misc_feature (126)..(126): n is a, c, g, or t
  misc_feature (136)..(136): n is a, c, g, or t
  misc_feature (140)..(141): n is a, c, g, or t
  misc_feature (145)..(146): n is a, c, g, or t
  misc_feature (152)..(152): n is a, c, g, or t
  misc_feature (154)..(154): n is a, c, g, or t
  misc_feature (157)..(157): n is a, c, g, or t
  misc_feature (161)..(161): n is a, c, g, or t
  misc_feature (166)..(166): n is a, c, g, or t
  misc_feature (171)..(171): n is a, c, g, or t
  misc_feature (174)..(174): n is a, c, g, or t
  misc_feature (176)..(176): n is a, c, g, or t
  misc_feature (182)..(183): n is a, c, g, or t
  misc_feature (185)..(187): n is a, c, g, or t
  misc_feature (189)..(189): n is a, c, g, or t
  misc_feature (193)..(194): n is a, c, g, or t
  misc_feature (202)..(202): n is a, c, g, or t
  misc_feature (204)..(205): n is a, c, g, or t
  misc_feature (207)..(207): n is a, c, g, or t
  misc_feature (209)..(209): n is a, c, g, or t
  misc_feature (219)..(219): n is a, c, g, or t
  misc_feature (223)..(223): n is a, c, g, or t
  misc_feature (228)..(228): n is a, c, g, or t
  misc_feature (231)..(233): n is a, c, g, or t
  misc_feature (241)..(242): n is a, c, g, or t
  misc_feature (245)..(245): n is a, c, g, or t
  misc_feature (249)..(250): n is a, c, g, or t
  misc_feature (257)..(257): n is a, c, g, or t
  misc_feature (262)..(262): n is a, c, g, or t
  misc_feature (266)..(266): n is a, c, g, or t
  misc_feature (272)..(273): n is a, c, g, or t
  misc_feature (276)..(276): n is a, c, g, or t
  misc_feature (278)..(278): n is a, c, g, or t
  misc_feature (284)..(287): n is a, c, g, or t
  misc_feature (290)..(290): n is a, c, g, or t
  misc_feature (292)..(292): n is a, c, g, or t
  misc_feature (299)..(299): n is a, c, g, or t
  misc_feature (303)..(303): n is a, c, g, or t
  misc_feature (310)..(311): n is a, c, g, or t
  misc_feature (322)..(323): n is a, c, g, or t
  misc_feature (325)..(325): n is a, c, g, or t
  misc_feature (338)..(338): n is a, c, g, or t
  misc_feature (346)..(346): n is a, c, g, or t
  misc_feature (355)..(355): n is a, c, g, or t
tatgagaaactttctaaatntatcgttcaaaaaacaaaacactacccttacgaatatattagcattaaacatttagatcatgtaccccaaccattcttatttttctaaacttctaacctgaaagcntttaggttantgannggannaacaanangtnttgnatggngtttnggngnaactgnncnnngnctgnntgtgtgtncnntngntgtcatgacnatgngtcantgnnntggggtgnngcncccnncccaccnacacncccnaacganngcncnaacacnnnncangncacgtcncacnaatgtannggtggagctgnngntgggtggttgtgnaggtgtgngtggtaggnggggtgcacacctagtcctcagccaacgaggcactaaccagcgagaccagatgttctaaccagtcttctctaatgctgtcaatctaagaccacaaccacatctatacttcacaagcatctcagaagtcctaaatcccagtaagatgcagtacagttggtgatgtcactctgaaagatttatgaccttgcaggactttcggccactgctacaaaaaataaacagatagttgtgtgtggaaaagagaggatgtgggtgt

SEQ ID NO: 331618 - DNA, 380 bp, Homo Sapiens
tagttagcatagaatttagtgtcagaaaaaaattttactgagcatttgcaccatgctaggtattttctacacattcatttaaatctcacaaccacaacaataaaaacacttccctagtgcttactatgtgccaagtactgttctaaaagcttaacatttattatctcattccatttttgcaataactttatgttagtcttattttgcccactgaaccaatgaggaaactgaagcacagagggaacaagtaacttgcccaaggtcatgagattgagagtcgcggtgctgggacctgagcctgggtaacctggctccaaagtctgtgttcctaacctctacacgctgttgtgttgtctagcaaagccaaggcatagatatta

SEQ ID NO: 331619 - DNA, 326 bp, Homo Sapiens
ttaacaagccttgagatgagatcacacaaacactcaaatgtagcttctaggggaggggagaacccaggaggctgggctttctcttctcttctcaccactggaagggaggagtaaccagaaggagcggaactaataacacgctgtccagagaggggagctgtggtcagtgggacgtcatgagtcagtcatagggtttgtcctgatggtggtggtggcaggtggtaagggttggggaaaaatgaagaattagaggaaacccccaacaccagcaggcaggctgtactgtgactggactctccctcaacatcccccactctgctcaaagc

SEQ ID NO: 331620 - DNA, 555 bp, Homo Sapiens
  misc_feature (301)..(301): n is a, c, g, or t
taggttacatctactacaaaggatatcatttgggaagaatttccagaaactgctcctggctgggctatcaaattatgcagtatacaactcccagaggactgatcactgtgtaactgtaagcctcaatgactaaaagcttagaaaggttcctggttacgatggacaaaatagagcttctacatgcctgtcgtgccatagtgtgctgaaatacatatcacctttgtttgtgggtagaaagctataggacaagatagaaagaaatggtgggtttctggtgggaataaagcagtaggcattaacntggtgagcttgaatccccacaggaaatgacttcacgtagagcctgagaaagacttgtgaggtcttatggcatactcagactaaatcacatctaggtatgatcattatatgtgatggttaattttatgtcaatttagatgggccacattgtacagatatttggtcaaacactattttggatgtttctgtgaggatgtttttagatgagagtcacatttaaattggtgtttttttgagtcaagcagattgggtgaa

SEQ ID NO: 331621 - DNA, 329 bp, Homo Sapiens
gatttctttttctgatattgtaccctataaaatgataactaacatgcattcgtgatttatgagcttttttaagcaatgaaacattctttccccaaataaaatgttacatggaagccatgtatactaaacagtttcacaaatataatctgttactcaaaatttggttgtaggcaaggtaccaggttgcacgcctataattctagcactttggggaaccaagctgggagaatcacttgaggccaggagttcaagaccatctggggcaatagcaagaccccatctctacgaaaaaataagaaaattagccaggctttatggcatgtgtgtat

SEQ ID NO: 331622 - DNA, 522 bp, Homo Sapiens
  misc_feature (398)..(411): n is a, c, g, or t
taaccagtttttataaacttcatttaggtctctaaaccacagactttttaaattgcaactgtaaatatgaaatggtcatcacatctgaccttggtcagtggggaggggaactggtatcctgccaagcctggttgtaatttgtaaccattttctatttgtgcaaactctgtaaatatgtgtttaaacaaatgtaatattttgtacaagatacactggagaacaaagggaactcaagattcttccagccacatgtcacctgtaggtagaagtaaactctgcagtgcagcttctgctctttgcccctcttgccagggcccctgtggcttcctgcacactggacaggtgactgtatggtagagactgtgatctgggaactttttgctgtacaaatctgtttnnnnnnnnnnnnnngtaactcattgaattaacttgcagtggtgtgtttgattcttttttagactggcttcagcattgtgcagtttaaaaataagtaagtaacttacataaatcttcaattgtatg

SEQ ID NO: 331623 - DNA, 440 bp, Homo Sapiens
  misc_feature (18)..(18): n is a, c, g, or t
gtaaaaattaccggaagncccacaaggttagggattatggaggaggggcctggaattctggttaaggataccaggcatagttaaaccaataaccagccattgttccagaggtcacaatatgtgtaacttctcccaattattcctgtagataacatcactatcggtagaacctaagactggccttttgagatgtttttagacttttacatttatggcaaccaactgactctacccagaccatgactcgtgactgaaatggtcctgtggcccccatccagaggctgactcagcacataaggaccatttttccaggctcctatgactgcatccccaactaatcaacatttcccattccctagcctcctgcccaccaaactctccttgaaaaactctaacctccaagccttcaggagactgacttgaataattccgagttcttc

SEQ ID NO: 331624 - DNA, 390 bp, Homo Sapiens
tggcttgccaaaactgtgtatatttgagaggggggcatgataaatctattataatgaaattcatgtgctctaagacaatgactgaacttggtatttaagactatttaaaagtcacaagatgaattaggtcatgtttcagaaatgactctacaatctaaatttctcacaagcaagtcaggttaatgacaccagactctgctactttcaatggataaaacaagggatcgactcatatgttaaattttcttctagtggttatacatttggtactttcataagccataagtaagagacccaggataatttaaatccaggagactttatttagcctccggaatggcccctccaaccccaaatccatgcaagaacacaaagccaagggggtaaact

SEQ ID NO: 331625 - DNA, 434 bp, Homo Sapiens
  misc_feature (159)..(379): n is a, c, g, or t
tattatttattttatggtttctttcattttttccccactggtgatttggaaagtatatatgctattcaaaattctagtaaaacaaattaactcatacttacctcctatggctatagttccagatttttatctgataattttcgaatggtgaagattcannnnnnnnnnnnnnnnnnnnnnnnnnnnnnnnnnnnnnnnnnnnnnnnnnnnnnnnnnnnnnnnnnnnnnnnnnnnnnnnnnnnnnnnnnnnnnnnnnnnnnnnnnnnnnnnnnnnnnnnnnnnnnnnnnnnnnnnnnnnnnnnnnnnnnnnnnnnnnnnnnnnnnnnnnnnnnnnnnnnnnnnnnnnnnnnnnnnnnnnnnnnnnnnnnnnnnnnnnnnnaccagttcttccgtactttacaacatactgggcctgcttacagatttcaaactct

SEQ ID NO: 331626 - DNA, 496 bp, Homo Sapiens
  misc_feature (14)..(14): n is a, c, g, or t
gcacacctggaganattcagaaccaggttctgaatcatcacgattgccttttgcatgaaaacatcggctggtgatgtgacttctcttcaggccatgagcctaacaccctgccggttttcatgcccgctgcagtaatggacgtttgtgtgaagaaatgaactgtggagtacaaaatgctttgagtctttccgattgctcattaattcacttttttgttacttctttccaaaatggaagtgctgaagccatggtctttctgcccctccaagctgatgaagggaagcctttgccaatggcccatggaagacacttggtttgagaaaccctgcccacttccaaagaccaaagagattaggaaaagcctggcagtattctccaactccaaacaagctctagagtgctccaggaaaagttatattcagtatatgaataagtgttattctccattattaatgtgttctgaaaatatattatgaataaatacatcaccacaccc

SEQ ID NO: 331627 - DNA, 432 bp, Homo Sapiens
gccttgaaatgtttttaatagaattggtctagtaatcgttcaggatttcggtgatgggccctccctgtctggacactgccaacccacagctggaggggcacttaaggcacgtcattttgtgattagaattacacaaaatttgattaatattatagctgcaaaattaacatacacaattttcactcataatttaaaatattttgatgaaattctttgctttcacaatagaagatcagtggtacacagtatattgaactctgtaacaaaattattttttgagaaaatacagaagtgagaaatagtgatttcctcaatttggtttatagtcttatcacaaagtaggccaaagttccagtattaaataaatagatatcctaataaaagtttgtacaagtcttcctaaggaattacattcgtaagactgtttacctt

SEQ ID NO: 331628 - DNA, 435 bp, Homo Sapiens
gatctctcttagtgttgcacagtaaaagttgaaacaatacacttgtgagtggaattctgaagacatcacttctgtgatttttaaaccacttctaaatcctttcctcttttgtttgtggtgggtagttaacttcactttttggtatttaatggagctaaagtttatttttaaacgggaactagttcagttttccgaactaactaaactttttgtggaatactatcttttgataccagcagaatattaagtttctttttattaacctaaatgattaataagccaatgtttaccatggagatactgtttagggacataatgagtttttcacagttcagtgttagaaacaaatcataattcagtaaactaagaactattttagaagtttgttttgaagtggtaaagaagggattaaaggcctggcgcggtgggtcattc

SEQ ID NO: 331629 - DNA, 552 bp, Homo Sapiens
cttgcacacagcaacagagaactgtcagatccagaacaccgcttgccattttggttgagaaaccctgcttaaggaccataaacacagtacttggtgaaagacattgaacccaattttaccttctgtacctccaacaccgtactgggccaccataaatggggaaaacacagcaaactcctcagctcgtgcggcgatgtggctgtacatcctttcaaccaggcgtgcacacttttaggaccgtaggcaaggtcatctatggcttcctacagacaacaaagtgtttcccaaccaattagttcaaaaacagcacattttaactcttctatgttagacttttaatatgggtgaaaattatctcaagtgttacatgttttcccagactctttaattggcttattttgcagacgagaataagggagaacagatatgtccaaacagttatctacacaacaaagggaaggacactttaaaaaactcaagagtgctcgggtgtttttaagagtctaaccagaaaagtaatcaagatttttaggatgaaatctaggattactt

SEQ ID NO: 331630 - DNA, 521 bp, Homo Sapiens
  misc_feature (356)..(448): n is a, c, g, or t
agcttcaaaatatttttgcaacctaccacatgaaagccaggtagttttaaagaccactaagaataaaaatagatctggaagtttggcgcaaggctgagttgagtctttaggtaccaaaatgatctaagtcattggtactgtagcatgggatctagcagataacagggtttgtgaaaagctgtgtaatatgacggaatgtgtttgggctttggaatcaagctggattcaaatgttcgaactgccactttcttaagggaccctggccagttaatttaagttccctcatcacagcgttctcatctacttcacagggtttagttagagtgtgtaaagtaggccaggtgtggtcgcccatnnnnnnnnnnnnnnnnnnnnnnnnnnnnnnnnnnnnnnnnnnnnnnnnnnnnnnnnnnnnnnnnnnnnnnnnnnnnnnnnnnnnnnnnnnnnntaaccaggcatagtggtgtgcgcctgtaatcccagctactcaggaatcttaagacacgagaatcgcttgaact

SEQ ID NO: 331631 - DNA, 367 bp, Homo Sapiens
  misc_feature (65)..(65): n is a, c, g, or t
  misc_feature (79)..(79): n is a, c, g, or t
tcataatcgaaaagtgataaaggtttttgcatatgccacaattaacaccaccccacaagcacaanaaaagttaggatgnaaaatgttcttccaggaatatggtggaataattgtggccctattgaaaaattcataattgaaaattggagtattgtagacagcattcttgaatcacatgtttgtttctgtgtgtaatactgatgactgtcttaaaatttctaacttccaaataaatcatactccactggattataagggcttcaagtgtgggggctgtctcactttcataagcccagtgtcttgcgcattgtctgaaacacgagtagatgttttgataaacgtttgggccaggcttgggggcttacac

SEQ ID NO: 331632 - DNA, 529 bp, Homo Sapiens
  misc_feature (441)..(441): n is a, c, g, or t
  misc_feature (455)..(455): n is a, c, g, or t
  misc_feature (499)..(499): n is a, c, g, or t
taattggccaaacttcctagttccttttcagtagtactttagcactgaggcttgagacttgtggaagtggtgtttcctattgtgtgatgttaacttgatgccaaatggtcactaagtctcaacgaactagaagtttgtaaagtactgcagcaacgaaaacagcaattaaaaatagaggacctgcacatgcagcaaaatctacagtggtgatgaagattagtcagcagctggtaaagtcattggctcagtgactcctggttcactgtggcaactaaacatttaaataattggctattctacttgtaaacagaaaatcacataagccaaaaggagataacaattatgtctatgtagtgtgacgagaatttcaatagatgacaatttgcaaatatggccatccaaacaccctccgggcattttgatttgtattggcctatatgnctttgttttttggnccaaaccaaaggtaaaagtcctgtttgggggccttggggcattnttgggctttgctaggggtgaggtaccccag

SEQ ID NO: 331633 - DNA, 720 bp, Homo Sapiens
  misc_feature (644)..(644): n is a, c, g, or t
  misc_feature (668)..(668): n is a, c, g, or t
  misc_feature (670)..(670): n is a, c, g, or t
  misc_feature (690)..(690): n is a, c, g, or t
aagttttgccactaactttaatgtatcattaggcaaattatcctctctgagccaaagaagggtagtgggattacgggatctccaaggatcgttcttcttaacattgtctgatggcataattgtcttattaagatttctagggagaaatacaaagttaaaaataaaatcatataggttaaaattatgtaaacatctggcctagagcctcttgattcaactcacataactaaccagaccatgggggccaacaggtcaaaggacactatgtaaaagacatgacttagacacatggagtgagaggagcaacacaggctcccatgggtggggactgagctggaaggtcacagtaatgagtgaactcccccttgggcacacttagtatgatgagtaaagcttcccttgtgacttttagagaatggatcatgggaacacctttataagaagatcccagacagaagagcagagccccttgtggtgtgcatagctttaggggaatcagggagcccctcctaccactatactctccaaaccatgtagaaccaaagatggttacctctttctcaaatggtgttgttcaggataaatggttgatctttagattttggcttttgcgtgctaagagggcttgtggtatacaaaccatntctgcagggaaagggttgttgtgnanagataagctggagggacttngtgtcccatccctgcttcaggcagatcccc

SEQ ID NO: 331634 - DNA, 457 bp, Homo Sapiens
  misc_feature (28)..(28): n is a, c, g, or t
  misc_feature (46)..(46): n is a, c, g, or t
cccaaactcccggttcttccagtccttngcctattgggaaatgggntcgtaccagccagggaggtgagcagcgggcccagtgagcattaccgcctaagcttcggcctcctgtcagatccagcggccagcggttagattctccataggagtgtgaaccttattgtgaactgcacatgcaagggatccaggttatgcactcccttatgagaatcctaatgccctgatgatctgaggtggaaccgtttcatccccaaaaccatctccccctactccccgcagtctgtggataaattgtcttccacgaaaactggtcccctggtgccaaaaaggtggggaattactgatcttatggactagattggtcatatgtccatttcaaaactagttacgaccaacagagttactattgccttaaaaaaaatcaggccatctgtaggtggatagtgtcgagaaattt

SEQ ID NO: 331635 - DNA, 451 bp, Homo Sapiens
  misc_feature (438)..(438): n is a, c, g, or t
tataagtaatgtacattttatttaagtcatgtgatggattttcacagaatacatatgcccagggaaccagcaccagattacacaacagaactggatcagctcccagaagctctcccctcgtcccctcccaaccctaagggcgatcactatcttgactttggtgcactataaattagttttgtctggttctgaacgtaatacacctggaaccatctagtatgtactgttgcatttggcttctgtcactcaagatttcatcatgtgacttgtctatgttgctgtgtgtagccgggcatgtcaatcccgttgctgtgtctatgtgcatgggtaggtgagtaggggcatcattcattttcccattctgttggatggggttatttccagtttgggggctgttatggaaaggggctctggaacattcccatgcaccctcttgangctcacacctaca

SEQ ID NO: 331636 - DNA, 371 bp, Homo Sapiens
  misc_feature (28)..(28): n is a, c, g, or t
ctttatttattttcagcctggctcaaanagcgtttgaggtagctgcttacaggaatgcatgcaataaggattttttaagataataagttttcgaagtcagcataaggggaaattgttataaaatagaataagaaaatgagtacatgtgtgtgaaagaaagagagagagaaataactgtaagaatacaggagggctagcttaaaattagctggagtagcatcctactgcaacctttaaattttaagagttttggagaatatcttcctttttggcctattcatttccccaaaatccactgttatagatgaattcacacataactgtcatatcacaactgctcattgatacagaatgaaccaaaaaatgtaaaa

SEQ ID NO: 331637 - DNA, 431 bp, Homo Sapiens
acattttagagttgtttacttttattaataaaaagttagatcacttatatatatatacattgaaaaaaactattattgtccctttcctggtgaaaaggagtatacacaacagacctttgtgatattctgcaacaatgacccatattgctgtggaattctcactttttagtagaacctttaaaaactcaagtgagctgtacaacgccccgattgctttaactccagtgaaccacggaggtataaagacgctagagttctttgtaattcttcagtgccaaaaataataaagttggaaacttggattcctgtttgactctactgtattaagtgatcagaataaaattactgtaaggctaatcttcaaccacttcatggttttcattcttgctttctatagtgaacatctgttgtttccacttgctctaaacccc

SEQ ID NO: 331638 - DNA, 433 bp, Homo Sapiens
  misc_feature (323)..(323): n is a, c, g, or t
  misc_feature (325)..(325): n is a, c, g, or t
caatacacactgatccaaaacaacagctatgatcaggtgatatgtaataatgggaaaatcctccttggaagttatgccaaatatgaactatcctaaaaggaattcaatctgataagaaatagccaatcattcactcattcacactttataaagcctgtcagctaccaatggcaatggacataattttacaggcacaataatttataaacacattaataattttagggaccattggctacgggttccaccttgaaaacagatgcccagtgagcactagaaaaggcaaagcgtaaactccacatggtttggccgtgcgtatgctngngatcgactccaatggcctcttccaactctgctatcctgtgaaaaatattttcaaattttaagtcagttcactttcaaactccagttcagttcactgtgtttttggtgt

SEQ ID NO: 331639 - DNA, 629 bp, Homo Sapiens
tatggttattcaatatattcatttatttgacaattatttattcatttgacaattattcaatgtttactgcataagcaaaaaactgaataagacggttttctgcttttataaaacttacagttaagtagaagggacactgcataagaagtaacatgggagaaggctcaagtgttgacaactgtgatgaagagagatggaggtccagaaggaaattcaactgtggcgagaggcaactaaaaggttcctgcagtccaggagtcagcaacctatggctcattaagctattcaggatagagacagctgtggcctcatatggctagtgagacaacttccaacagagtttagtcaacaatgataagaagaacagtttcactacaggaagagctactgcgcaactgcctggcagtcagccagggctttggctgaccaggaggtatctctggccatcattaaataggactgagactgccaacaccaccttatgtccactgtgcactgctacagagttgggtggtaagtacttgagggcatgtgggaacattcagctggatgaataccttaaaggctgccgatctcactctgggcagctgtgatattgtgaaatatatagttggtcttctgtgccgaaa

SEQ ID NO: 331640 - DNA, 538 bp, Homo Sapiens
acaggccagacatgtatgagagtaatgagtgcctggtgacagctcactagcctgattcccttacgacttcaagaccagtgcccttgggaagcagttcacagcgtttcatgtaggacacagagctagaaggggccgttctattaccttggatggggtgttgcttcttgccctggtgttggtttgcagttttgatggggttggtgatcgagggcacaccatttcaggtctgtttggaacaaagcccatctcactattaggaggaggaagtgttgagccagttgcctcgagaaggaccacctagtcatcccagggccaccccatgcctcagcactgtgggaaccagaggccagaagccagggggagcatatacaccagggcacctcagccaggcctgccccgcccagcctggtgtcaagttctccacttgaagaggctttgaaactaggcagaacgatggctctgcccttagaggagagccagcctttctgggactttattagctaatgaagaaccctttatatataagatgaaaaaaaag

SEQ ID NO: 331641 - DNA, 167 bp, Homo Sapiens
agtgattaatcttatattgttagcttatgtacattttcttgatgaagtcttcagtttttcagtaatgccattctcttaacaaggcagaaatttggtgtggcttaacaataaaattctctattcttattcttccttggtaatgtggtcaacaattctagttttctctt

SEQ ID NO: 331642 - DNA, 473 bp, Homo Sapiens
tttgatcttcagaaaagtctggctcttgtggaggaatgatgttttcaatactgataccaacatacaccaagcgttcttttcttcgttcggcacgctctttcttctttaaggcaacatccaaatcctgcaactgttcctctaatttttcacagagcagtttatgttggcaaggtgggcagaaccattctccatctgggatgatcatcagaggagggcgaaaggcaggcagtatggtatccactatcgcaagagtcacacagaagaattagctcaggatggtttggaaggccacattttttgcatggttcatcatcatctgctaggatggcttcttcactttccttttcttcctcctcttctgaagctgcagatgatttttcactgccagacccttcactttcatcattgctggaatatttccatctgccacgtgtccgagaaccagtccatcgaactttgcctttgggttttac

SEQ ID NO: 331643 - DNA, 462 bp, Homo Sapiens
  misc_feature (29)..(29): n is a, c, g, or t
actttgcatctgccccaatctcctcttgnttagtgctcctctgtgccccatggagacacaatgcatttgtctacatttttcttcttggaagtggtaatttttttgctttctctgctactgagcctgttactgacagtggtcttggggttataaaatctcagattagtgttgccagcagtctgaatgttgtgactgtgattgggcagggtgattatttcagtggcaattttgtcacaaataaggaaatacacagggtatacaggtcttatttgtagttgatgcaattaacttacacaagtttatttactctctctctcggaatagtgtggaaaatcctgcaaacaaaagaaggagtaccctcatcacagtgcttaatatatcggaaattgaaagtagattttataaacatccatttacctgttttgccaagaatacacatggtatagatgcagcatatatcca

SEQ ID NO: 331644 - DNA, 512 bp, Homo Sapiens
  misc_feature (44)..(44): n is a, c, g, or t
cattccagacctgcctggcaaccccctatcctgagattttatanccccccaagccccactgtcagtaacaggcctcagtagccagagaaagcaaaaaaattccccactcccaagaagaaaaatgtagaccaaatgccattgtgttcctcccatggggcacagaggagacacctaaacaagaggagattggggcagatgacaaagtgctttgcaggtgttgtgaaggagaggtcatgggaagcccaggagatccttgtcccatagatgagcagtaggaaaccagtagaggctttcgagagcagtggattgcctgattcttgagctcattaatgagtctcttctaagctacttgaggaatatgaagaataatgaaagataattgcttcgttgaaatgttgcaacatgtataacgtaagagaaaggcttctaagtggtctgtaatttgcaccacaatgacaagtattttttaccttaaatgtacaagatcttataaattctacttagcttagcaa

SEQ ID NO: 331645 - DNA, 438 bp, Homo Sapiens
  misc_feature (349)..(349): n is a, c, g, or t
  misc_feature (365)..(365): n is a, c, g, or t
  misc_feature (370)..(370): n is a, c, g, or t
  misc_feature (393)..(393): n is a, c, g, or t
  misc_feature (400)..(400): n is a, c, g, or t
  misc_feature (405)..(405): n is a, c, g, or t
  misc_feature (428)..(428): n is a, c, g, or t
ggatatatgctgcatctataccatgtgtattcttggcaaaacaggtaaatggatgtttataaaatctactttcaatttccgatatattaagcactgtgatgagggtactccttcttttgtttgcaggattttccacactattcgagagagagagtaaataaacttgtgtaagttaattgcatcaactacaaataagacctgtataccctgtgtatttccttatttgtgacaaaattgccactggaaataatcaccctgcccaattcacagtcacaacatttcaggactggctgggccaacacttattctggggatttttattaacccccaggaccactgtccggtaacnggggttcagtaggccnggggnaggccaaaaaaattacccacttncccgggnggggnaaattgtagggggccaatgggcntggtggtttt

SEQ ID NO: 331646 - DNA, 557 bp, Homo Sapiens
  misc_feature (428)..(428): n is a, c, g, or t
aaacagcttctttcttatgataggtcttgcaaaagagcaagctgtattattaagagctgactatgaaagtaggaaagcctggggttgagtgcaggctttcacacttcctaatcttgtgatttcctgccaagctacctaactactctaagcattgattttctcatctataaaatgggggtaacaccagccctccatggttattgaatattacataaaacaaagtcatggaatgtgagggcgatctggctgtgacatctgtcaccccattaatcgccagggttgattcggctgatctggctggctaagtggctgtccccttcctccctcaccactccatgttcatgcctcccaaagctgtgttctcagtcaaagaggacaaccatctccactagaagaggaccagtctttggtcaagggtatacgagtantgcgcttccctgctggaacctccagacaagctctcaagtccatttgtaggagaacatagggtagtcaagcttccaagattccagacacatccaaatgaagtgctgcatgtggcagtctgcctttcttaa

SEQ ID NO: 331647 - DNA, 493 bp, Homo Sapiens
  misc_feature (113)..(113): n is a, c, g, or t
  misc_feature (164)..(173): n is a, c, g, or t
  misc_feature (289)..(432): n is a, c, g, or t
agtagaaacaggcctttgccatgctggccagactggtcttgaattccagtcctcaagagatctacccacctgggtctcccaaagtgcgagtattacaggtgtgagccaccagnccaagccatgttttcttatcattaataactgatacgaggcagaggaaagannnnnnnnnncagtatgttatttatagaaactgtatagtgcatatagtattttgaatatggtgattttcctttattactataaacactgtcttaaaactgtatttaatgtcttttttcctcattcnnnnnnnnnnnnnnnnnnnnnnnnnnnnnnnnnnnnnnnnnnnnnnnnnnnnnnnnnnnnnnnnnnnnnnnnnnnnnnnnnnnnnnnnnnnnnnnnnnnnnnnnnnnnnnnnnnnnnnnnnnnnnnnnnnnnnnnnnnnnnnnnttggtgtctatagagacaaggtctttccacgttcccagggctggaaagaccttgtctctat

SEQ ID NO: 331648 - DNA, 421 bp, Homo Sapiens
agtgttttgccacatttaagatgctcaggtgtgtatctatggaataaatggaatgagtgaaattatgtatagttttcttcttaattgtgatgctggattacctggacatcccctacctctggtgactacaaatgaatcctcaggcaatgattgtgcaaggctagtgtctgccattgccagggcgtccccttagggtcaaatctatgaaccacactcctgaagcatatacttccagccagctgagcaaattctaactcaaggagagccatctagattaacccatttaaaaatccctttggaacaatgcatttactctgccaaagtcactactattataatgaaaaaatattcaatgtgtatttactttgcattttgtgacataatccatcaaacttaagtcacccacagcatatgaaaatat

SEQ ID NO: 331649 - DNA, 439 bp, Homo Sapiens
  misc_feature (265)..(325): n is a, c, g, or t
  misc_feature (391)..(391): n is a, c, g, or t
  misc_feature (427)..(427): n is a, c, g, or t
caaatcttttctggctttattctcaaagaacagtcaagggaggaaggcatctgtttaataaccagcaaaacagaggctaacgcaaaggctttctcattcattgcctcatttgatcatcaccaaccacgaatcaggtgaggcaaggatcactccggctattttatagatgagcaaactgaggcttggggaattggggaatgtgcccaaacttcaacacaggtgttctgactcctagttcagtaagctttcttttctctataggcgnnnnnnnnnnnnnnnnnnnnnnnnnnnnnnnnnnnnnnnnnnnnnnnnnnnnnnnnnnnnnaagtatgacccctttctaccattctgtgccctaaaatattgggctttttttccttgggtactaatnggcagaaaaaaatggactattacaatttaaattcangaaaccccaagg

SEQ ID NO: 331650 - DNA, 168 bp, Homo Sapiens
acttgttatttgatatgtaaatgtatctatttctctatatagatatatatttaaatgaccagatatgtatatctggtgctacagggacattgttttgttgataaatatatatgtctgactatacagggacatagtttagagctttttgaataatcattcattttcccg

SEQ ID NO: 331651 - DNA, 368 bp, Homo Sapiens
  misc_feature (35)..(35): n is a, c, g, or t
ttttgccaaaggaggaaatttggaaggagaatggnaattaagtttcaaaaaaaacgcaccacaaattcaggatactgggtattggtgtctgttctttttgtggggaagcttccctcggggtcttctctttgttggcaggcatcttcagggatccggtctgcgctttaatgccccgcgccctatggtgggaggacggtgcatacgtttctgtcagggccagagagcacaggaggcttacttagcagagaccctgacctctcaccccaacccgattccaactgcccagagctactggtacctctttagaaaaatgttacggagaaaacatacactaagaaggtgcagcgggcagaaggtgctctctccaa

SEQ ID NO: 331652 - DNA, 758 bp, Homo Sapiens
ggcctcatatttctatgaaccatttagtgatactcccgcttcctgcatgccacacactgtgctgggaattgctcatgggttgtcctgtttcatcttctccgtagccctgtgagatcggcaatattagtccccctacagccaaggaaactgcccagagccacacaactcttgaggggcgaggagggcttgaacctgagtctgcccagctccagaactgagcttgcagccattaagccacagctgtctcctgcatgtctgagcaaagaaaggcctttacacagcatcaccctgtgccatcccatgcaccgtgggactcagctaaaggacttgtgccaaagagggggctcctgagttggatttaggccaaaaggggccagaattcgtttggatttttagagaaaatctctggagagtttctttttgattcatagaattccttttagatttctttccagcataccaactagctttagtagtgctgctacaaccagctcttataagtaagagtgaaaaagtattcttttcttctttaaaaaataagtttttcttgcttatagttaattctagaaaggcaatactaaaggtatatatttttttcaaaatgctattttttactgcacttgataattatcctgacagctctgatctctgtaatagattcactcttcagctctgggcagaaccagaggcagggttcacaccaaatttgtaaataccatatgtgggtctggtgtccaggaacttttttctttctgtta

SEQ ID NO: 331653 - DNA, 377 bp, Homo Sapiens
agatttttgcagttcctaattctttgacccttgttgccacttggggggaagtcctggaaagccagggacaaaacttcctgcaaagaaatgatgtaaaacatgttttgttcaacgtggctgaaaagcatttccagcatgggtccagttggagctccttcgtgaatctagatttgactgggttaagagaagctggtgatgccaaggctggaaaccttgtagacctgtagatctatcctgcctgaacttaggagagcagaggatagagagatttgaagcgcactacgtttggcctacaggatgcagttcttggcatgcttaaaattttgccttaacagtttccctttttatggggaagtactgggctttggtgcatttgt

SEQ ID NO: 331654 - DNA, 471 bp, Homo Sapiens
  misc_feature (11)..(11): n is a, c, g, or t
  misc_feature (134)..(134): n is a, c, g, or t
  misc_feature (382)..(391): n is a, c, g, or t
ggcggttaagnttaaggggaccagtggccttctgctgccccttactgaatctccccttagtggattagtgttttaaaccgaggctctacaacagccccaagatgtccactttgttgttgggagccaggggagcnaggtgtagatggggagtgtgctggggctggcagaattagatcatgattcaggagggtagcatgggggaaaatgtagtcatcagagcctgtgtctgttactcactggacatcactgaacatattccatgtgttctggtggcatctttgaactatttgctcagataactctaatcaaattgtaatgtagaaaactggcttgtcaagacagtttagagatctgttctttagcatctgttgagtataatttnnnnnnnnnntccaagttggaaatgacctgtaaacccatctaattaggcacaataagatattaggttatttttaattatcccaaacttta

SEQ ID NO: 331655 - DNA, 488 bp, Homo Sapiens
  misc_feature (463)..(463): n is a, c, g, or t
ttcatgtgcccatcggagggtacatatcagtctattttttattataaacaaataaaagattaaatcacacatcaaagacctagactccttctctgagacaccaaaggcctaacaaccagtaagataattttagacaattctattgaaagttattcaaaaggcatcaagtcaaaataacgaaactgccccagtaaaaaggggctgggcctgggggcaggaaaggcaagcatgagggcccagtagaggtggacctgtccctatggtaactgagctcggctttaaggccaggcattggggatcagctgctaggagcccacctgtgttcttcctgaggggtgggggcaccttagtcactgcctagaggcacatggtcccccaccagcctacagcatggaaacacccaatgtctgctctagcctattcttaacccacaactgggatgggagctggggacagggagaangggtcatggggccaggagcctattt

SEQ ID NO: 331656 - DNA, 392 bp, Homo Sapiens
tgaacagggctgcaatctactaaagggtgtactatagtttttcttttgcaacataatttttctgtctataatcacccccatttctaccaaagataatcgagagtaagactaatttgtttgcgaaaataagtttcgtctcgattaaacttcacctgattatttgtatataagtacagcaagaataaccacacagttctttttaaatttgatttgctggaaattttgacaaacaatctcagattatacttttaaaaacctctcatcactaggaagccaaaccaaggccgacatcagactttgtctactttgtctatggttatctagtgtcttgaggttcctaggcctgccaggaagtgacaactttttactcactcactgtaatgctgtgtgta

SEQ ID NO: 331657 - DNA, 478 bp, Homo Sapiens
  misc_feature (429)..(429): n is a, c, g, or t
taatttttacagctgtctataacaaaactttttaggaaagtaccacaaatatgttaaacagaagaagcaaatctcaaataatgtgcaaaagctgtgagtttcttcttacataaaactggtacctaagcaagtgagggttcattttatttttcactcaccaatccccatatcattatacagtaacaccatacagccaaaacggccatgatattcctcccttctcagccaaaattgggcaagagagaatgacccttgtaggggaaaagaaacctctacgataaactgaaatgccaccatcagggtttgttgaaactgtaggaacagggtctacgactcactttaagctggctaatggagtttctatgattccagatgggagtaagttccaaagtaaggaagtgaagggggctggacctggtctgtgaatcnggaatgagcccacgtcctccaggaaggttttttatagcctcctctccca

SEQ ID NO: 331658 - DNA, 444 bp, Homo Sapiens
  misc_feature (257)..(257): n is a, c, g, or t
  misc_feature (310)..(310): n is a, c, g, or t
gaacaggcagaaactctttaatcaggctttttttccaactctaaaacaaaatcccattttttccttaaatttagttcctcaggaacagagaactttgcaatgatgatctcaactctgcatcatctggtgactcctgattctgcaggactaagacatttcccaagagttctgctgcatcagccagtgaggacaagagttcttcagtgcggttcagctcaaggacacctaggcttccccagcagggggcttgcttgcanggtctgacaaaccacagagccgttgagcagatggcctgggactcccagacctnggcagagggttttattaagggcccgcctgggcctggcaccgtttcatccaagtaacccttgaccccagcactcatcttccctgggcattctctggttaatccaccagctcctctgcacacctcagcgtctactt

SEQ ID NO: 331659 - DNA, 436 bp, Homo Sapiens
ttcattttaacaacatttattacaaatcacattttataaacactaagataaattacatataaaagctagacataaatataaagaagcaaaacaaaaacagcagtactattaatgcaagagaaataagctaatataatatttaaacacatataacttaataaaattaccaatttttcattgttaataatttttcataaattcaaaagctattcagaaatgaaatgtaatacattctgattactatcaaaggttagaattatagaaacaaccatagcactacttattttttaaaatccgtttcaaacattccagaagccaaatgactgtccttaaagacaaattaaatgggtaaaaggtcttatctaacagaagaatacaaaattttaagctttggttaatagataataagtgtagtggaaatttttaaattaacatc

SEQ ID NO: 331660 - DNA, 482 bp, Homo Sapiens
gtatcactgctgaccttttcaaaccccagagctatggaaatcatctgttcatagaaggagaagtaaacacttgccttgcagccaaaaaataggcagaagactgccagaaagtgaagtctgtgactaagctagctgaccttgcataccgtatgctgacatccactcatgctctggtgctgggcgtcctacatctgactcctttgatgtcaacaacccgagtcctttttagatcatggaaggttattgtaagcagtgtttttgtacttgagacctaaactgtaatgcttcatacacatattccagaaacagttactttttagacatgtgatagaatattaagcaactatctttggtctcccactatgagtggactgggagatacattatatatctgattgcatgattttattaaaacagtagcaagaataatgtataatagcattcactgagttcttattacaagccaggcactatgctaagtg

SEQ ID NO: 331661 - DNA, 508 bp, Homo Sapiens
ctattatctcatttatttcccctccaatctctgttatttattttattctgcttgctttaggtttagttttctcttctttttctactttcctaaaatgtaaggttaggttattgatttgagatttcttattttctattaaataatataaatgtttatagttataaatttccctgtaagcattgctatagctgcctctcataagtttggatatgctgttttcattttcattcatctcaaaatattttctactctcctttgaagtatcttctttgattctttggttatttagaagtatattgtataatttccacctatctgtgaattcccaacatttccttttgttatttataatttcattccattgtggtcagagaaccatactttatacaattccttaaatgcctgtaccaaatgagtttcttatactttactgaggggctctgtgtatgagtgtgagggccacaggccttacatgctcaggcatgcagtttataactctgccttaggc

SEQ ID NO: 331662 - DNA, 405 bp, Homo Sapiens
  misc_feature (222)..(222): n is a, c, g, or t
  misc_feature (315)..(315): n is a, c, g, or t
  misc_feature (329)..(329): n is a, c, g, or t
  misc_feature (347)..(347): n is a, c, g, or t
  misc_feature (382)..(382): n is a, c, g, or t
tcctaaaatgtaaggttaggttattgatttgagatttcttattttctattaaataatataaatgtttatagttataaatttccctgtaagcattgctatagctgcctctcataagtttggatatgctgttttcattttcattcatctcaaaatattttctactctcctttgaagtatcttctttgattctttgggttatttaggatgtatattgtataattnccaccctatctgtggaattccccaacatttcccttttggttatttataatttcattcccattgtgggtcagaggaaccatactttataccaantcccttaaatgccnggtacccaaatgaggttnccttatactttactgagggggctctggggtatggngtgtgaggggccaccggggtaac

SEQ ID NO: 331663 - DNA, 540 bp, Homo Sapiens
ccctgcatctcaccaaccaataactactagtaaagatttaatcagatgctatagatgccaaagttttattctcacccatttcgtactcacttacgaaagggtgggtcaagaggaattaaggaaatccaaaggtactcccagtttaagaagacagatggcatattaagagcactaatacttgagatttattatttaaacttaattttatgaaggtattttctagccctgttttactagaattaggatattaagtgatgtcaccattttcagcattttgactgagggttaatgatggattggaaattctagtagagacaaaggaactaatcatcaagatacgggttacagagtaagtgagctggaggccatctttttttcctgggaattataacaattgtttacataaacagtaggttaggtgtgcacactttatgtataatggaccctgacgatggaacccttccttgctgtttattcaagggccagagctgctgaaaccattattcttacttcccctgtctgcctctctcaaggagacgg

SEQ ID NO: 331664 - DNA, 313 bp, Homo Sapiens
ttgacaacaatgaaatagtttattttcttcaaatattttaaggtacgaacgtcagaaataaaaatgcagcatttaaccctggaacctcaaatatcactgattatactcaaaggagcagaggcattgttttccatctgattcctcagttcctcacacacacaaccatccccctcaccccatgatctgaaaagcgaaatgaggaattcaccctaaaattagtgtggagaaaacaagcaaattaggttatttactaagtgactacataaaaaactgagtatgagaccaagaaaaatagattctgtagttttagttt

SEQ ID NO: 331665 - DNA, 901 bp, Homo Sapiens
  misc_feature (857)..(857): n is a, c, g, or t
  misc_feature (860)..(860): n is a, c, g, or t
ttatgtttttatttatttttaatctttggcagcatagaactgattgtggtcctccgatgcatttctggtgtcgagaacttcctttctcaacctccccttcccccatagccatccccacaagctgtcccatcaaggaatatttcaggtgtaaactgaatatgccacgaggcctcctcttcatgaagtgcttggttggcctacgtatgggtggcaggctggacacagctgaatcgtctttctgggtcaccctgtaactcaagtcccctttcccgttctctcccaacgctacttatccgcaggaatttggatgccggctggcccccctgatggttcctggcctaggggctgtcatggcagagggaagccaccaaggtgccattgaggattggtgtctggctctctatgggcaagagcgccaggggacacacagtgggaccggaaccttccagaatgtctcctcagtcaggttttcaagggggagggaatgcggagacaggagaaaaaaagtgctgagggccaaagctggtgcagggtgacggtgcgtctgggtaaggcaaatgagaggcagtgaggtgatctcagaatggcgttgaggcggtcagattaggccgggctggctcacacgagggtcccgggcttggctttttcctgcccgtaccactggacatcagctagttctggatagagggaggaatccaggaaacagctatcattgtagctcccagtctgccaggttaggatgtggtgggggctgcttgggggggtggctccaatttcacttgacggtgtcgagcttctctggctttgaggtaaggcagctgacgtggccttgcacatctggggcatcctggtgaccnctntgtgcgccacgaaggtgctctgggaggaggtgctgtactgc

SEQ ID NO: 331666 - DNA, 757 bp, Homo Sapiens
  misc_feature (541)..(541): n is a, c, g, or t
  misc_feature (558)..(559): n is a, c, g, or t
  misc_feature (561)..(561): n is a, c, g, or t
  misc_feature (611)..(611): n is a, c, g, or t
  misc_feature (700)..(700): n is a, c, g, or t
taaattatttttattttttgatgaaaacaagaaatacggtagtgacactttatttttccttcaagcacatgggagaagacaaaagtactaaatgatcattgagtttgacagagaaattctactggtacttacactgcttaggaacataaatgtcaagtacattactagggcaagaaatatcaagtaagacaacagagtcgtatttttctttttgaggttattttcacaagacatagctataatttgtaaaatattcagactattgaaagatcacattcaaattatatttctaagaatagagccatatatgaacagagagcaaaacaagctaatacattaatgaatattcactgaattcttcatactgcacaggacacaaatttggtatttttgcacatgttgtcaattataagcaaaaagcaggcctgtaaacatcaattttgtcataggctgaaacagagaaaggaaatggattttactcaaaaacagtgacataaggagcatataccattaatcttccacacatataaaggtcactccntaggataattgagagannanatcgacttacattttgtttacaagcatctactggtgaattcaaggacttnggaaaaattgaaggaaaatcttcctccaagcatgctatttaaaccccagcccctcttccctggagagcacctcaggggcctcccctccnacccctgatcctgcaggttctttcctgtgagcctttccaaacccacgccacagcagg

SEQ ID NO: 331667 - DNA, 481 bp, Homo Sapiens
  misc_feature (398)..(398): n is a, c, g, or t
  misc_feature (414)..(414): n is a, c, g, or t
ttaatagtaatacatctaataattcaaatttaaaaggtgtatttatgacaccacaataaagagcttttcaaagttaaccaaagacttacaagggtatatactgaaaactatctccccatccctgaccctagtttcccacacccccagaagcaaccaatagctaaaatatttctgaaatgtctatctgaatttttgatttctgagttcaagtaactagacattcctgtagtcagtatcttgttttatctttccattgtatgtatttacaaatatctgtatgtacatcctcccctctcctacctttctacacaaattgttagaatactttatgtgctttgaggtgggacttttatctttaatttattccagtgatcattccatttggagtaactaaagangctcctttaccattcnggtatagccacaggggacctccttggtatgggatggcaccttaatttataccctattttggtccatc

SEQ ID NO: 331668 - DNA, 485 bp, Homo Sapiens
  misc_feature (173)..(181): n is a, c, g, or t
aaaataataaattacaaaaaacaccaaccagatagaaagtccaaaagacaaaatgtaaaacacttgtattttgactgaccttcttccagatatttttgtacacttatattaacatatgtacacacatatattcacattaggacagcactgtacttgctaaactacattctgcnnnnnnnnncctgaggggaaactatattttttggacatactttaatgcaaataaagaactttccatcagtttttaatgggtcaagagtattccattgcatgtaccaatcataattttcttaactagtgtcctagtgatgggacacttgtttctagaagcattatttttaaaaaaggtggcaaatagtatccttatgaatcccttattttccttaggggtatatgcctcggaaatgagacaggctgtggggcaaaggctaatgcatatgttaaattttggtaaataggggtgtaccaatttcaccttcacacca

SEQ ID NO: 331669 - DNA, 514 bp, Homo Sapiens
tttatatttacaactctgtattttagacacacacacacaaagacttgaaggaaatataccacagtgttaacagtggttatttcttgggggagcagaactaaaagggttttgttttactagtgcttttttcactttttgaaatgttcatgaaaaatcaaaaacatgtcatgagttgtgtttccataagtatttggaaaattagtcttcttactttaatagcatctcacaggggacagtaggtgccgagagtaaagttggcaggaaggagtacagtgtgaaggcccagagaagtaccctgtgaggtcacagccgcctctgccccacgtttccaataagcctgcactatcttccagccctgcaagtcctgggccaccagtaaagttgtgaagtatccaggtgactctggggtgaccggctcccgttgtcatggcagttaggggtgggtgaagtcaggtgaggggcagatgactcagcttcaagccccaataacctgtattcctgagctgtgcatgcc

SEQ ID NO: 331670 - DNA, 654 bp, Homo Sapiens
  misc_feature (505)..(505): n is a, c, g, or t
cctgatggacatttcagaaatgttctattgatgtttctaacgcaacaagcctcatgatattatccttgtgttaacatcattgtgacatcctccacacacccaagtcaacttggacttatttttctgtctcctacaagcaatggctgctaagtcctgttgattctggctttgaaatgtctagagaataccctctcatgtagtcacttctatttttgttgccctagttcaggccgtactctctcttgcttgcctggaccatgacaagtagctgtctagttggtctcatgggctgctatcggatttcctctcaagagtacccttgaagttgccccagagtgctcttcctaaagaatgacttggtgatgtccctttcctactgaaaaaacttgtggtaagtcccaactgcctactgaatctgtttccaactttactcttcagcctcattttctgcaactccctgtcatctccccatgctgaaccccaagagacaactcacgattgctcngatgagatgtccaatttcattcctttgtgctgttgcttgggttgtttaatgcctagaaactttagcaagacaacatgcaaatattctgcagcttctctgtgccccctcacacctgcctgctccaagcgtcattcttcctttgcagttaa

SEQ ID NO: 331671 - DNA, 435 bp, Homo Sapiens
  misc_feature (20)..(20): n is a, c, g, or t
  misc_feature (225)..(225): n is a, c, g, or t
  misc_feature (247)..(247): n is a, c, g, or t
  misc_feature (413)..(413): n is a, c, g, or t
attaaagcctaaaggggggnccatgtgagaaccggggccgtggaaaaattggaaacaaattacggtttccaaaataccttttttgcctttccatgatgctgttttttcccttgggagccccggggttactctgaacttccaattattcatccaaattcacaaaacttaaaccattaccttaggaaaaaggcccaaccagcatcttttaggaaacttgaacggtcntctcggctctagcgtgtaaacnggtaggtctctaaccttcaaacgcacagcgggcactggaagcggtgattgtccaaaggcctgattgtcccacggatctcaaaaggagatctggtatttttgtgatttggttctcattaaattcctataccaagtaaaatgccagttcccatggcctaaattttatnttatatatatatatgctttttt

SEQ ID NO: 331672 - DNA, 682 bp, Homo Sapiens
  misc_feature (59)..(201): n is a, c, g, or t
  misc_feature (203)..(218): n is a, c, g, or t
  misc_feature (363)..(396): n is a, c, g, or t
  misc_feature (450)..(459): n is a, c, g, or t
  misc_feature (585)..(585): n is a, c, g, or t
ggcttaaacaacagaaatttacttctcttggttatggagtctggaaatccaagataagnnnnnnnnnnnnnnnnnnnnnnnnnnnnnnnnnnnnnnnnnnnnnnnnnnnnnnnnnnnnnnnnnnnnnnnnnnnnnnnnnnnnnnnnnnnnnnnnnnnnnnnnnnnnnnnnnnnnnnnnnnnnnnnnnnnnnnnnnnnnnnngnnnnnnnnnnnnnnnncctcaagtaaagaactatccagcggacattaccattaactgataaaatgatgaacactgacatcagcaacaagccaagaataatccacaatcatctctattattctgttattgttttagaggttctggctattagagtaagatgnnnnnnnnnnnnnnnnnnnnnnnnnnnnnnnnnnccttgcagatgatatgattgtattcttagaaaacctcatataccactaaaattnnnnnnnnnnttaggtgtgatatggctggtcaaaagactagtatatcagaatcaatggctttttctcccccatagtaccagtaatcacttagaaatggaagccaggcacagtgggatgtgccggtggtccgcgaanctccggagtatgaggcaggagaaatacttgagtttgaggatacttagctatgatcgtgtcactagcctgtgcgatatagcgaggctctgtctcttaa

SEQ ID NO: 331673 - DNA, 500 bp, Homo Sapiens
ttgcaatgtaaatcagtctttattgaaaacccataaacaatgaacaataaaaccaaaaaattcaacaaaagcattttagagaatatgatgcacaagaatataactgctacttattagcaaaattccttagggaggagaatttactgtaatgcatcctgtctatatactatgacgatgaccacatactggttttcctcttgtagtgctcaccattagcaaggcaagcaaaataaaaatttgtcagcatgttaagatacctcgtaagctcatgtcaggatattaaatgaaatgtcttataaagactaattctcataagcccaatgagcacatctctaggcatgactgcatgtggaaattaagtgactttgccaaaactcttacattacaccatcagaaacgtctcaaatccattccagttcaattcaagacatgagtgtgcacagcaaaacagagaatggagggtgtcactttcatacctacaccatgtgtttcagtcatcc

SEQ ID NO: 331674 - DNA, 413 bp, Homo Sapiens
  misc_feature (42)..(42): n is a, c, g, or t
  misc_feature (155)..(155): n is a, c, g, or t
  misc_feature (388)..(388): n is a, c, g, or t
aaaacacgttggtcaaggtggctcaaggctgtaaatccccancaccttgggaaggccaaatacggctggaatcgcttgaagcccctggaattcaagaccagctcgggcaacatggtgaaaagcccatctctactaggaacacaaaaatttttgcncgtgcggtggcacctggctatggtcctagcaactttggaggctgaggtgggaggatcccttgaacccaggagattgaagcttcagtgagggctgatcctgtcaccagctctcatgcctggccaacagaatgagacccatctttaatagaaatgaagaaaaaggaaacacatgcgtccctgggtcttggggacagggagagtcttaaggccaatttaacacgaaccttcaggangtccctgattgacgttgtgtcccat

SEQ ID NO: 331675 - DNA, 516 bp, Homo Sapiens
  misc_feature (114)..(114): n is a, c, g, or t
ctccccttttgtgaagactgaatgagataaatgaaaagctgtttgcagtatggtcatactaaaatgggagcagtcagtacccttccccccatttcccagccagagtggtgggcnaggtctagctagccccttgtacatacaccttgcagaatagtttatagtagtgagcatagctggtaaatgtacaataaaaaaagttcctgtttttcatttctacctgattgaatggagacacctatttaatgcaaatttcaataatgctctggatactaaactctgttcaagttagtaagagagctttgtagagttattgtgacacctgggttaagtatggctgactttgggttaagtatgaggtctaatcatcccagtctgtcctctagattttttgctgttttgttcaatataattatgtaaacaggtattctctatgtaaacatttgtgaaagttaaaataccaaagcagattaaatatagaactagactggatgcctacatcagtgttttagtgacagc

SEQ ID NO: 331676 - DNA, 510 bp, Homo Sapiens
tatcttgagacccttcactggaaaattttttccacacccaaaacaataaatctctgggtcaaaagtctaaaacgcttaggctggcaaccatcagatccttgcccatggtgtcctcgagcctactctcatgaaatggacaacagtacacgcatatggggccagttccacatatttggcaaccagaccagcatccaggacaacacaaagtatgtcgtttgttgttagagggcttgggacatttcactctttgccagcctcagcttaatccaggagacaaagattattttccttattatctctcctgcataggatctgcaatcagaactattgaacttctccattcagaccgccactcacacctatgggaaaagggtaatgtatcatcggcttagcaacagggaatactattcgtatgacggaaaatggggacaaaaggctttggtacataaaacattattccttccttggcctaaaaactcatcgccacctacattaaagctaatatgcctg

SEQ ID NO: 331677 - DNA, 391 bp, Homo Sapiens
tcggttttaatctgtgttttgagatttttttcaaatggaaagatattacagatagaaacacatcattctaggtttcaaaatcaccaaagtcagtgagaagaatgtacattcatttaaatgtaatcatttgtaaataaagaaatcttgaaaaggctgaacagttcaatcaaattgaagaattgatctagatttttcattattctttttaaataatgagtaagtgtagatatagtgtacatacaagttgacattctgattcattcaaaatagtcacatccctttgcttggttttggatgttccagagactaaaatttaataccattcataaacatagtattttccagtaaaaaggatttataggagccatggaaaaatccagaagattggctc

SEQ ID NO: 331678 - DNA, 553 bp, Homo Sapiens
  misc_feature (343)..(343): n is a, c, g, or t
  misc_feature (420)..(420): n is a, c, g, or t
  misc_feature (427)..(427): n is a, c, g, or t
  misc_feature (452)..(452): n is a, c, g, or t
  misc_feature (464)..(464): n is a, c, g, or t
  misc_feature (479)..(479): n is a, c, g, or t
  misc_feature (486)..(486): n is a, c, g, or t
  misc_feature (495)..(495): n is a, c, g, or t
  misc_feature (507)..(507): n is a, c, g, or t
  misc_feature (526)..(526): n is a, c, g, or t
gtttgaaaattaaagtttattaggatatattaatgtatgatattatagtattactcatcacatgtaagctttacatctgaagcaattcatgcttactgggagggaagtttgagtacttacttagcttttcctgctattcctaggtaaaggccctcctgtggtcattctgaacagaagagtgagcttactgcaaaccacaggctggacagtagagggtgcatatcctcactgagtggagctcagaaaagaattagggattctgcacacatttattccagactcagttcccactgttggtttttatattgagattattttaaaatcttttcgaaatataatttanttgccccttaagtatgggtggggtgttaagccaaatttaaaatgggtccgtgagggcacaggcattatacctaagcntgaaccnaatgaagccccggacatacccaccnggagccagtccnggtaagccccttatnaaggccnatgcccagncccaagggaacncaaattttaatgggggaanattcggacccacttagggggcctggta

SEQ ID NO: 331679 - DNA, 493 bp, Homo Sapiens
  misc_feature (353)..(353): n is a, c, g, or t
  misc_feature (449)..(449): n is a, c, g, or t
  misc_feature (467)..(467): n is a, c, g, or t
ttcaagtcactcaggtttaatgattccatcatttggacacataaacttctgttccatttaagtctgctcactgtagataatccaggtcacccagcctcccattaagatttaatcaaagttttctgcaccccaaaccctcacaaaacagacctctatgatgaaatcacagaaagatacatattagtccagttagtggccaaacattgggtctttagaggtccaaagacctctataaccaggtaacagtaggttggggaggaaaagaagggattaaaggaaactgaggttttctgaggaaccccctttcccagacttgccctgaataaggttgccttttcttaaaagagcagggnttaatctactttatggccaaggccccacttggggcaggaaagcacccccaacccgggggttaggcttgatcttttacccactttccctgttgaggngcttacagcaatcttttnggggatttttcttgcaggcaattttt

SEQ ID NO: 331680 - DNA, 511 bp, Homo Sapiens
cgtggattcttctttatattaaatatgttgtaacttattgttgttattcttttgaatgctcaaattgtcgagatttggccaatgcaatctttgttatttttttaactccacaatcgaggttaaactgagctatttttaatgcccagagtaatttctaatatttcccactcgccaacagggattgagaaagggactccagaagttgggggcttattcagacttcttaaaagtctaccttcttcctctgtactttcagcccaaagtgagacttttgagttgggaagagatacttctgaattaaactactaatcactgtcacccaattctaatcccaaccatctttattctaggcataccatactcactgccatgcttacccttcagttgggcacttttgtcctccttcctattggccttctggttcctacccaactgtccagtccataggcttcaatgacacctttttcccacacctgtggtagcgttggctgcctcctttacctactcaagt

SEQ ID NO: 331681 - DNA, 497 bp, Homo Sapiens
cgtcttcagtaattgctttattcaatgtaccttctttagcgtttcactaaaaatgtaattaatttccttcagtttatactatgtcatagtatttatttttaagcccttgtaaagtataaactttcaacctgtgagacggcaaagatctctaccaattgaaagctagaaatcactgtgatcacaattgatttagaaaattaaatgcactagagaccaggggtgtgcacagagacacaggccccccaccgaggcttgcatgctaacagagactgttggcttttctttcccagtcatgtcccgtctgcaggtcgcgtgtggagcatgtccagcacgtctatctgccaacgcacacccagtcttctcaatctgactgtaatctaatctgttgtgcttttgttggacttggcatgtttccatgaactgcactattataaactattaaaatgatagattgtggagaaagtaattattccaacacccatctgccatgcgatgtt

SEQ ID NO: 331682 - DNA, 372 bp, Homo Sapiens
tttttgcaggctagaaaataattttaatgcaaagtagaaagtatcaatccacctcatcactttccttgctctctctctgtcacctcctctttcctgtggctctgaggaggtgggagaagcaggcagtatttccacagcagctgtccatacaggaaagagtctcccctgttggtagcttgctcccagatctggggcaatgctagtgtcctttagatctagaagcagacatgaaacaataaaataatttacatgtggttcattgcctctactaattccatctcttcctccttgtagtcacagggcagctgcatcatccttggactcatggggacccaaagttgcttttaaagaaccttctctgctgagagactt

SEQ ID NO: 331683 - DNA, 466 bp, Homo Sapiens
ctcttccccaacctaggggattcgttttcctcccctgcagtagacatttgcgtgaaggttaatccacagttaggagttgcttaactcaagcctcagaaagcgtacactgcatctttaagaaatagtttacttgtgaatcagtaaacgtactagacaaagcagccattacttatgcattcctgcatatccagcaaggtgaaaataatggaataaaccatcatatacttcattatgatatcggtttacacttccagggtacacaaaaagaggccatttcatcaagctaattgcctgaaagtaaaagagagagaactttagctattagtctattatggggcttttttcttaatcacaaataggggccgtgtgtccctggggggatgtgtattctaatttacaattgaactacagatcagagcaatcaatcttgggcagcacttttacagtgtaattgctgcaacataac

SEQ ID NO: 331684 - DNA, 326 bp, Homo Sapiens
ccttattgtaccttccatttaaggtaaagaatatctaatactataatacaatattttgagagttctgcctaaaaatgttttggcttaaacaaaaaagttttggttatcctgaaagaacttaattttgtgagacaactcatttctctaataattctcaacaaagaacatgttagtataaatagctttaaaagtggtataatttgcttactatttagaaaaacacttctacccaataaatgaagaagaaagaaaaatccctgctttacagtttttagtcttatctagatccaattattagtttttaagttaatgtatttttggtgact

SEQ ID NO: 331685 - DNA, 442 bp, Homo Sapiens
aggttagaacttctgaagtttaattctacagcacttgtgagcatttatttctcttttgggtcacaaaacttggaatgggatttgggtatttgagtaatgggttaaacatatatattgattagttcaggaattgagtgactttaagatgcttatcagacacttttagagatcccagcaagaggcagattcggtttctggtttcatagagtttacagtcactgaacaagtctttaaaataagtagcaaattctaagttggggataggtgaggcttcttgggtagacaccctgtctgtgttcccggccaagacttgatgattctgatagatgtactggaaatgctggagaaagactcaggcaagactggtgtttttgctgctctctctagtttaccacactgggctttcagaattgccttggggaccagaatccagggccaccag

SEQ ID NO: 331686 - DNA, 217 bp, Homo Sapiens
ctttagtatgggtatctccatgcaatatttgggcatatttaaacctcattgtttatcagatagtcgaaattcaagtgcccatactgtgttttggtttgttttggctaaatctggcaaaatagtttataatttaaaaaatataattagtcagatgctaatcacttattcagagatgacttcaaccacccaggaaactgtccagatttcataatttagc

SEQ ID NO: 331687 - DNA, 416 bp, Homo Sapiens
gacttcagcagttaaattgtattttcctgttttaccaaacctttttaattatcgtttcttgctgtagaaaaatcacataaaatctgctctttgcttaacaaattacagggtcgcttctgatttgtgtgctcgaaatactagtcaccaagcagaaactgatgactgtgagaataggcgactaattaacaaacaaacaaaaaaagccctttctcaacattggattgaccgagtgaaagttgacaggggaaagacacctcgattcagccatctttctccaacaggttgtactgctgactgcacagtctcccctgaaggactccggtcgctgtagccttggagagcgaccagattcctcaccccactcaggaggagccagggcaagattagggtgcagagaaatcggtttcctccagcct

SEQ ID NO: 331688 - DNA, 246 bp, Homo Sapiens
  misc_feature (14)..(14): n is a, c, g, or t
cttattttgtaggnctggggttgatgaaaacctgttcatgagggcacaaaagactcttcccagtttattctatcactataaaatagaatttgatggatttcgaagtaagaaaattcttagaatagaaaataggatggtaaatctttaaatacatatgagtaattagaatatcataaggctagtacagataatattcttacaaaggcatccataaatagtgaagtggtagcacctattcccccatga

SEQ ID NO: 331689 - DNA, 573 bp, Homo Sapiens
  misc_feature (481)..(481): n is a, c, g, or t
  misc_feature (526)..(526): n is a, c, g, or t
ctttaaatagttcacatttattattgataacaataaaaaaatcttttaaagactatcagtattgtattaccaagtgaggtaatatgtttacaaaacatttacagaatttgatatgcaaataacaaatttaggaaggaaagtgaattaagacataatagagggagaatcaaagaatcattagtactaagaaatgggaaatgacagcagcgttttaaaagagtggcaaggtactaaaggtagaaacacggatgcaaactgcatactcaacccatagctgccccagaattcccttacaaggggagtgagattggattactcgggaggaaaccctgtaagcatttgtgcggtcatgtgctttgagctcttcaagatgcactacagtctttgggtataaaagaatgccactcccgaatcaacttaaaaagaacagatcttcagcctgggaagggggcagggggatggctgcaattccaacagttcnataaacatctctgggcacatgaggaccgttgagtgaagcatttcntggcagctgtcagccaaatcgccctctgggacccggggaaggggaag

SEQ ID NO: 331690 - DNA, 449 bp, Homo Sapiens
  misc_feature (161)..(161): n is a, c, g, or t
  misc_feature (169)..(169): n is a, c, g, or t
  misc_feature (177)..(177): n is a, c, g, or t
  misc_feature (190)..(190): n is a, c, g, or t
gcattttctaatatttgcatgtacacaatgagttatcttagggaggggatccaagtggaaacacaaaatttatttttgtgtgtatacacacatacacacatcccttatatacatagccttaaggtaattttataccgtatttttgataattttgtgcctgnaataaagnttggggancccggacccatcngaaagcaaaggtgtcactatctcagccacccatgtcaacaagagtcatcattcctgactcttaatctacatgctaacaatagggcaattgttttcttacatttattcatacattaaggtacttaacagtaaaaatatgacataccattaacactgaaaaaataatgtgtcaggacaactaagcagcatagtagcatcaccaggataccggtttcagctattaaaccaaaccaaccacagagccgggggtagtggctcat

SEQ ID NO: 331691 - DNA, 809 bp, Homo Sapiens
  misc_feature (172)..(190): n is a, c, g, or t
  misc_feature (285)..(313): n is a, c, g, or t
ttttaacaagatattaggaagtgctcggcattgttaggattttttttggccacgtggaaaaacacacatgatataaagcaaaggaaaataaggcagtctgcaaatggatctgcttagaactgccattacgtaaaacagtcctcagctcatactcgacttggagagaaatccnnnnnnnnnnnnnnnnnnngtaagaactttttagctgatgagtaacatttgtggctgaatccttttctcatttctgttaaatattatgatggtgtttgtgcagaacaataaaannnnnnnnnnnnnnnnnnnnnnnnnnnnnattttagaagaactggaaatgctcttttacagcatctcagcactaaagccacactaagctgctataaaatccaaagtggtccctgaccatggagagacactgtggacactgggtttcaccgcgtgtgttccaagggggtatccagtctaaagcaaatggggttttgccagactttaacttataggcaagaggaaaaatacacaaatcatcctctcaaaccagatgttccaggactcaccacaaagctcccttacagaggtctgcagtgaaaccaacccctcgctctcacataatcatcccaccaaactcctgccagcttctagggttaaggataaagacccttttccccttgaaagcagcgaggctgagctgcagtagtaaatgggagcacagagcagagatcacacatgcactggcacctgtggcccaggtgcgccctggaggcatgttttgtttggctcacacaatgttttagaagttggaacatttcacttag

SEQ ID NO: 331692 - DNA, 269 bp, Homo Sapiens
ataactaaaagtaaaatgctgatggagatcatttaagactgtctctatgctgttgattgcatgcttgtggctcataatcagaatgatgcaaagtaattgttagactgacttgccaaggctacattttgtgtcgttgccactgtcagcactttggtcgcgctgtgctgcctgaagaacgcttgcctggcacctgttgggcactaatacacaactttccactgaatgtcatgggtaacttttgttctcatatcctcgcttgctatcttcac

SEQ ID NO: 331693 - DNA, 392 bp, Homo Sapiens
  misc_feature (303)..(303): n is a, c, g, or t
  misc_feature (311)..(311): n is a, c, g, or t
  misc_feature (370)..(370): n is a, c, g, or t
gcatttcctttagttttattgtgtccttgtaattcgattgcaatctttaaacatctctctgtatttaccagaagattatttgattagttaataaaatattttctaacaggagctgtttttggcagggaggtattatttttatctttgctcatatatttcacactggtaatcatgtgtaacaattttgagactaaactattgaaagtcattctttagcaaataaagtaaaatctctttttaattgattcttaatcattaaaataattttcaaaatattttcaaggaatatgtccaacttcgatnccaccggnaataaatgagatttagctaatatactaatggcatggttacttcccaatttaaattaggnttaaaaatagaattcatccaac

SEQ ID NO: 331694 - DNA, 422 bp, Homo Sapiens
  misc_feature (40)..(40): n is a, c, g, or t
  misc_feature (130)..(130): n is a, c, g, or t
  misc_feature (277)..(277): n is a, c, g, or t
gatttctattaacgttaaatagcataagtccatgaataancataagtccataccacaaagtttatcaatgtatggcaggtatgtggataaatttccctattgtattctctatgttaagctactagaaganagagtaatattttctgagcccgaaatgatgagaaaagattgtgtttttgaaacagcaaaattaggcagacagttgtaacatttttttaaaaatacactagttagcttggtgttctgttgcatttgaaaatagcatgatacagtatcnatcaactcttaaattatgttggaagaaaagataggaaacacatcaaattgttattagtatctggtgaattcacaggtgacttttttggtctcttataatttcattatatattctacagttcatgagtattacctttataatcgag

SEQ ID NO: 331695 - DNA, 338 bp, Homo Sapiens
  misc_feature (130)..(130): n is a, c, g, or t
  misc_feature (232)..(232): n is a, c, g, or t
  misc_feature (281)..(281): n is a, c, g, or t
  misc_feature (295)..(295): n is a, c, g, or t
cggtgaagacatttatttaatatggggggtggggtattgctgtctctgtcagtgtgtatagggtggtagggagacaactagagggactcctgtcctggggtaggctgttctggccccaggctgggggatnggggagcagactgacaggggtggggaggtgtgtaagaagggtagggtgaagctctgcacacatccttgggaccacagtccaggctcacccagtcaccaaagnaagaaccgaataaataaagtgcaacccgtgggggtgggggtaggagacntgagggcacccgtntgacccattgcccacagcccacattcagtgctgcaaggtcttg

SEQ ID NO: 331696 - DNA, 378 bp, Homo Sapiens
gcaatccaatagtattttattctcctaggagagctgccagatttcaaattctgattaaataatactgtctttctgtgatccaattattttttttccatatcattttgcatataagccatgcctctggtcctcaaacagctgccttctagcatcaatcaatttggaatcttagaggtatacctttaagcaattagacttacatatacatacacacataagtatatttagtttatttacctggaattgtgcctacatttccaagctgtttcccagttcaaaatgtcaaattcaaacaacattctcctcacccctcaatggtctttacgacaattaaaaacaaaatgaatcaatctgggcattggttctcccaatctcatc

SEQ ID NO: 331697 - DNA, 607 bp, Homo Sapiens
  misc_feature (35)..(35): n is a, c, g, or t
gaaggataaagtagaattaaccaagagccaatagnaacggtatcctaggagtatcctttaaacactagtggattaataagtcaccaagagttagggttgatatagaggaatgaaatcccagacagtagtgcttgttcctcagaggtaggtgttacaaacagagggttcagctctcctcttatttaagggtttgccgaggcatcacagtaaaattgacttctttttgagagaggtaaagctctgacttccagcttgaaatttagcctctgacttgtctggcttctctcattctctccaagtagatatctgccttagaacattaatgaaagccaaattccaaaacagcagtgccttaacattgctctgtgtgcaaacaagtctgcctgagcaggcatgaacatgaaatgtacctgaaggccagagagaacagtgcagaatgtgcaggagggctttgcaaatctgaggtggctctatggaaagacactaagtatgtcaagactaaaactagaggtgtgtgtgtttgaagagattatttctgcttactagtttctgcctgtcttatgcttgtttttaatttatctcattcatttatttaaattgcctttaa

SEQ ID NO: 331698 - DNA, 505 bp, Homo Sapiens
  misc_feature (15)..(15): n is a, c, g, or t
  misc_feature (23)..(23): n is a, c, g, or t
  misc_feature (54)..(54): n is a, c, g, or t
  misc_feature (70)..(70): n is a, c, g, or t
  misc_feature (450)..(450): n is a, c, g, or t
ttaaaagcctcctancctgtganttcctaagtgccccataaattaattcctccnggtccatcctgccagnaaagatatgtttccatgatcactatttactgaaaatggaatttaatatcgatatgtgtgagcatttgcaaaaattcgcccgtggactcgcttcctacccataagatcccatgggcttcaatattgggacctaaaaatggaaggaaataggaattcaaaacaaagatcacagcagcacataattagaacacttatagtagataacgaaagaggacaagtttatattcatggctaagtaataattctgtacaggcaatacccccaaataaccaattacgcagagttatgaaaatatgctacaaaatggaatactggtctattccaagtcttcccctttgctttccatttaccggaggtcggacatggtttcctcgctggaangagaagattcagctggcaggggtaacaaactggcccaggcaccgaaggcctgcgg

SEQ ID NO: 331699 - DNA, 323 bp, Homo Sapiens
aggtttctaggtaacattgttgtatttttcaccatttatttatatggccagcttgctctcagtttaggtagaataacctttgagtaacctggtaaataagcattttagtactgccagatggaacatttactgttctttgtaaaataaatacaaattgacaaaccatgaatgatttgttttgcctcagcaaattaaatattaccaacaattttttcagctcaaatttgatcactggaagaaggattatatacaagaacacttacgacaaccatttttgggaagaatatttttgtctctttaaagattacaggcatgagctaccg

SEQ ID NO: 331700 - DNA, 495 bp, Homo Sapiens
  misc_feature (424)..(424): n is a, c, g, or t
  misc_feature (472)..(472): n is a, c, g, or t
cgggttctttcatgtttaattcagtttgttgtgatttctaaaaatgtatctctttaaaacaattgctgctgtgcaacagtgtgatggcaagggaacagaaaacaacaaaaaaacttgattgaatacttcaatcaaagtgcttcttttttatgtgaggataaatcatactgaattaaggggaaatttaagaatattttttaagaaataacaatttcaggtaggcaattgtgaggaaaataacaatcatacaagccaaggccacgtgattcttccacaagccccagggtgagagatcgatgccctgctttaccaaatattcttcgccagtacatgttgcatagttacaaggattgtttcctgttgcattgagtcctggggcagaagttttgtcccaaaaattcattatgctgcaagccggtaaatnccatatcgtgggattgctgaaggtactgaaggccatggacagccaggntgccattgggttttgaggatttg

SEQ ID NO: 331701 - DNA, 520 bp, Homo Sapiens
  misc_feature (278)..(278): n is a, c, g, or t
  misc_feature (396)..(396): n is a, c, g, or t
  misc_feature (400)..(452): n is a, c, g, or t
tttttatttttggtatcaataaagcccagatattcctggtcagtgatgcctttattattcctgtttcctttgtactcagttgcttcactgggtttaaggcatgctttgtgtatttagtttgcaaaaataaaacttttagtacaaattttttttatacaaacttttatggcacaagcagcaaatctgctgttttaagaaaatatataaatatccttttcttctgtacaaatatctccagtattccctaccccattttataattttaactgtacatgggnctgcctcatccttctctaatagctccctccccccctccaggatctcaaccaaatttatatttacatttttacggttgggagggcaggtcaggagggagggaggggcccctcctcaggngggnnnnnnnnnnnnnnnnnnnnnnnnnnnnnnnnnnnnnnnnnnnnnnnnnnnnnataggctcctctctgtgtatgggagaagggtggggcagctttcataggttctcctctgctgacaggtt

SEQ ID NO: 331702 - DNA, 125 bp, Homo Sapiens
aactggacagtatttaacacctctggagccaaagagattgatagtgaaaacaactacaagtccctctgagcaccatttgcattgtctttgctttgatgtatactcgattaaaaaataagtggtat

SEQ ID NO: 331703 - DNA, 396 bp, Homo Sapiens
  misc_feature (241)..(273): n is a, c, g, or t
ttcactgcctgaaagtctttattgaaaatctgggagaaaatatattgaaatgttagtagtgcataactttaatttttatactttttgcatcttacaaactttctacaataagtacacatgacttatataaacagagaaaagcaatcattatcttaaaaataactatccagtaactgccacaatctcctgagtccagacaatctagagcagaagggtagactgaggaaaatatacacagtannnnnnnnnnnnnnnnnnnnnnnnnnnnnnnnngatcaacatccaataaatgcttctgaataaagggagagtagataagaactggattttaatcccaacactgccatttaccagctggccaatactgagctagttactctaaagagttcagttttc

SEQ ID NO: 331704 - DNA, 655 bp, Homo Sapiens
  misc_feature (486)..(486): n is a, c, g, or t
  misc_feature (629)..(630): n is a, c, g, or t
ggaggagccctagatgtgattggggaactccagacacataaaaaggggcagcagaatagttccagagaattgggggatctcaaaaatgaggggacagatgtgacaacacagccatagatgggcgaagagatctgagatgataacagctcccagaggccccagacataactaggaaatctcagatctgacaagagggaaccttggacagggctcagggttgccagcaggggcccccaccccagatgagattcagggtttacagacacacagcgattttaaaaacgtcccaggcctcactggggaatcagatttcacaagaaaattcccagagaagctcttgggattctggaagaacttgctaccctgcctccccgagtatagtggtccataggtcctgtcacccaaaacatgaggatcccagggagtctgtacatgacaaagaagatccagagggaccccaggcacaagtggggaatcccagacagncccgggctgggcttggggattatggcagggcagcactccccttaccccaaaaggtggggatgcgtaagtcctatcacctagagtgtggggacgccctttttcttccagggggatcctggctgggacgtgaggtcccccgagcnnccgcaggtgggagcctcgggtgtgc

SEQ ID NO: 331705 - DNA, 500 bp, Homo Sapiens
  misc_feature (298)..(368): n is a, c, g, or t
gaaaatattggggattgggttattgattaaatgattgacattggcgtgtgcatagaaaatggatcaatacaatatttacctgttttttaaggatcctttgtagtataggtaaacaaactattgtttataaactgtcaataagtgtagaaggtttctcgatgctttaaggttgagtttagcaacagtatgatacatagttgttagtttttgtttagtgatacaaggcagttcctcattttgacagttgccttttcttttttccctaaatcactagctctcaagcttttaaatctcccannnnnnnnnnnnnnnnnnnnnnnnnnnnnnnnnnnnnnnnnnnnnnnnnnnnnnnnnnnnnnnnnnnnnnnctgcggtggcactgacagcattgtactgggggctgctggttccctgtcagatgttttaagtcagattggctagcatagtcacagctgctgacggtgtctttattcatggatgctcagtacagcagttgctag

SEQ ID NO: 331706 - DNA, 373 bp, Homo Sapiens
  misc_feature (18)..(18): n is a, c, g, or t
  misc_feature (52)..(52): n is a, c, g, or t
  misc_feature (121)..(121): n is a, c, g, or t
ccaccgtgcccggcctcnaaactatattttctaattggtacagtaaatacancattaatcatgccacaattatttcttcctggattccagccaggaaaaaattaagttaagagaaagtgcnttcatatttcttgatttgttataaaaaggggagatcctctagatttctgggtaagagggaaagctagcaatccccacaatgatttcctttatttcttgccatccgaatatatccttcttcaccaaagttgtggccccagctgtttttcacaagccagtattctttcccattaagatcaccatagccaaccacaagtacaccatgattcacattctgagtacaggatggttcatagtagacaccacttctgtc

SEQ ID NO: 331707 - DNA, 204 bp, Homo Sapiens
gggaagagtgattaagaaactttattacagaaaatgaatgcatccaacgtccccaaatacatttgtgacaagaacagacacacacaggagacacagacaatagtcactacatcacagccttgttctttccgaagatgaaaatcgtcattcaagaatggggtgaggtggttagagggagtaggtactatccttttaaatgggggg

SEQ ID NO: 331708 - DNA, 598 bp, Homo Sapiens
tttttctataatcttttattattaagacggctgaaaaaaatgattacatattattagtgaagctcagtggaagagaagtgggtggaaaagctctaacccgagaggccgctttcacaggatgggaggatgggttacattttgcaaggtgtaccaaagggttaaagtcattttcattaaaatttaaatttcagcatgcgctcactctcccttccccgtcctttgaacgtttgactggcaaccatttcatatttcaatctcggcagaacaaattgaattagatgttgaaaccaagctcggctctgttcaccaaagcctgcatgctctgctcacactaatcctttcctagacgctgcggagcacagacgggcgctgcgagagacgggccctgcacaaaagacaaaaaggaccaaggcggcaggaaaaggagagggggaaaaacaagcgggcagaggctgctggaaattgtcttccacctgatgcatgggcttaaagcctaggagacagagcctcgtccacgcagcagggaaggccagtgtggaggcacacagagcgacccgagtttctgtcttgtgtctggggcacccagcacagtgtctcg

SEQ ID NO: 331709 - DNA, 477 bp, Homo Sapiens
aagtttcaccccccctccagtataaagtttcaaaaatccttttccacatggatgcataccctctggtcaaccggattattatccccttggcttgtataagaccttccgatctcatcccacacggaaattagtgattcttgcccgtttttatctgcttattttgcacgatctcactttcatggccgtctttggttttggtcacgcgtcctatctccaggacaataaagacgacatttaagtttttcagtccgggcttaatatctcttataaaaataagtggtcgttgaccctattcatattgggacaggcgcggctacggctgcggagacgcgagtgggcagggcggggtcaaagcttccccactcccgggacaggggcgaaggcagaggggcgaccttgggcaggggtggcgagagaaggggcagaaagccgttagtcagggtagggcaaaccagcccggacagcactgagcctaaa

SEQ ID NO: 331710 - DNA, 479 bp, Homo Sapiens
  misc_feature (55)..(55): n is a, c, g, or t
  misc_feature (370)..(370): n is a, c, g, or t
ttctctatcaataatatttttattaaattccatggtggccttctctcaaaattangtaatgaaatgctgaaatgtccattgattagtgagggcaatgtatgtaagccagaagaatgcaataaataagggttatgtttcttcttgtcagacccagaagggagatctttgaacaacagtgcttcaaattgagaattcagtcccagggaagggtctctctgccccacagactgtggtgggacaaacactggggtgtaacacttttatcttcatccccaagccccagaaaattagaggcagagtctttctgacttgggtaccagtttaagtccttattaagcagcaaaaattaattccaaaatttggatgctgnccttgggaagaagcatacaggaaaatgaaaggggtaagagtaatacagcagcccatctgttggttcctaggtcctccatctaagaatcgttcctttggctgggcacagg

SEQ ID NO: 331711 - DNA, 466 bp, Homo Sapiens
  misc_feature (437)..(437): n is a, c, g, or t
gacctgtacaataggcactttattagtggttggaatgcagttacacgcaggggtgtgcagacgcaatgggggcagggctggtgcaggcacaggaaacgggagacccccccctctttcccctggggccaggggttctccctctccaggatcctgggacagtgctgatgagcagagacatgaagtctgagggggacttggaatatggcaaaggggcaactgggaagccagttcccctgagtttgacaagtttggcaaaaggatcaagtgaggtgtgtgggcagaggggcccggtttgcccaggacatctgccctccacctctccccctgaaatcatcccttgggtgggtttagtttctttcctctcttacaaagagagctgtgtcaataactggcagaggaagtcgggaaattcagcctaactccctccagcccagcanttttccattaaacagctattagccatctc

SEQ ID NO: 331712 - DNA, 784 bp, Homo Sapiens
  misc_feature (474)..(474): n is a, c, g, or t
ctgtttctagaggcattttcctgatcttgcctaacaggatttctttcctaggctgtaaaaatccctgcacatttcaatcagagaaagagtaagacgccacagatagagaaggaagaagagttttgcaacggtatagttgagggttctctgccacacacccagaacaggctattggaggctgggtctggtccagaggcctttgaatcatgccagtatgtcccctggccagaaattctcagttacctcagaacttttcccagcctcaagcgatgaaaagaaactagttcaaaacatggccaacattcccagtactcatgggtattggggggttctccatgttctcacccagcaagccttcacatctgagtctttagtacagcagccaacgctgtgtatgtactaggcttgatgcatgcccgttcctaaaagaaattacagatgcttgctcatgactttttgggatgaatatatctnttttgggtgtaggcagagtagggctctgcatctgagaatatcacacagaaagtagtttgggtttatctatctaattttattttaatatagaggccaagagcaccttgtgaatgatgcaacagattttaagctcgctcccatacttaccgctccaacaaaggctgtacctcagtttcctggccaatggatcaaaatgatatggctccgatgactggaggaacaccagcgtccttagtcttgtgtcaatttagataaaatgacacagacacatgtggagtcgttttaaggagcagagagtttaatagacaag

SEQ ID NO: 331713 - DNA, 288 bp, Homo Sapiens
acccaatagtgtttatctttttatgtagaaattgtatatctcattgaattataaccccatcaaaaatatgaaagataaaaaaaatatggtctggtttctttgaaaaggtgcctaagagtagtttgaaaatagcattcacatactaataagcaaaatttacaacttttggccaaatgtggtggcttatttcgtgtaatccctgcactttgagagactgtggtgggaggatccccttgagcccagaggttcgagatgagcctggacaacatggtcacactctgtgtctac

SEQ ID NO: 331714 - DNA, 367 bp, Homo Sapiens
  misc_feature (15)..(15): n is a, c, g, or t
  misc_feature (85)..(85): n is a, c, g, or t
  misc_feature (91)..(91): n is a, c, g, or t
atgttcccctaacanaacaataacccccaaggcccgcaacaaaccctatcaaggctcctgcccctgccctacccctcccatgtanggctanccctaatcgcaactggtaaaggccccttttcctctttgctttcatctgttcccaagttgtggtcgatatttcagatggtagcctcagtgacatagtcagaattctctcagaagctagggtttcccagtagaaaaagatctttggtttgttactctatggggttggtttacacctgctgtcatcctcttccccagctactttaacaggagacaggagggtagctatgaggatgtttgccagaaaaggaaattgggtcctagttgcctactgactatc

SEQ ID NO: 331715 - DNA, 607 bp, Homo Sapiens
caagtcagaaacccaggtttgaggtttccaaggcccttttattaggggaagttcccctttatagcacaagacttcacaaatgtgttgacaacaatcagattcatttcttaaaattatggagaaaaaagggaaaaacaaaacagatgcactttttatatatattgaacataaattaaaagaatttataaaacagtcacctttttacagaataaatgcagactgaattataaatgcacctccaggttgaagttgttttgagttgcttttcattttccaataataaataaatagaatttgttcttgagttttagatccacctgagccacggcaggactctaagtcatgaatgggctttcttcccttggtcgctcctgtgcgcagcatggtgagtgtgctgaggttacagatttcattggcccaccagcgtgtatgctatcctttcggggtggcattcgctcattaattcggtccagacctcgcgcttcttcaaaactccggatcttgtgctgaagcgagaaccctctgatggctgtctcgatagtctgcttgcctcctgagaggacgccagagggagtgtgcctgtgggagtcaggcccttgagagtcga

SEQ ID NO: 331716 - DNA, 428 bp, Homo Sapiens
cttaaaccaaaccggaaaaccggatgaaaacttcaccaaaaatttaaatatgaaagaaagatgtcagctagaacctttagttgtcattaagctttgtcttccttatcccagatattgaaggcagtttacaaggggatgataacaaagtaactaactaactgtagcaaaagacaagtatgggacagactgggacctggagtaacactggatcacagactgcaaaggcccacgcttggaacaagttgccaacttgtttcactctgcttgcttcagactgtgcacagctgggatgggatctggggatgtggacccctattctttcaaaaagtcattcaggtgatttggatgggcaaatagaactatttctctaatggccaatgttttttaagagtcataacctggaattaattacattaagtgctcagcta

SEQ ID NO: 331717 - DNA, 493 bp, Homo Sapiens
  misc_feature (287)..(287): n is a, c, g, or t
  misc_feature (335)..(335): n is a, c, g, or t
  misc_feature (453)..(453): n is a, c, g, or t
  misc_feature (458)..(458): n is a, c, g, or t
  misc_feature (464)..(464): n is a, c, g, or t
  misc_feature (469)..(469): n is a, c, g, or t
agttttgttttgtctttattgatagaatgtaatgggcctttgggatcttaagtactacttatgttacctttgttattcagatgctgaacttaagcagtgaaataatagaaactaaaggatgttattaaggggtttaactattttaagtcaacatttagcttatccatcatattggtttcctgaagatgtcagaatttttcagtgtaagacaaatatcaaaggtaatagatccagtttaaaaggtgaatccactgtatgtattatattgataccatcattttcagggntctacattaagagggatgggtgatacataattaggtaatctcaggggntttttccccccatatcctaaaatgtagggcaataggttgtttctccttttaggttcatcagtttctcttaggcaaaataaattaggggtggggccatttaatggttcccatttacccngggcntaggcnttggnttcccggttttacaggccatttcc

SEQ ID NO: 331718 - DNA, 483 bp, Homo Sapiens
  misc_feature (421)..(421): n is a, c, g, or t
  misc_feature (430)..(430): n is a, c, g, or t
gtctgctgctattattaacatttattatctgtatcttttggctcaggaaatgacttcacctattttttccataagcagacctttaacagagtcacttaattgggctgcttaaacggatgttctgggagaaaattataatatttagtatttgtacaaaatatcaaaaagtattttgacaagtttctttttaaggatagttcctaaagccttaccctggctaggaggtgttttgtacaaattattatattaaggccagcctggatctacccaacatggccacaggggaatcacaatcaacagtgtggggaaagtcagggcagtggaagtggatgcactctttttattttgaaggcttaaaccaaattgtcttggaattaaagctggtatttctggcagctttcggtacagagaaaaagagganagtgaagcngtgtcagtttttaacattagctatatccacatgtttaagaaagatagatgagg

SEQ ID NO: 331719 - DNA, 532 bp, Homo Sapiens
  misc_feature (19)..(19): n is a, c, g, or t
  misc_feature (82)..(82): n is a, c, g, or t
agataagaccatggtgccntcttggggccccttgatggggcttttgggaagtggaggccattctttaaggggataagaagcnaaatggaagacttgctccaacttctaggagttttcagagagttagaggaggtggagagatttactcctgccatggatcatatgcacttctaccatcaactcctggttttgcaagtatttttataaatggagtttggaccttggtgacactcagcctctcttccccttttcctatgttgctcaatcttcctttccctccgtaggttcttacacatttcaaacccttgccaataacagtattttagttatcaggtctcaccattccctctggttgttgagcctttggataaaaatccacatggctatggagtgggttttgttggaaaaagtgaccgtcctctaactgcacctctatttctggctcctcaaacagcaaagggtaataataaggcatggtagaggttttcccatttttcagtgactagactgtgaatatttacagatgaatttt

SEQ ID NO: 331720 - DNA, 467 bp, Homo Sapiens
  misc_feature (27)..(27): n is a, c, g, or t
  misc_feature (56)..(56): n is a, c, g, or t
  misc_feature (62)..(62): n is a, c, g, or t
  misc_feature (68)..(68): n is a, c, g, or t
  misc_feature (77)..(77): n is a, c, g, or t
  misc_feature (93)..(93): n is a, c, g, or t
  misc_feature (163)..(163): n is a, c, g, or t
ttaaacccttaacccttgggccttttnaaattcccaacctggttatggtccacccngggacntaaaancagtgcatngaatgccagtaggagnctcactcagtattattaaataaatgttgatttgtaggggtctctttcctatatattaaaatttcacaagnatctcaatgtgtttctgggctttcccattacgcttccaatgacctaattgtccatcctagcatcaaacccatactgtcctattatgattttgtagtaaatcttgctgtcagatgcaatacatttttctagggttctcttgattattcttgagtatttacttgtctatatcaattttacaatcagtttttcaagatccatgaaaaatttccttgtaattatgactggaagtacactgaatacagagattaatttggagagaactgacatttttctttacatctttccctattaaagttcgattgc

SEQ ID NO: 331721 - DNA, 455 bp, Homo Sapiens
aggtttttcccccaacccctttttgggagtcccttttcccccttcctgattcacgattttctttcaacaattttcccacttaggaatccatcacaaaagttttgcacatgctctacggaaacttctgctgtgggcagtgtatcccactcgtcatcctagagtctggtaaatttccaaagctggcagttgagactcctttagtttgaaaaatgatatcaccttcccattttctttcataccactgtccaccagaataaagagaatcttcccctggaagagcttgtctgaccttctggtatttgtgcatgttctcttcatactctggggaggccttgttcattatcaggaggagatgaatctgaattacgctgttgaataacccaatcacagtcacagggttgtactctgtcaccatgtggaggctgttgatctcaatgaaacggctcaatttggtc

SEQ ID NO: 331722 - DNA, 482 bp, Homo Sapiens
ttgtacctgttcctgttttgaataggaaatgcctgctttccagtggtacattactgccaaggacccagttgtcctgcagctggacggactcgggtgtggtttgcagctcggcgggcaaagcagccggcggggcgggacatcatggttccttttattggtcagggagtttctgttgagagaagtgatggatggatgatgctgtgcagagtgctgcttatgggaaggcggcaagggctgcagggtagactggccttgattgcttgcaggttgctcattctcactgtcggacttgttttcgtgctccgtatctgtcagggtgagggctgagttggaccgacttgacaggcaggagctgcggcctgatttgacccccctgccccaaagtctcatggcatgctctggggacatcactgcttcattttcagtatcagcatctgaccctgcactgatagagtaacctctgtgagggagccccatttccg

SEQ ID NO: 331723 - DNA, 391 bp, Homo Sapiens
gcctgtgggccatgcctctctgtcctcacaacagctgcagaatgaaacaccgcacctccaacaaagctcacataccctgccgagctcccctgcgatggaggcttccagaatgcaaatacgagctaggcatctcagatggatttgatttcaatcaacattagtgccaaatgaacatctttgatatgcaaaatgtctatgctactgaataatacagaatcatctttccccacaaaaactttcttctaggaggttaaaggaaatagtcgatctgtaaatgttaatatatctattgtaaagatgaagaaattgagggacagtaattaaaggaatcaaatgatcagaagaactggaacccataacatcttggggaaagttaatattttatggtctt

SEQ ID NO: 331724 - DNA, 390 bp, Homo Sapiens
  misc_feature (27)..(27): n is a, c, g, or t
  misc_feature (95)..(95): n is a, c, g, or t
ataaaacctggacattttaattttttnaaaataatattttaaaattttagggggtccaagccttatttgtatctgtgaaaaattccccaaactanagtacttttttcttaaaagactttgtcaacaacagaattaaacgctgtccttgaagatgattttgctcaatgctgtgaatgccacagttcatcccaacacacagatcagaatcagcctccaatccaatcttcccaccacgcttgatattattacttacatgtttggaaatacatgttggttcaaaaaagataaaatgtgcttcctaaagtgttctaccatggagtctctctttatgtttgtagcaactattaatctatttctgtattttattattagaaagttcttgacaaattc

SEQ ID NO: 331725 - DNA, 359 bp, Homo Sapiens
  misc_feature (20)..(20): n is a, c, g, or t
  misc_feature (32)..(32): n is a, c, g, or t
  misc_feature (69)..(69): n is a, c, g, or t
  misc_feature (105)..(105): n is a, c, g, or t
  misc_feature (110)..(110): n is a, c, g, or t
tgagacccctctcaagtggnaaaaagtagcgnaatgcaaatttccagaaaggttctttagtatggagcnacattttcagactgtctacttacccatctatctttngggcntatatcctcttcctatatttccataatgcgtacatatagagagagatataagtataaataggggtagtttgtacatttttcacccccctgccacaaataaacaaacaatcaaatttcaaggaaaaacttctctgttcctaaaaagcctggctaatgagatattataaaatgctttgctttttagacatcaaaaagatatcattctgaaatttaggtaagaaaggtattaggggttaaggagaaatagct

SEQ ID NO: 331726 - DNA, 573 bp, Homo Sapiens
  misc_feature (76)..(76): n is a, c, g, or t
  misc_feature (83)..(83): n is a, c, g, or t
atttgtatctatccaagttttaggagattcagaaggcaaaaatactgggaatataattactctgtggctcaattcntgctggnaagttagtgttttctggaatggagtgagtatagtcatcaagaggcggaagttctgttaggatctcggtgtgtcggggcactaatactggaggcaaaactggtgtctcaactctctgatagtggtaagggtttacacatacttcatcctttttaagattaaaagcatattcgcagttttcaattgccttgagttcatgatgactgtgaagatcaggccagcgcccctaataatcggcaatatataacatgtggcaatccttttcgatgggatacctggagacgaccatcaagagacctggtttgttcagagaagctgtaaaggcctgttgtatcccactgatctatcgtatttggtgtactcagtccccaaatttcagagcaagtgcgcttcaaggaaaacgatgatgataatagaagaaaactgtagttgtaacatttctttgaaaataaagcatcactggctaatttaaccagtatcatgattatatgc

SEQ ID NO: 331727 - DNA, 568 bp, Homo Sapiens
  misc_feature (404)..(404): n is a, c, g, or t
  misc_feature (406)..(406): n is a, c, g, or t
ttttcacatatttgttttttatttacagcttaaatttacattgatgccataaaaggtactaagtagaaaacctgtcatgtgagagctacattataaagaattctaagctaattgtccccacatgatggatgcctttgtataatctcctttccttgagtgggagtgaaaactgaatgtgatgggccatcactcctatgaatgttacattatatggcaaaacaaaggttatcctgggtgggcctgacctaatcaagtgagccctttaaaagtatatattcttccagctggctgcagaagaagtcagatattcaaagcatgagaagaactcagcgcatcactgctggcttgaagatggaggggcaacatgagaaggcatgtgggtggcctctagaagcttagagtgnantttggctgacagccagcaagaaaatggagacctcagtcatccagtcacaaggaactggattttcccaataatctgaatgaagttggaagtagatttcttcccagagactccagatgagaactcagcctggcgaaaatcttgatttctagccttgtgattccc

SEQ ID NO: 331728 - DNA, 452 bp, Homo Sapiens
  misc_feature (81)..(81): n is a, c, g, or t
aatttattggatggggagcttccaaaatgggaggaaaaagttcttgtgccatggaaatgccagggatctcccagaagtgcnagcctttgttattgccatacattatggaaacatttggaatgaagtaccagaagatgcttttgcttatgttcaagaaagaagattttgtattaatcctaatgctggatttgtccatcaacttcaggaatatgaagccatctacctagcaaaattaacaatacagatgatgtcaccactccagatagaaaggtcattatctgttcattctggtaccacaggcagtttgaagagaacacatgaagaagaggatgattttggaaccatgcaagtggcgactgcacagaatggctgacttgaagagcaacatcatagagtgtgaatttctatttgggaaggagaaaatacaagagaaaattataatgtaaaatggt

SEQ ID NO: 331729 - DNA, 438 bp, Homo Sapiens
tactgtatccattttgccatttatatatcctcatacatattctcatctaaattattctttttcttgcctattctcagtagccagccctatcacacgttctcctctccatctcttgctctctttcgtagcagcagttcttatcttttctctgcacgtttaaatagtttctgtatatttttgttgaattatttcctttacctaaaataggttgttttttggggaggggaggaagtaggagatcgggaaatggttattttaattttacatcttaaaaataaagcaatttactgaccttgccaccacataatttgggaagaaaatttcacgtttaagttccttttgtaaggctgaggacatgttgctattgctctgtctttatatgaatatattatacgattgtcatctaggacttcctcaacaccccagcctgagggccct

SEQ ID NO: 331730 - DNA, 420 bp, Homo Sapiens
  misc_feature (280)..(280): n is a, c, g, or t
  misc_feature (291)..(291): n is a, c, g, or t
  misc_feature (300)..(300): n is a, c, g, or t
  misc_feature (313)..(313): n is a, c, g, or t
  misc_feature (329)..(329): n is a, c, g, or t
ttttgctttcatttttaattttaaattaagtaaaatttgaaagttcttttgcactagcccacctatcaagtagtcagcagccacgtgactggtaccttctacattgcaccacacagttctagaatttcatataaatgaaatcatttactatatactctttttggcatctttcattcagcataattgttctaagattcatgcatgttatgtgtatcaatagttcattcctttttattgccaaagtattaccccattgattgggtaatacccccaatttttnaatccgttcanctggttganggacatttaggtngttttttagcgtttancttttacccaataaaagatggctataggcatccagataatagtggtttggtatgggacacatggctttcattttttcttcagtaaaataac

SEQ ID NO: 331731 - DNA, 420 bp, Homo Sapiens
  misc_feature (31)..(31): n is a, c, g, or t
  misc_feature (54)..(54): n is a, c, g, or t
atctcccaggaactgttctaggcattggaangagcaaaagaaatcaagaaagancgtatcttttgctttatatctgtactagtaattcaaaggataccgaattcttaataaaagtcaatagccttgctcattatgaatcagacttttatcatttgtttaccactcactgaaaatgaaaagcagaaaatgcaagttacacttcctccttcctatcaatttcttgtaacatagtggatgattgttattctaatttctttgactccctaattagattttaagaagtatagtgaatattttttcttttcatatttaatttctgtatagtggttgtacagatctctaaaataaggtggagaagaaaagagttctgaatgggggtaaaataaaaagtggaatgttgtgtgtctgtgtatgtaatat

SEQ ID NO: 331732 - DNA, 656 bp, Homo Sapiens
  misc_feature (51)..(51): n is a, c, g, or t
  misc_feature (68)..(68): n is a, c, g, or t
  misc_feature (373)..(390): n is a, c, g, or t
  misc_feature (620)..(620): n is a, c, g, or t
cttttctggtggtaaggtgtgatgttgatgtgaattgttccaggagtccanacccctatatggatgtngaaagaataaatcagtatgccaagggaatggtgtgttaacattatgtagaggcaacagtgctaaggagttatactattttcttataatttttttcctttggacactataatatgtggtgaagggatgaccaataaaacaagaataatagatatttagtgttgcttattaagagttaagcggagggctgggtgcagttgctcatgcctgtaatcccagcactttgaggggccaaaggagagaggattgcatgagcccgggagttagagaccaaaccgagcaacgatagggagaccctgtctctacnnnnnnnnnnnnnnnnnngtttagcagggcatggtggtagcacacttgtggtcccagctacttgggaggctggggtaggaagttcacgtgagcccaagtggttgagcttgcagtgagttctgatcttgccactgcactctcactcgcttggatgaccaagcgagatatgtctcataagctgggcagggtggcctctgcgtgtaatcctagctacttgggaggctgaggtgggagaactgcttgaggcncaggaatttgagaccgcccttaacaacctaacaaga

SEQ ID NO: 331733 - DNA, 430 bp, Homo Sapiens
  misc_feature (387)..(387): n is a, c, g, or t
ctcctgtgacagattaaactttctaaatttgaaaaatgattgggaataaaaattataaaggccttccagaggaaaattttattaacatcattttcaaaatattctaattcctgattcatatgcagaaaatactcatgaatacttttgaataggttcttactaatatttctagtattctttgaactagcaatattactaaatgctacaaatgcctcattgcatgtcagaacagggccagatcaaaatccaggtctgattctcgtggctcatctgatgagctaggccacaagtcacaaaccaacaagggctgcgcatgttaaggttgcttcaggaaaattttcacctaattttccccacttcatatggtgctgtaaaatgggagggtcnatagtgccggtttgtataagcgctgaaaaagatatggtgaagt

SEQ ID NO: 331734 - DNA, 835 bp, Homo Sapiens
  misc_feature (88)..(88): n is a, c, g, or t
  misc_feature (157)..(157): n is a, c, g, or t
  misc_feature (531)..(548): n is a, c, g, or t
  misc_feature (609)..(634): n is a, c, g, or t
  misc_feature (647)..(691): n is a, c, g, or t
  misc_feature (778)..(778): n is a, c, g, or t
  misc_feature (785)..(785): n is a, c, g, or t
  misc_feature (798)..(798): n is a, c, g, or t
  misc_feature (825)..(825): n is a, c, g, or t
ttaaatgaaaattacttttaaatccgcaagctaatgagtgtgaagaatgtaaatgattaaattcccaaaaattagttgcaagttgtancatttacggaacccgcactaccaatttgggaacatcctgtgtctccccataacctggcgaatttctttnggattccaaaggtattattccccttccaagttaatgaatgtccctttggccagcctacatttgttgtttttctcttgaattaagatgagtgtttccattaaaggtatggtttttgggattttgagaaattatctgatagagtatggttttctaaaattaagaaaaaaattaaaattcttattgttattgccttgcatttgagacaattttaacgttcctatttgctatttgaacatctcattcaggaatctcaactgaagaaaatgatctcattatctcaatcatgtggacaaacatcatcaaatgcttgcatttgaacactggccaatatataaaaagagacattgggtatttatggtagtggttttcaagannnnnnnnnnnnnnnnnnactgtaaccccagtcagaattccattttgcaatcatgatccaggacatacatataaagggnnnnnnnnnnnnnnnnnnnnnnnnnnaatttgaaaatcnnnnnnnnnnnnnnnnnnnnnnnnnnnnnnnnnnnnnnnnnnnnnaaatctgaaaggccatgctctagcaagaagatgacactactagtgactagttctggaacaatcaaacatgccagttttttaaaaaangagcganccacccacctgtnggaaacatttctccccgggggagaacncccggggtct

SEQ ID NO: 331735 - DNA, 566 bp, Homo Sapiens
  misc_feature (147)..(147): n is a, c, g, or t
  misc_feature (162)..(162): n is a, c, g, or t
  misc_feature (434)..(434): n is a, c, g, or t
  misc_feature (532)..(532): n is a, c, g, or t
cataacattaatatttttgaagagtctaggccagttgtcttatatagaacatctcacaatttgtatttatctaattgtttcctcataattaaatacaggtcaaacatttcttggcaggaatacacagatgacgtctatttcgcactngtgttacacgagacnatacatccatttaacccttaattatcacttgatttgtaaaccattaactatatgtaaagcctactgccccaccaaaatgagctctttgaagtgaaggactagaatgaatgagtcctcagtgtctctggcagggattacaacagggcaaggccagaagaagctactggaagtacctaataaattgacccaaacaatcaattagccagcaaatgtcctaatacttggcctaaggaggctcttcaagttacagacctcctcataaataaatttcntggatttaataccaggccacacacttaatatccaagggccaggaagcaagcggaacttaccagttcctgagcctcgaaggggcaggaagggcgatgcnggatacagcagttggccacttctgtgaatatgtc

SEQ ID NO: 331736 - DNA, 260 bp, Homo Sapiens
gaaatgctcaaatttgtatattactgtctttgccacaaatgggttagtggtgactgaattatcgtttggtctctttagctgccaaaatataacaggtaattgagtttaacatcaactaatgtttttgttttattttcagtaggccattaaaaaaatctaaataatttttaaatgctgttaacttagaagagctcatgaaaaacacctgttaacttacaactaaaaaaaacaccatcttagtcaagcctggtggcccacac

SEQ ID NO: 331737 - DNA, 199 bp, Homo Sapiens
ttaagatgaccacaagaagttttacattattatattcagacaaataaccatttagttactctatttcagagcactgaaaaaaacaagtagcaacagaagacagacttacaagggcactaagtctctggtcactcaaggaccaatcaaaggaatgcgctgttaggccagaaaggagtctctgaagcaaatgattggaagg

SEQ ID NO: 331738 - DNA, 404 bp, Homo Sapiens; identical to SEQ ID NO: 61970

SEQ ID NO: 331739 - DNA, 388 bp, Homo Sapiens
  misc_feature (43)..(43): n is a, c, g, or t
  misc_feature (315)..(315): n is a, c, g, or t
  misc_feature (370)..(370): n is a, c, g, or t
aatgttctaaaaagtacactttattaaatgtgagaagcttacntggcaacctgaaacatgggccagcagaaagtcattgcctcccaaatggctggactccccacaatttcactcatgaatataactatcaggtccaggaattgcagggtttgcttgcattttagtctttaagctaagaactgaatttccaggcaaatgtgtcttggttggggagagcagtcttaaatgaagagtagctttcaaaccactccatgtcttttttcaaatttcctcaaaggataggactcactttccagctgtagaaaaatggtcccnttctcctgcttgtggtgtccaactgttggaagaacgatgagtcacgctgactcgnagactttgacatcctgaa

SEQ ID NO: 331740 - DNA, 462 bp, Homo Sapiens
  misc_feature (67)..(67): n is a, c, g, or t
attggcagcgattttccacattatttcatccccaatccctgtgtgaatcccatctgaaaaacccgcngagacagggggaccaccacattcaatttgggtgtccaaaagatctgggctttcaagtccccagttcggcccacatacttagctgtgtggtctttgggcagggtttgctcttctgggcctctgtcctgctctgtaaaagcaggattcacaaatagtgaccttgtcctttggaggaagtaggaggtgaagtccctgggcccagctcagcgtccacagcaaactcccatcaggcctgatcaccctggtgtgaacattaacccagaactagcttacttacttgctcttccaagaagcaagaggtctgggttggtctgaactactctttggaaaaactacttttggcagatttcaaaccagttcctaaaatttccatgtattacatttagattaaagagg

SEQ ID NO: 331741 - DNA, 421 bp, Homo Sapiens
  misc_feature (410)..(410): n is a, c, g, or t
actcttgtgaataggatcaatcttttttccaccactgcattcttcaactggttatcactggggcatagaaaaacaattatcttagtatgttgattttgtttgaacaactttcaaattgttgaactcttattaggtctaacaatctgttgtacattctctggtttctttatacagacaattgaatcagtctcgttgctttctttccagttcttatgcctcatttctgaattactgagcatgggtctgccccagaatgttcccaccattaatgggtaaggctgctaaatattcacccttaactatgtttgccaaagggtttgataaatagccctttactaaggttattgaggtgggtcaaatttctcaaataccctctctggaatcccaaaatggaatataatgctggttcntctacaaatcc

SEQ ID NO: 331742 - DNA, 293 bp, Homo Sapiens
atgcctcaatttttgaactgattctaagtccctttggggatccaagcagaaagacaaccttaagtaggaaaacagccaaattattctgaaagaatatgttttgctataactgtaaaattaagataaagaaaggatgtcagttgaaggctacttccagagaggatgtcctgaaaaacacagatggtactattttattagctaatagtgtcactctggggcacaaaaaaatgatttccaattactagagctgaaacgtatcaaagactgaagtaactctttgcatcctattcttc

SEQ ID NO: 331743 - DNA, 282 bp, Homo Sapiens
attaccagcatcatccacagcatctggcccagagggaatattttaaatgctctcctctctctggcttaccctcaagctggcttaacttcagacactgagaagtgagatcacttactaaacatgaagagagctgcattagtctctcatttgtggatacttcctgctccggcctacagttttagggttcccccaaatgaccatctcctcagagcttattctttcatttgccaaacagttgtctcatacgctatttgtgtagaatacagtgggagacaccaagtc

SEQ ID NO: 331744 - DNA, 512 bp, Homo Sapiens
tttttttactgatatattgtagtttaataaaacatagtttatacagttcattgaaaaagtattttaatacaaacaccacttatacacaaaaccaaatgttgatattcttgtttttaaaaattcttgatttctctaaaacactaagatgctatctcaatagagattgcttcacattttccagtttcttgatctgtgcatgtcacatgtaaagatccatcccttttcatagtaagaacagctaatatatcacgtaatccattttcttttttatctaaatcctggagtacaacctgtgcaaacttggtttcctctttggcagagttcttcccatcagactcatagagttcaaggcacactgaagatatgcttccaggggcttgcaatgtgtgttgtcttcgagctggcaaaggagtccctgatggaaacagcactgtgaatctactggctcctgattcgtccacacccttaactaaaatatctcttgcttgacactctatcataagagagtcttc

SEQ ID NO: 331745 - DNA, 674 bp, Homo Sapiens
  misc_feature (183)..(183): n is a, c, g, or t
  misc_feature (433)..(433): n is a, c, g, or t
  misc_feature (555)..(555): n is a, c, g, or t
  misc_feature (616)..(616): n is a, c, g, or t
  misc_feature (622)..(622): n is a, c, g, or t
  misc_feature (640)..(640): n is a, c, g, or t
  misc_feature (649)..(649): n is a, c, g, or t
atttaactggaaagtataccaatttcactttattagcctaatttaggaataggatgaggagagcggggttgaggtcaggcatgaaggaagagggtaaaaacttgtgatggttaagatcccttcagaactctggtgcagtcctcaatcactgcagctttactgtcagtcagtggagctgcaatnccaaaggacgggaaaatcgactcctgttttccatttctgtgtccagtgactcttcagttacagtgtgatgaggtctaccaggttgcctttaggaggagtcatgctgtcaggaaagaaatttactaaggtgtcaaagagctgagttctttgagcataggtgtgatccacatcagaaaagcccagagctgtaaaatctgaaccagatttgaatagagctgatgccaggagctgaaactcttttgtctcttcntgggtctgaatgatccacagttatataaagatccttttggtaaatatttcagagcactaagggggatccacttgggccttttcttcaaacatggtgttttcttatgaggtaccttgcaatgncctcagtaaataatcttttggaaggtctacacaacttcagtgaccagaagtccaccaatcnccaccnttggggggcagatttccnggatccccngccgatcctgggcccgagggcaaat

SEQ ID NO: 331746 - DNA, 433 bp, Homo Sapiens
  misc_feature (366)..(375): n is a, c, g, or t
atcatatgagataactatttcttaagaactcaaatgcttccataaactacccaaggataattaatacaagctgtagaccatgcttttagttttggttttaatatcttcaaaatgtagtgtcaggaccaaaaacactttgtaccaaagtggagaaatttcatctatagtgaattatatttcatgaatgattttacgagatctgatttcttataaaatgcaagggagccattaatgacctctgggatatttaatccacaaagtttaggttattgctttatagacagccattattagaagctggtaagaaggagcctaggagtcaagggatatgaattcaggactaagttagcagataatctgctaaannnnnnnnnnaaaactggcccaattacttgggcctcccctcttcaggtggtgtgaattaatcatttgg

SEQ ID NO: 331747 - DNA, 467 bp, Homo Sapiens
tttccgtgaaggaactattattactttaaaagtgagggtaatttacatatggggtgtatatattctaaaaatagtaataaaagtaccttttataagcaatgttgtgtggcttgtagaagaaagcagggaggaaaaaaaggcaggcaaaactagtctaggtctaggccctaaaaatgagcttccttcccacttgactggaaacgcccatgtgatttctaggctgaaaataggtaggatttaacgagtaacctagttcccttctgtctctgatttctgatcagctgatggagctgctagtaagaggggccgatcatgctcccagacgagtcctttggcctcttgctctccatcccaagcctgactccttcagcagcagccccctccttctgtgtccatctgatgcaggcaagcaggagcagtaagagggcatcccatgttccagttcaccttctatggggtgactaaga

SEQ ID NO: 331748 - DNA, 258 bp, Homo Sapiens
tgttcatggtctcaaaaagtcaggctccgtatgagttaccattatagaattcagtttataaatgccaactacataacaggtataactaaaacatgtgctttaaaccaatattcaccaaaaaaagaaacaacaagccaagtccctattcacaaaataatctattgaaaaaaatgtttcatcatagccccttgagtttatcaacagcataagaagtttcaaggataagagagattcacaaatacgtttgctggtgtttta

SEQ ID NO: 331749 - DNA, 491 bp, Homo Sapiens
  misc_feature (168)..(168): n is a, c, g, or t
  misc_feature (474)..(474): n is a, c, g, or t
cttctttaaaaacccttaaaggaatatgttaactatattaacctcatccaaaataattggtattgtaagaattaaagaaaggggaaacctgaaagtttctttcgaaagggggttaagattggccgttaacaaagggactttccccccaacttccctctgtgcccttangctgtcttaatctgtgttttactggtctgctctttctggctgcttgtagttagaagagaagtgatttccttgaaatgcatgaggctagaatgggagctggaacttgaaagtggcagtgtttgtctgagatgatggtgctcctgctctgtcattctaggcccctatagttataaaaggatgaggggcgatgtgttctttctggttacttcctgctgatgggggtgtggagagtttcttggtctcagattgcctgcaggagcaacactgtgtgtagatgttttgaggcagttgtctgcgaaatggccnatgattctgtcagttaa

SEQ ID NO: 331750 - DNA, 478 bp, Homo Sapiens
  misc_feature (131)..(131): n is a, c, g, or t
  misc_feature (151)..(151): n is a, c, g, or t
  misc_feature (178)..(178): n is a, c, g, or t
  misc_feature (183)..(183): n is a, c, g, or t
  misc_feature (198)..(198): n is a, c, g, or t
  misc_feature (203)..(203): n is a, c, g, or t
  misc_feature (215)..(215): n is a, c, g, or t
  misc_feature (220)..(220): n is a, c, g, or t
  misc_feature (232)..(232): n is a, c, g, or t
cagctctgttatttcatcctggtgtgtattcagagtcaaatattggccaggaatggtggctcatgcctgtaatccccaggactttgggaggctgaggtgggaggatgacttgaggcccaggagttccaagncaacctggccaacgtagtgngatcgcatctctatttaaaaaatttgnaaacnaaccaaaaaaagccnaaatncagtgtcacaanctttnaacacatgtttnacacccctgttttccctcatttactagtgctccagtttccattgactataagtctttctatttccattataatggttccatgaatcatttgtctaagagagacttggtctataaattagtgaagaaatgtcattctgtgatactaaattttatgtattcataaatctctggactatagccacttccttggtctgcttatattatcgatttagggaacaatgtcagtaatccaactgtagccttcag

SEQ ID NO: 331751 - DNA, 219 bp, Homo Sapiens
ccacagagttaaatttaaaattctgtttagaatggtaacaaatttaattatgtacaaaacagcatcactttagtgttaggatcagtgttactcaaagtgttgtaatgttaataacaagcatttaaatcacattgtttgaaaactgggatctacaaaaaatatgattccaataattaactttttaattatgggaaaggcaagggaatgttcagtgaatgt

SEQ ID NO: 331752 - DNA, 222 bp, Homo Sapiens
gtgtaagccattgtgcccggcctccatgattttagaaacaccgtttttctttacttaattttttcttaattagaaatgggcccagacatccaacaagcaattattacttaatttaaaaatttcaggattttaaaatatatgaaaactctatttacaagcatttatttttaatttattggagatggagtctactctgtcacccaggctggagtgcagtggagt

SEQ ID NO: 331753 - DNA, 477 bp, Homo Sapiens
  misc_feature (448)..(448): n is a, c, g, or t
atcaagtgagcattttaattatgaaggaaacagaaaacaagttagaagactgaaggcaaaactgacttgttaataacagcaacatcactagttttatacttcagaggacctaaagccaagatgtaagtttcaaggttacagactgggtggcatcagaatatatccttaacacatgtgtcctgctccatcctccctacagcaggctacttacctgcccttccccagccctgaagaaagcccaggtaaacccagaggttacctgaaacttacaccctttccaaaagccttagttaaggctgatgagattaataacatagagactggagtcatcccagtaacattaagaattttaatctaccaacaccaagtttagcaggggaaagtgacccctggccagtcccttccaatatattcctttttttcctttaaagaaaaatatctataagcncaatatattccatttaggatgatgggggg

SEQ ID NO: 331754 - DNA, 358 bp, Homo Sapiens
  misc_feature (18)..(18): n is a, c, g, or t
  misc_feature (25)..(25): n is a, c, g, or t
  misc_feature (31)..(31): n is a, c, g, or t
  misc_feature (44)..(44): n is a, c, g, or t
gtccacaaaccgggggtntcgagangggatntcttgtgaatggnggaatctcactgctttaatttataccacagaacgtctgattgttcagttttgcaaattagcaagtgaacaaaccaatttaaagaaataaagacaatgccacataaaacacagtcctcttatttatcttgatgaggcatggttccattttaatgatttctgttaatgttttattgtacagtggttatgcccccaagtgcattttataagactaatgaagtcttagtaatccgaggcgtcttctccaatatgctcttactatgtctttgctgagaacgcttgtggggagaccgaccaccactgtgtgagcaaggaa

SEQ ID NO: 331755 - DNA, 290 bp, Homo Sapiens
cacccctgtacctgtattttgctcctttttctactatactagtccagtcaagaatggaatggaagctgggagactttagtggctactaacactgaagtgatataggattagactaaagtggtagtaatggagacagggaattggagagatctggtaatatgccttcaagacagagctagtaagacttaatggatcagagattggatgtgaggtatgagggaaagagaggaatgatggcaaccaggttttttggcctacccatagcctggtatttaagactctgtttctca

SEQ ID NO: 331756 - DNA, 149 bp, Homo Sapiens
gatctaagttcttcttaatttttctcctctgaagagaaagttcaagttctaaacctttagttatttctaatataattcttccacagcctcccataatatcctgaaattgtcatcctttctgtgagatgataaagtcttccttgatttga

SEQ ID NO: 331757 - DNA, 184 bp, Homo Sapiens
gagtgattatgcctccgtggacatttgacaaatgtctggaaacgctgcagctggcatctggtgggtgcatagaggtcaggggtgctgctaagtgtcttagaatgcacgggctagaccctacagccaagaactctctggcgcaaaatgtcaacagtgccgcagttgagaaaccctgcattataca

SEQ ID NO: 331758 - DNA, 271 bp, Homo Sapiens
cttgtatcctatattttatgggcaagggactaggactattccaaaggtatccataagtgaatatccaatttggaatttcaaaacctaaaagtttaatagataaaagtatttagagtctacttaagtccttttaaatctggaattcagaaggctttgtaattaaaaaaaccctgaaaacctaattacatgaagtccaagatgttaaaatacagaaaaagttaatttttgttcatttaaaaatattatttattcggctgggcgcgggttgtca

SEQ ID NO: 331759 - DNA, 462 bp, Homo Sapiens
tttgagaatcacattaaagtaatacattctgaaataatttgctttatagtcctgagagtcacatagaagtaaaacattcttacctactgactttgaaatcacgtccactaaatttctctattcatactacctccctactcctacctcggctctactcctgtagctgagaatcttctgtctcttcctacagcacagcaccaggtcaccagccaggtcagtcaaagccttgatttattgtttttgaggagtgggggtagggggacttaaaacaacaggaatttattctctcacaattctggaggctagaagtccaaggtcagtagggaccataagctctaggaaagaaacatttccatgatttgttcagcttttaaatccccaagttttccttgcagcatcttaattccaattctgcctttatcttcacatggtgtattagtcccttctcatgctgctaaataa

SEQ ID NO: 331760 - DNA, 391 bp, Homo Sapiens
atctttgtgatttggattagacattttttaagtggcacaaacaacggaaaattagattaatggacttcatttaaattaaaaactttgtatgcttcaaaggacactgtcaaggaagtgaaaagataatccacataatgggagaactatttccaaattgtatgtttgacacagctctagtacctagagtatataaggaattcatataactgagcaataaacgacaaccacatttaacaatggggaaaaaaagctgtgagtagaggtttctctaaaggaaacacacaaatggccaagaagcacatgcaaagatgttcaatgtttttcgtcattaggaaaatgtaaatttaaaccaaaatgagataccacttcaaaccctgcagtatgacttaag

SEQ ID NO: 331761 - DNA, 499 bp, Homo Sapiens
  misc_feature (34)..(34): n is a, c, g, or t
  misc_feature (442)..(442): n is a, c, g, or t
acttgtgacaaccaaatgtatgagtttttaaatntttttttaatgtcaacccaatcatccaagtctctgggcacccaactgagtgttctacaattccagttcagacactgtctggggttagcccagaccccacgggctaaaaactgtctcaaagtttaccccgcagtagaatctccagttaaatcccatgttatcacctgcagttttgaccaaccagcttataaattgggggtccccttggtgacttgctagaaggtttcccagaactcaggaaagcatcgtacttactattaacagtttattataaaggatacaacccaggaggagatacacagggtgaagtgctctgggtgtgatgcctccatgctgtctcctggcacactgctctcccagcactttgatgtgttcaccagccaagatgttttctcaactctgtggttcnaggagttttgatcgagctttaattacatcgacatgatagattacatcattggctatt

SEQ ID NO: 331762 - DNA, 638 bp, Homo Sapiens
  misc_feature (254)..(254): n is a, c, g, or t
  misc_feature (311)..(311): n is a, c, g, or t
  misc_feature (390)..(390): n is a, c, g, or t
aacagtgtagtcgcttccctttttaggaagccctgttaatatgctcattgaaaacatggcattgaagcaggcacttgcgtggatgtttctcacttgagcacgatatttaggctctcttccaactcactctattctgtcctcactcctgttttggatttttctctttgcatgtttgaaatgttttatgtgaatgtattagaaactctttttcttcttaagggactgagactttccaggggattgccatctttacnctgtctcttctccatgagggagaaggaagcagctagctatggtccctagctgcaggnaagcccctattttttcccaagcacgaagccaccaggtcttccccaagggagcaatcagggaagggacatgggatgtgcntccttccacagggcccttcctacctttggatctgtgaagaaggtgaatacaaagcagcaggcagagtaaaatctgctgggactgcctggagatttgtcaggagctgcagacaagtaccttggagcattctgttatttttggaaagttcaaatatgcagggacaaggaggttgctgactgtactgacaggctctaagtcattttctccaaaaactatctattcaattatcaggggctggtcttgaggaa

SEQ ID NO: 331763 - DNA, 217 bp, Homo Sapiens
  misc_feature (113)..(113): n is a, c, g, or t
  misc_feature (177)..(177): n is a, c, g, or t
  misc_feature (193)..(193): n is a, c, g, or t
ataaagtgtctggtagtcttaccctctctataattacacactttttggcactgcccctttcctgccatgcatagccccaggggtgaatctctctatttctccagctctgcatncagtcactgtcctccgtgctgtgtcccacgtgctgtgcccacaaacctcatacaaccggtgacntcagagccaggacgcnacgcggagtcttccctgaggctcc

SEQ ID NO: 331764 - DNA, 504 bp, Homo Sapiens
  misc_feature (359)..(359): n is a, c, g, or t
ttttttaaggtaccagatatactaaagtccactaatattctaaaaatagctaaataatctttgcatttaaataagttaagtttccaatataaaaattttattaatgtaaaatttttaaagtagcttcatttctctcatataatcaaacacacagattatttttcctttgttctagcaacttcatttctagaaatttaacctacatatatacttagatagatgtggaatattactcacaaaattatccactactgcattgtctttaatagcaaaacactgggaaccacctaaatgtcttatcaacaggagctgggtaagtaggctagagcacaccctgggaataaaatagcatgtggctnactgccacaaaatgaggaaacttcatgttctgatagtccaagatcgggtaccaaatgcactggtttactcacacacacacaccactcaaccactgactcacccagagcaacttccagttccacaggctccactcatggtaagtgt

SEQ ID NO: 331765 - DNA, 272 bp, Homo Sapiens
  misc_feature (17)..(17): n is a, c, g, or t
  misc_feature (27)..(27): n is a, c, g, or t
  misc_feature (34)..(34): n is a, c, g, or t
tggggcctcaacacacntgcccaaggntggaatncaagtggctgttcacaaggcaccatcatagctcactgcaagccccaaactcctgaattcaaagggatcctcccgcctcaacctcctcaagtaagctgggactacaggtgtgccacaatgccctgtaaaggactcagatcccaaaaagttttaagacttatacactgtttcacggaaaagaaatatggaacagtttcaacatctcagtgctgctcaggtttaagaaaagcaacattcag

SEQ ID NO: 331766 - DNA, 283 bp, Homo Sapiens
cccttcactttgttctggaatttaaaaagtgtcttagagcccattactttagccttagcttttttggacagcgttatcttataaactttccttgaagtgagctgctaagcagaagaaaacttgtttctttttctttttaacctttaccacaattctgtgggccaaagggatcaggagacagacatagagcagtagaaaacctgagacagagaaaagaagaatgagagagactcataacagatggtaaagtagaggaggggtgagggatttgccaagaggtgac

SEQ ID NO: 331767 - DNA, 672 bp, Homo Sapiens
  misc_feature (24)..(24): n is a, c, g, or t
  misc_feature (557)..(557): n is a, c, g, or t
  misc_feature (612)..(612): n is a, c, g, or t
  misc_feature (626)..(626): n is a, c, g, or t
  misc_feature (660)..(660): n is a, c, g, or t
gttatacattttccacttacaaanagaagacaattctgttaaatgaaacctgtatcgtaaaatgtatttttattttacccacgagaatgttgttatttttagcaaatagaactcaatgcagtgcattggttattaccctgtgtaccttgtccctcattttgctgtgacaccctgaaaaagctgaccacaaatgcagtattatcttgacatacctctgtcctcctcagtgctttttaatgaaatttcacctgccccttgtgttcctgctttggatagtttttgctcttaagcatttggcattcttctattgtatggtattgtatttatagcaattgtagggatgggtctgaaatggtccacacactttctatgcatacaaattttgtgaattcccaaagtatgctttggaattggtcataagtcttttcgtatcatgagtgtgtatcccagaagatacagaatgcggtcattttacctgaaattatttgagaacacctggatgtatctgggtctgtgtaaaaagttagcacttttaccctcttttcttcctggccaanccctctgaattcatctggttaatatcaaattggtatttttgccacatttctgtantggtgaaaagcgantctgcagaataactgccaacgtgtttcattcctngttttaacaaac

SEQ ID NO: 331768 - DNA, 419 bp, Homo Sapiens
  misc_feature (263)..(263): n is a, c, g, or t
tcaacaacagaaatttattttttcacaatactggagtctggaagtccaaaatcaaggtgttggcaggttggtttctcctgaggcctctctccttggtcttcttgatgaatcctcacatggtctttcctttgtgtgtgcaactcctgtgtctctttttgtgctcaaatttccttcttataaggaaaactgtcagactggattagaacccaccctaacggcttcatctgaacttaatcaccccaaagccctgtctccaaatacangtcacattctgaggttacggctgttagggcttcaatataattttcgggaggacacaattcagccccataacaaccccttccccttttctctggcccaggctaattcccatttgttttcccaagactggtccaagccttcccactccagagtaactt

SEQ ID NO: 331769 - DNA, 445 bp, Homo Sapiens
aaatcttcttggctttttatttaacttagcagtgaatgcagcaggattggcttaaagtataggtacaccccatggaaacatgcaataagatcacatcgatccagaggctggctcaagtttgactgaggggaaacggagggaaggctgttcctagcacacaatctcagcagaggttgaggtggtggggatttctttcttctcatatgacgctaccgtcggtgacttcttactaggagaccactgagcactgaatcaaggtttctaatatgtttcaaatcaagattttagagtgtattttcttatggcaatagagttataaaatggtaacctatgattttcctcatataatgagatcttcataaagtccttgagctttttagactttaacaaattcagctacagatataaaaaataatctgtaaacacctttaaaatgcgaatttat

SEQ ID NO: 331770 - DNA, 288 bp, Homo Sapiens
  misc_feature (214)..(214): n is a, c, g, or t
  misc_feature (265)..(265): n is a, c, g, or t
  misc_feature (278)..(278): n is a, c, g, or t
catatattggactgccttttaatcattcacaatgaaagaaatctcaggcattgcaatgtcatttaaattgcattcatatttaaacatgacttaaccatattaccaggcgtttccaactctgagtttacagtatgttttgatttgatcattacagattataaatttgagctggttttaaaatttctggcattgacttaagtttatatacatagcnaattgttgtatgctagcagcaaaataaattttccccaaaagaggcaaaacntttactcaggacntacatttcgc

SEQ ID NO: 331771 - DNA, 386 bp, Homo Sapiens
  misc_feature (311)..(311): n is a, c, g, or t
  misc_feature (350)..(350): n is a, c, g, or t
  misc_feature (356)..(356): n is a, c, g, or t
  misc_feature (361)..(361): n is a, c, g, or t
ttttaaatggtttttacaagatccacattttaatttgtatattccagaattgccacacagttagttgaacaattttatcagtcaaatttatcctcacgaaatctagcacttataggtgaagatgcatcccaaatgaaatgctcttattttcagatttatcaagtttaaagatattctatcttgaacagacatgttactttcacctacatttgaaatgtcaaaatttctagttacacaaattgacagtgataaccttaaattgttacaaaaagtgacaacttataaacagccactttacaaaaatcaaaccncacagaagaacgtctttcacatataatgcaccttttcantatggntaggnatttccggtcagtgggccacaattg

SEQ ID NO: 331772 - DNA, 224 bp, Homo Sapiens
gtgagcatggggccgtattttaatacaagaaagacattgctctagaacatggctcgcctttgcttcagggcctagcagtttattttagccataagggtaagggagcaggtcagaaatgacttttagtgtaatcctatctgtaattaaaaatacaaatgctgtcataagatcaaatgttatcaaaaatcagtatttaaaattaaatttacccccaaatttctttc

SEQ ID NO: 331773 - DNA, 758 bp, Homo Sapiens
  misc_feature (31)..(31): n is a, c, g, or t
  misc_feature (180)..(180): n is a, c, g, or t
  misc_feature (402)..(402): n is a, c, g, or t
  misc_feature (413)..(413): n is a, c, g, or t
  misc_feature (429)..(429): n is a, c, g, or t
  misc_feature (471)..(471): n is a, c, g, or t
  misc_feature (560)..(560): n is a, c, g, or t
taattttaactgccagacctttcctcttctnggtgcctgagggaaacgccctgctgcttttagctgtcttgtaacccacacgccttttcacttctgaagttgcaagaataacggctgtggtttttcacacaaaagggttgcagactgggttaggtccctgttccctgccaacctgggctngtttcccagtttcagttaacttagtggtttactagagccccacacctttctctttcatatggccatgatccaggaaggtaatccgtcacctcccctccactagagtgctccatggccatgggataatccgtcacctcccctccaccagagtgctccatggccaggggtaatcctcacctctcctccgctagagtgttccatgggccaggcagtgtttcctgnggtccagagcnacctcaaacaatttcnagtgttgtggtgactcagggccttcaccatacagacttgacnagcatagtctagaggctggaggggctctgtgactcccattaatgacagtcactgccacggtttccccaggcaggatgtgccaggagaantgctccatgttggctcagcagaatgttattataggtagctcaaaaagagagggaacagggcttctctagattatttcagggaacgagctattatttgaatgttaatttaagactattttatcaattaaaaatgtaaggcccaagaaacttcagtgaggaagaatgaacaaattgaataaatactgttaaactttaaaa

SEQ ID NO: 331774 - DNA, 260 bp, Homo Sapiens
  misc_feature (17)..(17): n is a, c, g, or t
  misc_feature (68)..(68): n is a, c, g, or t
  misc_feature (206)..(206): n is a, c, g, or t
ccccctatatgtgttanccctgggaaaatatgatgaatgggtatgtgtcccacggcaaaaactgcatnccctaatacctatcctagccagctccccaaagcaaaagtataggtaaggttttcagagaaaattattgctataaaatctgaagcttaaagaaggcaatgactttgttttcctatatgaaagaagcacagtacgtatcnattgatgagtcattatcaaaaccaattttgggcttggtatggtggttcacaccg

SEQ ID NO: 331775 - DNA, 372 bp, Homo Sapiens
aaaatccagaataggaccagccaattggccaatattgcactaaggctggggggtacacattccttacgacctaagaattctgttccttggcatgtgctccagagacagcctcacacctatgttcaggaatgttcactcagcataacttgtaattaggcaaatggaaaaccagcctaaatgcctgtcaattaggagtgcagatagacacactagggacaatttccatgatggactatttcacaagaggaaaaaatgaacacaacagaattcatgtatcaacatggatagtcccccaaaacaatgttgaatgaaacattaagtagtgtaggggtataattggtatgataccatttatatgatgtctaggaacaa

SEQ ID NO: 331776 - DNA, 440 bp, Homo Sapiens
ggagaatgaaggtttattcaaaacaagtggacaggtcaggggtaacgggtgatgagggcacctggcttttgtaatcatgtggggactgtcccctgggaggtgcagcaaaaatcagaacggagacagaagctcacagtctggttttagctgccaactcctatggaagtccatagctgactcctatggaaggcctaccaaatgaggaaatttcaggaatttgctaatgcttgggaggattgaaaatgtaggcagcacagaaatagagtagttggtttaaacgggaatcaggaaggattggtataacaaggcacaagatttggaatttaccctttacagactggcttttataacacccaccctcgtctctgaagcctgctgattcagggctagcagacctaggggcaagtttggggccagttcacccacccagtttattgccc

SEQ ID NO: 331777 - DNA, 557 bp, Homo Sapiens
tgattttcgtcctgaccagactcaagtcagaagatgagccaacgcgctctctcagtggcctcatcctcaagaacaacgtgaaggcacactatcagagcttcccaccccctgtggcagacttcatcaaacaggagtgtctcaacaacattggcgatgcctcctcgctcatccgagccaccattgggcattcttcatcaccaccatcgcttccaagggtgagctggcagatgtgggcccgagctgcttgccccagctctgcaacctgcttaactcggaggattacaacacttgtgagggagcctttggagccctgcagaagatctgtgaagactcatcagagcttctggacagtgacgccctcaacaggcccctcaacatcatgatccccaagttcctgcagttcttcaagcactgcagtcccaagatccggtcccacgccatcggctgcgtgaaccagttcatcatggaccggggcccaggcgctgatggacaatattgacaccttcatcgaggtggggccgctgggtgggggtgggaaggcgaaggactgaggggcc

SEQ ID NO: 331778 - DNA, 508 bp, Homo Sapiens
  misc_feature (119)..(233): n is a, c, g, or t
  misc_feature (394)..(394): n is a, c, g, or t
  misc_feature (413)..(413): n is a, c, g, or t
  misc_feature (489)..(489): n is a, c, g, or t
ggtccagtctccagaactgtgaaaaaaatgaactggtgttgtttaaatcccccagtcgtggtattttgtcattgtggccctagaagacaatatacaacccaaaggaatattctttccannnnnnnnnnnnnnnnnnnnnnnnnnnnnnnnnnnnnnnnnnnnnnnnnnnnnnnnnnnnnnnnnnnnnnnnnnnnnnnnnnnnnnnnnnnnnnnnnnnnnnnnnnnnnnnnnnngccttcctatacctccatttgcctctccaggaagctgaattccagacaattaatcattcatctcatcagttcagcaaagcaaatgccctcaatggtttcttttgtgattcgattattatgggatcagaatgtatcttattcctctgggaaaaatgaaacantaaaaattcaggaaataanggtttttggggcaagcttaattgggtttaagagaaaggaagggaggagactccatgcagggttgacgctgagcagnacccatgtggttggggccc

SEQ ID NO: 331779 - DNA, 453 bp, Homo Sapiens
  misc_feature (45)..(45): n is a, c, g, or t
  misc_feature (130)..(130): n is a, c, g, or t
gggtgtgaatatctttgagaggcccattatcctgccctaccgttnggagggaagccattgataacatcttgagaccgtttaaaccagtggtacccagtcataagtgaccgtgctgcctgcagggggacantttagtaatggctagagacattttttggttgtcacaactaggagaggactgctactggacatctagctggtagaggccagggatgctactaaatatcctataatacacagaatagcatccacaacgaagaattatctagcacaaaaatatcaatagtgattgagttgagaaaccctgatttaaagcacaagattccttgaaatctaagttagggaggttacaatgcaatggaaatcagtttcaggattcagacttacacggaaaagtctgcaaaatcacatacaagttttataactctaagtttttgatgaccttatagggtc

SEQ ID NO: 331780 - DNA, 872 bp, Homo Sapiens
  misc_feature (289)..(303): n is a, c, g, or t
  misc_feature (802)..(802): n is a, c, g, or t
  misc_feature (850)..(851): n is a, c, g, or t
tcaggaggatcacaaagttgtttattttcccacctataagaaaagatggatgatgcagagtgccgagaaatcccagccattcccctggtgaacatactggaggcccacacgagcctaacaggctgtgtctttaccaagggattttcctctatttcaacagaactgcaatttcccttccaagtgctccccgaggcattctgtcatgctgcttctggggataatttatcatccacgtctgtgctattctacagcagccatgtccttagaacatagaaaatctgattggccnnnnnnnnnnnnnnngtgccaaaatgtcaaatttcatacaatcagggcaagaactggtcttcttttggcatttggactggctgcccccttaaaaaatgtctttcttttccttggccccttagccaaggccccgccagaggccagagaaagggggtgacactttagccttcgcattaaaaaatgagccaaggttttcaaccaaacagttgagcaactgggctcattttttaaacaccgaaaatacatcagatggacttattcatctggctcagcttaatacatgttggcctaatgctacaaatacctaacattaaaaaagtctgagggtataaacaagtacagaccacagtcactggcagcaatgatttggcctggaggtgcacctgcggctgtgcggcagaccagccctcagaaccagtactcagagacgaagatgtggacgttgacaacatttcggtgggagaccacgcccccgaccacatagttcatctccagcttcaggacggcatgaaantggccacgatgggccgcacctggcgcacgacacccacggtcatgccgnncatgtaacgcttgatgatgtc

SEQ ID NO: 331781 - DNA, 548 bp, Homo Sapiens
  misc_feature (179)..(221): n is a, c, g, or t
aatttcaataatagattttattgaatttcatacatccaaaatacaattatttcaatagatatttaatgtaaaaggttattagatattttacagtctgtgtttcttaccaaggccacaattccaatgtgtattttacactcacaacctgtctcattttgtaccagccacatttcaggtgnnnnnnnnnnnnnnnnnnnnnnnnnnnnnnnnnnnnnnnnnnngttctcacctgcatgtgtcagaatcacctagagccggggttaacaagcgttttccatagaaggccagatggtgaatattctaggctctttgggccacacaactgtcacaatgcttccgctctgccatcgtagtctgaaagcagctacagacaatccagaagtcaataggcatggctgtgttccagtaacgtgttctttacgaacactgaaatttgaatttcgtattttcatgaatgacaaaagattgtttttcgttttgatttgtttccaaccatttacaaatgtaaaaccatttgtagctggcagtgagccagcatttgcccaccc

SEQ ID NO: 331782 - DNA, 293 bp, Homo Sapiens
attataacattttccatacaagacagtgcatatgttacagtgatttgattggttacagattgctgcatcccaaggaagatgacattattactctgtagaaggggcagtgatctgagggggttttatctctggcaccacttagtctcaattatttataggtggaaaaaaggcagaagttgcagctgcatgccatgtgactcaggcttcatagtcacatttcctcttcaagactcagaacaatttaagttccaacagctttaagtttgaattatttggctgggtgcagtggttca

SEQ ID NO: 331783 - DNA, 482 bp, Homo Sapiens
  misc_feature (52)..(95): n is a, c, g, or t
  misc_feature (167)..(385): n is a, c, g, or t
  misc_feature (457)..(457): n is a, c, g, or t
atctaaatggagcacagaaagtggaacatggcgacatctcagccaaaagacnnnnnnnnnnnnnnnnnnnnnnnnnnnnnnnnnnnnnnnnnnnnagcctgtgagcagtgctgacatcttattatcttcgatatggcgtcatgagcaggctgcctcctcttggtggnnnnnnnnnnnnnnnnnnnnnnnnnnnnnnnnnnnnnnnnnnnnnnnnnnnnnnnnnnnnnnnnnnnnnnnnnnnnnnnnnnnnnnnnnnnnnnnnnnnnnnnnnnnnnnnnnnnnnnnnnnnnnnnnnnnnnnnnnnnnnnnnnnnnnnnnnnnnnnnnnnnnnnnnnnnnnnnnnnnnnnnnnnnnnnnnnnnnnnnnnnnnnnnnnnnnnnnnnnnattgggacaagcttggtgaaacccaagttaagtccaggcttgtaccaattgtccactttccagttctgaggnacatgctgtggtctgtccacatttt

SEQ ID NO: 331784 - DNA, 624 bp, Homo Sapiens
  misc_feature (22)..(22): n is a, c, g, or t
  misc_feature (109)..(109): n is a, c, g, or t
ccaccattaggcatgtgtgtanatatccatacacagtatatatgtatatgaacatttatctattaatgaggaaaatttaaaaggaatgtatccatattctcttaacccntcacccttcagaacgagatggcatttccctgcttctccctctaaatacaactaacttccctggaaattatccatcaatcaacaacaggactctgaaagctggaagaaaaaaaggtagactagctaggaagctcaagaccagaaacagacaagccttaggttttctgtctgtctcccatatacccctggactggttgctagtataacctgtaaccaccaataggtgaaaaacagggtggaggctgggtggaaatgcattctctgaacaaggtaaacccaccgaagacctaatgaggaaactcaagccccattcagcactctcggccatggagcactccttactacctgcattggcaaagcaacaaaccctgggctgtgctatgggactgtagcagtaaaggagctcataccaagccagtcccgcttctacaatcatagatggcaggcggtatgacccacatgaagctgtagagtagtgaaacccctgaccttcacagcccaaggcaacattttgat

SEQ ID NO: 331785 - DNA, 484 bp, Homo Sapiens
  misc_feature (289)..(289): n is a, c, g, or t
  misc_feature (404)..(404): n is a, c, g, or t
  misc_feature (441)..(441): n is a, c, g, or t
aatctcttttgacagtttaattggcagggctccagccactgaacctaggagggtacaggaaagaagtttttcctcccctacaattgctgagcttcttgcttaatttagaggctttccatcccaattttattcctaacatggagggcgtggagataaatattataaaaatataaaccaaattcatgaaaagctggagagttccaggggtgacagcaatcagtcattctcatttaacaaataccagttgagtgcttacgacttgccaggcactatatcaggcactggggtnaaagatgaataagcgggaaatgctttctagagacaggaacagagaggagcatgaacagcaataactaactgcctggagaagtccaaaaaaagcaaagcttggtcataacagggcntaaaagggaaaaggagcaatttcaatcttcctaaccncaagatttcccattaaggcagacaggacctggcaaatgtagtt

SEQ ID NO: 331786 - DNA, 512 bp, Homo Sapiens
aatttaaaagatgattccccggagtagtacagtatcccttgaaccagctcctttaactgtacatattgatcatcttgtggtagagagaagtgacgatggctcttttcatatcagagattctcacatgcttaacactggaaatgatttgaaagaaaatgtcaaaagcgattcagtgctgctgaccagtggaaagtatgatctgaagaaacaacgcagtgtcacgcaagccactcagacaagcccaggggttccttggccttctcagtcagctaactttcctgagttctcctttgacttcactagggaacagctcatggaagagaatgaatctcttaaacaggaactggctaaagctaaaatggctcttgcagaggctcacttgggaaaaagatgctcttcttcatcatataaagaagatgacagttgaatagcaggagtggcagtcaaaactgaaattatagctctgggagtaggaaggttatatttataatgtggatgttaccagttagggg

SEQ ID NO: 331787 - DNA, 840 bp, Homo Sapiens
  misc_feature (230)..(230): n is a, c, g, or t
  misc_feature (270)..(270): n is a, c, g, or t
  misc_feature (504)..(504): n is a, c, g, or t
  misc_feature (748)..(748): n is a, c, g, or t
  misc_feature (794)..(794): n is a, c, g, or t
  misc_feature (801)..(801): n is a, c, g, or t
aatgcatgcatgcggattaaggtcaagcccctagtatcagccatgcagcgggctctcccttccagctgcagccgcagagccctacccacagccacgagatgccttaattgagacgtgctgtcaaagtgacaaacacatttgcatacagtctacactctatttattttctctggaaaggtctacagtctgctgttggttgaacattcttaatcagtttgctgtaagtgaanttgcagctagctcacttatggcgggccccttcttcattanggtgacagattagctgaagagggaggggggcttgagccagggaaaaccacagacccctttcttttaactctttccagctttgcccttatggtaggttgtccttgagtcttttcccgggtccctggtttgatgggctgttgaccgtaagaagtacggtttctagagcacctactaccggcagcatgagttttaaggacttgatattcttcccaaagaacagtctcttgagtttcnatttcagaagtttttaccacactctcttaccatctatactattttctttacttgatagttttctttaaataaggactcagacctgacatctaatagcatcttaagcctcatcttcaagaagatgccattgggtaaaattataggcttgatatactagtcccagttttttctaacatataaaacaattttaagtgttcatctatgaatcacctaatgcactcacgtagccctaatggtatatatntctttttttggaaaccaacagactccttggtacttttttgttgtcncacacancctttgaggaagggacattagcccattttattgaccaga

SEQ ID NO: 331788 - DNA, 582 bp, Homo Sapiens
  misc_feature (214)..(223): n is a, c, g, or t
  misc_feature (361)..(369): n is a, c, g, or t
aataatctttttatcaggacaaaggttatgggcgaaggatagacagaattttggcactgctgctttcctgagccaaattaagtagtttttctaaatcatgaaaaaagagcatgactatccatctggaacttcctagattgattttcaaatgatagttcctctttgaagtatttacaggtctgtttttgccagacatcttttcatactgggaacnnnnnnnnnngtaatatccactaaagttaatctgcctttatatagacttggatttttaaaaaaccaaaggatatattttccattcagatttatggtaactattttatgagtaaatagaagtttgaatatttttcttatggtttaatcnnnnnnnnnaaattatatttattggtgatataaatgtatcagatgtatcagtgcctgtgctcaccaagttcgtctcctaagaagcagtttgtgtgctacaacgtatgcgtatgagtaaatacacatgaacaactgctgggctgccaggtactcccagcaggacagcgctggccaggggggagaggtctgctgagggaaggaccaccctcatgggcgctacca

SEQ ID NO: 331789 - DNA, 718 bp, Homo Sapiens
  misc_feature (14)..(14): n is a, c, g, or t
  misc_feature (31)..(31): n is a, c, g, or t
  misc_feature (133)..(133): n is a, c, g, or t
  misc_feature (164)..(164): n is a, c, g, or t
  misc_feature (193)..(193): n is a, c, g, or t
  misc_feature (243)..(243): n is a, c, g, or t
  misc_feature (258)..(258): n is a, c, g, or t
  misc_feature (264)..(264): n is a, c, g, or t
  misc_feature (284)..(284): n is a, c, g, or t
  misc_feature (317)..(317): n is a, c, g, or t
ccttggccttccanggatcaaccaacccatntcaacttacatcaatcatggtcccagtcagtcctacagcattcctggcctctgccctgggtttttcctcaattctactctaagccccaaatttgcttgtccncttctcaggggtggccatcccgttttcttancctgcaatctttcttcctctggccctctngtccttttgctcctcctgttccggcccaaccccaaaccgcttccccctgntgccctgatttcatnggggangaaatgccccttacttcaanaccttccagaccttgtggctttgtcaattggantccttgttggctgaggactcttggttaatttaggaacccggaaatgtgtacaagagagaagtcagtaactggcaaaaatgtatgtataaaggaggaggaaaaaaatgcaaggattactgaatacgggaagaaaataactaagtttttacttttctcacacaaaacacttatcgtgctctccagaccccaaccctgacataattcctaaacaaaaaacttttaagagcccctgctcaagagttttcagaacaagtctcaattcatttttttacttctctagcatgtgtgccatggctgactgagtaaatctggggttgcctgaagaggtcactgagtgcatcctcggctttaaacagtttcatacacaaccacttcagagaggtgagagttctctagttttt

SEQ ID NO: 331790 - DNA, 856 bp, Homo Sapiens
  misc_feature (813)..(813): n is a, c, g, or t
ttctctgctgcctcttcatacgttttctcaagaacttcagtttataattggaagagaaatttttgctgttaatgccagaatgagcaacctcaaggaattgaacacttcttggaaaatctaggtaattcaagccctcatcaggtttacaagatcatcagagaaacagaggattttaatttttagttctggccggctacaggctccatttctctgccttcccattggaaatagtttattttccacatttctccactgcgtgtggtcaaagttcctcacccagcaagggactatagatactcgtgtcccaattccaaaacacaatgcacaagctgaacttgggctgaacgtggcgtgttgagatttggaatgaggtttctaagagccgtgttcttcatggaattttccaggccacttggcagcttggtttaccgatggatgggctagagatcttgtcgtttcttggaagtcacagggaagattgaagagaacgcttgagcatccttggcaacagccaaggtgggacctggattgaagctttgcactcaagtattgtcaagggaagcttcctgtgaaccaaagttctcaggccaaggtctcgcccaccaaagccagaaagtgcaagcacccgtctacccagctctaacttgtatgtgtgagacagaccaggcttcgggggtaggaggatctgcagttgttcagccgtctttctgctggtgttgtctttctggccatcagagaagggacacacagcccgttcgaaggtgtgcagagggctctgagcgccaggatggcaggggctgtttttgctactgnaaggagcgtgtgtcctgaactcccacttgcagggacagtccca

SEQ ID NO: 331791 - DNA, 407 bp, Homo Sapiens
  misc_feature (50)..(110): n is a, c, g, or t
  misc_feature (357)..(357): n is a, c, g, or t
  misc_feature (370)..(370): n is a, c, g, or t
  misc_feature (385)..(385): n is a, c, g, or t
ggtcctgccttgttgctcaggctggagtgcaatcatttttcacggtaacnnnnnnnnnnnnnnnnnnnnnnnnnnnnnnnnnnnnnnnnnnnnnnnnnnnnnnnnnnnnngtgtgagccaccttgctcattctagtttaaactttggagtggtttgtgtctcctgattggactcctgcaaatacagaattgatgctacggaacgggtaccagggacgatagacgcacacacgatgggatttggggaataggtttggttatccaaggagcagtgctgagctccttgcttaatggggatatggggatgctgggtgatttccagttaagttgaacctccaaaattactcaaggctaacanatactggtggatngtgattgaatggcangttgaagaactgttcttgcaag

SEQ ID NO: 331792 - DNA, 417 bp, Homo Sapiens
  misc_feature (223)..(223): n is a, c, g, or t
ttgttctgcatgaatgttgatttaataagacaaggatatacaagtcgtgctaaaaggcacattttaaaatttataggattttctggaatattttacccacatggattaatatttttcaaaaacttacttccaaaataccacatactactaaaattaccctgcatgcactttgacctttgaatcagaatatttcagtatctcttacgctgtgggctgcaaactntgtagtgtgtgaagcacccctttgagaaagggcaggaccaaaccgcctttcactctggggagcagcttggtttgctttagaagaatgtttgtcccctgcttttggatgtctgccctgcagtttcagggtaaacggctgtctttttccttttagaaacccaagtctgatatggtgaggacttcccttcgtttaca

SEQ ID NO: 331793 - DNA, 307 bp, Homo Sapiens
aatatgaaagctgaaagaatttggcctgaaagtagcaagctgaaaacaggtctgtggttttaaggaggcttgacttgagcaagtgaataatatattaacatgcccaagaatctctccctgaactggcaggaaaaaccaccaagttcagtttctttcacatgaagacacagccaccatatccaagggatgctgggcccctgctgctcagtccatggcatgggaggtgggggccaactctaaacttgggttgtggaaatactccagttttattttcttctttttctctatctgcattttcttgcttttc

SEQ ID NO: 331794 - DNA, 864 bp, Homo Sapiens
  misc_feature (232)..(232): n is a, c, g, or t
  misc_feature (234)..(235): n is a, c, g, or t
  misc_feature (237)..(237): n is a, c, g, or t
  misc_feature (240)..(240): n is a, c, g, or t
  misc_feature (244)..(244): n is a, c, g, or t
  misc_feature (253)..(253): n is a, c, g, or t
  misc_feature (732)..(732): n is a, c, g, or t
  misc_feature (805)..(805): n is a, c, g, or t
tcccccccaaaaatacttttcttgcttaatttactttcttggtaagagtgaatagaggctaagtgataatgccactacactgattaaatgacttactggcacaaaactattgaggcttaactagttgactgttttaataacatcattaaaatttcattttggtttattagagcacatccatgcaaagttggaatctaaccattctcatgtctccttataatgcctaaggggngnntnttngaancagtatttntgccaactcatactttctattttcattctgtaaagataaaacatgtaagtgaaaacgttttaacaaacattaagaaccttcttcgaccaggcactctccttcgctacaaatttccacattacctatttttttattagccatttttgaactctcttccatttctaagtttctccctgcagctttcctgaacatgaagcatttccttttcttttcatttctagctttcctttctctgtacctcatgtacacttggaagcttcagggacttagcactggtcatgccagcctctacagatcacatctctgtctataattgggtctccatggtaatgagaagcagaaagtgctgaagtagcgcactatgtaaggactggcaagagaaaatactggtcgcggcctctacaggcatagcattggaatccccatggtgcccaagaagcccgagagaagcacgctgtggtgtagagcaggagactganggacacggacttgggcagatttattagcagcaatattctaagatgaaccaaattttaagagtttgtaagtgcncctttcaattgggaaaagacctttgaaattttttttcctttcctttaggaggccagatg

SEQ ID NO: 331795 - DNA, 354 bp, Homo Sapiens
  misc_feature (271)..(271): n is a, c, g, or t
  misc_feature (340)..(340): n is a, c, g, or t
ataattatttaaatttatctacatgtacttagcagctaggacttagaaaatacacttgcaaatattcttttctgtggcacatttgtacatggagatgatggggtatgattcatgaaatgttttaaaaatgaaaatgtaacatactgtggcaaaggttctactttcttggttccaatttaagtctcttgaaagcaaatcctattttcttattattgtccatatatttactgtcagagattttgaaattttgaagaattaggaagcatcaatnaacttaggagtgctgttaggacacttacttttttcctggagtaatcatcctgcctctgaaaccttcctnttgtctttagcatt

SEQ ID NO: 331796 - DNA, 412 bp, Homo Sapiens
tgaaagtgaatctgctccaggaagccttttctgttctgactgttcaggtctgggtccttattccttcctgtgccttcttttggttcacttttcagatagagactataagatggttaaaaacaaaccatatgttgaccaccaaccaggcatgggcacagactgagcatccttaaagacattattccactagagtctcataagagttcattgagggacgtattattatccctactttataaatgatgaaattcggagtcatgacccttcataacttgatccataggcaagcaggcagtaaatgcagatgactaacaatatggcaggattcaaatccagggtcttgcttaattattaaaacccacagtctttaccccagtttcaccgaagtgttaaattttaaaggttaagtggc

SEQ ID NO: 331797 - DNA, 456 bp, Homo Sapiens
gaagaagatgatgattacgggtctcgaacaggaagcatctccagcagtgtgtctgtgcctgcaaagcctgaaaggagaccttctcttccaccttctaaacaagctaacaagaatctgattttgaaggctatatctgaagctcaagaatccgtaacaaaaacaactaactactctacagttccacagaaacagacacttccagttgctcccagaactcgaacttctcaagaagaattgctagcagaagtggtccagggacaaagtaggacccccagaataagttcccccattaaagaagaggaaacaaaaggagattctgtagaaaaaaatcaaggaactcaacagaggcaattattatcccgactgcaaatcgacccagtaatggccagaaactctgcaggatgagtcaagattactatggacatgggaatccatgggtccctgcaggcacaaggt

SEQ ID NO: 331798 - DNA, 334 bp, Homo Sapiens
ataatgtgtgacaaaaaacataactcttgatggtctgatgagatgttcagtattttgagggattttagccatttaaagaaacttgtgccaccatttttaggcttcttttagtacatggcacttatttcccatgcagaacaagacatgggcatcttttcttctgacatggatttacttcttataaagtaactgggagacaagcacatttgagtaaatctctcgtttggagttttcttttttggtctcaaatattaagtgtataagctctggcacttgatttcttgtttggggagaatgctgagagacttgagagacggcgtgcaagcttgctttc

SEQ ID NO: 331799 - DNA, 300 bp, Homo Sapiens
tttttcttcaaatgacaactctactgtcctaacttaaaaaaacaccacacacatattgtgctttaatatgtacgttttacattaccagggttttaattttaatatcattttatttaagtgaagccataattcttaggatttgaaaatattactggtaatatttcttcaaaaaattctaagttaaaaaataagtgattttgaaagggtttcaacattcttataatgtttattatatttataaggataaaagtatactatccttatttttgttgaactttaaacatctctatccacccgtct

SEQ ID NO: 331800 - DNA, 263 bp, Homo Sapiens
  misc_feature (144)..(144): n is a, c, g, or t
  misc_feature (209)..(209): n is a, c, g, or t
aggagtctgaagcacctgtggagccccagtggctggtgcagataagcggacttgggtagagcggccagaccagctttcctgagtggcctttcttctcaggctgtccaggctcagggagcgagagccaggcatgaggcccagcgnctccaggcccagctgaatgaactgcaagcccagttgagccagaaggagcaggcagctgagcactnataagctgcaggtaaggtgcccagccccagcccatgccaccttcctcggtgccc

SEQ ID NO: 331801 - DNA, 263 bp, Homo Sapiens
  misc_feature (113)..(113): n is a, c, g, or t
cttgtactgtctccctcatttgtgtcttgaatggaagagagaaagatggatgtagccactgagccaggaattttacatacccatagcctatctcatctgggctagagccgtgngtttggttactggtatactatttagtagtgtgactgttgtgaactttttatagtactgtgctttcctaaaatgttgttttgagatttatcaaaatctggaccatatatttcttatgagtgtcaagaatgtgaacatccttgtcaaaagga

SEQ ID NO: 331802 - DNA, 580 bp, Homo Sapiens
  misc_feature (56)..(56): n is a, c, g, or t
  misc_feature (246)..(246): n is a, c, g, or t
  misc_feature (459)..(468): n is a, c, g, or t
ccatgattccctaggactcggggaaggccaccagagctgggtactagtctatgctngaattaatggattatgcacccgaggaaggacaacttttgaatgaaaagctctctctgtgcccagacttgaggtcacccaagcatcctgctcacactctgcgatgtctgtggagtagcacaccaccagaaactgctgatggaattacatcttcaagattcaaaatgtttagatcccatatatctaatcccnataaatatagcgcattctttatgctgaatgcagtcctatgcagtcaagaacaataatctagacatttttcatgtaggatttaaataggagtacaagtgaattaaaccattcagataaaaacgcaactaaagatgcattagctgctttgagtcaatatattttgtggtcaacctgatactccatccacataaaaaaggcattctatttctttannnnnnnnnnatttgacaagcagcagtatcatgtttgtcattttaatgtagatacaattattaggttatctgtcatattacaatatttaagtttttaaattttatgtcctttaagatacatt

SEQ ID NO: 331803 - DNA, 602 bp, Homo Sapiens
  misc_feature (467)..(467): n is a, c, g, or t
  misc_feature (480)..(480): n is a, c, g, or t
  misc_feature (486)..(486): n is a, c, g, or t
  misc_feature (516)..(516): n is a, c, g, or t
  misc_feature (522)..(522): n is a, c, g, or t
  misc_feature (538)..(538): n is a, c, g, or t
  misc_feature (558)..(558): n is a, c, g, or t
  misc_feature (566)..(566): n is a, c, g, or t
  misc_feature (579)..(579): n is a, c, g, or t
ggcacgagggggagctaatttttgggaaagagactataccaacaagatttgcataattttttatatttataccacaggtagggattatttttagagtcactatagcttaaggttattgatttcactagtgtggtttctgcattctaaatagttctcggagactgtgttagtaactggtttcaaatacatatatataatatttatacacaccactgtgggaatttatttcactgtgtaaatagtgatattttcctgttcagatacttctatagaaagtatttattttaaccaggaaaattaactgtgcaaaaggggctttccaaaaagtgttctttctaggccacccatcctccccagctacccatggctcaaccattggggcccccaaacaacagtggaaggcaggaaggtgtgggccttggaaaccttcactggtatttgggacagatgccacagaagcacgtctnccccactggtcancccatnccacaacaaagtgggaatcccatcatgggnatggcngtgccggcatggatcnggtgtgcccatgcagcctanttcttgangcacagttggganattagcggtatggcaccggtgtg

SEQ ID NO: 331804 - DNA, 660 bp, Homo Sapiens
  misc_feature (507)..(507): n is a, c, g, or t
gaggcttagctgaggtaagttaactgaatcacaggctgcaacagaaatactatttaaaatgtcacatagaaaattcaatttacactttgctttgccttttagtatctggatggcagatgacaggggttatgtggccaaattggtctttcccacctggcagcagctctcttgacacccacatcccttgttcgtcttcaaaagttccttcactgcctcggcgacttatctcagccttcatgaacaaagtgctatgctgctataagtagttagaataaatgtgatttcagcttcatcgggtcctatcctttcaccttccttgtagctggtgtatgtcccacagtgcagccataaactatgaagcccagaagtatatgacttccactgaaactcaacatgcaacacacaggtgcttgtgggcacagaagaagaaaggacaaatgtctgagcctcgggacttgcagcctctgcccttgctcctgacctccgtgttttgcccagatcagcagncttatggctaccaggcactggcaacaaaggcaggacacatgtcatctggggggtgacgcatggcaggagaatcagcagtggctgcaacgtggtcaggctccactggaaattatctgccctaaatggatctttctgtgagcaaagacctacagc

SEQ ID NO: 331805 - DNA, 575 bp, Homo Sapiens
  misc_feature (91)..(92): n is a, c, g, or t
  misc_feature (336)..(344): n is a, c, g, or t
  misc_feature (506)..(506): n is a, c, g, or t
gagactccactagcagatttctgtttgtaaaaaagtcttcaaacaacagtaataataccaaacaattaccaagtatgctctgtgcctggcnntgtctgtatgcacattgcatgtgccctctaaccctggtgtggggcagagtgtaggaacctagttcagagtcccagccattgagtccgcagagtccgcgtatctgagtccagcctgtctggctctgaaacccatactatactggtaactccttttcttcatcacttgcagaaaatagatctatcacacaggaggaaaagttagccaactgagacaaatcagcaaaagaagaaaatatgtctgccnnnnnnnnnattctgaaagtgataggtgttcattatagaaaaatggagtgtatacaaaactgtgtaagagagtaaataagtgttgcataagcctaccaccgcaagatgatctgttaatatttttgttgttatttccatttgagtcattttatggactatgtaaggacttcngtttagtattagtttacctattactacagttgatttatgccacattttttcccaaaagctttcaataac

SEQ ID NO: 331806 - DNA, 409 bp, Homo Sapiens
  misc_feature (161)..(161): n is a, c, g, or t
aaaagacataggcctaatatatttaactgaagatgttaacaaataatttccaaagccacagtgtcaccctggaaaagtccacatggccaagttgaatgattttcaaaaccccaggcccccaacactttaccttaacctccttggagctactggaagtcctntccttcggtcttcttctgctttgatgtggaggaactgtttttgctgctgccactcgtctccttgttgctgttactgcttgactttaaggaagaagactgactaatagtcctcttccgagagccatgctctgtttttggatcttttgaaggaacaggcccagcgggagaaggcaacaaatccttttcttttgcagcactctgcttagatgactctctgttgctggatggcttatggcctgctgaattct

SEQ ID NO: 331807 - DNA, 490 bp, Homo Sapiens
  misc_feature (404)..(404): n is a, c, g, or t
  misc_feature (422)..(422): n is a, c, g, or t
  misc_feature (460)..(460): n is a, c, g, or t
  misc_feature (465)..(465): n is a, c, g, or t
  misc_feature (476)..(476): n is a, c, g, or t
aagcgtttgtgtgtgtgttgatcaggttgtgtgatatttttgcttgataaagaatcaaatttgaaacaattaaccagccagtagattgtctgtcagtgaccttctgtagtaataaagtttttgccactgtaaataaaaacagtatccgtagctatcaggatcattgcgcactcatatatgctaagccttctgttctctaatagaagcctttcttttccattgtttctggatatttgtattatccaaatgtgcttatttctttgccttaggcacaccgttttatgggagtacttgttatactagggtttgatttggaaactgggtgcttgtcggcaggaactgttcaggaggcatgaggggaggcgctcctcctgtgggggtggggacggcatttcacggcactncccggggggttggcaccnggctggctgggccgggtgaggcaggggggggttccagncagcnttgaacccgtnggcccccccgaggg

SEQ ID NO: 331808 - DNA, 525 bp, Homo Sapiens
  misc_feature (395)..(395): n is a, c, g, or t
  misc_feature (428)..(428): n is a, c, g, or t
  misc_feature (481)..(481): n is a, c, g, or t
  misc_feature (490)..(490): n is a, c, g, or t
ttgttctgaagtaaaacaatccagaccattaccacattgataattttctccaattagacagattagaggtttaatcctaaaagaaccccagtatccaatatttttgcctacatctttaacattaaggaaatcctgtttttaaatttatatttttaaccattacacaagatctttattattgggaaaaagggacagacggcaaattaatcaggaaaatttctcattgaggaagattgagtttttaaatgtatgttaacaaaaggtagaaaaactcatcacacttagcatgtatacagtacttatatggactagaaacgttttgttcttgtgctttcaggtagaaagcataaaacaaatctggatgttggtcatagaggatagtttcataataggtnatggtttttgtacaagtcccatattttcactangaactattacaaacattacagtcatcagcagatgttacacatgtctaggcatngaaatttcnttttttgggtttggtggttggttggtttgagacgg

SEQ ID NO: 331809 - DNA, 608 bp, Homo Sapiens
  misc_feature (577)..(577): n is a, c, g, or t
ggagagctagcaccatgagcttcaaaccctgcctgtccccatatggtggcatgtcacccccgccttcactatactttcaaagcttcccactgtcttcagtatgcaatttcttcacgtggcttagaggggtgtcatgatcagaccccttctccagccccatggaccttctatcagccccaagggtgccatgtagatccctggctttcttattttcattctcagtccaccttcgacccctggtgcagacacataacctaggcctggccaatcacaagcatttcattcccagactgcaagtgtttggttcaaaggatgggacggtttgacccaatctagggtcaatgaaaactcaactgggagacttttacagaattctggcgggggaaggctaaagcaaagtaaggggtataggggctggaaggtgttggggccatctctaagtcaccacctggcaaagctgggcatgagaagcaaagccaacctaggaagggtgggagccgaggatggagacacaattccctaaaattacttgagtccttggatctagccatacctgaggcttacttcttacataatnccaataatttaccttttggctcaatggctat

SEQ ID NO: 331810 - DNA, 359 bp, Homo Sapiens
  misc_feature (269)..(269): n is a, c, g, or t
  misc_feature (287)..(287): n is a, c, g, or t
  misc_feature (310)..(310): n is a, c, g, or t
agtcatttactaatattgggctgtagtactttcacgtttaagctttggctattcagagctcactacgtttaatcttcagttacctgaatggtgtttaccttctggtgtggatcatcccggcttgtgttagtgctctctctttggaagaagccaggatttaagatcgagttagcctagatgtggcccagcagggtacagaaggggaaaggctgcagaaaacgggcgtattttccgtgcaaagaggtttttgcgccatttatttatggttntcaccgtccgtatgagangactattcatggataaggctggnatttgctgacagcctactttggggctccccatgcgttgtgccgaaacca

SEQ ID NO: 331811 - DNA, 187 bp, Homo Sapiens
gcaaaggtctaagtgttcttcagtcagcttgtgtgaatgctgcttccaggcctgagaattacctttcagggaaatgggcttccctctggcccagagcaggtcccaaactgccatccaagagcccaggcttggatttatggaccccaagaccccacttggtgttctatcctatggtggctgagttggt

SEQ ID NO: 331812 - DNA, 552 bp, Homo Sapiens
  misc_feature (477)..(477): n is a, c, g, or t
  misc_feature (500)..(500): n is a, c, g, or t
  misc_feature (516)..(516): n is a, c, g, or t
  misc_feature (525)..(525): n is a, c, g, or t
  misc_feature (535)..(535): n is a, c, g, or t
tcttgagtcaatatgatttattgttttctcttctgccattaacattctagctactgggtaagttgttctccatccttgggatctcatggttgggaggagaggtctgggttccctcccacaaaactctcaacgatagaatagaagcacagctgcctcagttatctcacggctgctgctgtaaccaacatgagttccatatccactccaatcaaaaccagaaaaatctccacactgctggggactggcctctggaaagtatcctcctccaccaatgcagtgatgctcagtgttacatccggtgaccctcattccagcacacaaggcgttggctgctctctcgttattaaataccctgaactgaacaaatcccgcagtgaattcccgctggccatagggtgagtaataagatgctgtttttcttggcgtcgccaaaaatcatagaccaacagggatcaccgggccggtggtcagtccaanactttccttctccatatttcacnggaaaatttcgggtanatgcccaanagattatgtnccagtgtctgggggaaa

SEQ ID NO: 331813 - DNA, 441 bp, Homo Sapiens
  misc_feature (418)..(418): n is a, c, g, or t
acgtcttccctttacagctttaaattttgacgactggaggctggggtggggtaaggggcagtgagtgggagctatgagtgggaagacatggtgtgagcattactacagaaaaacagaccatctgttctaagagctccggacttcaagagagtgatcagttgtccctatcgtgctatattttaacatgatggccttctgacgtcacataacactgagcgctatcaccccctgtggacaacagccaaaggactaaacaagtccttgctcatccatttttgcctgagctagcaccatgaccctgtgggacaacagccaaaggacttaaacaagtcctttgcttcatcccatttaattgcttgtttaggcttcaggggcaaaaatcgtcttgcatttgggggactttcagccttcatctttngggggccaggaaaataggtcttt

SEQ ID NO: 331814 - DNA, 677 bp, Homo Sapiens
gttattttgcttctaaacccaccccgattgtggaaactgatactagctagagggagctgtagaaaacaaagatttcaggattgcacagtgtgtgggcaatgggatggagactttttcccctattcccagccacagtgcccaagcgttcaagtctcctggatcagacagatgggattttagctgctgctttaaatcctagtgctggaataagtcaaggtacttcagttcagctcttgcctctgtcactaatcttgctttatgaactcctttgattttctgaataagttccagaaggttctctattattctgtccttcttccaaactggaaatggctgtatctaattctcaggatattttggatgtgtgcctcaggtaatttatgtggaatgtgtaaagcaagatgtctccaattctgaatattccttccccttttcccaatcctccactcttggactacctttataacaacaccgagtacgcacagacctgaacccatgcccaagaagcacacacaatgactggagctgtcgggaattcctgtcagtggcattccctgagcactggctctgtacaactcaattataattttttaagaatcatacctctgtatagatcttttggactgtactgattaaactttgatattgtggagtaaattcagaagtgcaattttaaa

SEQ ID NO: 331815 - DNA, 210 bp, Homo Sapiens
  misc_feature (48)..(48): n is a, c, g, or t
agatctttccatatgtcaacccatcactttaagtattaatttttttgncttagaacttcctctcacagtcatcctttttccccattcttatgtattcaatgttatgtttcctggaccccatatcttcttatttcttagttactccttttgtcagcagctctatacaaaaggtttacagaaaataaaattggtccgggagtgacggctcat

SEQ ID NO: 331816 - DNA, 342 bp, Homo Sapiens
ttaaactctcaggacttttatttgcaccttggatgacgaaacaaattcttcagttaacattaagaaaaacaagtcaatatgtaaacagtaaaagtgaatttaccaatttttccttttgccttcccagaaactctttttttctttcactcgtgacttgattactaattctaatctagaaacgaactctagattagaatgctaggttagaattagtaatcatcttgacaactaggtaatcacaagtgtttgccattctcattacccaggaagtatactcataccacatagtggataggccaactagaacaaaatccaatcaggtgtaaaaaatgtactttgggg

SEQ ID NO: 331817 - DNA, 601 bp, Homo Sapiens
tttttagcaacacattcaaatacaagcatctcaccattcattacctgaggcctttaacaatctccttagatctgcttcctcccaccaaagctaaatatcctaggactgaaaaatacaattgttttgctaggtagacgagctcttttctagaaactcctcatttgaccatacatgagaactcatccttgacatgtgcagagattcagcagggacccgaaataggagcaaggtggtctgccctatcactctgccatattaacttctctacattccactcatttcccatgatgaaaatgaaatgatttctgaacacctactagtgccaggttctgtgctaggtatattacagactttacccctctaattctcactacaatacccttctaccagtgagaaagagtgaggttcaaagaagttacaaaaactggtccctagccatacatctggattcaaacttgggtcccaccgagagtggtactctttccactgcaccacactgcttaccaagacatggagcacctcagggcacatccatggaaattcttaggtgccatatatatgtgtagatagcataaaccattatccaacttcaacaaattta

SEQ ID NO: 331818 - DNA, 566 bp, Homo Sapiens
  misc_feature (22)..(22): n is a, c, g, or t
  misc_feature (63)..(63): n is a, c, g, or t
  misc_feature (68)..(68): n is a, c, g, or t
  misc_feature (181)..(181): n is a, c, g, or t
  misc_feature (520)..(520): n is a, c, g, or t
  misc_feature (546)..(546): n is a, c, g, or t
ctttaccaggcatcttttgatntgactcagaactttgaggaatgttgaactacagcagcagantgttntactgatatctcatgcaatagaagccctgattttggatccagaatcagcaagtttccaggaatatggatctactggaacagcccatgctgatagtgaatatgaaagaagaatngatgtctgtatataatcatgtcttggaggaggtagaatcactcaatcggaaatatacccctgtttcttatatgcacacagcatgcctctgcaatgccatcattgctttgctggaagttcccctttctttccagagatattttttccagaaactacagtctaccaggcatcaagcttgctctgtcaccattcgccccgggaattcctgcagagcccattggctgttccagaattaaccagcaggtgggcgcttaaagggtaggaggggagtggtttcaggcacgggttctaaaccggggttttttccgcaaaatttcagtctgtctgtctggaatgtttntttccacattgcgggtaaatttgggncagggttacagggtaccctt

SEQ ID NO: 331819 - DNA, 534 bp, Homo Sapiens
  misc_feature (335)..(335): n is a, c, g, or t
cgctcgggtttctcgttgacatctagatgggcctgattagagcagtcatctcctggtaggcacaaaataatcaccaacagtaatgttgtatctgtaatgtttgtttgctttttaaagttttattcttgatttcttgtaaacatccattgcactgaggccgtatcattccttaagacagccctacatcttgccttggtaatcccttagataatgtggaaactcaaaccgttagctccagtcatcttagaccatttcccatccgttttgtattttctcgtcctgaaagcaagctgaactgaaagtaagtaataatatgctggaccagtgggaacggnatgtggggagtatttgtggtgtgctaaaatactgtaattatctgtgaggctgcctgacacgcttttgcaatcttgttttcatcattcattctgcaaacgtttatggagggccttctttgagcacagaggcaaaactgaaagcttcagggatttgctgtagctgaggagccctgggagcacagcccatcaagcaagggat

SEQ ID NO: 331820 - DNA, 468 bp, Homo Sapiens
  misc_feature (113)..(113): n is a, c, g, or t
cgaactttgaacctggtagtgagctcagcaatctacctggtccaagtcccccattttagaggtgaagaaattgaagtccacagcgactttgtccagggtgaaaagcagagccnaggcacagcccagatgctcagcccacccagagcccttctgagacatcacactgtggtcacacgacggcagctccatagccggccttgcttgctctggagaccgtgggagctagaggacacccctgattatgaatttcaataaaacgagctgcaaagatgtttccaatttaagggcgctgttgaacagcatttccaaaatttgcttggtgatgagaatcatctggggcacttgtgaaaaattaaaatccccaggctccttcccagacccagtgaatccatgctctccgaggggagggacctgggaggctgaatttttaacaagtgcctcaggtaactctcagcagcagcaaagcgc

SEQ ID NO: 331821 - DNA, 319 bp, Homo Sapiens
  misc_feature (169)..(194): n is a, c, g, or t
actatctataatgtgattagatgttctctaagatcttacagagcattgacattcatattctaattagtttcttgaagccatttttgttttttatggtaacctcttgaattacagtgtcaattcataatgcctccctatgtttactctttgtatacaagcacgcgcgcgnnnnnnnnnnnnnnnnnnnnnnnnnnactacctcccgacacacacattgatacatcaggtaacagtagtcttagaaggttgtgcatttggcttagctgtgactagcttttagagattttcacacgtgaccgctaagctgatgcacaagttt

SEQ ID NO: 331822 - DNA, 709 bp, Homo Sapiens
  misc_feature (44)..(44): n is a, c, g, or t
  misc_feature (67)..(67): n is a, c, g, or t
  misc_feature (76)..(76): n is a, c, g, or t
  misc_feature (88)..(88): n is a, c, g, or t
  misc_feature (109)..(109): n is a, c, g, or t
  misc_feature (129)..(129): n is a, c, g, or t
actgaaaaggtaaaaaggggtttaaaaccccaaacccaaacccnaacctcactacccggtccctccntccccaagntgagatatggcnggttgaggccttgaacctacngcctaaaaaacaagtccacnggctcagtaagttaagacaacatacaaataaaaagtcccccaaattccacactaaataataggccttaatgggatgcttaagcccagtgagtctgcctcaactcagaagaaaggagttcaagataccctacttttgccctggaagatgtactttctccaggccaggatgacaaaaatattcatagatctgagaatgccagtataaacacctctgcccaaacttggtagggggagaggatggtactgtatactggctcaggggtgagtactagtcagaccagccccaggttggaagggaccgggaagttaaaccaaaaaacaaaatggatttctccatgtatagttatctgatgcaagggaaaatacacacaacaaagagttaaggtgtcttcaaagtatctgcctatgaataagaatttgaaactaaaaaggacaagctacattaccctcaagtatatttcatataaatcagttctcaaaaaaataccttccaggtacagacatactatttatggtacagtatatacaaatatagcagtataattcaatttattgctagaattttatttggttgttagaa

SEQ ID NO: 331823 - DNA, 597 bp, Homo Sapiens
  misc_feature (81)..(81): n is a, c, g, or t
  misc_feature (399)..(515): n is a, c, g, or t
aaaaggattccaaatcataaaagtagaaagaattagaaaaatagaaaaccaacagaataatataatcaaccgctgccgcangaggattcactaatgaatgctaaaataagtagaggaaatttttaaggagaaatcagattctgtataacctcagagttatcttcccccaaaatattaactaattactttaggaattttaacatgcccacaaattctttgatactccctcccttcaggggttgggagcttaattcccttcccccagaatatgggatatgacttggtgactcatttctaggttctatcaagtaaaattaaaaagcagaacaacagtcactttacagtgcagaacatcactttaatccagttatcaaagttaacaaggcacaatggctcatnnnnnnnnnnnnnnnnnnnnnnnnnnnnnnnnnnnnnnnnnnnnnnnnnnnnnnnnnnnnnnnnnnnnnnnnnnnnnnnnnnnnnnnnnnnnnnnnnnnnnnnnnnnnnnnnnnnnngtgtggtggcacgtgcctgtggtcccagctacttgggaggctaaggcacaaaaatcacttgaattgggtaggcagaggttgc

SEQ ID NO: 331824 - DNA, 346 bp, Homo Sapiens
gcacagcaatgtgtacataataacaaggatctgaaaaccccagtcagttttctatgttttgtcctctttcacacccttccgagagttctatctaatgtaactatgaatggtcactgtgtctttatttttggcccagactcttctcaatgcttcagcctcacgtatccaactacctactgattattctgcttggacatacatcagccattttaaatttggcctgagttgaactcattctctttctctcccacattcattgtgttttcatttgttttcttgaaatctcctggttaagtcagttcaggttgctatagaaaaaaattttgggtctggcgtggtgtcttgt

SEQ ID NO: 331825 - DNA, 595 bp, Homo Sapiens
  misc_feature (308)..(441): n is a, c, g, or t
ctacagtcatttcttcatggaattagacacatagcagtggggaccaggagtgttttattagtgattgtcctcctgcaagtttccagggtatctcagcttagacacatgaattattttttcctgttgcttggagggtatacttttaattatattcattcaataacagagcagttccaggtttgtaaaatattttttctcccccaaccttttcccccagcatacatccccgtcccgtaagtttctgggcagagacaatctcaggaaccttaaaggttgctaaaaaattagcttagttggccaggcgcatnnnnnnnnnnnnnnnnnnnnnnnnnnnnnnnnnnnnnnnnnnnnnnnnnnnnnnnnnnnnnnnnnnnnnnnnnnnnnnnnnnnnnnnnnnnnnnnnnnnnnnnnnnnnnnnnnnnnnnnnnnnnnnnnnnnnnngtggtgcatgcctgtagtcccagctactggggaggctgaggtgggcgggcgattgagctcaggaggtccaggctgcagtgagccgtgattgtgccgactgcactgcagcctggatgactgagtgggaccctgtctcaataataaataaataaat

SEQ ID NO: 331826 - DNA, 402 bp, Homo Sapiens
  misc_feature (36)..(36): n is a, c, g, or t
  misc_feature (53)..(53): n is a, c, g, or t
  misc_feature (58)..(58): n is a, c, g, or t
  misc_feature (70)..(70): n is a, c, g, or t
  misc_feature (93)..(93): n is a, c, g, or t
  misc_feature (342)..(342): n is a, c, g, or t
ggccgggcccgtgggtggccctaagcacccttgggnaagcccgaaggcaaggnaaaanccaccctgaagntcaaggaagttcaaaaaaacggnccctggcccaaacatggtgaaaaccccatgttttcctgtccctccttgcatttgccctgtggatttgccagttggtaatggcgttccttgcccggccctcctttgttccctcccaggcagcccaggcagctgtggcgtagtgaaagggcaggatgcggggatagggaatggagttattcctgattcagactgatttgctctaactgtgatttggggcaagtcccttcccctgtctagaccttagcgtgntgccgcatctaaaaaatggagccaataatcttttcctcgtctttggggtcatccatcttt

SEQ ID NO: 331827 - DNA, 350 bp, Homo Sapiens
  misc_feature (235)..(235): n is a, c, g, or t
  misc_feature (260)..(260): n is a, c, g, or t
tcagcatcaacacaatttccaggggacctcaggtctacctgcaggacttgaacgccacacctcaggattcctcctccttgaatctgagactggctgcccattctgagatggggatgaatgtaagatgccgcatcaccaggcacgccgcccctgacagctgccttgataccagctctctgtgggaaacccccgaggagttggatctgggagaacagctgggcctcctcactcaggnacttctctcctgaagaacacgcagnctaaaactgaggatgatttccctaatgcttctgcttggccttatggaggagctgctccttccttacagccttggggatggacttgcccac

SEQ ID NO: 331828 - DNA, 603 bp, Homo Sapiens
  misc_feature (81)..(81): n is a, c, g, or t
  misc_feature (415)..(415): n is a, c, g, or t
aagggaaataaaaaataaagttaatctttccccaaaatggtcctttggtttccccctccaagaagtttggtccataatttncaaaggccccctaaatcctaacctccgtgaacttttccttaatccctccttcccctcccccatcgccccatgtcctgccgaaatttcctaactcacccattccccatttaagaatcaacataactgttaacttgtataacagttggcatgggtttcctctgctgttgtacagttaggtctgtttcttcaggaaacctcttctatacctgaaggcaacaggcacttgagtaggaggtctcagctgtcagtggagaattagctgaccggctgggggtaggggcacttatttccactagaagagaaatttttttctggagcaccaactcttatctcntctgcaagcagcctgttcaattcctttatacaaacaacaacagcaacaataacaagaaatttttaactggtatcaatagtggagactgcctgtgttctgtgcataagagttgggggagagtaggagagggctcaatcttacaactggagtaattcttcagtagacaagcttttcaggtgcgcaagtct

SEQ ID NO: 331829 - DNA, 406 bp, Homo Sapiens
  misc_feature (353)..(353): n is a, c, g, or t
  misc_feature (361)..(361): n is a, c, g, or t
  misc_feature (388)..(388): n is a, c, g, or t
cgggatggttttggttcccttcccttcccacccccccttaagcctgtcagccccctccaaatgtctcaggatcccccctctcccctggggctgggtgacagcaccccggctgcgttcacaccccagtgtcacagggcgagctgttctggagagaaaaccatctgtcgtggctgagcggggagcttgaacacccaggccagggacacccctccccagctcccagagaggccccctgagggtgcagccctctttccacctttcccctattccatggcacccccttcgcaattaaaaccaactttaaaaatcacagctgttcgttcctaggccagtgggggggcgaccggaatttnggggggtnggagccttttggggatttccgtaggancaaaggggttgtggccaa

SEQ ID NO: 331830 - DNA, 473 bp, Homo Sapiens
  misc_feature (142)..(142): n is a, c, g, or t
gtcaccagtcaagaggagttcttaaagagttttatgttgactgaatattgcacattgagtccccattgagtccctggtgggaaaagtccacaatttcccattgatagctttttactgttgtgaaaaagggaagcgtcagcancacaaaagcctgcatgaccgctgcttcggagaattcttcgaccctaactgcagtcactgttacttgggatcagatcaaggcgcagtgaactttttggggattcagtgggttattctccacacttcgtaggccatttcaaccaactttgaggcacaaaatgcagccatcctctatgcagcaagccctgcccagtcagtgaccctactggacagatccaaggccagccctggttccctgcttgcagccaccgtcctggacgttcatcggagcaggccggggctggcctttcccggcacaagtggctgttctgacaggcccccagtttgtccca

SEQ ID NO: 331831 - DNA, 462 bp, Homo Sapiens
  misc_feature (368)..(368): n is a, c, g, or t
gccatcaagctccaagggaaagctgtgagtcatctcctccaccagattacttatgaatttaagtctttttttaggaacatgccttaagggtgggtggtggaagggtgggggttcgttcttactgcaaaacttggttttttaaaatggtctgaaatattggacaataacagagaaaaaattgttttccccttccaaaggaaaagtgctgcattgccacatgttaaaaaataatcaagatgtcttgtaagacacccaattaagcataaattattctactggtggacattttcaaggatatggaaataagggtctgccccagaaaaggcagagggtagcccaggtagaaaggggcgctcttacccaaaggnacacgctgtggagtctaccctccccgacaggcgtgcacccagcatgtatgcttggatggtctgtgggaaggcctaactttagatactggtgtca

SEQ ID NO: 331832 - DNA, 508 bp, Homo Sapiens
  misc_feature (24)..(24): n is a, c, g, or t
taaaataaagatggaaccggaaanccccacccccccaatagagttgtgccagtttgtaaaaacacctcaagaaacaccatgtaaattaacttttaaagttccttgaaacgacaatttttattttcctgacaaataggcacgaggtccttagaattaaaattttttccttttgcaatacctaactctcagttatacacactaacatcagggaacattatctactaaaatttaaaatgtaggataactttttaaaaaataatcacaaacatgcagcttttgtatgacctttgttatttgtttcaaagtggatttatcttatgctaggaaaataattttgaccaaatgcccaaaccacactatcaagagctagcaaaactagaagctatctagtttaaggggtcccaaattagaccccttaaactcaattccttccagtaacttagtccatgctgagaatagagagtcccgtccgcaaagctgctgtctttcaaacctcccctgcagttga

SEQ ID NO: 331833 - DNA, 700 bp, Homo Sapiens
  misc_feature (14)..(14): n is a, c, g, or t
  misc_feature (26)..(26): n is a, c, g, or t
  misc_feature (105)..(105): n is a, c, g, or t
  misc_feature (110)..(110): n is a, c, g, or t
  misc_feature (141)..(141): n is a, c, g, or t
  misc_feature (253)..(253): n is a, c, g, or t
  misc_feature (317)..(317): n is a, c, g, or t
aatgacaagctagnccaattagctgncaattttttgttaacaaagccaaatcacttccaaccgtgaataggagtaaatctcatctctgcacctccatggacctcnaggantcacacctggcctgagcacacggtgatctanaatgcaagcctaggtatcactacatgtgtatgcagtttaaggttaaagcatacatggccacgtgctttctctcgcatcgtatcttgacagcagagactttggaattatattntatatggtttttaagcagaatgttttagaaagtctggaagttacaaaagtagtactgtaaaacncccatatgaattaaatttccccataacaaatgccacaagttattcttaggcagggatacatatttttatcccatggtaacatattactgagcttatctgacagtgttttcaaagccaataaagcagcaccccaagtaaaaatatacagacagccatcatatgggagagacagacggctccaagatgtttaggaattctgtctttatggtatgtaagtttgctgtggaatacacgagattttattattcttcctagaattctcagatggtataggttagtagaaacagaatgaaatggtttcctaaaagaattattctgcctcctgtttaaagtaagcttttataattctgttttggggaagaaaattcttccagtctcgtgcc

SEQ ID NO: 331834 - DNA, 449 bp, Homo Sapiens
attcttgggaagactctttggggtgcttaacaagaaaaacatcatttagtgaaaagttctgttaaaaatgcagattgctttcaccattttgcccagggactaccttattacctgtggacacttaaaacaaagtgacccatctaaatgagtgcaacattttggcaagtttatggtggttgaaacatgatttggttttccaacttctccccacttggcttcatttcaatctgcggagtatatcaagtgagaatgcttctgcgccttcatactgccctacagagggagtggccacactaagcaagcctatattcaattactttccccactttatacctttcttacacttttcccatatgacactttcataaccatatttagctttcttcctaccatctccctgtaattcaaaacgcaatttagattcccatatggttgccatcgaagctaac

SEQ ID NO: 331835 - DNA, 401 bp, Homo Sapiens
  misc_feature (380)..(380): n is a, c, g, or t
  misc_feature (386)..(386): n is a, c, g, or t
gtttttcttttttcctgaatgcgtcataggcttgtgagtgatttttgtccattcaattgtgccttctttgtattatgataagatgggggtacttaaggagatcacaagttgtgtgaggattgcattaacaaacctatgagccttcaatggggaagaccagaagggtgagaggggccctgaaagttcatatggtgggtatgtcccgcagcagagtgaggagatgaagcttacgtgtcctgacgttttgttgcttatactgtgatatctcatcctaggctaagctctataaatgccccaaggaccccaaacagtactttttacttttttttgttaccaaaaaccaaaggacattttaggcccattaccaattcaaatggccngggggntgttttttgatggcc

SEQ ID NO: 331836 - DNA, 761 bp, Homo Sapiens
tcacaagacttttaaattttattagtaaaatacaaaatggcacagacgttggtgatgagggttggaaaagtctttccaaagtcttcctactctttccaaagtcttcctagatcatccttgtccatgtcctgcttggagaaactaacaaagtccatggtagggggaccaactggccccagcggcttcctcacaaaggaggcagggccccatcacagggtgtcccacccctggaaggctctcccagcctggaagagccagaacaaagtgcattgggcccactcccaccctctctgagctgccagagtgaccccacctgagccaggccctgagcttcctgaaattattgcgccacacccagcaggggagtgcagaggccaggtgggcagggcagcacagcgtcttgctctctatggaccagagctgggtttccttcctccaagcacccatctgtgaaggagtgttcctagcgacctgggtagaacccagcccataagaggcccctcaggtagacggcaagggtcggggacaatccaagggagaggtgagctgccaccagggaccctgagggccaggccagccggtgcagccccatccaggcatgctcgagccttcagcagccaaaaaagggaacccctgactttatgcctacaacttcccctttccgatgtcccagccccttcccgggtagcgtccctttcagaaacaaacaggggactcatggaaaacatcatggaaatccctggtcctgtctgcggtgggga

SEQ ID NO: 331837 - DNA, 391 bp, Homo Sapiens
atgagccacgcaccaggccagtgtgttctttaccatctttaaatgaaaccttccctcaaccttccattcctctacggctaccactaatggtataaacttgccttttatttatcacatcatttgcttttctgttatccttccacatatactgctctgcagaaatcacgctcagtaggaccaccagtgacctcttcattgttaaacacagtggtgccaatcagccctggccatcctctcaactgacttgaatcagctgatagcatttgatactgttgatcatttccttctccttaaaattcccacttttcctgggtctttggcagctttactcccctcccacattttcttcagtctttctgggatggcttctcatcagggctcctttttctgg

SEQ ID NO: 331838 - DNA, 542 bp, Homo Sapiens
  misc_feature (114)..(114): n is a, c, g, or t
  misc_feature (259)..(259): n is a, c, g, or t
  misc_feature (287)..(287): n is a, c, g, or t
  misc_feature (483)..(483): n is a, c, g, or t
  misc_feature (514)..(514): n is a, c, g, or t
  misc_feature (521)..(521): n is a, c, g, or t
cctggttataaaatgcttacagatattttgtccttagagttatacctatccctcacaaataacctgaaacataaatataataacagagtatgtcacaaagataggaaattcctnggtgattccagagaaactggaatctctagtttgtaaggaaaatagtctctatctttggcttctttggcttgtaaagtgcttggtattatacagattgtccccagtttgttgactcctattatgacttgaacctgctctaagaaanggctttttgccccccattactccaaggnaaactgcagtgatcaaggttgcaaattacctcgtctttttaaaatccaagcatcatttttccagtcttcattttactggggcttatcagcagcatttaatatggttaatcaccttcttttccttcaagtactttgtttattttggcatcctagggacattatggctcacttgggtttttctcgtatcctgtctttncttggcctctccttggggaagggtttttccntcatatnctaacaattcctttaaggggg

SEQ ID NO: 331839 - DNA, 524 bp, Homo Sapiens
  misc_feature (73)..(73): n is a, c, g, or t
agcatgagccaccacttaagaacttcggagctgtcatgtagatgaacacagcccagagaaccgggtaggactnggacatggcttcaagtacactgaagaatgagttcagttacacaaaaatcccattgatctgaaaatgtcagccggttgcattttagaagacttaaaaacttaggctgtggagaaatgatgctattgcttcatacacatgtggacatgactgcttatgggaggcgggaggtttagtggtggaacccagagttctcagaggcacttcgcaggaaatggaagaaaaccacacttcagcttccgaacaacagaaagtagaggttggtgaaatttggtgagactggctaaagtaacaaagaactagaaaattcatacctgtgaggtaggtgttgtgcgaggaattaatgaaatagtgagaaaggggctgagacatgtcttcattcaaatccagtttctcaggtgaaacgactccgttttcttctccactcagatagcgcatgaacccatccactgaa

SEQ ID NO: 331840 - DNA, 486 bp, Homo Sapiens
  misc_feature (329)..(432): n is a, c, g, or t
gtatacccagttagaacgtgtagggttctgggtccctggcaagtctaggtgggcgggtgacagggaaagcatgggcatttttgtattgctgtcacatgctaacagaggtttgtaattatcttttggacccaaattatagagacattcacgagttttctagccctcacagtaacagagctaagaattcagatgtcaggaagtctgtgaatcttgatggattttctgagaaacctgactcaatggcatatataagagggaagtaagacttttaagaaaagaaaaagttatgcctcattcctcatgtggcttccaataagtatcttaggaannnnnnnnnnnnnnnnnnnnnnnnnnnnnnnnnnnnnnnnnnnnnnnnnnnnnnnnnnnnnnnnnnnnnnnnnnnnnnnnnnnnnnnnnnnnnnnnnnnnnnnnacagagacgtggtcccactatggttggcccaggctgggattgcagtggctattc

SEQ ID NO: 331841 - DNA, 686 bp, Homo Sapiens
  misc_feature (168)..(168): n is a, c, g, or t
  misc_feature (171)..(171): n is a, c, g, or t
  misc_feature (190)..(256): n is a, c, g, or t
  misc_feature (479)..(479): n is a, c, g, or t
  misc_feature (500)..(602): n is a, c, g, or t
attggacaatctttttgagccattctatttttaggactattcgttagctgactttagagcctttaatgtttcgttattatttcaaacaatagagaactttactcccccccaaattttgagacagggtctggctctgtcatgcaggaggctgtctgtagtgcagcggcncangtctcagctcactgcaacnnnnnnnnnnnnnnnnnnnnnnnnnnnnnnnnnnnnnnnnnnnnnnnnnnnnnnnnnnnnnnnnnnngccaccacatctggctaattttaaacaatagagaacttccaaaacaaaagttctttattaattcttcaagaaatctgttttttacttaggtcgattaatgtccatctcatgttgcctcaatagcccatgtatgaatcactcttcttgcagattttgttcagttttgttgtatgtagacccatctttctttgagttggtttctttgattgagttgatttgtctngtattaaaacccaaacaatannnnnnnnnnnnnnnnnnnnnnnnnnnnnnnnnnnnnnnnnnnnnnnnnnnnnnnnnnnnnnnnnnnnnnnnnnnnnnnnnnnnnnnnnnnnnnnnnnnnnnncaaaagaaaaccctctgtcttctgagaagctccggaagtgccaacacgttgccaattttcctggttccctctctcagtccctgg

SEQ ID NO: 331842 - DNA, 209 bp, Homo Sapiens
caggaagcaagcatgatttggagctattttggggaagtgcatgaagcaggtcagggtagcaatgccccatggaggcagcgctgcagtggtccatgttcttcctgctcaaatgcttcagcttgagaatactgaaagcaggctggaaaggagggtgacaggcagatctcccttttcctgttccagaaaaggaaaactgagacctaaagccc

SEQ ID NO: 331843 - DNA, 504 bp, Homo Sapiens
  misc_feature (16)..(16): n is a, c, g, or t
  misc_feature (22)..(22): n is a, c, g, or t
  misc_feature (42)..(42): n is a, c, g, or t
  misc_feature (49)..(49): n is a, c, g, or t
  misc_feature (59)..(59): n is a, c, g, or t
  misc_feature (85)..(85): n is a, c, g, or t
  misc_feature (98)..(98): n is a, c, g, or t
  misc_feature (111)..(111): n is a, c, g, or t
  misc_feature (118)..(118): n is a, c, g, or t
  misc_feature (158)..(158): n is a, c, g, or t
  misc_feature (182)..(182): n is a, c, g, or t
  misc_feature (188)..(188): n is a, c, g, or t
  misc_feature (270)..(270): n is a, c, g, or t
  misc_feature (476)..(476): n is a, c, g, or t
  misc_feature (482)..(482): n is a, c, g, or t
gcggggccccaaaccntggttnccagaaataccccccaaaangtttaantttttaaagnaaaaaggtgaacttccagccaatgtnccagaacacgttntccatgaacacanttgtccnaagaccccccacaggatgtgccgcccccacaaaagagtgnaccccctaatgcatgtgaaacccnaggccncctagttaatccatgtatccagagtccgttccctccgatcggaacaaacagacccacacccacacggaggccaaccgtgtgnaatgaccaggggagatggtggggacgggatctgggaattcctctgtactttccccaccaatgtttcctgtaaactgaaaactaccacagaaaaaaagtttattccatttaaaaaatgtgttgaatgaatggcttttaaaatctgttcagagtctacttaaggtgaggaggcagagagggtttggaggctcaggctgggcttgaatncttganctcaggctcagggctccagcat

SEQ ID NO: 331844 - DNA, 340 bp, Homo Sapiens
  misc_feature (64)..(64): n is a, c, g, or t
ctcaaaaacaagaactctgacacactttgatcacggcccattttggaagactttacaacccccntggaaactgcagcacaagacagatcgctctaatactccctaacctttggtacagtagtctactaaggaacaatttctttcgctagagaaaatcatcaaatggacaagaaaaagaaatgtaactcagtctgattcagagggagcttggaaagaactgaaaactgaaaacaaggcaagaaagggtgaatactgcctgtgtaaccaatctttttaaccgacatctaacaaaatatctgtttgtcagggtaattttttctagaatgaaatctcattaagt

SEQ ID NO: 331845 - DNA, 660 bp, Homo Sapiens
  misc_feature (61)..(61): n is a, c, g, or t
  misc_feature (66)..(66): n is a, c, g, or t
  misc_feature (79)..(79): n is a, c, g, or t
  misc_feature (88)..(88): n is a, c, g, or t
  misc_feature (150)..(150): n is a, c, g, or t
  misc_feature (209)..(209): n is a, c, g, or t
catggcaaccgagctctgcaagtcaggtggtcataattctatgttagattaagtgctttanggcanactgatgtaaggnggccagcanatcttatatacatctgatcaagagatcacacaacacccctcgactacataatctgaaatctntgatcttcctatttaacaaaatcttaatttatatcgtataccttacaaagtgtaatgtnattgaattcacttcattatttactcagagttcttgctgtaggctttgtcttgaatgtgtaggaccattcgtcgtgcatagaagtccctatattcctctggtaactcgggccagtgttttcaaggctctgtccagaatttgtgcagctcttgatgctgctgtaggatctttgtttccataggtatctgttttatcatagcattcagatggaaggtgcttccaaaagatattcactcccactccaaactcttcagaaattacattatggaaccataaagcaggaatgaataatacatcaccagcttcaagggaacattcatatcttctagccttggaaaaaagtggatatttagccaagtctgggttatctatattcagtacttctgatttagtaccttttaaatataaatactgggcatctcgaggactgaagagtacaacacgcttttttc

SEQ ID NO: 331846 - DNA, 416 bp, Homo Sapiens
  misc_feature (31)..(31): n is a, c, g, or t
  misc_feature (44)..(44): n is a, c, g, or t
tgtttataccctgccgcgtgacagctcgtgngtgccagccacgnattcactggtttcctatccatgggataagaacacacttgggagtttcagtgcttctcaaaaggaaagaagaaaggaccccaccttcccccaggttagcacaggtgacgtcctcgtgagagtgatgacagtgcaggggcacttcctgtgggatcggaagaaagagcagggcggacacaaggtctccaagtcctatgtacacattttacaaagtttccacacttcctccattaggcacgaggttgatttgtctagcttaggagggggtggacagagaagggcagagggagggagtgcactgtggggggaagagagggaggtgggagcaagagaggagaacgtgggtctcctctagggcaaccggcccccctcca

SEQ ID NO: 331847 - DNA, 506 bp, Homo Sapiens
  misc_feature (253)..(253): n is a, c, g, or t
  misc_feature (473)..(473): n is a, c, g, or t
tttcttagttcccagttgaggaccccattagtcaagactttcccagccctaccagaaatttgcaattaaatttgtgttaagtcacttaagttttgtggtaaatttttacagcgggcagtataaaacttaatacagtggtgtgccttccttggttgacatttgaaatgcgtttagaaaggcatgaatgcgctaatgtatacatacagtttaaaatgcttaaggccatttcactaagtttggaattggaggaagnagcaagccaagaatcaaagaggcccaggaaggcaggggtagaatccatgagggcatagaaatctctaagactgagccaggagtggagtgggagagaggcagggagccaggagctgacatcctcagaggcccagggagcagctgccccagggaggaggtgcgggaggtaacatggaggggctgtgagtctgaggagcagggaggatgtggggtccctgacnctccaggccagggaatgcatgagagaaaaagcc

SEQ ID NO: 331848 - DNA, 785 bp, Homo Sapiens
  misc_feature (22)..(22): n is a, c, g, or t
  misc_feature (62)..(62): n is a, c, g, or t
  misc_feature (75)..(75): n is a, c, g, or t
  misc_feature (135)..(135): n is a, c, g, or t
  misc_feature (201)..(201): n is a, c, g, or t
  misc_feature (278)..(278): n is a, c, g, or t
  misc_feature (282)..(282): n is a, c, g, or t
  misc_feature (284)..(284): n is a, c, g, or t
  misc_feature (295)..(323): n is a, c, g, or t
  misc_feature (333)..(333): n is a, c, g, or t
aggacaggcatatctgaggaanctcggggctctctcttcccctagatttcctggacctacgncttggcaagcagnccggtcagtttctaccagctcctgttacaggaggtggccaagacacaggagaatgagttnccgaggcaaagaatcggtccatggatcttcaacaagattttgggcactactgtcaagctgatggantaaagcctaacacgtgttactgcctcagtgtccgtgcagccaacacagctggggtggggaagtggtgcaagccctanaaananaaagggggggnnnnnnnnnnnnnnnnnnnnnnnnnnnnngggggggcanaaaccagggctttggaggttgggaacacccctatgcccacatgactcatctggctagctttccttctgcctgggtcaagaagcatcaattccagaatgcatgcttctgggaggtttaaggattaagccactctggggcccacttaggaatgcaaacgaatgtatttttcaacatcacgtataatgttcccctcccaaagccattggtttttagactctgcaattcagtgcccatgattgtgagtaggctgggaagtcaagggcattgaaagaaatagggaagacaagaggctaaagggggacgaagaagggaacagcctgggtatggggtaggggtatgggggtatagaggcctgagtacagacagccctttggttggaaatatcccataatgaggaggtacaggcttgagtcatgcatctttgcacctgtttcctgcgtcaatggctaggt

SEQ ID NO: 331849 - DNA, 516 bp, Homo Sapiens
  misc_feature (36)..(36): n is a, c, g, or t
  misc_feature (77)..(77): n is a, c, g, or t
cctgggctactacaatgttttatggggaaatcaggncagaatacctcaaaatgggaccttaccagatacaccaaatnttatgctttcagtaactatacagggaaggtatttctcttggacaactacgtcccagaaattataaattgggaaaaaaggaatcaacctcatcacaacatttaaactgagatttgtttgggcaatatccttttggcttgaaagtctccaaggatccccattcccaaacactgccttttgagtgtcctgttgccaagtctattctggaattactggaaggacccactcagagaatgtctatggcctaaaacatgagacataatctgggagacatcaataagatctacaatgtcatggaatgctgcaaagtgagtattatctactctttggaaagttcatctctttagagaacttatagaaaataaattagtatgtgacattctcaaacttacagactcaagaaaaataatgtaaagatttttttaaagtctgagaagttgg

SEQ ID NO: 331850 - DNA, 614 bp, Homo Sapiens
  misc_feature (49)..(49): n is a, c, g, or t
  misc_feature (177)..(177): n is a, c, g, or t
  misc_feature (180)..(180): n is a, c, g, or t
gctctaagtcaccgtaacaagctattcatagcctgaggcaggtcctccnaagaaggcagtggttacagaaggctaaaagcagtactggggattccaggaagaaaagaaatgaggagccaagaaggctagcacacttcttgttgatgatatgaagccccaccggacaggcagtccccntcntactcagccacttaattggctagcttttcttcctacaactttatttccaaccaagatcagtttcctatttggcatataatgttatataattttcccttattataccctctactgaaaacaaatatttaactattggggcttttctgataaacttaatagcagaaaaagattccttttatccccatatctgtaccattataattcatattgaaggaatgcagatacctgataaactattctggttctctattttaccttaataactaggataggaaccaggatctgggatgaaatgcaagaagttaaaaaaaattagaacaagattgtaaaaagtaaccctagcaccacagtaatgactagaccaagagagataatcatccagtttagtcatttatagtttgtccacaaccatttccactaccttagatcatgca

SEQ ID NO: 331851 - DNA, 376 bp, Homo Sapiens
  misc_feature (246)..(246): n is a, c, g, or t
  misc_feature (256)..(256): n is a, c, g, or t
ggcgccaagcgcatgaaagtgccccatctgcgccaagtgcttcacgcagagctcggcgctagtcacccaccagcgcacccacactggggtcaagccctatccgtgccccgagtgcggcaagtgcttcagccagcgttccaacctcatcgcgcacaaccgcacacacacaggcgagaagcctaaccactgcctcgactgcggcaagagcttcagccacagctcgcacctcaccgcgcaccagcatcnccaccgtggncgtgcggccctacgcctgcccgttgtgtggcaagagcttcagccgggcgctccaacctgcaccggcacgagaagattccacaccaccgggcccaaggctggcatgctgatgtgggggcgg

SEQ ID NO: 331852 - DNA, 483 bp, Homo Sapiens
  misc_feature (29)..(29): n is a, c, g, or t
  misc_feature (63)..(63): n is a, c, g, or t
  misc_feature (65)..(65): n is a, c, g, or t
  misc_feature (80)..(80): n is a, c, g, or t
  misc_feature (88)..(88): n is a, c, g, or t
  misc_feature (100)..(100): n is a, c, g, or t
  misc_feature (104)..(104): n is a, c, g, or t
  misc_feature (130)..(130): n is a, c, g, or t
  misc_feature (139)..(139): n is a, c, g, or t
  misc_feature (144)..(144): n is a, c, g, or t
  misc_feature (151)..(151): n is a, c, g, or t
  misc_feature (153)..(153): n is a, c, g, or t
  misc_feature (168)..(168): n is a, c, g, or t
  misc_feature (184)..(184): n is a, c, g, or t
  misc_feature (196)..(196): n is a, c, g, or t
  misc_feature (199)..(199): n is a, c, g, or t
  misc_feature (205)..(205): n is a, c, g, or t
  misc_feature (210)..(210): n is a, c, g, or t
  misc_feature (220)..(220): n is a, c, g, or t
cgttccaacctcatcgcgcaaaaccgcanacacacaggcgagaaaccctaccactgcctcgantncggcaaaaaactttnagccaaanctcgcaaccttnaacncgcaccaacgcacccaccgtggcgtncggccctangcctncccgttntntggcaaaaacttcanccggcgctccaacctncaccggcacganaanatccanacccnaagcgccaanccctggccatgctgatgctgggggcggcggcggcggggctctggccaaacccccacccgctcccacctaggaggccaggaaagggggaacggggcgcccagggccactggaacagccccactggagtcaaggctccgagggaggagagaggggctcgggaagggagctggggcggtgagggcatggggtgaggcatggcgatgggggagggcgagggcgagaaaagggcaggcactctgcgaattaaaggccttggacttgaa

SEQ ID NO: 331853 - DNA, 139 bp, Homo Sapiens
  misc_feature (50)..(50): n is a, c, g, or t
accaagttcccaggctgcaaccagcaaggggattctgggcccagccacanaaaccactttttcctcttaaacctccaggcctgtgaatgtcggggggatgtgatgaagacctctgacatgccctgaagactccatctca

SEQ ID NO: 331854 - DNA, 377 bp, Homo Sapiens
  misc_feature (205)..(205): n is a, c, g, or t
  misc_feature (248)..(248): n is a, c, g, or t
  misc_feature (296)..(296): n is a, c, g, or t
  misc_feature (302)..(302): n is a, c, g, or t
  misc_feature (312)..(312): n is a, c, g, or t
  misc_feature (340)..(340): n is a, c, g, or t
  misc_feature (353)..(353): n is a, c, g, or t
  misc_feature (364)..(364): n is a, c, g, or t
tgcattgtgaaattatcttcctaagattttgtataaatcgggtgctgctgtttatcttgttgaagctttttaattgataccttatgaattttcttgacctttaaaatttaaatctatcctgagtgtattcaaaaattgtggttaggtttcttttgaataattctgttcagattgtgaggctaaatatgctttattttttggaagnattataaggtttttgaaaaatgggcaggaaactaggacagtangttgcggggaggggagggtatcacacttttaggcacttgtttgacctncccccnggggttgccnggaggacccagtatggatccatttgggntgccggctgaccnggaccaaggtnggaaaaaagcctt

SEQ ID NO: 331855 - DNA, 371 bp, Homo Sapiens
  misc_feature (60)..(60): n is a, c, g, or t
  misc_feature (202)..(202): n is a, c, g, or t
  misc_feature (207)..(207): n is a, c, g, or t
ctgaaatgaaaaggctcgccttgggccgggaaaatcaaaagttgtcaatgagctgtggtnaacgccacggcactggacagagcttgaccttgtctgaaaacaaacaaacaaacaaaagctatatgggtaaggcttggagggaattcgggagtcaatttctttggggaccagggcacctctattattggtcagaggtaaatanttcantccttcccttccttcccccttccccattagacttcttctctgtttttggaacatatccctacaaagctggtctgggttgaggcacagatcctgtccccaagtccaagaggtggggaagtttgtgtgcaggtcctgtgggctcaaaccctgcccacctagtgttc

SEQ ID NO: 331856 - DNA, 558 bp, Homo Sapiens
  misc_feature (270)..(270): n is a, c, g, or t
  misc_feature (351)..(351): n is a, c, g, or t
  misc_feature (467)..(467): n is a, c, g, or t
  misc_feature (508)..(508): n is a, c, g, or t
  misc_feature (548)..(548): n is a, c, g, or t
tattctttaccagtggaacaagtggatatccgaaaatgactgcacacacccacagcagttttggtttaggattatctgtaaatggaaggttctggctagatttgacaccctcagatgtgatgtggaatacctcagatacgggctgggcaaagtctgcatggagtagtgttttttctccgtggatccagggagcatgtgtattcacacaccatttaccccgttttgagccgacttctatcttgcaaacactctccaagtaccccatcacangtcttctgttcagcaccaactgtactacccgaatgcttgtacagaatgatataaccagctataagtttaaaaagcttaaangcactgtgtgagtgctgggggaaccaatttacccctgacgtgactgaaaaatgggaggaaacaagacgggcctgggatatctacggaagggatatgggacagacttgaaacggtgntaatctgtggggaatttttaagggggattgaaatttaaacnggggctccattgggggaaaccttcttcctgctttttcganggtttaggat

SEQ ID NO: 331857 - DNA, 535 bp, Homo Sapiens
  misc_feature (34)..(34): n is a, c, g, or t
  misc_feature (42)..(42): n is a, c, g, or t
  misc_feature (73)..(73): n is a, c, g, or t
  misc_feature (78)..(78): n is a, c, g, or t
  misc_feature (83)..(83): n is a, c, g, or t
  misc_feature (85)..(96): n is a, c, g, or t
  misc_feature (101)..(101): n is a, c, g, or t
  misc_feature (110)..(110): n is a, c, g, or t
  misc_feature (115)..(115): n is a, c, g, or t
  misc_feature (362)..(362): n is a, c, g, or t
aatcacttcagggccccaattcaagggaattccnctgtttangcccagaaaggaaatctctgaaagcaaattnattgnaaggncnnnnnnnnnnnnttctnaggaaaatnacaancccgaaaaagtttcccatttaacaattaaccaagggaaaagagggaaccccgaacatgaataataaaatccccgaaataaagaactttcccgctgaaggccaggtttctgagccatggaaaacaacaccggttagggactggaccggaccacagtcttgccccagccccgcctcggcccttctcgccgactcccagcatgggaaatactctcatcgtcccggagcaaagatgaaatcaagagccctncgttcggccgctgcgacgtttggatgccacaaatccaccatgaaaaccacccgtgggccatcctctgctgaaccttcatggaacgcagcatgcaggaaagagtcatcaaagagaagcagcgcccttctgcccagcacctgggctctccccccaccaccagctcacctcgtgcc

SEQ ID NO: 331858 - DNA, 605 bp, Homo Sapiens
  misc_feature (46)..(46): n is a, c, g, or t
  misc_feature (71)..(71): n is a, c, g, or t
  misc_feature (81)..(81): n is a, c, g, or t
  misc_feature (123)..(123): n is a, c, g, or t
  misc_feature (143)..(143): n is a, c, g, or t
  misc_feature (223)..(223): n is a, c, g, or t
  misc_feature (400)..(400): n is a, c, g, or t
  misc_feature (485)..(494): n is a, c, g, or t
caaaacgtgtgtctgttcgtttctgaaaataggactgtgttgttcnaccagctatagcctacctccttggnccttcttccntacatcccatttggaaaaaatctttggaaaaatggggaaggngatttttaaaaacctcaggncaacgggtcaaacttgagggttcaaaactgggttctaaggttggaggttcctaaaaattaacttttctttaaaggaaacntcagccatgatcagatttttaggcttgcaagcttaaatgtgcttccaatggtactgtgggaaacttatggatgactgtgctttttatcctataaattcaaatctcctgtaaccattcacccaagactacggaaaagcaatcacctgagcaggcccaccccatttttctctctactanttcgtttcaaaacaggaatattaaaatatggtacaacacagaatcatctttactgtgaattacatgttctgctaagtaacttgcnnnnnnnnnntcaaactggcagtaactttactaaagatacaaatgcttatatgctatattttcttattctgaatagaatattaaaatttattacctctaagccaagcacagtggctcaacc

SEQ ID NO: 331859 - DNA, 762 bp, Homo Sapiens
  misc_feature (632)..(632): n is a, c, g, or t
  misc_feature (655)..(655): n is a, c, g, or t
  misc_feature (667)..(667): n is a, c, g, or t
  misc_feature (676)..(676): n is a, c, g, or t
  misc_feature (690)..(690): n is a, c, g, or t
  misc_feature (708)..(708): n is a, c, g, or t
  misc_feature (752)..(752): n is a, c, g, or t
cgaattgagatagacattgtatcagaagaaagcagttttgaacaaagagagcgaattactagccagttaacaagtgtcagctgttttataagcatggcataacacttcctaaattgtgcactgcattgttcagttaaaggaattggcgttctgtgactttttgacagttaaataatttgagaacttctgcattttgggcctgtgctcttggaaatccagaatgtacattaacttatttatgcctagtgttccattaatggaacgctaagcatctgggagttctttatatcctactgctcaaggtcatcgccaaggtctgatttttcaccctcaaaaaattgcaaccttagacataaatacaggagtcctatgagtcattaatatactaaacaaactttcttgtttaactctgctttttctaaacttacatgcttagtgatcattctttgcagggcgtgttttgagaaacatagtaatagcaagtagttaagtttctatctacctggtgttcacagtgggagtagtatagaggaagacccaagtttagcctttggaaaacctgagtttgtggtttttaatgcttttagtgaacactatattggaaaagttaatttaagtccccatgattgttncttttgtaaaatatagtacattncccattctaatnacagtgatnagatgtttatagtnccaaaagctatataaagncttcatataggttgaatggcccctccttttatgctaatgtaggnccacatatgt

SEQ ID NO: 331860 - DNA, 484 bp, Homo Sapiens
  misc_feature (107)..(107): n is a, c, g, or t
  misc_feature (123)..(123): n is a, c, g, or t
  misc_feature (149)..(149): n is a, c, g, or t
  misc_feature (176)..(176): n is a, c, g, or t
tgtttaataaatttcttcaatattttgtcgtatgcatattatatggttattccatgtttctgtagtacaggtagcttgctttttccatagcagatgaatatgggccntaagaacaatcccagnttaaaatttccctgcatctctcgtcntcatagggtaggtccactccttcggcngtcttcccttgcactgtggaagggaagggaacttccagcttcacagtccatccatggtgctggccagcgggctggtgggtggggtgggagagtgttacacagccggccgaccctcgggctggctgcggcggcaggaaggaaggagggccggcggagcggagggctgacaggagggcggcgggattacaactaacacacgcagactagagggtcccagtgactccagcagcggcggcggcgaagacagggaagaggagggtctgggcgtcttacaccccggccgccatgccgctgccgtctccctcccc

SEQ ID NO: 331861 - DNA, 560 bp, Homo Sapiens
tctgtgccctgagcatggctctgcccccaggtcgtcttgcacaccttggcagccccctgtagttgacaggtaagctgtaggcatgtagagcaattgtcccaatgccacttgcttcctttccaagccgtcgaacagactgtgggatttgcagagtgtttcttccatgtctttgaccacagggttgttgctgcccaggctctagatcacatggcatcaggctggggcagaggcatagctattgtctcgggcatccttcccagggttgggtcttacacaaatagaaggctcttgctctgagttatgtgacatgcctcagccccatggactaagcaggggtctggtataaaaacactcctggaaacgcctttgccctgatccaaatgttagcacttgctagtgaacgtctacttatctcaagttctatgctaaaggcaatttatcttgatgtgatgataaaccaaacttattagcaagatatgcatatatatccataaattctctttactctgtctccatcacttgatggacataagtgccctgacctcagcatctcccctcta

SEQ ID NO: 331862 - DNA, 514 bp, Homo Sapiens
  misc_feature (44)..(44): n is a, c, g, or t
cctctcccctcctcttctttctctcttttgctcggctagctcantatttccttcttcacaggcttaagctgtcttttcgtttaatttttatttttgcatgaaagcagtgggaaccatttctccaaagaataattttattcaaaatggggaagggttaggctgacacacaggtccactcatcttcggtctcagcaactgctccccacaagggacctgcaggacttccaactcccaagggcttgaaattagtctcttaagccaactgctgggactcctaagaggggctgatgggtttatggagatgccactgacagacacgaaagacagatgggacagacaggtgaacacaaaacactgatcgcgagatcgcgattaagtgtaaaattcaacagtaaaattcggcacccaccacctccacctcccaagactccaaagcccagtacctggttgctgctgctgctggggcgtggggcgaggtcaagctggcccgatgttcacgggccgggcgtctctc

SEQ ID NO: 331863 - DNA, 595 bp, Homo Sapiens
  misc_feature (26)..(26): n is a, c, g, or t
  misc_feature (97)..(97): n is a, c, g, or t
  misc_feature (231)..(231): n is a, c, g, or t
  misc_feature (316)..(316): n is a, c, g, or t
ttggaggaggggccattatgaaaccngctgattagaaggcaaggcccatcaacttgctcatgtaaaaaaactaccgagtgaactaccctagtgccantgaagataggaagactcgagatatactttggaggccaaaattaacatgatttggtaatggactgggagaaggtaggaaaaggtataaataaatgacttctcaacttggaaaattcgttttcttcccaatgaaanttttatttatcctcccaaactcaactaaaatgtaaacttcccatcagaattagctaagatctgtctccttcactattataacacntaatagttattaaaccttgggttatgaagagttgtttccttatatattttccccacaaatgagtgagtttctttacaggaggggccatatctaatttcttgctctagttcacataaaaaaaacacagtgccacacacatcacaggtcatctcaggtaaccccactaatggtctcagatccaggacaactccttattcttttgttcttcctttgataagcacaagaattcagtctgctttcttctcctttcagctcttctattttttggagttctgtttt

SEQ ID NO: 331864 - DNA, 603 bp, Homo Sapiens
  misc_feature (71)..(71): n is a, c, g, or t
  misc_feature (99)..(337): n is a, c, g, or t
  misc_feature (344)..(356): n is a, c, g, or t
gcagccccattctgttgttccctaggtcctccatctaaggaaatcggttctttttggcttgggcaccagtngtcacgccctgtaatctcagcacttttnnnnnnnnnnnnnnnnnnnnnnnnnnnnnnnnnnnnnnnnnnnnnnnnnnnnnnnnnnnnnnnnnnnnnnnnnnnnnnnnnnnnnnnnnnnnnnnnnnnnnnnnnnnnnnnnnnnnnnnnnnnnnnnnnnnnnnnnnnnnnnnnnnnnnnnnnnnnnnnnnnnnnnnnnnnnnnnnnnnnnnnnnnnnnnnnnnnnnnnnnnnnnnnnnnnnnnnnnnnnnnnnnnnnnnnnnnnnnnntatctcnnnnnnnnnnnnngaaatctttctttcaccgagccctggtcctcatggtacgtatctcatgggtgtaaaggagtcattatggtactgattttcactgtttaatctgtaatgtcacacttttccctactcttcctcttccaaccacttctatcaatcacaaagagatattaacccagaaagctgctacaataaaatgtcaaatgtctaatggaggaagtgaaacctaacccaaggccaggtgcagtgactcatgcatgtga

SEQ ID NO: 331865 - DNA, 321 bp, Homo Sapiens
  misc_feature (21)..(21): n is a, c, g, or t
  misc_feature (28)..(28): n is a, c, g, or t
  misc_feature (183)..(247): n is a, c, g, or t
aatttgggcccctcgaggccnaaaaatngggcacgaggggatgttacccccattttaagacacccctttttaagggtaactttaaggggaaaaaaagcctgcctattatgatattaacactttcctcatcaaataaagagagcttttgaattatcatccatcatcattattttttgagatagnnnnnnnnnnnnnnnnnnnnnnnnnnnnnnnnnnnnnnnnnnnnnnnnnnnnnnnnnnnnnnnnngctcaagggatcctccaacctcagcccccagagtagctgggagtacaggcacgtgctgccagatctagctaatt

SEQ ID NO: 331866 - DNA, 667 bp, Homo Sapiens
  misc_feature (337)..(337): n is a, c, g, or t
aagagggttaggataggtggtgggaatagaggctgacagcagttttcagatgtccgtgtgttcatgcacgcagtatggcccaggtaagttcaaaaccttattcttaggctatttcgatcaaccctgccaggcaattttaaattcttggtgatgtagggcagggacactgtggatggctgaggaaactctgggctctgctggctaaccagcttcgctccactctgcagaggctgtctcatcttttgtgatctgcaaattcttgctttggtcttcatgtgaactctcagggaatttgagcagttcagtctgttaccagtgttgtgagcctacctggtcnattttagctgttgcttttgtaacgtaggcttttggttgttcctcagttataattgtgggactttcctgaaccttctggttcttgtttcttccttgaaagtaactgaatcctggggtaattacacaggatttgccatagcggaatcaagcaattggtctatcaagtatgctgtcttgtccccggcagtggctaatgctgcttcttcttgtcaggcaaacaggagatttcacaatttagcactgagatctaaagatggtaaccaggtctcctagtttacccttcagctttgacgcagactacctaatttcctaaggtcttagcatccacctg

SEQ ID NO: 331867 - DNA, 568 bp, Homo Sapiens
  misc_feature (27)..(27): n is a, c, g, or t
  misc_feature (118)..(217): n is a, c, g, or t
ggctggagtgcagtgacacccatcatngctcactacagcctggacctctgggctcaagtgatcctcccaactcagtctctcaagtggctgggactaccagagacgtgccaccatgccnnnnnnnnnnnnnnnnnnnnnnnnnnnnnnnnnnnnnnnnnnnnnnnnnnnnnnnnnnnnnnnnnnnnnnnnnnnnnnnnnnnnnnnnnnnnnnnnnnnntccaataacttctaatataaatgtgatccttcaaatgggcaaatgattcttgacaatcactaaatttggcaaaatacacaaaatacatatttcatattaattacaggccagtttacataatctctgctgggctgcagaaaatttgccaattatttatagtctcaaagatatgaagaaccagttcatcacatttaacttttattaggataaacgcaaagcccaacagtagctctatcagaggtcttgattgtttataaacagtaaaatctaggtattacataaaattcaaaaccaattactagagaaatacacttttttcttccacaagacactatttctcagctcgtgccc

SEQ ID NO: 331868 - DNA, 562 bp, Homo Sapiens
  misc_feature (262)..(271): n is a, c, g, or t
  misc_feature (295)..(351): n is a, c, g, or t
  misc_feature (406)..(406): n is a, c, g, or t
  misc_feature (445)..(445): n is a, c, g, or t
  misc_feature (483)..(483): n is a, c, g, or t
  misc_feature (532)..(532): n is a, c, g, or t
  misc_feature (541)..(541): n is a, c, g, or t
ttaaaacaaacaggtttattgataagcaggaatgccgtccagcatacagtgcaaactttcattgtcttgggatcaacacacacacacaagggaaccaaggccccacagagtctccaaattcatcgcttcccggctctgccttgtgatgccaaggaagcctgaggttctcccaggactgtccaccagggggcaggtgcgctccatcatgtcctcatgtgggtccaatgtgggcagaaacctggccagtcccagcagtctgacnnnnnnnnnnctttaagagacagggtctcactcnnnnnnnnnnnnnnnnnnnnnnnnnnnnnnnnnnnnnnnnnnnnnnnnnnnnnnnnntgggctccagtgatcctcccctcagcctcctggagtacaggtgcacgtcactggnagccagccagtctgacatcttgattccagggtgggaaanccttcttggtctccatggtaatggctgggctctcccancctccaataagttcagctgcaagttcaagtccagtgggaatttatcaanatttatcancctggccctggtctggtaaaa

SEQ ID NO: 331869 - DNA, 570 bp, Homo Sapiens
  misc_feature (261)..(261): n is a, c, g, or t
  misc_feature (298)..(298): n is a, c, g, or t
  misc_feature (452)..(452): n is a, c, g, or t
  misc_feature (515)..(515): n is a, c, g, or t
  misc_feature (527)..(527): n is a, c, g, or t
  misc_feature (543)..(543): n is a, c, g, or t
cagcgtacctcagttggaaatgcagaaatcacctgtcttctgcatcaatcactctgggagctgcagactggagctgttactatttggccgtcttgggataaggttatatattgatcagttgatgaaaatgtaaccacctattcctgtatttcccctagaagtaatggttcagtatttgctaatttgggtattctcagcaacttaattagaccatgactaccttggacaacatgaatcaattgtacttcctttggaaattangtgttttgtttgaaaattctttggagtctaattttangatcttttgtaaattatctgaactttcactatggctcttttaaagttgttattgtcttcggtagtcagaggcttactgtaatatatctagtgtagatttattttctgcttgggcattttttatgcttcccgaattaaaatattaaagggttacnttcatcagttatgcgaagagtctcatgcatcatctccttgaatataacctttacatattttgnaatacagtttgnaatacaatcggtttgnatgcaatcggaataacagtccggcatt

SEQ ID NO: 331870 - DNA, 587 bp, Homo Sapiens
  misc_feature (311)..(311): n is a, c, g, or t
  misc_feature (398)..(398): n is a, c, g, or t
  misc_feature (443)..(443): n is a, c, g, or t
  misc_feature (483)..(483): n is a, c, g, or t
  misc_feature (526)..(526): n is a, c, g, or t
  misc_feature (542)..(542): n is a, c, g, or t
ataaaaatcattctcctttaaatattaagggggaaaagttttccattttctttggtatggtttttattatatcttgagggcaaagacttccaatttcaaaatggaaatcaatgagaaacatgattgaatttaggaaacatggttttacagccaacagttttgggctgtgcagaaagttctgaaggctataactatatctataattcatactaatattttgaggatttgaaaagcagctgggtcttagtttcctagaagctaacttcaacgttggtaatgtcctatgttctttgggagccagagataccttngagatgagcttatttccttgcatttttcttcatggctcctcccacctctggtgggccatggaaacggttagatgggctaatgtgccnaaggaaaataggccagaataagcaatacatggcagctcctgtgancattctactcccggaaggggctccaagggggccaggaaantttcagggacttatcaggagatgaacgatggagatcttgaggncacagaagcaggttcnattaaaaataaggccaaaaacttaccattaccttttggacccggc

SEQ ID NO: 331871 - DNA, 619 bp, Homo Sapiens
  misc_feature (593)..(593): n is a, c, g, or t
tcgtgagcttctctcaggagaaatatcaagagggaggccaacctgtaatcataagaacttctgctattttaatgccattcatcagactacagtcaatcaccatgcttctggctttttgtctatctctgctgtcttgtacatcctgagatagtccattctgagaactgtaccctagatcttgtattgcctgatgcctgtcaaagatgtaatccatgctgcttaagtgaggttgtgcacacaaatcaccatatctcctgcaagtttggattttgattcagtagttcgatggtggggtttgagattctgcatttctaataagctcccagatgtggctgggtgctgctggtccatgaaacacactttgagtagcaagaggtgatctgtagctcagtattggtcctttaagttccctcaaacatatatagagaaaaggtcctaaatattgcaaattctctcaaagtttgtcaagctatattggaattctctcaaagtctgtcaagctctattgtagaaaatcaaatttttattgggaaaaagcctaccccatatttacttacagataaagtacttttaggatcattcaagggacacanccataacactgggtatgtaagacaga

SEQ ID NO: 331872 - DNA, 493 bp, Homo Sapiens
  misc_feature (320)..(320): n is a, c, g, or t
  misc_feature (328)..(393): n is a, c, g, or t
  misc_feature (425)..(449): n is a, c, g, or t
  misc_feature (461)..(461): n is a, c, g, or t
tcatctgttttgatcactgaaaagttgtctaaaaactgtgctcattatacacagtttatagtattttaatactttgtttatagtatttaatagcttctgaaaactttaagagaacatactaaaccaaggaactatttattaatggtaatctatatttagtaataaataatatttggtaacttactaaatgtaagtttactaaatgtagattactaaatcactgagtaaatatttcttgaatatttggacaacgagatggggggagggagaatgacttgaccctcaagaaacttaactgctacctttaaaaggttataatngaagctgnnnnnnnnnnnnnnnnnnnnnnnnnnnnnnnnnnnnnnnnnnnnnnnnnnnnnnnnnnnnnnnnnngagccgaggagttcgagggctcctgtcccctnnnnnnnnnnnnnnnnnnnnnnnnntattccagactnggaggggttcccaacctttaataccttaagca

SEQ ID NO: 331873 - DNA, 597 bp, Homo Sapiens
  misc_feature (27)..(27): n is a, c, g, or t
  misc_feature (50)..(50): n is a, c, g, or t
  misc_feature (71)..(71): n is a, c, g, or t
tattggacgattcccacttatatgagntacttagtccaaattcatagagncagcagaatgtcgactgccangggttggaatttttggggtgatcagacccaacaccagttcgtgggggttaccaaagtcccagcagagtcaaaggattgagaaaaagacagtgagagaacaaggtgggacaccagggggccatcactatgtatggaggctgcgaaggccccgagctctgagagcccacggtatttattggtaatcccaacaaagaaacaggtgttgagacttgtggaggtcaacacctccacatgttccattaagcacatgatttacagctgtgatggtttagcgatttatatggaacatgtcctgctacttgagataatgggaacaggagcctaggagggctagaagcaagcagccagcaagtctagacaacattccaaaggacactatgcaagccctgcctcagtttccctccctacactcagctttttcccaacagtggcgggaggggagaatgaagttattgtttattggtagacttttagctggggaagataaaacagttctggagatggatggtggtgtggctaaacagtg

SEQ ID NO: 331874 - DNA, 525 bp, Homo Sapiens
  misc_feature (15)..(15): n is a, c, g, or t
  misc_feature (68)..(68): n is a, c, g, or t
  misc_feature (81)..(81): n is a, c, g, or t
  misc_feature (127)..(127): n is a, c, g, or t
  misc_feature (429)..(429): n is a, c, g, or t
  misc_feature (502)..(502): n is a, c, g, or t
atgtgggaagccacntcaaccccagagtgactccggtttgaaataagggctaagaaaaatgaagctgnatcaccaaccggnaattaaagggttgcacaagcctgccaatcaccttgctaatgatagntagtaataatacctttctcattttacaaaaaagaagaaggggggcatgttaggaaaaagctgagtgttgggagaaactgaggcagggcttgcatatctgacataatgtcctcttggaatgtgtctagccttgctggctccttgcttctagccttcctaggctcctactcccattatctcaagtagcaaaacatgttccatataaacgctaaaccatcacagctgtaaatcatgtgcttaatgcaacatgtccttttgacctccacattctcaccacatgtttctttgttggactgccaatanatagcatgggctcccagagctcagggccttcacagcctccacaatggcgatggccccctgtgtcccacctttntctttcaaactatttctcaatcc

SEQ ID NO: 331875 - DNA, 626 bp, Homo Sapiens
  misc_feature (79)..(79): n is a, c, g, or t
  misc_feature (175)..(175): n is a, c, g, or t
  misc_feature (251)..(251): n is a, c, g, or t
aaggactttctatcttacacactggctctcatcactactggctgagtaagctgataccagtgtggtttcttcctcgggnaaactccctctagatcttacactctcactcttgggtctttggctactatttctagttgaaaacacccttctgatgacatggtaagctttatgaagnccagaaaaggaaccagtacttctctgaagcttctcaaagtgcctgctgcagttctgaggatgcagcaaaccgtttntgacgcaactgtgtttaattcaacaaaatgttgactgagcttctgttctgtgtgggtcccaagagccagctttggggggagtgcaaagaaggaaacctgacatgaacaagacagagaattaacatttgaactacccatcaagttaacaaacccagcacagagtgttttctctgcatccttcatttctaccaggtagatatcattcatcttaatttctaccaggtagatgttatcattctcattttctacaggacactaagattcccagaagagtaacttactcaaggtttcatgtcagaatggaatttaagagagcagagccagatcttcatgatttctacttcacctcattaacggccatgctctctctcgtct

SEQ ID NO: 331876 - DNA, 406 bp, Homo Sapiens
tgtgtggccattaatctatgacttagaacagggattgtagataagcttaatcggccacacccagcctgtgattgattcatagtctcttcttggaacactgtgttgagaaggattctgaggccagccatcttggctcagcagggaagagtgctgtggtgagtgagggattttgccatggagaaggagaaggacccatagcagtttgtcaggtattggcttctcctattgtagtagaataatgataaggggaattatttagcctatattaacaacaacagcaaaatgaatatagaactatatactatataggcttactttttggggggaaagtctgtgagttgagaagaatgacttaaacatacaggcaaacatacagggtattgaagctcatggtgctagctcgtct

SEQ ID NO: 331877 - DNA, 397 bp, Homo Sapiens
ccccaaatccatataataggaaacccccagaaacacacatttttaaactgcatgtcaagtctcaatgatctgatggtggcccatttcagaaagatcagaggggtccccataacttatggaaatacagagcctctggggagtgggcccagagtcattacaacacacagctattatctacattttatctccactaaattgacttaaaaatggagaggagtgtgtgtgtagcactcaaacatctgtgacatatcattatggaagaagaatatttctaggaattcttattcataattactactttcaaactgagaaaacagcagaaaacaactgttaaattaaaaagaagtgcatgcatgtcacaatttagtaatagccaaagtcaactagaaatcagttt

SEQ ID NO: 331878 - DNA, 476 bp, Homo Sapiens
  misc_feature (430)..(430): n is a, c, g, or t
  misc_feature (438)..(438): n is a, c, g, or t
  misc_feature (459)..(459): n is a, c, g, or t
cgtccatagggagcgagaatgggcatgaaaagacctggagctcacttctggagccatcagttgtctgtcatatgacccagggtccctctgtctcagttaacccttctgaacaatgggataaaaccatctaccttttctcacagagctatacactgtaaggtgctatgcaaatagatgaaagtattatgcctacttccaacagaaacaatcagatgctaaaggaacagaagagtcacttgctctatccatgcatgatactgagcacctctcatgggaacatttactcttcagagtaatcccgggattatctccatttactgacatggcagctgaggcatagaggtgagcagtcgctgtgcccccaggacctgcagctaggcagcagttggggccaggactcagctgtgctacttgacgccagggccaaatnccttaagntccccatcaaggcctctctgnctcctgataacccttta

SEQ ID NO: 331879 - DNA, 404 bp, Homo Sapiens
  misc_feature (347)..(347): n is a, c, g, or t
atcaccatccttgaatatttacaagatgagtgtccatcacctttgaacagtatttgcacatggaatccgaggtcattcaacttgcccttgaaggaaggaaatttgggcttctaattcttcttcagattcttttcgtgcccatagttttgctgtgtgagcgagaacgtgaagatgttgcctaaaaaaggaatcttttttagtagcagatgaaggtggagagcccagtgaattctcttcctcccaggcaaactctcaacgcttggagatgaactgatgtttttagaacttagccctttgttcaattgcacaggcatgctttctgatttcatcagcctctgctgctgctngttgctgttgcaagtgatggacactcatcttgtaaatattcaagatgtgatattaca

SEQ ID NO: 331880 - DNA, 371 bp, Homo Sapiens
  misc_feature (24)..(24): n is a, c, g, or t
aattcctcaatgcaacgctggccnacccagggtccagccgccacccccagaggtcatgtcacagaaggtctggtagataacaccattctcagtgcggagaaaatacaggccatcaaatgcactaggacattcgtctttgatttccttgcagcttctgggcagagatggagacgaagaacaggtccattccttgaagtaagtattagcctcatctgtactccatcctctggtggtcgctatgagaaacagcaggaagctgagttggttcattgtaatcttgtctgagtctcagctgcactttccttgggtacagagagctccttcactccctccctccactgcgccctggagctcaacagagtgcagctttc

SEQ ID NO: 331881 - DNA, 514 bp, Homo Sapiens
tcattaatacaagtttttaaaaacagaaacattttagagtaattttaacacttttatcttgcccagaacataaaaaaatcttcattttcaatccttataactttgtgtgagggaaattaggcatcagggtgggaaacagaggtgacttttatttgtctaagtctaccaaattgctgaactagtaggtaaaactcccttcctcttaactgagctgactgatttttgctagatttttcttttccgtttcttcattttgtttcttccgtttcctgggatttcatgtgtgatttctttttctaaagcacaacctttggggtgtaagttaagagacatttttccctgtgtccccaccaccccttccacacatgtgcaggtctcccctgagtgcccagacagcgcaggaccacgcagtccactccctctgcccctcagagattctgcctctctctcctgacctgtgccacattcttgtgtcaggaccccacctcccgctgcgttttcttcaacatatgag

SEQ ID NO: 331882 - DNA, 436 bp, Homo Sapiens
gagaagaagagaaggcgcaacaacaacaatgatgaagtcaatgccaataacttagaatggttatcaagtctgtgggactggtacaccagctacctcttccacccgattgcttcttttcagaactttcctgtaagaatctgattggggacgaagaccctggacttattcttgggaggcgcttagcttttccctgtcctttgggcttcaccctctggataccaactggattatattaaaaacttaccaatgtgggcgattttaaatgtcttggagtccagtctgaagaggaaatgtcggaggggtctcaagatactgaaaatgactcggaaagtgagaacacagacactttgaagtagtgaagaaggaagaattttgaagataagccaaacgtaacttcacaattcctccaggaacaagcaaagttcacttgtgatgg

SEQ ID NO: 331883 - DNA, 794 bp, Homo Sapiens
  misc_feature (522)..(522): n is a, c, g, or t
  misc_feature (528)..(528): n is a, c, g, or t
  misc_feature (617)..(617): n is a, c, g, or t
  misc_feature (722)..(722): n is a, c, g, or t
gtcatcctcctccaactactgattgacatatggatcatcagttcagaccctcactgcatacaggatccctagagggttctatttaatagcttgaggaagggagactttaaaaggacgtgtgtgagtgaaataggatatagccattaccacggtgccaggacctgacagcgttccaattctttttgcagcatggggaatcaaaggtggcatgcaatgttcaactcagggctgaggtatccacattgtccacatcaggcaagccctgcactgacggttgagcctcatggagaggagcatgtgttggaaagagatccctttgttaactgttttgtggtgttctcttcaatgaattagagctcatgccccttttctggctttgctgttgattttggatggtagagaatattcctgagagccttccttttggcccccagcttatgccacccactctcttctcttggttgaattctctgaaggaaaggttcatgtgctattgtcctgttagtcaatagtcttcatatnataatntgtgttacatatattgctgtagactctcagaaatcagggtagagcttttcctttgagcagtttaatgagtgaattcagcagccaaagtncgcaagaaatggttctccagccgggagaggttatgtttatccccctgattggcccgtttttctctggcacacagtggatattcgtatttcagttgaggaggtgcngttgggcaccccaggcaggcacccgggggcaacaacaggcattttcatgttcatgttcacagtgttacaagg

SEQ ID NO: 331884 - DNA, 640 bp, Homo Sapiens
gccagttagactctcattctctcattgtttataaatccaaagagacctggaatggctctagaatggagggcttggggctatggacacctatcgaagcaccatggctgccacgaggtgtctcttctgataaatggtcctgagattccaataccctgtcgtccctgaccaaatgacaccggtcacaagacctcactgacagttttcaacagcagcaggtttttttgacagcgaaaattctggtcattccttttcatatatgtttgtggtttgaaactaaaatcatccacaggaaggaggagcagtgaggtaatgctctcccagacattcattacggttcatttttcaagctggacactgaaggaatccttgaatgttagcagcaggtctcttcactcatgtctttctatgcttagcaatagaattggcacacagtaggcattcaataactctttggtattaaatttggttcaaatctcacataagtgatctagcaatttagaaattcttaccataataaagataatttaatgaaaataatacatcaatcctggcagcagataaattgcttttttactgtcatttggtgttcacaaggaggacctgtggatatcttaaatcctcaattttaatttctttttgc

SEQ ID NO: 331885 - DNA, 445 bp, Homo Sapiens
  misc_feature (258)..(258): n is a, c, g, or t
  misc_feature (297)..(297): n is a, c, g, or t
ggaaaacaaagttgcaggactaacacagcctgatttaaagcctgcagacagtgtggtgttggtgtcagtattgaggtttacatcttcatgttatgcaatgaaattgtgtcagttaggttttgctgtgtaacaaactttcccacaacttaatagcttaacaaagtgttaatcatttaatttgctcagagttctgcgggtcaaggattttgggtgattgttttagtcttggccgcatttgctgagcctcagtggttctanggataacctcactctcatgtctggcagttggcaggttangttgatctgggggctcagctggaagcaggttcatctgtattccacttggctctcgtccttcacacttcttcacacagtagtgtccggggttccagagagtaagcaagagaggggcaagcctcagtgaacaggcacctgtcaaagcctc

SEQ ID NO: 331886 - DNA, 554 bp, Homo Sapiens
agattcttttggcaaaaattttagagtataaacaccataattatgtgtctcactagccccagaattaacagctgtcaggcagcagcttttaacaagcgaccctcaacataacctcatacagatactctgtttactgtaaaaagtttcagaaacaagtgttggccacaaactaaagggaggatgtcaccttccaacaccaggaagagggagaggaggtgacccttttttgcagaaccataatatctgaaacttacaagtaggagcctgagaaacttaaacttcggaaacccaacaacccgagagtgtgtagctttaaggaagaaatgttgattcacggaagctgtcattagaaatcgagttgtccccagcaaacaatccaagagcaaatgtgagttgtctacacagccctttgctggtatgtctccagttcttctgggggagctgggagcagtacaggatggaaccgccaccctctccttaaaacccaacacgagttaccgtttcttccccctgtccctctgctagggtgccttcctatttggatcatcactctc

SEQ ID NO: 331887 - DNA, 439 bp, Homo Sapiens
aaatactgacaaaagttgtcacaatcaacttctttggatggggaaattaactaaaggcttgtaacaatccaaggagtgtttaatcaagaaaaacagctgaatcttggtaagaatagcaagctttgtggcattttaacttgccatatacccatctccctcttctcagctccatgataatcttaaaagccaacagctgctcaaatcagggtgaaaaccaggcagcctagcagccattggagggagcagatcagggttaaggctcccatgtcccacagttctcacattgtcattatttgacctgtctgggcacttccctttaaactcccattctaagtacttatatttatttcacctgacttcaggaccttggcttcagtggcaggtaggacttttttaaaaaacctggggatttattcaaaaaccaattcggcaacctttt

SEQ ID NO: 331888 - DNA, 408 bp, Homo Sapiens
tagaatgtcattaaataccattttggataattcttgtagacttgagatgatgtctatttaaagttacaagacaagtgcctgtatttctgtattcataacagaaaacaattggatatggaaaagaaactaacatgctatgccacaatctctaaagaaagattagggaagtttcagcttaaagcaagaataatcacaataaagttttacaaccctttgcaagcatatatgaaaaacttacaaaaagtttgtaatgttcttttcttaagctaagagaatggaaaaaatgagaaaaattaaattataaaatgaaactttggtttagaggtaagaaacatttgatgacagtcaagagatcagggttgtacagtgtattatgtgaatgttgtgactcattggtttcatcttgga

SEQ ID NO: 331889 - DNA, 429 bp, Homo Sapiens
  misc_feature (257)..(257): n is a, c, g, or t
  misc_feature (324)..(324): n is a, c, g, or t
  misc_feature (342)..(342): n is a, c, g, or t
  misc_feature (368)..(368): n is a, c, g, or t
  misc_feature (382)..(382): n is a, c, g, or t
  misc_feature (415)..(415): n is a, c, g, or t
acaagtaattttggaacagaccatacctgaggtaaggtagtgagcccacaggtgatgtaccacattatgtggcacaaaaaggatgagagatctctagcaaataaaagaaagaaggactcaaaatttgaggaaagaacaaaaagaaggagaggcaaacaatgaatattttgcctctcccttcctctaaattcaaatattagggagattaaggcacaaacaaggttccctctatttttcctatttgcttcacgttgtgngtagggaattatggatattgatccaaggcaagggtgagccatacactatttaacaagtctggggaantgttttatgggtctggantacattgttttattttgttaggagcnggatattaaaaacnggggtaatgtgtctccaggtttaaaaataggcnattttcttaaaaaa

SEQ ID NO: 331890 - DNA, 424 bp, Homo Sapiens
  misc_feature (390)..(390): n is a, c, g, or t
atgagccactgtgcctgatcatgagagaagttttgtgtaaaatttggaaaatactaccactctttgattctgtagatccggcaccttggtctggtgttctattggagcagtttgggaatcatgactcttaaggaaagagaatgttgacagtcaaaactttgcttggatatgctttagagaatttcacagtgatttgaaaagaacactctctgtgatgtgctctttaaaaccattacacaaccattattttgatgttgtggatattactttttctcgcatcatttttctcaacaaaaggataaggtcagtaagtgtatatacgtttataaactaaggaagttaagtaatgtaagcacaaaccatccaaggaatttgttagtgatgcaatcntggcctctaaactgctcttgaccaaggagcttca

SEQ ID NO: 331891 - DNA, 483 bp, Homo Sapiens
actaacaatacccacttagaaatgtctagaaacatcatttctagaactcagcttgggagaccatatcttgcctgaatatgtacatatatttacaaaatattcccttttggcctctggaatttagccattttagtttggctgttagctgttttctttccatatgctagccaatactgcagttataactatcattaaaatactcttatgcatgaattacaaatattaataaagtaactctgcatgtataaatatctcaataattctagcagaacttaaagcattcagaatgtacataaaagtatttgtttttggtagggacagtatttctttttatatcatcgctgtttcaataatgctttgtacatagcaaagcccaaaactgcaaaaacagtagcaccaaaacttgctcgaagccaaaacgtggagctcttgaggtcagcttgtgtcactgtgcaaagcagtttttagaaagacccagatttt

SEQ ID NO: 331892 - DNA, 396 bp, Homo Sapiens
  misc_feature (116)..(116): n is a, c, g, or t
ggcacattttgtgacccccccctaagcatttcccctgagaacataaagaaggttattaacataatgaactatttcagccttgaaaacagtattcattgaggagatcccctcagggntaaggacttcctttgggacagtaagaaaaatctatgagttcttaagtggaagaaaagaaacaactatgaaaagcaggaccagctcagaactcctcctgaggaagagatgaggtatgacaggattttccctgtcccaaaatattgctatccttctataagctgctggaatctttcttcattccgttctcccattctctgtgaatgagaatcagtgggttatgaggcattctctaaaaacgcaggtgcagcagtcatgggaatggcagtcggcccaatgcag

SEQ ID NO: 331893 - DNA, 457 bp, Homo Sapiens
gaaatatagatacgctgagttatccagctctctcactctgcctccttttggcatgcccaggctgtgcccgtaaagtgttgaatcactgttatcctaattttcttagtgttttctaccgtggccactgtgatgaggggctggcaaagagcagcctcgtgccttccgagaaggctgccaggagcctctcgaagcttgaagcgatgcacacattgcctccttgtgccaaagcccttggccagcctccccacactccttccctctccatccggcctcatgagtcttcgttaccaagtaaaattaccactgcttcacctctgatacagcagaagccttgcttcagaactggtaggcatttaggctatttcagagtgtccactaacctcaaaaggaggtttttccacatacaaaaccctagcatctttgaggggaaagcaaaatgagaataaattatgtcatg

SEQ ID NO: 331894 - DNA, 587 bp, Homo Sapiens
gaatgaacttttttggatgaagtctgtcgctgaggagcactggagtcccctcctaaatgcctcaaacacacccctcaacgagggccttaggggcaagttcgctgtctgtaattctctggtattttagttttgaaggcctggccagttctcccttttggcaccttgcccattttccaagaatccccaaggatttgaggtcacatctgtaaatacctccagctaaagttctttctgaccctcccttaggcctgccttgaattaggagcccctttgttctctgcccattacttagcagagtgttcccctaggaggaaaaaaccccttggagcggagagttccttgcactgctcttgatatcgcagtgtgacggaaacctgctattggtaacgaatctcagaactgggagagtatgtggagatgatcctaagagggggttccgaggacccctccacacaccatggacagttaccccgaatgtgagcatctctgctaagatctgattcaggatgttcactcctgtgttatttattatatagaaagatcaaggggactggttaaactagacatatcacatccagccgctgcta

SEQ ID NO: 331895 - DNA, 405 bp, Homo Sapiens
  misc_feature (380)..(380): n is a, c, g, or t
tttgctttattgtggcacttaccacctgcggaacagggctccacccttgtgacccaatcacttcccaaaggccccacctccaaataccaacacattggggatttggtatcaatctgttaatttgaggtgaagacgacaaacattttgacttttgcaatcaacaggccaaaatctctgatgctgtcagaaaggctgccagcagcagtggggataatttagttcctgattcaaatcaataggaacagacgaaacctttctcacatccatgagataaaaatcctctccttggatcagattgagcctatctaattcaggagttctcaaatttgtgcctcagaatcacctgggggggcttattaaaatgcaggattgctgggggntctctcctgaagtttctcacccagt

SEQ ID NO: 331896 - DNA, 950 bp, Homo Sapiens
  misc_feature (284)..(284): n is a, c, g, or t
ggtaggcgcgattgtgtcccggaagaggtgttacataggcaaagttcaggaacgcattatcggagaacacaacagctttgttggccccccaagagaaatacccgggaatgggccaccaccccgcgacacccgccccggcacactgctttaggaatctagaaagaacgtcggcttcgcatcgcactgcaacgggatctcgaggcattagtggaccgccagcttccagccacgctgttaaacgtcgccatgcagccaaatacctcgactcatgaatagctcgagcncttattacgacggtctctgtgcttttgagactgcatagggctcggcgggggattcaacagtaaacacatcaattatagaatacttaagagattctattttgctgcacatctaatttgtaggcacttactttttttatctacacacacagcacacaatagaattctcatatttcataaatccatgatattattttatagggctctggtatccgtggaccatactaacttgttgggctaccgtaaaatgacctctcattctgtattgctctctgtgcctgctttttgtgacatgcctctgtcacctactcacaaattcactctcacgccctggacatctctcaggggaggccaatgcctgttctgccacctcttgactcctgtctcccatctcccttgtcatccactttcactgcacagattggcagagacatatttcagtctggtctctgaatccatctcacaaccttatacttgacgattccgattctctaagtggttttcactctggggtttcaacaaaccttctggtctctactttcccgctcagtaggagacactctttatcctgttttgatgtttttaaattggaggcagtaacttgtggaatgatgttcttttactggctctctctaggaactagacattttctttacaatcatgttcctg

SEQ ID NO: 331897 - DNA, 490 bp, Homo Sapiens
  misc_feature (461)..(461): n is a, c, g, or t
acaaagggacacggaagcctttttgaacagtcaggccatcagaggctggtcggaatccccagcagatgagagtggataccgaatggaaaataactgagcttctttaaagctcagctttgatgccccgttctccctggaagctctctctggttcctctgatcagaaactgtctcctaaacatttggcaagacattctgttgtgggattttgcctggtggtaggaaaagcttgggtattagcctcagaaagattctcagctctgccattaagagctgttgtccctagggcaagtctctgcctttctaagcctggttttcttctctggaaaatgaggctaatactttggcaaattgtcagaaaggttaaagaaagttgctgggcacagtggttcatgcctataatgccagcgctttgggaatccaaggctggaggattgcttgaggataggagtttaagaccancctggcaatacagtgagatcccatctcaa

SEQ ID NO: 331898 - DNA, 552 bp, Homo Sapiens
  misc_feature (183)..(183): n is a, c, g, or t
  misc_feature (505)..(505): n is a, c, g, or t
ggagaggagaggagatcctctctgtgccttggtttcccatttgtgcattcagggcctctgcaggttcacacagggagtctgaggggatagtgtttaagtgagcactcaggcttcctctgaggaaaagaaatgaccaaagtgcagacttttattactgccattcctgctcctaatgggacagangttcaaaaggaaaaacaaattaaaaggggctaatgagaaaggaggagagatgagacagagagtttgaagggctatgcgcctggatcctcataaattcttattgagaatggcacaggtattaaaaaagtttctgggtagtctacgagaaatgtcaattattatctctactacaactacttacatatatctaatgggaaaagagtggggcttaggtgtcagagtggatgggagacaaaggagaagctacactaataaatacaacaagtgggaaggtacctgtccccattccctaaaagggtttgtggggcaatgctggcacttnggtggccgggggaatcttcttgaccccactttccctcctcttcagtc

SEQ ID NO: 331899 - DNA, 695 bp, Homo Sapiens
  misc_feature (294)..(294): n is a, c, g, or t
aagtttctccaggcatcagacatcaggcactggtcctgccccccagctaacataattcaacacagcccaggcctcccaagtgcccagcaccactgcagatcactgtgtgcccactctgtgcctcaactaaggaagctcctatggatggtcagcagggagagatgccaaacagcaatgagagcaggacatactaagcaaagggctgtcctaaagtgtccaacggacaacttcaacctcaccacagtgacatcaacaaggaggggctgctgttatccctgattttcccaactgtcngggaaacgttttcaagaggttaagtcttgccctaagattatggcaggctgtcctctgtcccagaggcagagagacccatgttccctggaatccagggtatcctgagttcctaatcccacttcccagagtggaggctctttctaatagaccctgtactcctcatctagaatttcacatacagagcacacccagccatgcttcagagaataaatgactttctgtctgaacagaacacagtttttgctggttactctgccagatgcattttcaatggcatagaattcaccaaaaaaccttccttgggggggtccaaagagaaaaaaacaaacaagagaacaccaaaccaggaggaaacagccaagctacatgttttaaacccccagagaatcccaaacacacgg

SEQ ID NO: 331900 - DNA, 447 bp, Homo Sapiens
  misc_feature (283)..(283): n is a, c, g, or t
  misc_feature (395)..(395): n is a, c, g, or t
tttttttagacacaaacatctagtttattttttctgactgtaaccaaagtcagcaaaagaaacaacaaaacttcagtgccctagaaatcctcctgggttcaatgacaacacatcaatggccgggcacagggttggattccttttatgaaatcaccttataatctctcatcatcccaggacagtgccttttgggactgcatgaatctttaatagctacaccacattttctcatcctttaagttatgacagacaggttatctctctccaagagcatcaggttagnatgctctttcactcttacaaactgtcaggtggagggagaatcacgacatcgttcataaataactgtgggagtctggggatgctggctgaaggcatctccgggaaggactggnggggcgattttgctaaaaggggctgctcactgctcatttcactggcatgccg

SEQ ID NO: 331901 - DNA, 380 bp, Homo Sapiens
gactctaaaaaggtattaatgaaacataaaacttaacaatgaaggcagaagaagaacatagtagaaacaattactacaaacattttagcttccaatttcatataatgttatacagtttagaaggagatagtctattcgttaatagaaatagtaagtgtacttttttagcttctgctgtgggagcatggcatacaccagcttgggtggtggggaaagcgggtctgtaatgttccagcctctggttggctccatcggctgcttttgggcaacacccagctttagagatcttttttgttactttctgactttgcttattctttttcttttccaaccaagaacatgctaattctttgaaaattagtttgccaagcagccaattt

SEQ ID NO: 331902 - DNA, 528 bp, Homo Sapiens
ggacttaaagtgatagtttttaaaccatattctgtccctaagtaataaaaaatctaggaagttactaaaataccagatttgttctgctctgcctcatctagaatcaacgtctaactaacttaaatgaagtataataaatgagttcatatgaaaaggcttcctctatggacacttagatatattgtaactattgaagttacctgggatgtgggggcggtgggaggaggacctgcctccccaggacatctatgactaaggcctggctttagttatggagagagacgtagaagttgaattttacacccaaaattgatgtgactgaagaggaactgattgttgctaaccagctcacaagaatccagtattgagaccagttcactagaagaaacaaacatttctgccatgcagaccaaaaagttattagttggtgaatatgtattttctctttggaaggtctttaaggggagcaaaccagttttaatcaatcagattgcttggtaagtttggaatctgcaatcagttggtctt

SEQ ID NO: 331903 - DNA, 558 bp, Homo Sapiens
  misc_feature (22)..(22): n is a, c, g, or t
  misc_feature (29)..(29): n is a, c, g, or t
  misc_feature (42)..(42): n is a, c, g, or t
  misc_feature (71)..(71): n is a, c, g, or t
  misc_feature (102)..(102): n is a, c, g, or t
  misc_feature (109)..(109): n is a, c, g, or t
  misc_feature (162)..(162): n is a, c, g, or t
  misc_feature (203)..(203): n is a, c, g, or t
  misc_feature (537)..(537): n is a, c, g, or t
ggggaggaggttaaaaatattnaccattnaaaaccagttggnagaagttcattcccaacccctcatgatgnccttgagggattccgaacctccagtggaggnaagtccnctgtagatgtgggtggaaaccagccaagagaaccaagaattaagaagaggganccctgacgatcctgacctgaattgcctgccaatcctcatgntccaaaccttgaatgaatgagaagttgccttccttatggaagatccaaagaatgtggtttgttgagatggaatcctactccctggttaacatgctgtgaacattgttgaaatggcaacaaaggatttagaatattacataaccttagttgatagcagcgtcagggtttgagaggattgactcaattttgaaagaagttctgtggataaaatgctgtcaaacagcatcacatgctacagagaaatctgtgaaaggaaaagccagttgatgtggcagacattcttgtcttattttgagaaattcctcagcctggatcttgcagtgagccaaagaantccactgcactccaacctggg

SEQ ID NO: 331904 - DNA, 460 bp, Homo Sapiens
  misc_feature (232)..(232): n is a, c, g, or t
  misc_feature (237)..(237): n is a, c, g, or t
  misc_feature (244)..(244): n is a, c, g, or t
  misc_feature (252)..(252): n is a, c, g, or t
  misc_feature (273)..(273): n is a, c, g, or t
  misc_feature (279)..(279): n is a, c, g, or t
  misc_feature (407)..(407): n is a, c, g, or t
ttagaattcaaaatatgaaaatttattttgcataggaaacaataatctctggtaaacatcattactgcatctaacaaaacaatgccttcaattaaagggggaaagtgagtttttaaacattagggttaatttagaagaaaatacagtatataataatctcaacatcatgtttagggtaaaaatgctataatgtgaaaaaaagtccctaaggaactgggacaggaacctaccntaacnaacaccnatttaccngtgtatgttttcaataggacnaaaacnatattttgtacccaaattcccacagtggggtaattctataggttgtgggccccttttaaaaatgggccaggcattggtccttggaatcaggaaagcttactgggggatttccctcatcggaaggtggnggattgccggcttaatccctgggtacccttttggttgggtaattacttagggg

SEQ ID NO: 331905 - DNA, 504 bp, Homo Sapiens
ttttttttggtaagcgggtatgggtatgagttagtttcaattacttgcagctataaaagcctaatgataataatagctagcgcttcttgggcacttactacaagcatagtaaggcactattttaagtgctttctgtgtattaaagcctttgattctctcaacaaccctaagaagaggttttattactctcttcccatcttaaagatacagctgccttgtttgcagggacctgatcttggccagtcctcagacaccaccccctgggtgacttcatgtagctcagacccatgagcttttgccttcaactacacccatgtcttgggccatactatcaatcccacggacccccttatccctccattgcagcaccaatgggcccaccatccccaacaaatctggactttaacccatcgttcacttcatcttctctggctcctactcccagagggaaaacaacaacaaatacaggccaggaggactggcaacccacattcctggtggtcc

SEQ ID NO: 331906 - DNA, 484 bp, Homo Sapiens
ttatatgaggatttcccaggggatttttattacttgcgataagtaaggaggacactgggaataattccccaaagcaatgcctccctgagcaatggtgcaaacatggcttttattagtctggttagctgagtcattgtatgtagaggtggagtcaaggcagcgagtcccagttgtcggttatgctgctacatatgtcacatgtatagaaaatggtgaataagctcctccttggacaggattttaagtatgggtgatgaggaaagttggccaaagttcatctccaactcagggcatctctggggtccaactgggtctttgtttttcctgggggctaagcttcttcctgggggaacgttacttgtcgtttgttaatacttccacggatgtcttttcaggggtctccattaaagatgtccctcccggggccttcttgaagttgggctgtcctgctttccaatcctccattccttccacctgtcttcca

SEQ ID NO: 331907 - DNA, 416 bp, Homo Sapiens
  misc_feature (27)..(27): n is a, c, g, or t
  misc_feature (45)..(45): n is a, c, g, or t
  misc_feature (63)..(63): n is a, c, g, or t
  misc_feature (118)..(118): n is a, c, g, or t
  misc_feature (178)..(178): n is a, c, g, or t
cccctttccggacttcaaagatggaancctttggggacgatgttnctggtgcttgggtcccanagtgattccacttttgaaggaagaggccacatgacatgaactgccctggtgttanaaccctagctaacatatttgatgctactcctgttgtctgtactgcttattcaagtagtantctaagttatgttactaaaaaacatggtgggtaaagcacaatcctacccatcattgtcctccaaaataattgtatgacatacacgcccagcccattgccctccctgcatctctgtgctctttgccatttccccttctacccagcctcctcaaggggtaccttggtggatatttcagtacttaaaaccagactgtaatcataacctccctctgtgtggcatcaataaatagccaaactc

SEQ ID NO: 331908 - DNA, 441 bp, Homo Sapiens
tttttttccgcataaatattgcttttattacaagaaagaagagaccacctctgaagtaaggcacaacacaattccattgtcactgtggcagaagtccctgttgctcatccctttgatctcagccaagactgtggtccacgggcctaaggcacttgagcttttccctcaactgaagtgtagggggtgcctgagagctgagcctcgtgggagtgtccatggtctctggacctgcatcgaagttcatgtgtttccactggtgctgaagatgaacatcaagaattactagacatgtaaaagtgtctttaagtgtctttcctcctgagtccacctttggcaatggtccccaaagcctggccccttagagatgcagctccagatcctggccaccctcagggttcaaagagactggcccaggggtacacaattgctggaatattctct

SEQ ID NO: 331909 - DNA, 227 bp, Homo Sapiens
ctgcataggagctcctgtctgggacaaatgcccaccagagaaaccagcaagtaatagaaatgtggctttggaagggaacttagaaatcatctggaatgttgtatcctggagaactcctcgccccacaccagcgccagcacccctccccaaccccctacaccacctccacctttatacttatgctttatacctgcagaactataacctaagggaaggaatgaatataa

SEQ ID NO: 331910 - DNA, 457 bp, Homo Sapiens
gcctgaaaacacattttcttaatgggactaaacttttctagctgaattgatctattttaaaacttgccaatgaaagctccttagtagtatctgctaattaaatgcagtttttatacctaacggaccttttaaagaatgtgtgcactttgcaaaccccattgcttcttgccgtatctgagcacttgccacctggtggtaaggagaccattccatctccttcactagatggtagcacctgcaagtcagggatcattgctgacttatcttgcctcccaacattgatcatgcagtaggtgtggatgagaaagagggagataagggaagaaagggggctgtgaataaacgctgttgctttctgcttccctttttagggagttaaaagtctcttcagctaccctgtttagggggtatgaaagccaaatctaggggaatggccctcctgccagttttcccgatt

SEQ ID NO: 331911 - DNA, 394 bp, Homo Sapiens
  misc_feature (16)..(16): n is a, c, g, or t
  misc_feature (33)..(33): n is a, c, g, or t
  misc_feature (40)..(40): n is a, c, g, or t
  misc_feature (46)..(46): n is a, c, g, or t
  misc_feature (54)..(54): n is a, c, g, or t
  misc_feature (71)..(83): n is a, c, g, or t
  misc_feature (93)..(93): n is a, c, g, or t
  misc_feature (181)..(181): n is a, c, g, or t
  misc_feature (295)..(295): n is a, c, g, or t
  misc_feature (305)..(305): n is a, c, g, or t
  misc_feature (315)..(315): n is a, c, g, or t
  misc_feature (329)..(329): n is a, c, g, or t
taaaatatattaaaangaaccaaatgttcaagntatcagntatggnacaaatgncaaaaataatgtgagcnnnnnnnnnnnnncctgttaggnagtctgtaacactttgggtattttgctatagttgctaattaaaaaaatatagatgtttatttatttttaatggcagtaatatatgggngaaatgaacaaactatgtaaacaaaaaggggaactcacttgtttttctttaggtttataaatttgaggctattttttttagggggtgcttttttaaaaatcccataggatacangagatgtttnctttggtttnctgccagtcatccngctggatacacacctgatggattttaaggaaagccacacagagctggatggggccgtgttaatca

SEQ ID NO: 331912 - DNA, 403 bp, Homo Sapiens
  misc_feature (212)..(212): n is a, c, g, or t
  misc_feature (324)..(324): n is a, c, g, or t
agatataggacccctttcaatccctttcctttccccactgctgcggttcctcagcgcagctgtccctgggacacccagacaccgtgatgtagaatgaaagcatcttgttcaccccaagtgacctgctaacgtgagaattctcattttgagacattaaaaacacactttggcaggccaaggctggcagatcacttgagccccaggagttcaanaccagcctcggcaacatggtaaaacccatctctacaaaaaatacaaaagttagccagtcatggtggtgcgtgcctgtggaaggctgaggtgggaggatcacctgaccctganggcggtcgaggctgcagtgaagctgtgaacatgctacctgcacctccagtccgggtgacagagtgagaccctttcgcaa

SEQ ID NO: 331913 - DNA, 417 bp, Homo Sapiens
  misc_feature (239)..(239): n is a, c, g, or t
  misc_feature (327)..(327): n is a, c, g, or t
ggggtttgtttgggaaaccgtaagactatatggctcagcagagggataacaaggttttttgtgtaatcaaaattcaaaggtatactgtagaatagaacaaccggaattacaactcagaataaattcttagaattactaacagaaatgtgaaaagtcctgatggagatgtagaaagcgactggggacagatataggacccttcaatcctttctttcccactgctgcggttctcagcgcantttccctggggacaccagacaccgtgatgtaggaatgaaaggcatcttgtttcaccccaagtgacctggctaacgtgaggatttctcntttttgaggacatttaaaacacactttgggcaggccaaggctggccaggatccacttgagccccggggggtttcaagggcccgccttggc

SEQ ID NO: 331914 - DNA, 512 bp, Homo Sapiens
  misc_feature (270)..(270): n is a, c, g, or t
  misc_feature (387)..(387): n is a, c, g, or t
  misc_feature (410)..(410): n is a, c, g, or t
tgttttttgtagagatgggggtctcactgttttgcccagggtgatctcgaactctgggcctcccaaagcattgggattacaggcatgaaccaccactgcacccagcctgagttcagctttattccagtttacatagtctacagtgtccctcaggctggcagagatggagaaattaaagagtatgagtatggacttctgagtcaatgagacctgcatctgtatcccagctctatttgttacctgtgacttcagcatttactaacctctcgntccccgtttccacttttataaaatgggaaatgacagtgccttccttacagggctgccctgatggattccagggagggcagtgcgggttacgtgggcttacttctgagcttgggcgtnatgggtcacagcttggataattnattactccataatcgataatgggaatttggggattcaatttttagtattttttctccacactctgaagaaaagctcctgactctcagctagggtgcaggggg

SEQ ID NO: 331915 - DNA, 763 bp, Homo Sapiens
  misc_feature (15)..(15): n is a, c, g, or t
  misc_feature (33)..(33): n is a, c, g, or t
  misc_feature (95)..(95): n is a, c, g, or t
  misc_feature (134)..(134): n is a, c, g, or t
  misc_feature (159)..(159): n is a, c, g, or t
  misc_feature (166)..(166): n is a, c, g, or t
  misc_feature (199)..(199): n is a, c, g, or t
  misc_feature (250)..(250): n is a, c, g, or t
  misc_feature (303)..(303): n is a, c, g, or t
ttttgagacggaccncacttctgtcgcccaggntggagtgagactacatttcaaaaaaataaaataagtaagtaaataaatgctgacaggcacantttgtggacatggaaacaatcatataatgggggcatganaatgactgaagtttgggaaacactntctaganccacaagatggaccacacgtttgtgccaaggtntccttcataccagaggcatatcttacattcacatagtcatgtaccctgggntctgagtgggaaagagagaaagctcatgtacggtgaggacacgatttaggggntcatgaacatctaaagcctgtgtcccactgagccagctgagcccttaccctgcaaaagagtgaactgcagtttgctacatccaagatgggctcttgtacagggataaaagattactggccggggggaatccaaagggcctgctgaagctgacttactaagtccagcacctaccaaagaggggatcaagcttcctgctctctcaggactgacactgcttgcgaattctggttggaaacaagtttgtgactgtcctggaacatgggctctcatagaacctccacagaggacagttgtccttgctcccctctctgctggggcaacaggctaggccctcagatgccagaactattcatgtcacctccgttgtccttgctctaccatttagcattcatgtaagacgaccttggagagaattcttcaccaaaattgcacatgacggcctatgcgctgaaacttatt

SEQ ID NO: 331916 - DNA, 475 bp, Homo Sapiens
  misc_feature (31)..(31): n is a, c, g, or t
  misc_feature (196)..(196): n is a, c, g, or t
ctcttttctaaaagactccctaacacttacnccatggctgtacagttggtggggtcctgcgagagaggaagagacactcagaccagagaaggggtgtgcatgcgccctactcggcttggctagaagtagattctggacagtcaagctcttcatctgcccaactgtgtagcatctgcattgcccagtctttcatgtngtgccaaggctgatgcaggatttgttctctgtccagcagtcacttcggccagagctgaagagttgccccgtctctgttccatgtctcctttaagagctctggtgataaggacatgatgcttttactgaactttcttatcctagcacatgcttcaatagttcaaggaacttgaaaaatacttttccttacctttaccccatccctgtctttactcctcacacttactgtaagacattagtaacataataaattaaaagtcacacgaatctcaccaacata

SEQ ID NO: 331917 - DNA, 378 bp, Homo Sapiens
  misc_feature (349)..(349): n is a, c, g, or t
gctgtaacagtgtttattgatgatgagtcccagggtgaggagtgagggtgtcagggtgagtgagggtgtccagggtgagtgcacatgtgtggtgaggaggtgtttgcagtgcttcaggcgcagcaacttctttcatctagtttaaaattgtgctctgaggttagattttagtagaacaaaggccttacaaagaatgtgaaaacattatgcttccctgcttacaggcaattaaaaaggagaatcaagctgagggtgcctggtgtggggtggggtggagaagaccacagagactattgtgtgttttattcaacagtgtcctgggctgctttctctcgtgccgaaatttttnggcctcgaagggccaaaatttcccctata

SEQ ID NO: 331918 - DNA, 472 bp, Homo Sapiens
  misc_feature (13)..(13): n is a, c, g, or t
  misc_feature (27)..(27): n is a, c, g, or t
  misc_feature (33)..(33): n is a, c, g, or t
  misc_feature (52)..(52): n is a, c, g, or t
  misc_feature (110)..(110): n is a, c, g, or t
  misc_feature (142)..(142): n is a, c, g, or t
gtctcaaaccagnaggggagcacaggnaggccnaggggaaacatggaaaccnaaacatcagggctggacccaggtttgggtgccccggggtggggtggagtatgttcctnaatttctgcctactttccccaaacaagcttcntggctccatgttggcttaaaggccctctcagaatctgacccttctcttcagtcctcaattttgttgcctctcctattcctacttcccttccttttctcaaatccacagacatctctggtaatcatagtagtcaacaccttacaacacttattatgtgtctggcattctttcaagggttttgtgtgtattaacacattgaatgttcatactcacccttggaggtcactcactatcatactctccatattaaaattgacaaagatgtgttcagagtcttgcccgagtccacccagcctcttactctcaacgagacaacagaagagcttcctt

SEQ ID NO: 331919 - DNA, 599 bp, Homo Sapiens
  misc_feature (12)..(12): n is a, c, g, or t
  misc_feature (73)..(73): n is a, c, g, or t
cccccaaaaccnatctgagccccacaactccctcacttgatggtgcaaagggactgtgtgtttgtggcccccncctaaaaatatacatgttgaaaacacctaaccctgatgtgatggtatatggaagatggaaactttggggaggtaattaggtccatgagagtggacccctttatccaatgggattagtgccccttacaaaaaggggcccagagaccctagcctagttcctccttcctgcccatgtgaggatacaatgagaaagtagacagttggtgatatggtttggctgtgtccccaatcccaagtctcatcttgaattgtagttccccacaattccccacgtgtggtgggaaggacccagcgggaggtaactgaatcaagggggcagtttccctcatgctattcttgtgatagtaagttctcacgagatctgatggttttagaaggggcttcccccttcagtcggctctcattctccttcctgctgccctgtgaagaagaacatatttgcttccccttctgccatgaatgtaagtttcttgaggcgtccccagccatgccaaactgtgagccaattaaacctctttcctgtacaa

SEQ ID NO: 331920 - DNA, 396 bp, Homo Sapiens
  misc_feature (14)..(14): n is a, c, g, or t
  misc_feature (25)..(25): n is a, c, g, or t
  misc_feature (102)..(102): n is a, c, g, or t
cctgccttgggaantttttaaaaanccaaatcccccccctggcctgcctggggtgggaaggaactgccaggggaaagaacaggtggggagcaagttccagantcctggttaaatccagggaccctagaaaacccttcaacccccaattcccgaaagcaaaaagtgccctccccagaccccacaaagctgagaaagtacagaggctgtggtagtctcccaaacagagcgagggcttgggacacccaggaaaactgggagcatttctgcagaactgactgtttgttaagctttgtcacgcctaaggaaaaactaaatgtctgcttttctgttctctattttttcctttttctttaatgacttttctcttgaatgactgaattttctgcttgggatttt

SEQ ID NO: 331921 - DNA, 404 bp, Homo Sapiens
  misc_feature (361)..(361): n is a, c, g, or t
  misc_feature (394)..(394): n is a, c, g, or t
ttttactgataaatacggaaactccatctttatcggctgtataaacatctctggtctgtacatacatttcatacatcgtagggtgggaagcgagggccaaagggaggcccagcagcacaacagctcacccgctttccctacagccctacccgctctgtgcaaaccaaggccaacagctcctgctgcctcttcctccctgggaaaagtcactgttacggggagggggccagggggttgaaggattagaaggagatagagggcttgggtgggggaggacacatgtaagtgctaggaatcaaacacttgaaggcgaaacagggcaactgggcacaagcaggcaagctgagggcatggggacggnggcagggaaaagggggaggggagggggccacgnttgcccctct

SEQ ID NO: 331922 - DNA, 489 bp, Homo Sapiens
  misc_feature (390)..(390): n is a, c, g, or t
  misc_feature (403)..(403): n is a, c, g, or t
  misc_feature (415)..(415): n is a, c, g, or t
  misc_feature (436)..(436): n is a, c, g, or t
  misc_feature (447)..(447): n is a, c, g, or t
  misc_feature (456)..(456): n is a, c, g, or t
  misc_feature (466)..(466): n is a, c, g, or t
ggcacgaggcagctcctgtcacctgtccagagcaggtgtagacctcaaggcaagactccccaaagagcctgccagaatccggacaatcagatagttcaaaccagcaaggagatgcggacatcaaaccactgcccaacggcttttaagtttccaggactgttttgtgacttccggggtctggaatgtgacggagctggtgagagtatcacagactcctgttgcaacagcatcagggcccaacttctccctggcggacctggagagtcccagctactacaacatcaaccaggtgaccctggggcgggcggtccatcacctcccctcctttccaccaggcaccaccaaggcgccccaagttccattcgatggacagttgaggtgggagagccntttttgatggacntgtttcttattncccgggggacagggccttttnccccaggcagnttgggcagncagccatttncccaggcgggtttgggcccaacg

SEQ ID NO: 331923 - DNA, 353 bp, Homo Sapiens
  misc_feature (64)..(64): n is a, c, g, or t
  misc_feature (79)..(79): n is a, c, g, or t
agtaagtaaatggatgaaaacacactgattaaaactgctgcttttatccaacaagatggatgantttcccaggaaagantacttgagttcaggcctgttcaagtcccaacctgtttgtggtttgaggttgctctctgcctcatagagcaaagtggaaaatttatcttctgggaggacagagttttcttctctgaaaaagtttcctacatagttggctttggcatttgcaaggaatgaaaggtcagggattgaggcctcatgagtctggatttctagctgaggttgagagaaaaggtagtgattgtaaccagaaaatccagagtgggtgtatttacctccagaactcatcactt

SEQ ID NO: 331924 - DNA, 613 bp, Homo Sapiens
  misc_feature (262)..(262): n is a, c, g, or t
  misc_feature (307)..(307): n is a, c, g, or t
  misc_feature (493)..(493): n is a, c, g, or t
  misc_feature (505)..(505): n is a, c, g, or t
  misc_feature (593)..(593): n is a, c, g, or t
taacactcccctccaactcaggaagaaatgtgtgcagagtccttagctggggcgtggtgcactcggggccaggtgctcagtaggcttcggtgaatatttgttggctgatttattcagaaattctgtccagcccctaccttggatggatttatcacctctccaggccacctcttctttccaaatagggccacctaggtatagaccaaagacacgaaatcttttgtgatcccacaaacacagagcaggtcaaataggcccaagncaatttgagactgtggttcacgtcgtgattgcagagtttgctgtnggacgtgctcccacttgcgtactagctgggcatgtggcttaatttttctcagcctcagtcgccccattgtaaatggagataatgatactatctcccctcacaggactgttgggatgctactggatttaataagctaatgcagggacatgctaagcacaacccatccctgaggcccagagaggggtnggccttggctgnaggtctcactgcgaggtgggaatgtgggcctccagaccagaggtaggtcctgtggcccctagacagtggacagcaatggtcagttttnacacaccagagccctagcca

SEQ ID NO: 331925 - DNA, 509 bp, Homo Sapiens
  misc_feature (77)..(77): n is a, c, g, or t
  misc_feature (267)..(267): n is a, c, g, or t
  misc_feature (334)..(334): n is a, c, g, or t
  misc_feature (430)..(430): n is a, c, g, or t
  misc_feature (440)..(440): n is a, c, g, or t
  misc_feature (467)..(467): n is a, c, g, or t
tctgggaagccatgtcctcagcaggcacagcaacccctctggaaatggatcacaaactcacttctcagccaggcagncaagcttctattgtaacagtaggcacagtatagtcggatcatcacatcagctgggtttttggtttagtcatctagagtcgtctggactaaaggtctttcaggtctccttgccctgtgagtgcgtgaacctccccacccgaattgcctcagttgtcctgagcctcatgtctctcctggtggtgggccaggnccttgcatgggaagggagcctgctgcggggcagcccagctggggtgtgctcacctatgcgcaatganagttattgaaggactggttgttgatgttggtgagcgtatccttcatgggccagcgcgaagtcggccagggtcagccaggtgcttgccagcgttctnttctcggganttgtctttcctgttgccagggggaccntgggagaaagtgttcaagggggccgttcaattgcagcagcct

SEQ ID NO: 331926 - DNA, 528 bp, Homo Sapiens
tttcagagcaaactttaggttttttattaggcttttgacagtactttctgagtatttgagcaattgatgggtttctctctgataccatcttgccacggtgccaaacagcacatatgcattttaaaaatgtaattcaagctctaaggagtatgagtttgtattcagaatgcaatttaaaatctacctacctatctacctctctatacgtatatacagtgactactttgaacagatccacataaaggagttggagtggagaacagtttcacaataaataatcgcttctctaaactgtacaaaatcctaccagcaaatcagccactttcatttcctcatgataggtcatcacttttatacctgtaataacttatgaaatacacacagaggatttaacatttggtcaaggccaatgctctgtcatacaccatcttaaatgtctctctacggggccctggacacccgctcaaatgccgtttcctatctctctgtgactgggttggggagatgggcagccctcccctgcgcagg

SEQ ID NO: 331927 - DNA, 465 bp, Homo Sapiens
  misc_feature (97)..(97): n is a, c, g, or t
  misc_feature (430)..(430): n is a, c, g, or t
  misc_feature (444)..(444): n is a, c, g, or t
  misc_feature (448)..(448): n is a, c, g, or t
cgagatacattcttttggtgggtatcaagcacagctgaaaatttctctgccaaaatcccataagcttcaaattcataaactcctgtagagctatganctgtgtctaaagccgacgcctcgtggccctcactgacatacaccatgcagcctattctaggcaaggatatgaaagtcgcatgcttctgctgcacgggcattttgcatttattacaagatgggacatgtgtttacatttgcaaagagttagcttgggagtccacttattctccaagaggaaggtcatgtcaaaagccagtaagtggctttccaacttgccaaaactctccaaaaccaatttcctgcatgaaaccggagctgcaggcgtcatgctctggggcacatctgggatcattttactcattaggaaaactggggtcattcggatttgggnattcttgccgtggngggnggtattgttaagtgagg

SEQ ID NO: 331928 - DNA, 427 bp, Homo Sapiens
  misc_feature (348)..(348): n is a, c, g, or t
  misc_feature (379)..(379): n is a, c, g, or t
  misc_feature (398)..(398): n is a, c, g, or t
  misc_feature (405)..(405): n is a, c, g, or t
ttttctaactaatccagagtctctcctgcaatgtctctataattttaactgtcttatatagttcaggcaaaattatatattgtggaattcattctcatcttcatcttaaacattttagacaaaaatatattagttccctacttctatacatgcatatatgagaaaatggtctgacaacccttaggttgggacactcagcaggtcatggcattcagagcaaattgatttttattaagataattataagaacatgattaaaaaagtattttgtatctccctctttcttttgtattttcaggaaaatcatatggaactggggcctggggggcatgccacctgttaatcccnggctcctttaaggagggcttaagggcagggntggatgggcttgaaacccnggggagnttttcaggaggcagcctggggg

SEQ ID NO: 331929 - DNA, 475 bp, Homo Sapiens
  misc_feature (378)..(378): n is a, c, g, or t
  misc_feature (420)..(420): n is a, c, g, or t
  misc_feature (436)..(436): n is a, c, g, or t
  misc_feature (441)..(441): n is a, c, g, or t
  misc_feature (449)..(449): n is a, c, g, or t
gttaggacacatggattagattgttaagatttgtgaatttactaaagttgtgtactgacttatgtatagctgtatttttctggagaaagatagatttttatcaattctcaatgtctatggagtttttaaaaagaggtaaggattattcaaatgtaactataaacataagaaaatgtgatatctataaccagttgttagagtatttatcgcctccattttgcttcacttgtagccacttcgtctcaatcttgttaaggaccaaataaatggtatttgtggttacttgctgatctgaaaagtgagtacctcctgcacctgggctagtcagtcttgtgaccaattttgggtgccataggaactaggcaggaggaactaaanttatgggaatgggcagatcctcagggagccagctatgtggantttacatacggtttgnttttntaatgggnttgggacgggtccgggccatgttgcc

SEQ ID NO: 331930 - DNA, 351 bp, Homo Sapiens
ggttaaaaaaatttacctgcccttcttttttcttaggaaggagtgataagagctttctaaaaactagagacaagcaaaccatccaaagtgtgaaatgttttaccattaaagttcaaagggcacgtagaactgagaatgcaaaggcaagatggcagtgggaagaagaacgtgacttctgcgtcatttcctgggtagctagcgtttagttaaccagatggaaatacctcggctcagtgcagggttcagtagcagcagttttgtccatattcctgctccgatttgagctgggaatttaaacaagcaccagttcatcttcaaaagagcctttattaccaaacacacacggcacac

SEQ ID NO: 331931 - DNA, 519 bp, Homo Sapiens
cttaggtttgtgtgtatttatgaaagactctatccagtaagggtcattatgtcatcaccaagattgaggagaaattcaaaaggctttcaaaaatagctagttttaatcaataacatttactgagtacctactatgtgccaagctcttgtgccaagagctttatgagtatcatttttaatgtattaatcctcacaacaactctggaaggtaaatactgttattgtcatcatttctaggatttttaagaaacctaaggcttacagacaatatgtgacttgcccaagggtctcataggctaaggtgatttgtgaagccaggattcaaatccagacaatctgactccagagctctggctctaactagtatacaatatgtctttcaaccaccaaaagtacatttccatgtttggagaccttctgtgtattcactatagcatttctgaatacctaggactcctaatttacattctgcagctgagaacactgactgacggttcctaaagggcaagggttttgaacg

SEQ ID NO: 331932 - DNA, 557 bp, Homo Sapiens
tttgctaattcacatgtgaagctttattaaatctggttatatgtgggacttcaacagctcaatttttccacaatttccacttttcaaatcccatgccaaactgtcactttttcccttaaaaagtggataaacccatcttttgaaagacaggtcttctcagtttttctgttcatcctcctactgtaagtactggctgatattcacacacatgtactacagaattaaaatactgacaagcaagtagtttcttggcgtgcacgaattgcatccagaacccaaaaattaagaaattcaaaaagacattttgtgggcacctgctagcacagaagcgcagaagcaaagcccaggcagaaccatgctaaccttacagctcagcctgcacagaagcgcagaagcaaagcccaggcagaaccatgctaaccttacagctcagcctgcacagaagcgcagaagcaaagcccaggcagaaccatgctaaccttacagctcagcctgcacagaagcacaaaagcaaagcccaggcagaaccatgctaaccttacagcttagcctctgtc

SEQ ID NO: 331933 - DNA, 895 bp, Homo Sapiens
ttttccctaaatggtatggccaaaagtcagagttaaaatatatatagttagattccaacttcctccttcactctaaaaatagaatccaaacccactcttcatatatgcttccagaatggggcttaagtaccaatctctgctttgcaatgggcacaatcttggtcatgtcctgaggctctctaagaaaagagaggatctaggatgggagagctagaaagttgctaactgggaagaacaaggccctgagggcttggtctaccaatctgggaagatttgaaaacaaacttctcgcaactgaaggaaggctgaaggctgctgcaagtcattgagtgactttaggatgagcaaaacattgggccacttcctaatgccctatgtgtatagtaccagaagcaaggtctcagacttaacagacccagctctgttccaaggtgagtctgaaccaatagaaagcaaacatgtgcagatatccaaacaagactgctcatgcaagtcggggctggctacccgtcttaggcagcaacagcagagtccagggagcttattcaatatttactgagacttcgaagacccagcagatgtttaatgaagtcactattttggctcaaaccctccacttctccccctcccctcaaaaagccaacaggtaaacacataaatgaaagaaacccacagaaggggatgggaaataaagaaaattctctcaagacttctccaggcccatgtcactggtcagcgtggtttttatgtgtattaggattgggggatgtgaagaaataagtatccagtactttataaccaaagcaattaaatgatattggggtagggaatgttggccagttttgtttagttttgcatcaccattgtcacccagactcactagcccaagtaatcg

SEQ ID NO: 331934 - DNA, 458 bp, Homo Sapiens
  misc_feature (411)..(411): n is a, c, g, or t
tttttttgtagctttattcttttattcaaagtttattaaaatacaagaacaaattgtataagcacacatagcactcagcaccaatatgataacactctttctactgataatctcccaaagcagttcattttctgcaactgagaagcacatatgtgtagcatatgcacgcgtgcattctcaccacatttacccaggactcttagcatcatgtcccgcatattctccttgccagggagacaaagatggggagaggcaaactaatgtgactacatccaaccactaactgaggtcgatgactctttcgtcagtaggttatcatccgcacactgggtcaactctggcacatctctggtctccctcttcgggcgcccgattacttgggctagtgagtctggtgacaatgtgatgcanaactaaacaaaactggccaacattccctacccaatatcatttaattg

SEQ ID NO: 331935 - DNA, 278 bp, Homo Sapiens
ggtgtaatgaaaacatacctaagttcccaattattccctaattaaaataaattaaaaatcagtaccttaataatgtattcaggaaaatatcctttaatttactgaagttcaagaagagtgtaagaaagatataagtatgaacttttcccctcaacatttctctaattctgatttggtacaataacatagacaatcctagcttaatacagaaatgtgccaggcgcagtggctcatgcctgtaatcccagcctacaaaagctgttttgaaaaattagccc

SEQ ID NO: 331936 - DNA, 436 bp, Homo Sapiens
ccaaaatgcaggatgctgaacttaacatgggtcaaggagtttgtttacacaccagaatttgacaataagctaacatggagagggcctccaaaaagatattgggtctcaatgctacaaacatctagggttttcagttagttattccaatttcattctctccaagccattggtaattcacttaaacacacgtgtattgtaaatcttacggggaaaaatatgcatattaatcaaatgagttgataattatatttaggggaattcttagagttatattctttcctaatagcctataattgaaaagtctaatagaattctagaaaataaagatggcaaagatgcattagataatatagatttctttttttcctcctgagcagtggaaactacaggatagtttgttttctgtccaggtttcaatttaaattcagaagggggg

SEQ ID NO: 331937 - DNA, 425 bp, Homo Sapiens
  misc_feature (48)..(48): n is a, c, g, or t
  misc_feature (382)..(382): n is a, c, g, or t
attattaaataaataattttcaaatggttaaacagtattaaatgggcnccctgattttgtgttaaattttaggttcccctgttgtttaatgccccccgaaatatgcagacctttgggaatataaaaatattgcaccccacatgtcttaatggggctgaatttcagattatttgttacatatacttattatattgattgttgggttttgattttggtgcttgctgctgaaataaattgaaaattaatattcaataaaaatgatgtatttgtcacttgctgttaaggtagaacaagaaggaacacatattatacacataatgatgggaattacattgtgatttgtactatctaccaaggagtaactgccagttaggaagaacangtaaacacgtgatgttaaaataaaacaatgatttgctaagaaa

SEQ ID NO: 331938 - DNA, 587 bp, Homo Sapiens
  misc_feature (18)..(18): n is a, c, g, or t
  misc_feature (29)..(29): n is a, c, g, or t
  misc_feature (76)..(93): n is a, c, g, or t
acccttggattacctaanaattccccaancccccttccccgacttcactttcaccttagaaccctggaaacatttnnnnnnnnnnnnnnnnnngacatcagcctctttggaaaagcataactctgagggtaaacttgcttttcattggaaacaacacaaaacaacaaacagggggctctaagaacccaactaagctaaatgaaacccagtcaaacagaggctgggtttcagctccacagaaaacttcctaacaaagaaatagagggaaaaggcccggaatcggggggatttgctagcaattagctgcctttgaaagatcaagaaggggtgttaatggacaaaagggctggggacctgatcttggttacagcagtcaccgcatagtcagcagttgcctatacaggacagaggcttctcctgctctcccctcactaccctctgctgccttgaaatccccaaaataagcaaagctgggcagaaacagaggggaggggagtagggactcacgtgctaggggggaggtagccaggctttttgcctttggtgtgactagatggagaactgctttggccctggggtccccaagg

SEQ ID NO: 331939 - DNA, 442 bp, Homo Sapiens
  misc_feature (52)..(52): n is a, c, g, or t
  misc_feature (78)..(78): n is a, c, g, or t
tcccccggatcacggtgcacaggccgggcattcaacatggggaaagcctggnccttagagggcttttcctttgtatgntgtaggcttgcctagtttggttttccctacatttgaaaatgtttagtttagaataagcgcattatcccaattatagaggtacaattttcccaaacttcccagaaactcatcaaatgaacagacaatgtcaaaactactgtgtctgatcccaaaatgcttcagtatttgtaatttttcaagtcagaagctgatgtccctggtaaaagtttttacagttattctataatatcttctttgaatgctaagcatgagcgatatttttaaaaattgtgagtaagctttgcagttactgtgaactattgtctcttggaggaagttttttgtttaagaattgatatgattaaactgaattaatatatgcaaa

SEQ ID NO: 331940 - DNA, 456 bp, Homo Sapiens
  misc_feature (416)..(416): n is a, c, g, or t
gcaattcttaactgacattcaatgacttacttcttttcttagaaaatttccaccacatttctatccccaagccaacatacaatgtgaaatgaaagccagtgcgtggagtgcagctgctaaaaattttcagcacagggctctttctgactctgctcatgagatggtatcagccacccaatgactggcgtatcttggtcctgtgtctttcttcttacgctgtgttaatgtgtttactttccatttggcagagagacaagagagacacctccaacttcgacaaagagttcaccagacagcctgtgggaactgacccccactggataaactcttcatcatggaacttgggaccaaaatggaatttggctgggcttctcttattacttaacccagagtttgttcattaaatgtgtagggtngaatggcaaaactcccatcgttgaagcctgggggtgtaag

SEQ ID NO: 331941 - DNA, 285 bp, Homo Sapiens
tttccatgtgcagaaatttattttaaattttattgcatcacattatacaagcattaatcatggcttcatattgatgactatttaaatgtgaaaattcactcatgtcagtactttttggctatttacaagtaaggaatttctatgtactttatatatctctgtatttgtatgtacatatgcaggaatacatgactatacatatgtacacacagaaatacatctatggccatacacatagctatagatatgtcatatataataatcttctcagaaaggtctaaaatt

SEQ ID NO: 331942 - DNA, 366 bp, Homo Sapiens
  misc_feature (65)..(65): n is a, c, g, or t
  misc_feature (201)..(201): n is a, c, g, or t
  misc_feature (223)..(223): n is a, c, g, or t
  misc_feature (276)..(276): n is a, c, g, or t
ggttggtcttgctggcatcttcacctaaaatagggtctggcagacaggcccttgcgctgcatccntgcccacggcgtgatagatggcctgtgaatggcttttttacattttaaaagtggttgaaaacaaattaaaaatatatttcatgacatgaaaatcatgaaattcacatttcattatctgagaataaacttttatggnatgcagcccatgcctgtctgtnccatgtcttatctgtggtctgctttgtgctacggctgcagagtggagtggctnggactgagacggaacgccctcctcacggggccgcgtctctccaccagggaccgcggggcttactctggaggctctgcttcttccccagcg

SEQ ID NO: 331943 - DNA, 331 bp, Homo Sapiens
gagacagggtcttgctttaacatatttttccagcctcatacctgcttgttcccctttaatatcctccagccaaagaaaatttgctactgtacaaacatgccacttgctttttcccctttgtgtcccttgttctctctgccctgaaaattcttttctcttttttgtagagccattctatccatccagctatgaaatcttctctaaaagcctctcctctggtgtcccattgcacttttatctgtactgacttgggctacttgtcagttgtatatttgcctgtattgtctcccatactgaaacataaaatccccgtggacaagaaacatgtctt

SEQ ID NO: 331944 - DNA, 623 bp, Homo Sapiens
  misc_feature (12)..(12): n is a, c, g, or t
  misc_feature (29)..(29): n is a, c, g, or t
  misc_feature (34)..(34): n is a, c, g, or t
  misc_feature (86)..(86): n is a, c, g, or t
tttatctgtacngactggggctactggtnagtgnaaattggccggtattgtctcccatactgaacataaattcccccgtggaccangaaccatgtcttactcatcttagtatttcttagcacctagcacagtactaggcacacagtcaatacctaataaatatgccgaataaatgaaagcacattacggaatggaaggtacaaagccacagttggacattttccataatagtgtattttcaacccttacagaaatagacttgcagtggaatgtctactatttaagcagctgaaattcagacttggggaagagccccagaaactgctacacttcacagatggtcatttggaaaagaaaattaatgcagagagcttgtgtaactatttaatagtagctcaggaataggtcaaaataacagattctctaattctcctgagatgcctatttgagagtgagaatcatctgtgcccccactcccacacacacatccaggttcactctggggtatttttccagaatgtaccaaaagcaaagtgaactggtcaggcctcctcacttgcatgaagtggaatccacagccctgtgactactttgaccggagccagggtactgtgttgaccact

SEQ ID NO: 331945 - DNA, 431 bp, Homo Sapiens
ttgcaaaaggagaatagttccgctttctattttactacaacaatagcatggaccggctccttcaagtgtttcaaaaagcagcctgagaaatctctaaccagcccctcagtctctccagcctgccgctttattgtccttcccatcccagtgaacaaaggggagggaagggtagaagtcccccagttgctgactgttctcagcatcctaatccttgagaaccggtgagggaaatggcctgtggagctggtaaatcgaattctgccctcaccttttattccctccctctgcttgagcactcaggagttcttcaggtattataaaatctccgggctagcaggccagtaggcatcttggggcttgcaagggataaaaggcactgagggatcattccctacccgcacggtagctggtgtggttggcttgtttccacc

SEQ ID NO: 331946 - DNA, 530 bp, Homo Sapiens
  misc_feature (468)..(468): n is a, c, g, or t
tggaaaggaacttaagcggtcatacaatatttaatctcaaccttcatggaggtaatgcatttatttcctctttcatggacaaaggaagtggcagaaagaacattcacccacatttctagtgggctgtctccactgaatcatgcttattcattagttcattcaggccacacatgtttattgagacctcctgcatgccaggccttgaactaggtcccccgccccttcaaattgcgggaggctgctgcctctgactcagcatcagtgatccttcccattttgcagaacaattctgccagtccagcctcgtgttgagcactacagaggatacaggctgggccaggctgtggagggaactagaactagaaatctcaccctctggtaagtgtgggatagcaggtggtaggtaagaatgtgggcttgagagagagaaattgggattgacaggtggtctgcagttcaaatccaagntctgccattttccggttgtgtgaccttgagcaagttaatcatgcctcagtttccttatctgt

SEQ ID NO: 331947 - DNA, 729 bp, Homo Sapiens
  misc_feature (561)..(631): n is a, c, g, or t
aactcagcataggactcttttgagtttatcctacgtggagtttgttgacctttttatatatccatgtcttccctcaaagttggggagttttggccattatttcttcaaataagctctctgcctctttctttccggtataaagattagtgtgggggtgtctccattgttcttttttttcccctcaaacttagagctggaagaaaccttagacatcctgtgggccagaatttcatattaccttccacaaaactaacttccagagaggtcttcaggaagttggcaaattttagttacgtatttttaaaagtgtctttgaacttttaagaactacatctcgttaattatatgtattcgtatatattattatccaaattttaacaaattagagtgcattggtgctttaaagtgctgtcaactactctgagaatgcaaaattcttgttttaaaatgtgtatcttacaactccttccttggatgaattagatttttttagatggagaaaccaaaatcaagtacagccataccttggagacattatggtttggttttgttttaggaacnnnnnnnnnnnnnnnnnnnnnnnnnnnnnnnnnnnnnnnnnnnnnnnnnnnnnnnnnnnnnnnnnnnnnnngtgtgagccgctgcacctggcccagcatggggttcttttccataccaccacaataaagcaaatattgcactaaaagaagtcacatataaaaggttctg

SEQ ID NO: 331948 - DNA, 357 bp, Homo Sapiens
  misc_feature (264)..(264): n is a, c, g, or t
ctttcttccaccatctaaataatctctccctccacagtatggctgtgacccgatccaaagacgctcctcctttcggcccccccatccccagtggaaccacattccgcaaattcgacgtcttcagagacttcttgctggccaaggtgattaacgctgagaacgtctcgcacaagtccgacaagttccacaccatggccaccaggacccgccagagtatctcaaggacctggccgaaaactgtgtctccaacacccccatcgactncaccggcaaattcaacctcatctccctgacctccaagaagaaggaaaagacaaaagcacgggctggcgctgagcagcacagtgcaggggccat

SEQ ID NO: 331949 - DNA, 477 bp, Homo Sapiens
  misc_feature (233)..(246): n is a, c, g, or t
atctctcatcggtttgctgaggaaattttctaagatgaaaatagaaaggcacatgacgccctgtgaaggacgtggcccagccgcctactctctgttgctgtctcccgctacgacctctcacacaggtaggaagcccctgcggacagcggggccagcgaaaggacagctcagacggccaccacacttgagttctgtgctttcctgggcatgggaggagctacaaactttacttnnnnnnnnnnnnnntcacacagtttttcaacaggaagagtgaagtagaagaacagatcatttaattatacaaacaaaatcgctttcctttgctccagcgagtccaggcaacctttcaagttcatttgctgcctgaaagaaaggtttttagtatcagaaagaacctcgctgtcctccaatatccacagggaaaacaagatcagaaacaaaagtccaccatggaagaaatcccagagcgatccaatt

SEQ ID NO: 331950 - DNA, 445 bp, Homo Sapiens
caagggaaaaaggcaaaaactatttaccctcctttgcaggctggggtttttgaaccgaggaaaggctgggacgcctgtttccagatggttgtcattggtccacgctgggcgaaagaagcttggaggggagttgtcccctcagctgagcggctgcggtgaaaatgccccagtgttccttgggttggcttttacggcaaacttaaatgcaggggacgcttggagtccgactcacctacaccggcttcctccccagccgctggtgtgcggcacacacaacatctgcattaggcagaggtgcaagtgggctgattgaacttttccttcaaaacctgcttgtctgtcctggacctttgatgaaatgggatcccggtcacgcaggctgagacagtggggaccgccgaggccagagtgggctatgcttgagcagggtatggtgctagctctc

SEQ ID NO: 331951 - DNA, 399 bp, Homo Sapiens
  misc_feature (223)..(223): n is a, c, g, or t
  misc_feature (343)..(343): n is a, c, g, or t
  misc_feature (351)..(351): n is a, c, g, or t
tttttttaaaaatatttcaaataggttagttaggaacaactttactcagaagacgtatttgagcaaagacatgaaagaggtgaataaagcatgtggatatctagagacagagcattccagacagaaggaacagcaactgtaaatagcaggggcagagtgtgcctgccactggtcagggcagagagtgtgaggaaacaaaggtaaagaagtaaaattttttccngctatcctgtttctaagttcccaaaagctatttcttcttttgaatatttcattttatagggacttattctcatcttttgatggaaatacccttcccctcatgtctcccagggggctgggnatcttttntaaggttttcttcagttcccctggcactgtttctgcttccctctgggg

SEQ ID NO: 331952 - DNA, 452 bp, Homo Sapiens
tctcaatggcttgctggctttcttcttgggtttcttttcattcctggtaagtaattgtgctagaaatgggccacagtcactaggaaattgtctcttagggtcatccatgcatcataggactggatgggagggaaccctggtaggtaggtaggtctgctaaagtgtttgcctgtcgttcagtaattttagatgttactgcttagaaaaagagatagaaaagaataatattgactgctaagatctacacatggggagtagggcttttattctaaaaattttgaattattgaaatccagcacaaatgtgatgcataatttttatcccaaaataaaattgtgttttcatttgtgcatgtcacctgctagttcttgtgatgtggacatttttttaacctatttagagtattatcatgaatattttaaattttcacctaaatttacgtatcagagatt

SEQ ID NO: 331953 - DNA, 596 bp, Homo Sapiens
  misc_feature (333)..(333): n is a, c, g, or t
  misc_feature (437)..(437): n is a, c, g, or t
  misc_feature (502)..(502): n is a, c, g, or t
  misc_feature (507)..(507): n is a, c, g, or t
  misc_feature (521)..(521): n is a, c, g, or t
  misc_feature (529)..(529): n is a, c, g, or t
  misc_feature (534)..(534): n is a, c, g, or t
  misc_feature (541)..(541): n is a, c, g, or t
  misc_feature (549)..(549): n is a, c, g, or t
  misc_feature (554)..(554): n is a, c, g, or t
  misc_feature (570)..(570): n is a, c, g, or t
ccaaattctccacagggaatctgaggtcaccgataaagcaaggttgcatatgaagtttcttctcaacatcggcacagagaggttgctgacgtagagcagagaacacagtgtgaggaaaccatgaaagagctcaagggttaataagccctggaacctaggtgggcggactgaggccatcacagaggcaaggcatccatcacttgcagggttaacaggaccccctcaatgagttgcatgtgtgccagtcttagatttccaccaaatgcaatgttaaactcacaccagtcgactagatgggaaaatacggggaaagctcattttgcaacaacccantttgctccctcccactcctttccccagagggattacatacctgtggggtcttggaatttcccccacagagggccacctttttcttaatgggcttccccaaagtngggtgggccacagagggaaaaggcagtagcttgcccaggaaaccagttgagtttcatcttgggtnaggangagggcaggtcctnggaagttnctttnagggttnaggacagnggagngggggaccaaggcttngggtcagggcacagggtttttgggtt

SEQ ID NO: 331954 - DNA, 504 bp, Homo Sapiens
  misc_feature (48)..(48): n is a, c, g, or t
  misc_feature (50)..(51): n is a, c, g, or t
  misc_feature (69)..(69): n is a, c, g, or t
  misc_feature (71)..(71): n is a, c, g, or t
  misc_feature (75)..(75): n is a, c, g, or t
  misc_feature (77)..(77): n is a, c, g, or t
  misc_feature (343)..(343): n is a, c, g, or t
  misc_feature (347)..(347): n is a, c, g, or t
  misc_feature (411)..(411): n is a, c, g, or t
  misc_feature (422)..(422): n is a, c, g, or t
ttgagttacgcaacatttcttttattgcctcgggttggaagctccagntnnccctcccttagccctacntncccncnccccgcccccgccccgcatgctctgactcctttggggtctgaagttcactgccccgcacctgcgccctcagccccgcccagcgcttctgccgtggttccctggtgccgcctcccgcttgccgaagcgcaggccgaaggagttccagttgtagttcggcaggtccttctcccgctgcaccagcaccgcgccctggggtgcggggatcttggcggctgtggggggcggacaggcccggctgctgggggctcccggagctctcgggggncggnacagcgaggtcccccgacgctcagcctggcagtagcagctggcttcctctcggtgcacggcagntctgctccccngggccaggaggcccagggattctagctgctggcctgtgggtctagaattccccacagaggccaccttttctaatggctcccc

SEQ ID NO: 331955 - DNA, 519 bp, Homo Sapiens
  misc_feature (166)..(166): n is a, c, g, or t
  misc_feature (431)..(431): n is a, c, g, or t
  misc_feature (437)..(437): n is a, c, g, or t
  misc_feature (453)..(453): n is a, c, g, or t
ttaactgtgcatcacagcatcttttcaattgtttcttgtttatttccttcttttagcctaataattaatttacttttcattttacttcatttaaagatgaccaagatgttggtaataatattttttttgttgttgttattttctacaaactgtttttattccaggncttttgctttctgccaaggttacccctgaagagtggcacacggccctttgagacttccatggtgccctctcattttctcttttctcttagtcattaagacattaacctagtttgtctatgacggacagcttaatcctggacattgcggcccatgcaacttgtgtccattctgggcccatgcaacctgttcactggaacctgcgggccatgcttactcgggtgggcctaaactggaggaggacaaccggggttttttaaaatattncttccnttatggaaaaataggnctattcaattttggggccacccaaatattcggaaatgtaaggggggggaaaatggttactttccgg

SEQ ID NO: 331956 - DNA, 548 bp, Homo Sapiens
  misc_feature (418)..(418): n is a, c, g, or t
  misc_feature (430)..(430): n is a, c, g, or t
  misc_feature (486)..(486): n is a, c, g, or t
gagagaattttctcacccattaaagtagctgatgcccctgggtcttaagaggagaggctcagtttcactgcaagagtccagaatcttctgccaaagcaatctcacaatagctcagagtcaaggacagctgcacgatatggaggaggggctcaacgtctgctgaatacctctctgggcttcaactatgtgccaagatgtgtgtcagtcaagtgcttggctaaatcagtgatgaagatgcactccctgctctcgaagagttaataatctgattgagatcaggtttctagccccagcttgtgtcagcttctagccatatgattccaagcatgtcacttaaaagttcctgagccccagggttttgttatttgggaaaccagaggataacatttcttcagtgtgttgggcatcaaatgaggantatctgttaggnataatatactattatctgtaatggtataatatactattattgggggtttctcgggngtattgtggtaaaggaggccggactggggctatccaaggaggcccactggatggacacaccg

SEQ ID NO: 331957 - DNA, 511 bp, Homo Sapiens
  misc_feature (244)..(244): n is a, c, g, or t
  misc_feature (416)..(416): n is a, c, g, or t
  misc_feature (475)..(475): n is a, c, g, or t
tggggtggaagaaaattttactgtgaaaggaatcatttttatcattacaacaaccagcacaggctgtgaataatactgtcaaggcagtattatttttgagaaaatatgtctaagtgaataaactcacttattaaacccagttacactgttcaagtcattctcaaaacgttctggttgttactaaatttcctcaagagagatgatttagtgcaaatgcttcatattccatataaagaggtagganggaaaacaaacttccctgggggtaccacggatgtgcaggaaaggagttaacacagcagggtcataggactactacccttaggaaagtcctgctttacaaagtcacctcttgggctgggcatataggaaacctgggggagtttgggggaggtgtttccccatccactcccctnaacttcaggtgtttcccccaaccttttttggggcactagggggaccagtttcgtggggnaggacatttctttccacgggacgaggggctgggggg

SEQ ID NO: 331958 - DNA, 565 bp, Homo Sapiens
agacatcccaggacccattctgtgtcaaggtgaatgcctgtgtcctccccagcttcatgcctctgtcatgggggaaggaatagcttatgttctgctctggtgcagtgccgtagattaaaggtacatttctatcttctttgatttaaaaagcaccagtctcataaaggtgccactcagttttagccatgtcttcactgaaattgcaaaagtacttttagggagcaggagtttatttgacatctagttatctgtctgtctgttcatctatctatctgtctgctgtatgagaggtaggactggattaaatgaccactgaactcactgaatccagatcattcatatcatcaacaaaagctctagggggaggtcacgttgtgaatgcttaaaacatattattttcttcaacaaccatatcgctaaactaatatatccagagattttgcacaattcgtgttgaaccttccaaaacaaaaataaagacctgtccaaaagttttgacaaaaatactgattgctcccaaataaagtgcttctaagctttgtgtagacatagtttaactgatttg

SEQ ID NO: 331959 - DNA, 546 bp, Homo Sapiens
gagaatataagaaagtatttgctgactgaagccagagaaaaaaatagccctgaatttccttcagggttgggcagactgctgttacgaagtgtaactcccacaacagaaaaacgacagtgactgtggagcctttgtgccccagtactgcaagtgcctcgcccttagagcagccttcccagttttccacaagaagacatgccccgagtgcggaagaggatttaccaaggagctatgtgagtgccggctcatggactgaaactcagcagggactctgggaagtctgaccaagttggagcagatggtttgttacttgaatctccaaacacttagttgaatttttacagatatttcagatcagtggtgttgggccactattgttacctcaaatttattttttgcccttattcatttctccagctaccatgtactattgtttaatgttcagtttggtttcatttttaattttatggttctgtgcgtcccccatatttaatatttattattcaaacgcatgcatatagacagagcatgcagtgaagagtatta

SEQ ID NO: 331960 - DNA, 452 bp, Homo Sapiens
  misc_feature (371)..(371): n is a, c, g, or t
ttagtgaagagtatgttggttcccatgaaatcgttgaatatttgtgttaaaagagatttaaagaaaagtaatctacttcagcttttcatttcataaatgaggaaagtcaggctaagaaagagtacccaagcaaccagtgtcataaaatcacagatctatgacagttcaggcctaggatcctggttttctgatgactcatccaatgatcttttcatttatctttgtccttttcctcaagaagattatattttatcattatagtattaacttgctccattataaccacattccaatttgcttcgatgtatcttaaatcaaaatagcaaaaacaaattgactcttgtgggctccacttgtcttaatgccccacnaaagtcactgaggaaatgctgtgaggggttggggtcccatcccagcccttggggatataggatatttttcaccatggtaac

SEQ ID NO: 331961 - DNA, 505 bp, Homo Sapiens
  misc_feature (355)..(365): n is a, c, g, or t
  misc_feature (425)..(425): n is a, c, g, or t
  misc_feature (448)..(448): n is a, c, g, or t
  misc_feature (465)..(465): n is a, c, g, or t
  misc_feature (473)..(473): n is a, c, g, or t
acttcagcacccactacgatgcattagccagagtggagctagagtacaggttacagaagaggccaaccctctgtccctgcattcatgaactcggctctgaggaatcttctgttatttccaaatttgcagaaagaaaccttgggcaaactgcttcttttccaccttaccattccaacaccagccttaggtattaccgtaattagtcaagaacatgtcttggttagtcaagaacacttcatgtgttaagctgggaatgagggatgctacttaggcaaagggactagtgattcaggaacctcttctacctgtgtggctcctctggggatggcattaggtttacctttccaggatttcnnnnnnnnnnnctaatttttaagttctgggggatacatgtggcaggaacatgcagggttttgtttacaaangggtattacatgtggcccagggnggggttttgcttggcancccattcnacccccttcatctagggggtttttaattcccc

SEQ ID NO: 331962 - DNA, 402 bp, Homo Sapiens
  misc_feature (371)..(371): n is a, c, g, or t
agctgtagaatgttttgtggtgacaggtgcatcaccacgggcttaggtgcagggtacactccaggcctggcagtggagggctgtcctgaccctgttccccggcccagcccagggcacatgacccctcagttcctgtcccaccccgttccctggaagaagcttggtttccagtagggaatcaggtgcagagtgtgcagtatagactcagcgtttgtcgactgactgaatgatagcacaatccagggttgcttcctgttgggctgggtttggttgggactggggaccggtcagagggaaaaggcaacgcccttggacaaaggaacatttgccgaaaggtttcatggggaggctccggcttaacaggtgctctntttgctggggttgcctaaacgagcagcccct

SEQ ID NO: 331963 - DNA, 392 bp, Homo Sapiens
  misc_feature (28)..(28): n is a, c, g, or t
  misc_feature (43)..(43): n is a, c, g, or t
acaatatccatatgtatgtcctagttangatcttttaacacanggtcaaagtgctgtgtacaacagcacccaagttattttactcatttccatccataaacacagcccagtattttcctactagaaaacttcccttaccttggaattaagaaatctcagattagtgttaaatatttcacccatgagagactgataattataataaatgattcacataacattattggtatcctgacacccagtcttgcatgaaatcaactctaaacaataaaagaattaatgaaccatcagtagaggagtctctcaatcatgtctgcattacattgagaatcagccctttttaatacccctgccttaaggtcacgccagaattgtaacttaggaattcggaa

SEQ ID NO: 331964 - DNA, 363 bp, Homo Sapiens
  misc_feature (19)..(19): n is a, c, g, or t
gaacaaaatttgggaaaanggccttgaaagaagtcctttcctccacaaatatccttcagtcctcaaatcacaagtcacttacttaagatagaagttggtttttttcttataaaatgaatctggagctgggaggtacagggataacttagtagtttcaaattgtcaggcaccccaggctgcttctttcttttaccaccatttttagtccttggcttccattctcaaagtcatctcagtgtcacaacatggctgctgtaatacagccattccatctgtgttctaggcagcataagggaggaagaaccaaaactcccaaagaggagcaccttctgggtgagtctttctggaaaccccaccaatcag

SEQ ID NO: 331965 - DNA, 457 bp, Homo Sapiens
  misc_feature (198)..(198): n is a, c, g, or t
  misc_feature (289)..(289): n is a, c, g, or t
  misc_feature (313)..(313): n is a, c, g, or t
  misc_feature (369)..(369): n is a, c, g, or t
  misc_feature (443)..(443): n is a, c, g, or t
ccagtggtatgcagatttttcctactaaaaatcttcttattcaaaataaacccggagatgatcccaacaaaatagttgataaagtccaaggcttgctagttcctatgaaattcccaatccatcacctgggccttgagctgtgataacctcacactctctgcgtgcatgatgtccagtgaatatgggttccattattgnctttttttgatgttcggcacattctcaaatgaggctaaacagcaaaaacgcccatttgcctatgcataaggcttttgaaaggatgcagggnggcatgggtggattggatatggangtgggaacccccactgttccccctccctgggtgggcagttttgtctggggctgganggggtaggtattggctgttccctggcaagttcacggggaaacagttggaaagtatggtggccaacttttttccnttcccacgggtagg

SEQ ID NO: 331966 - DNA, 372 bp, Homo Sapiens
  misc_feature (20)..(20): n is a, c, g, or t
  misc_feature (68)..(68): n is a, c, g, or t
  misc_feature (107)..(137): n is a, c, g, or t
ccccaagcaaacacttaaancccctgccctagcctaaaagaaaaaattcctcaaatccggggtccacnggttgtgtactttaagggtccccaaaaagagaattccannnnnnnnnnnnnnnnnnnnnnnnnnnnnnncaaatagtaagaacactctggatcaccctgggtgataattttataacccaaacactactgcaagacttcctactgaagtatttacagtcaggtcggcaccgagtacctttaactttgtctcaggctaatgagtctttacttggatccagacttagttcttctaaatgattttgttgctctccaatggatggatggatgaaaattcattttactcaactccctgttggtgtttttt

SEQ ID NO: 331967 - DNA, 363 bp, Homo Sapiens
  misc_feature (44)..(79): n is a, c, g, or t
  misc_feature (103)..(172): n is a, c, g, or t
  misc_feature (237)..(237): n is a, c, g, or t
  misc_feature (279)..(279): n is a, c, g, or t
tattataaatttgttcttaaagtgtatttttgataagaaagccnnnnnnnnnnnnnnnnnnnnnnnnnnnnnnnnnnnncttggtcgagacagagtcttgccnnnnnnnnnnnnnnnnnnnnnnnnnnnnnnnnnnnnnnnnnnnnnnnnnnnnnnnnnnnnnnnnnnnnnnagtcctcccacctcaacctccctaagagctgagactacaggtgtgagccaccatggcctgggctnaatttttaggaggacagggttttcaccttctttgcccagggntgggtccccaaactcctggggggttcaaggcagttccttcctggccttcaggccttcccaggagtatttggggattgttagggt

SEQ ID NO: 331968 - DNA, 445 bp, Homo Sapiens
  misc_feature (24)..(24): n is a, c, g, or t
  misc_feature (34)..(34): n is a, c, g, or t
cccccccggtgaaatggggaatcnaaacaggaangactcctttttaaaaacaaaaccccaccttttaagtccccaccttttaactcccattaataccctttgggttacccagctgtcctaatgaaaaaaagctgttgaaagaagtgaaactttgtcctgggactgcatcccattatcagctcacccatacatattaaatgaccctggtcattcagcccagttctgacccatcccagagtcgcccaggtcgtcccatatcccagcatgtgtttattatagaagatacggaagttacatttttgatgtctggcccgatagtttgttatttccctattgataaatggttttctattagaaaagtcttcattaaagacatcttttaatcttccaaggacttctttttcactgagtggaaccaaactgccatacttcttctgtgccgaat

SEQ ID NO: 331969 - DNA, 396 bp, Homo Sapiens
  misc_feature (339)..(339): n is a, c, g, or t
attcggcacagaagagggcaaatcctttctctttctggaggcctaatgtcagtgatacataattgcacatcacagtattttattattttgttgatatgaaatatttcagttgtttagttgtttttaactttcaaataaggatttgcatttcgttgaggaaggaaaaggatgatttccaaggacatgggacttattgccaggatattctaaaccctattttgggttaaattacaggcacccggattttaggtaacaaggcacattgattttatattcaaagcatttttatatttagtctcttaaccttttgtaattcccacccacagcttgcagtgcagnaaccctttttgtgtcccttgttgtcagtggggtgcctgcctggggcccaattaattt

SEQ ID NO: 331970 - DNA, 277 bp, Homo Sapiens
cagaagtctccctggggtgggggtacaaaatcacctcaaattgaggatcattggtctaaaccctttagcacttacataaaccttgacacaaaataggagcaaagcagagatgaaaagtgggatacaaaggaacttactggcatctttgactatgaaccttccttgactctaaagccaattaaatgttttggtggaaaaaaaggaaagttgttttaatcaaccatatgcctttcctcactcccaccacacttttgccttaaagtttgtttttgttgct

SEQ ID NO: 331971 - DNA, 477 bp, Homo Sapiens
  misc_feature (16)..(16): n is a, c, g, or t
  misc_feature (27)..(27): n is a, c, g, or t
  misc_feature (36)..(36): n is a, c, g, or t
  misc_feature (43)..(43): n is a, c, g, or t
  misc_feature (48)..(48): n is a, c, g, or t
  misc_feature (98)..(98): n is a, c, g, or t
  misc_feature (106)..(106): n is a, c, g, or t
ctaaatttttttatgnaaactccaganttaaaatantaacaanagggnaggggggttcccgtcccttcctcctagaataacccccccttggcctgaantcctccantccttgccatgtgcctaaaatgaaggcctcccaggtatttttaaaaatccattttccgtacatggccctcctgaactcaaacccctgcctacttcaaatggtgatcaactgaaggaagtgatccactctaaccctgcaggaaaaactgcatggctgagctcactgggtagtatgtcgctactgcaaaagcagcctctttaagggactggaaagggatccctgaacactcatgatttcttcccttatgtgcttctcttttacataaaagcaacacacctcgttgggcacacaaatccaggtgacacccttctaatggctgaggtggtctggtgaactggaaaggcctcaggactgggagtcagagatgcgct

SEQ ID NO: 331972 - DNA, 491 bp, Homo Sapiens
  misc_feature (359)..(359): n is a, c, g, or t
  misc_feature (463)..(463): n is a, c, g, or t
  misc_feature (469)..(469): n is a, c, g, or t
aaatgcaccattttgttagccaaagtgcagattttcgtagagaaaacaggaaaattattgatatgggtacactcacaacgtctaaatacaaactaaacagataacccataaggcagaaaatctaacccctccccgactccatttctgcctttgtccctttccatctgcatggctgtcccccaccctggcaagtgcctctgcctctcccaagagcatttttgggggtccagccaggtagcaccaccttccttatcccttagtccttcctgctgctcagagaggaattttctggagctgggtctaatcagtgcacagaggtgggatggagatgagtttttttaaaatataatttatcacgnatttgcacccattgttcttccaaccagattgcaaaccactagggatacaggggcatgtctaggtttctcttgcctgccctccccttcccagcttccaaattagncatggnagaggatctttactacactggg

SEQ ID NO: 331973 - DNA, 482 bp, Homo Sapiens
  misc_feature (283)..(283): n is a, c, g, or t
  misc_feature (378)..(378): n is a, c, g, or t
  misc_feature (405)..(405): n is a, c, g, or t
agagacaaaatttaatatatgcacacagttttatatataatgcagcatcacaccatgtagggcatttactcttattttatacattcagatatgtttgaaacacttcttaaggctacaaaacagaacatagaaaaataaacaggaatatattcaacacttacaaaaagtgatatgataaagaatataaagtactagtttccttttaacacttcaaaggatatgtatatatacttttttttacaagtaacatcacaaatgatcacatcttcacatgctcttaaangtattatttgtactcagtgtaaggctattatcgtttttcatacataaaattttctagctctgtaacacaatgcaatttttaatccattcaaggtnggttcaccccaaagttgccgcttcccngcattagggcatgcacccacccctcttctagggttttctaaacttggattcgggggggaaggccccttttaaaaata

SEQ ID NO: 331974 - DNA, 496 bp, Homo Sapiens
  misc_feature (108)..(108): n is a, c, g, or t
ttcaagacaggaaagtgcttatcacaaagaacccccgatctcgactggggaagggttggcagttgactctctggccagcactatgtgtagcacgcatcactagaggtntgaaggccccacagaggctctggtgtgtggctttgttttgaccaaggcgtgcaggcagtggtcctacggcagggctggcccgcgcctcgcctcagtgccctcagcgccttctgtcttctggctggattcagagtcccgggggaaagagactgaccttctcgacttgccctcaggttgattacgaagcctcagagcccttgttcaaggcagtcctgggaggacaacgacccttgggaggaggccgtgggggctttctcagggaggggtgggacggcttctgctgcctgtctggcaaggagggcagctggggtcaggggcctctgctgggtctctgcagggctcagcaagcagctcatagccctcatccagggacatgatttcagcagtg

SEQ ID NO: 331975 - DNA, 413 bp, Homo Sapiens
  misc_feature (392)..(392): n is a, c, g, or t
tgaaattggtgtgtaaatagcataaggggacatgcgctcttctgagcttgagcagctggtcacattcttatctgccacttgtgttcccacttcatctggcccagtagttcacaaagggccactggagtgatcagtgaaggggggttcctgggcggctggcctgatggggaggctcctcctgcagatgccacgttaataagtgctgcgtcctgctacggcactggggatccaggaggtgagtccgaaaccacattggccatgccctgctggatatagtgcacacagggcatccagggcaagacagccagggaggagaaggccctggctcggcctctccagcccctccatgagctcacctgcttactcatccaaccccatggaaagcgatgcanttgcactgccaggattgataa

SEQ ID NO: 331976 - DNA, 492 bp, Homo Sapiens
  misc_feature (58)..(58): n is a, c, g, or t
aaggagttttaaatgacctccaggagtagcctgagcccctggtttccatttttccccngataaacgaagcaccttaacaagtccctcccccggacgcctggagatgtgaccttagggccacatatcctgggcctcctgaatcattcctgaactcctgtgtgccccactgaatcagtgtctgtgcccaaccccatgaataagcagtggcagaaattccctggagggtcttctatccaaattctgatgggtccccatttttctttttagactgaggagataagaacatagggtgggatggccactgataaggcagaagtctgaagtaaggatgtaacacccaaaatgtgaaacagtattcggagtaaaaatatacattattactcaaggaggttcatatccttatcaatgcagcatcccacatgcttccagaaatcgctaatcatgtttcgtcaatgaaaatatcatgtatcagagttgaaaattcaaagattt

SEQ ID NO: 331977 - DNA, 480 bp, Homo Sapiens
  misc_feature (426)..(426): n is a, c, g, or t
  misc_feature (461)..(461): n is a, c, g, or t
gggaaaatcattttttatttgcacatgaaataatgtactgcttttcagaatgaaaacacttacaaatcatttttattatgaataatttaggatatttgggacattcatttctgagtaaaatagttcaaaataggattttgttgatacctgttgatacatatttagaaacaaaaatgagatatccttttgaaagtttgcctttgtagtaaattcagtcattcaaattgttttctctcaagacccaaaaatgccagggcattgccggctttgagtttattctttgtttcttcatcaaattcttccatgggactctattagtttcccagggttccagctcacctagtgggaaagggggtaatcgggttcccaaaatgactttatcctttcctatgacatctggttaacagcttgaggggacagagggancatggaacccaaaggcatctgtggttaaagggganccaaggggattttcttcgg

SEQ ID NO: 331978 - DNA, 425 bp, Homo Sapiens
  misc_feature (257)..(257): n is a, c, g, or t
  misc_feature (304)..(304): n is a, c, g, or t
  misc_feature (324)..(324): n is a, c, g, or t
  misc_feature (330)..(330): n is a, c, g, or t
  misc_feature (365)..(365): n is a, c, g, or t
cagagctcaggtgatcctctcctcagctacctgagtagctgggactacaggtgcacatggaatttcagtgttggtatatatttttctagtcagtgtatcgctgactctcccatcaacattgttggagaatgccctttaccaacgctggttattctgttgtaactgacttttatatgaagtttgaggaatacagcctcttcagttgaggatccatgtgtttgctgaatctcaacgtttttcccatgccagtctcctgnatggttaatgctaatctaaaaggatcaagttggctgaggccagggtnttgggtggttcacacctgtnaatctncaggcactttggggaatccgagggcaggtgggatncacctggaggttcagggagttttgagttcccagcctgggcccaacatgggtggaaacccc

SEQ ID NO: 331979 - DNA, 468 bp, Homo Sapiens
  misc_feature (376)..(376): n is a, c, g, or t
  misc_feature (383)..(383): n is a, c, g, or t
  misc_feature (399)..(399): n is a, c, g, or t
  misc_feature (450)..(450): n is a, c, g, or t
atcatgtgtgaaccaatccagcacccatcccacatggacatccccctggatagcaagaccttcctgagccgtcacagcatggacatgaagttcacctactgtgatgacagaatcacagaactgattggttaccaccctgaggagctgcttggccgctcagcctatgaattctaccatgcgctagactccgagaacatgaccaagagtcaccagaacttgtgcaccaagggtcaggtagtaagtggccagtaccggatgctcgcaaagcatgggggctacgtgtggctgggagacccaggggacggttcatctacaaccctcgcaacctgtcagccccagttgcatccatgtgtgttcaattacgttcctggagttnaggtttnaggaaggattgacgtnggtgttttttccttgggaccaggatttgattccctgtttcaaggccccacntgatgggccttggaacag

SEQ ID NO: 331980 - DNA, 388 bp, Homo Sapiens
  misc_feature (20)..(20): n is a, c, g, or t
  misc_feature (38)..(38): n is a, c, g, or t
  misc_feature (47)..(47): n is a, c, g, or t
  misc_feature (133)..(133): n is a, c, g, or t
  misc_feature (284)..(284): n is a, c, g, or t
acgaactggccgctaaagtnaagccgaaggccctgggntccgctccnacaacccagcccagggtcagctttccctgggctgctccgtccccgcgaaggccatcgccccattcatattcggcagggcatttccnacgcgtcccgtctcagcaagccccaagagcaccctttttcgggcaacactgtgccccacttcactggagagggaactgaggtccacgtcattgggagaggaacacgtgacatattgagctctttcctcagcaagtgacctaacccgccttncctcggccgtaagcggagggccagaccggaagtccgctactctgctgttctgaggcccgccagtctccaaatcccggtcttagatcgaggtctggccgtttccc

SEQ ID NO: 331981 - DNA, 413 bp, Homo Sapiens
  misc_feature (89)..(89): n is a, c, g, or t
  misc_feature (96)..(96): n is a, c, g, or t
ataaccccaaatggccttaacttggaacatcctccccaccttaagaagggcaagaggcatttaaaactccaaagacgtccttaaattcnaacctcnatgatcttcccctcctggaaatcctaatctccctactcttcccctatcttaatgaaagacaacaccatccgtccctttacattaagtgcttcagcttatccctacatctatctcatcactaagaacagttattttcaccttttgagtatcattcaaatgcatctacttctttccattcttactgctaccaccctagtgtaagttattactttttcctacttactggactcttctgattccctccaatcaattctccacattgcagtgttaatttttcaaaacacaaatctgatcatatcatgtctgacatggtttgg

SEQ ID NO: 331982 - DNA, 422 bp, Homo Sapiens
  misc_feature (22)..(22): n is a, c, g, or t
  misc_feature (40)..(40): n is a, c, g, or t
tattggttttaaaaatctcccnaaaactaaggaaaagcgntaatcaccagtgtggtgttttaatctttttaaccaaaaaactatcaacaccaagatctttcttccttcagcttatattctaatgacagacactggaataagccccacattgttaattcccacaatcagtacataaaatgctcccctaatattcagcattctgtcttaaaagctctcaaaaatatggttgcatctcaaatgctgctggcactctactgagtttatgtacagccattacacctgaaaaaacatttctactcaaatggtcatgaatttattttagattatcaaacagcctccccattcccaccatttccctctgaaatcccaaagaaatgcagcaaagttaatgactacatggtaggataatcattcaaactttt

SEQ ID NO: 331983 - DNA, 402 bp, Homo Sapiens
aatattttctcctaattttatttaaagccatcattatatattaaaagagcagaggtaattctgtcttctccggttgtgcagcacgatctgctccagctcgtcatgccagggcccggaaaacctccaccttctcccggtacagctggtggaactgcttggcaaggcagtggaaaggggcttcgaagttttccatctctttctggaaagacagtttaaaaagttggctgtgttcttttagaagggtcagagggccagctctcactcaatgcttccctcattcgggggctacctactttccacctcatttcatcttcacggccttcgaggtaggccactttcagtggatgccagttttacaagaaggaaactcagatggagtcaggtaactcagagatgaaggta

SEQ ID NO: 331984 - DNA, 339 bp, Homo Sapiens
  misc_feature (202)..(202): n is a, c, g, or t
  misc_feature (251)..(251): n is a, c, g, or t
  misc_feature (262)..(262): n is a, c, g, or t
  misc_feature (270)..(270): n is a, c, g, or t
  misc_feature (277)..(277): n is a, c, g, or t
actgcaactagttacttacaatgtttacctgacgaagtccctatccaatttaaacacttcaaaggctatggataattttttttaaaatccccactacaacctcaggaaaaaaactgacaaaagaaatactcaggagtttcacaattaaggaagcctcaaaacatgtgaaaagatatgcaacctcatagggtgatcaggaaantggcaaactaaaactggcaaccaaataccatttcataacctacccaaantggacaggaanttccaaanttcaggntaacatggtatttcatactaatggtaggggccatggacacctttcggtccactcctgggggg

SEQ ID NO: 331985 - DNA, 708 bp, Homo Sapiens
aggtttaacagctgagaaaatccatcagggagcttggaaatagggtttacactggcctccccaattgtcaaaactttaccattttttatattttctggaaactcctgtattccattcttgctgacatccagttccctgagattaataaggtttgcaatggatgctggtaacgttgttaaatcattgtctggcaaactcagtttgtgtaaagactgacagttaaaaagttgctttggaagctcttcaatctgattagcatctaaatagagttcctccaaggttttttcaaaagtaaaaatctctttcggaacttgttctaagctgcaatgagaataatcaagagtagtgacagtctcctcttcccctcgtagacagcgacatggtaccaaccgcacaaacaaacttcgttttgtagtcatttttagacacactgggttgaatttatctccctgatgtttcttaattgagccaacattctttcggcgggacaccgtctcagggcagctttttcaagcttcgcttgacatgatttccttcccttcatcagtcactttggatccagctgaatatctctctcgggtgagagcggatgtggactggcctcccacagaagaagagtaggtggctttggtgggggttggggtgcgggctggcttcctggtctcgagttttgcaggagtttcccagccccaacgaggatctccgccg

SEQ ID NO: 331986 - DNA, 502 bp, Homo Sapiens
aaaaaagcttagtagatttggtgcagcttttgaaacttagttagacgtgaactgaatacaggtttcaaatttactcacagaacctaaaaatgcaagatgtttttgatacaacataactctgagaatagtaagtgttcccctggggcattaagggtaagcctgggggtggtttttgaccaaatcccagtccctgttttacctttacccagcggcaactttcacccaacttcccctctcccaagtgagtcttagagagtgcagtcccattccttttgaagggtgagatggaagtggtcgtaaactgactggtgtcttctgtttctggaggcacacttgtaagcacagtggctgctttgggaggagtaaggtgtgagaaaaagcaaccttggaggccagtaacaatgacagatttcaatcgtggttttaggaattataatacgtggcatacatctcataaaggcttttgctgggatattgaattccctgaatttttctgttttcg

SEQ ID NO: 331987 - DNA, 268 bp, Homo Sapiens
  misc_feature (30)..(30): n is a, c, g, or t
  misc_feature (47)..(47): n is a, c, g, or t
  misc_feature (89)..(89): n is a, c, g, or t
caattgtcttttgtttaaaacagttgtttnagaggtggggtggggangtatataacgaggaaaagttatatgtactttaaagtatgtcnagttcttactagtttcctgtactgaaggttcaatttctcttatataagtttacttttcacctgctctattctttgtggggaaaaaatgcatctagaaaaacatagtttaaatactgtatataagataatgaaagttagtaacgtccattatttaataaagtttgtaaagtacaaggtaa

SEQ ID NO: 331988 - DNA, 489 bp, Homo Sapiens
  misc_feature (21)..(21): n is a, c, g, or t
  misc_feature (28)..(28): n is a, c, g, or t
  misc_feature (39)..(39): n is a, c, g, or t
  misc_feature (50)..(50): n is a, c, g, or t
  misc_feature (57)..(57): n is a, c, g, or t
  misc_feature (82)..(82): n is a, c, g, or t
  misc_feature (102)..(102): n is a, c, g, or t
  misc_feature (109)..(109): n is a, c, g, or t
  misc_feature (363)..(363): n is a, c, g, or t
agatgaagtttatttagtccnaccagtnccatccgattngatcccaattnccgggtntttccatatataaaatcctgggcangggttgttttccatttattngaaggancagggctaaaggaagttgaggttaagtgatttggaagttccaaaaactagtaagagctcaaactagcaataaaattattagtatgtttttcccttgccttcactgtaatgcttaatggttgtgtagtcttatacgtgactcctgacttcaaggatcctggtctgtacctctttaggtcaacacgttttgagtgaactggtgttggttatttggaattagatataaagtcatatattctttggtgaggaatggcnttcatataggagttcacatttcaaaacaagcttttgacaaaattaataggagtgaaaattggtagatcagagttgagctgattggaggaccaaattaaaagactggctgggcatgatggctcacac

SEQ ID NO: 331989 - DNA, 470 bp, Homo Sapiens
  misc_feature (13)..(13): n is a, c, g, or t
aaggtcaccctcnatcagacaccagaggacacacacaggggagaagccttatctgtgccccaagtgtgggcgtgcatttggctttaagtcgctcctcacccgacaccagaggacacactcagaggaggagctttacgtagacagggtgtgtggacaaggacttggccagaagtcacaccttatctctgaccaaaggacacactcaggagagaagccctgcatttgcgatgaatgtgggcgcggctttggctttaagtctgccctcatccgacatcagcggtcccattctggggagaagccgtatgtctgcagggagtgtgggcgtggctttagccagaagtctcacttgcatagacacaggatggaccaagtctggtcatcagctcctaccccaagaggtcttctgacctttcctttccccgtgagtgtgaagctggcagaaatcactagtaaatgcttcagtttcctga

SEQ ID NO: 331990 - DNA, 580 bp, Homo Sapiens
gttatgaaaaacaattaggaaaggataggtaaatgtaaaataggtgaagggtggggcttaatcacaagaaagcaagccaaacgagaaaatagcttctcaatctcgtccgtgtattttacttgtagcttggatttcgggctttcaactgtctttgccttgtcttctagtaattaagtatgtaccttggaggtagggtttcaccatggacccaccttcatctgcctaggcatttggctgcctcctgccactgtcactgggaattttagcccagagtgccctctttgagtcattccctcaggctcaatgcccttactccaaagctgcaggcttgcagctctgtgagaaagggaggtggagttcacactgcagaagcctcatcagttgagagacataaataagcaagtggatgttccttgttcttgaataggaagactcagtgctgcaaagatgccagctctccctaatgaatgtagcagctcaaagctatctcaatcaaaatctcatcacagtttgctttgtttcattgttttgccacttgatctaattattttaaagttcctctggaagagtatattttcat

SEQ ID NO: 331991 - DNA, 202 bp, Homo Sapiens
aaggctgtggtgtgatcactgctcactgcagcctcgacctccttaggctcaggcgatcctcccatgtcagcctcccaagtagcaagcatggaccaccacacctggctaatgaaaagagccaggttctaagtgctaaagaaccctaactttgagaagttatgcagagggataggagtctgtctgtccctaccactccctcccc

SEQ ID NO: 331992 - DNA, 431 bp, Homo Sapiens
  misc_feature (185)..(185): n is a, c, g, or t
  misc_feature (393)..(393): n is a, c, g, or t
  misc_feature (418)..(418): n is a, c, g, or t
tttaaatacagcaacataggtttattggacagagaaacctgtggaaggggaacaccagcgagtgctgagcccccgtcctgcgtacagactggggcaattataggtctggacaggggaggtggggcagtgtggctagctgcctggcaggatgtaataagggagccatttcctgcagtcaggcagtntggcctgggatctgcttggcaaaatgcttttcatggcctgagcccctatggaagtttcctccctgatcagggtgtacaaaatggcaggggtttacttgatggcgccacttgggctaacagaggagagttccctgacttcctcacaggacttttgacggggttttgctcatttgcaaggcttcttcacgtttcaaatcccctttgggangggggaacatgcagacaggcaggtncaggagccagggc

SEQ ID NO: 331993 - DNA, 495 bp, Homo Sapiens
  misc_feature (19)..(19): n is a, c, g, or t
  misc_feature (33)..(33): n is a, c, g, or t
  misc_feature (48)..(48): n is a, c, g, or t
  misc_feature (61)..(61): n is a, c, g, or t
  misc_feature (68)..(68): n is a, c, g, or t
  misc_feature (102)..(102): n is a, c, g, or t
  misc_feature (112)..(112): n is a, c, g, or t
  misc_feature (145)..(145): n is a, c, g, or t
  misc_feature (156)..(156): n is a, c, g, or t
  misc_feature (200)..(200): n is a, c, g, or t
  misc_feature (206)..(206): n is a, c, g, or t
aagcctccccgaagtagcnggggattaacaggnggcaggccaaccaanaccccagccaaanttttaanaatttttaagtaaaagaacaggctttccacccangttcaaagtncaggcctggtccttgaaactccctgaccctcanggacccacccnaccttggccctcccaaaagggctgggattaacaggcatccagcnaccccnacccggccggcaaaagtcttccttaaatgtacagctgcctttggacaagatccccatcatcttatacttttgtacttgcaagagtgagctgtctctaccacttttagtttttcatgttgaaggaagtagcattttggaagcatatacgtatatgccataagaggaactagagtgcagtatgttctcttccaaaatgctatgctagctggcttaattgccagaataatctctaaatactattgtcttcatgttctagttctcttgagaatcaacagtagctctctacttt

SEQ ID NO: 331994 - DNA, 419 bp, Homo Sapiens
  misc_feature (64)..(64): n is a, c, g, or t
  misc_feature (306)..(306): n is a, c, g, or t
gggaggctgaggcaggagaatcgcttgaaccccaggaggcagaagttgcagtgagctgagaccngcccctcacccctgggcaatagagcgagacttcacagaccctcggagtacagtcagaaattattacatttttgaatttccattttgatctaaaaataaattgatatatacctattggagatcatctgggtggcttataaaaatgaatcagtaccaatccttttatctgtctctgcttatgatggcaatgtatctgtaccaggtgatctctgggaagtgataacttttcatgtattgtttctncaaactgcaatgcaaggacatagcactgggatataggagttcttaaattaaagaccttggccacactatgttatgcttgtctttcagttcatcttgagtaaatgaatgagagt

SEQ ID NO: 331995 - DNA, 634 bp, Homo Sapiens
  misc_feature (518)..(518): n is a, c, g, or t
gaatgatttacacttaacaagccttgaatttgtaaaaagaaaagccatatttaactggtgcaaactgctccatgaacttaggattcaaatgtcacaattagtatttttaaaaattaatcactcaaatatccacttgccttattagcagaaagtacaccatctttctcttggaatttctgcttttctctgaattcttcccagaacttttagtgacttacactgactgggttaaatcagtggcctccatatcccaagatgggtgtgggtcgtgtatcccatgcatctgtatatatgtatgtgagggagacacactaggagtctgttcagtccaccactgccaccgtacttccctgccccatggtagaatgttgaaaaccagtcttaaactgttcaacaggagctataggttcactgttgactcagatgtttgtgcaggccaccacagtgcatcagggagggatcttccggtgctaagctcggtcctttatggttgagcacccaagattacaactattagnacccagctcttagagttcacatcatggaaacttctcaactattgttctaagtgcactgtaaacactgagtcaggactagttctaacatctaccacctcatacccttagaaccatag

SEQ ID NO: 331996 - DNA, 400 bp, Homo Sapiens
  misc_feature (347)..(347): n is a, c, g, or t
aaaagttttattaaaacaaaactgtacaaaaaagcagtatactacattttaattacagaacagtctactgtccaaaaggcactaatccagaataggagatacaatgatacaggactcatttgaactattttattcaaaacaatagagcgcttgtttctttgaccatttacatctagaaacaagggctttttgctacagccattacacattgttataaatatgagtcctacgggtgaaggtgcagtatcactctccctagaggaggttcccattagtgggaccactgtggagctcagaggcggatggcgcagtgggtggggcctgggacctgccacatggttggcccngtcagcccctggacacccggagcttgtctttcagcctggcctctggtggttgg

SEQ ID NO: 331997 - DNA, 402 bp, Homo Sapiens
atggaagtgcctgggtaagacccctctgtcccccaccagtgcccttgaggttatgggtgttggtaggtctgtggcctccatctccatgacgatggtgttaaggactgcatgtttgtgtccccccccaaagtttatatgttgaaaccctgaacccccaggagggtggtattaggaggtggggcctttgggaggtgactaggcttaggtgagatcgtgagggtggggctcgccgatgagatcgagtccttataagaaaaggaaggaactagagcgagatcactttgtgctgtgtgagcatacaagaaaactgccatcttcaagctgggtgcatgtgcacgcctgtaatcccagcactggaatgccaaggcattaggattgcatgagtccaggagttcgagacca

SEQ ID NO: 331998 - DNA, 358 bp, Homo Sapiens
aatgggcaaattacaatagttgtatatatttacagggtacattgtacatgttatgatacatgtatacactgaggaatgattaaatccagtgaattaacatatccagcacttcacatacttattgatccacactttattcaatgctgtgcccaacacagtctcagagacaaagagcagtctgaaatttccagatgctttggtaggtcagaagcgcatgccatccaccctcttacactccgctcaactccctttccctgtagagggagggaggcaagcttttgggctcaggcttctcctacacttttttttccacccccacccccacaaggcctcaaagcaaaagcttcccatttccttt

SEQ ID NO: 331999 - DNA, 374 bp, Homo Sapiens
  misc_feature (161)..(305): n is a, c, g, or t
tatcctttaaagaatgaatctgaaaagctacacttacacattataacagaaaatacatgtctagattggaaaaaaagtaactttaaatgaaactagagattcttccccattattagctcctaactgaatttgaatgttttaaatataagtagtaagatcannnnnnnnnnnnnnnnnnnnnnnnnnnnnnnnnnnnnnnnnnnnnnnnnnnnnnnnnnnnnnnnnnnnnnnnnnnnnnnnnnnnnnnnnnnnnnnnnnnnnnnnnnnnnnnnnnnnnnnnnnnnnnnnnnnnnnnnnnnnnnnnnaacgggcacggtgacgcacgcctgtagtccaagctacttcggaggctgaatcagtaggatcacttgaac

SEQ ID NO: 332000 - DNA, 508 bp, Homo Sapiens
tgtaacaggtttttagacaaatattcaggaaaaaacaggaggtataaattccagggtcaaatggaaatgcagagttacacgggtttttattttgttctgttgattgattttttaaaaaatgaggtatttctgagagcctctagtatgctagcactgattgtgatctgtaaaagcatcttataatatgcagtgctcccaaactagtaaactcttctgctgttttctcccctaaagagtcttgagttctgcagaacacgctgggtgttacttcttgggatagctgggtactgtagtgtgccctgctgggggacagggttctcccttaccctaagggaattctcactggggctggggacttcccacaatctgttatggacacttgggcacctgaccaatggggggttgccagagggttctcagggccagggctgggttagcctacctccctcacccttacaaggcaactctgctctctgtgggcactcatcaggattgctttgcacagtgg

SEQ ID NO: 332001 - DNA, 376 bp, Homo Sapiens
  misc_feature (19)..(19): n is a, c, g, or t
  misc_feature (30)..(30): n is a, c, g, or t
  misc_feature (37)..(37): n is a, c, g, or t
  misc_feature (75)..(75): n is a, c, g, or t
  misc_feature (82)..(82): n is a, c, g, or t
  misc_feature (257)..(257): n is a, c, g, or t
ggcagctaaggcctccttncccggcaaaanagaaatnaaaaaaacagccctcccattaacccggtaataaaggancctttanaatagggtcacctactattactaaaattaaataactttttcccctgcttatcaaaaaatcagccttttttaaagggtctgcctttcccaaaccctattgttatctttgtctctccagtaaacctgctcttaatgctccacacccccgtagatagcctattagaggagccatttgnccaaggacacattttcgacctatgggatcttcccagacctgtgatttgtatatgcacacagttctgattactgacccttccagtgttctaatgagcaaacatttgtgctcaaatttcct

SEQ ID NO: 332002 - DNA, 500 bp, Homo Sapiens
  misc_feature (348)..(348): n is a, c, g, or t
  misc_feature (385)..(385): n is a, c, g, or t
  misc_feature (420)..(420): n is a, c, g, or t
  misc_feature (436)..(436): n is a, c, g, or t
  misc_feature (444)..(444): n is a, c, g, or t
  misc_feature (456)..(456): n is a, c, g, or t
  misc_feature (465)..(465): n is a, c, g, or t
gctctttctctccctttaatttgctctattctctatatgggcctcattccttctgcaaataaggaaaatgaccacctggaaacccaaggcccaccacataccagcagagcacccagccaaaagaaacccagcttctctctccagcatctacacatcaatccaggccagaactccatctgacccttgtgagacatgcttgcacacctcggtgggccactgaggcatgagaattcagcataatgacgggcacttctgggggtcatggggccttccctgtagctaagggtgacagaagggacagactgggtctgggaatgtccatgccagctggggttcacatgggccagnccatttgatgctgggttgtttctgggggagctcagtntgttgctctagactcagaaaacctccatgtgaccntttccacatgaccctnaatttttnacagcatgggtnggttggggncccaacgggggcgacttttcatgaggcaaagtttt

SEQ ID NO: 332003 - DNA, 422 bp, Homo Sapiens
ggaacgaaatcttggctggggccgcgtgtcactctgggttcacatggcctggctctcaggacggcatgaacagaaactcccacgtggcagatgaatccaccccggaccactgcatttaagttgaagctcatcacttccgcttcccagagctttccccactgagctttctgaggagccacctgtgctccagcccaccccgcctgccagccttgctgccccgacacgcgtagctcccacagcagtggctccgcgtgggtgtggggaggactgggctgcccagacccccgggggccacctgccttccagggggctcagaggtcctaggttggctgtgaggccaaggggtggctcgcgtgaagggagggcgcttccaggatgtgtagaagacggagagaggccgagttggggctgctggctgaagg

SEQ ID NO: 332004 - DNA, 393 bp, Homo Sapiens
  misc_feature (372)..(372): n is a, c, g, or t
ggaaaggaaattaatcttttctggatacttctgtgtaccaagtactatgttcagtcctctatttactctctataattgatcttctatgaacagctatcattccattttacagatttttaaggtgtcatatactttaaataacttcttcatagctaggaggtggcgagggaaaatgcaaacaaaagtttgcctaggaaccaaacccagccagcctttctactttgctgttttccatgggcgtatgttcagttaatgtctgctgatcaccatctccggggcagaatctgacagctagtaataattgggaaacattatggcaggacaacgttttgatttatctgtgggtgttgggggattggatggctctccttnggttgttagggaaaattttta

SEQ ID NO: 332005 - DNA, 326 bp, Homo Sapiens
  misc_feature (16)..(16): n is a, c, g, or t
  misc_feature (24)..(24): n is a, c, g, or t
  misc_feature (41)..(41): n is a, c, g, or t
  misc_feature (49)..(49): n is a, c, g, or t
  misc_feature (54)..(54): n is a, c, g, or t
  misc_feature (65)..(65): n is a, c, g, or t
  misc_feature (77)..(77): n is a, c, g, or t
  misc_feature (227)..(271): n is a, c, g, or t
ccctaagtccacaggnacccattnaggaattcctaatatantttaaaanacaanacataaaaaanactctgttccanttaacgccttgttttgaaaaaccccaatttgttcctaaacatggcctgtgaataattagagaatgaattacagccataatgtgaaatttccctgttacttacacaccaattttgtccttaagaaatgctagaagctgggaacgggggctnnnnnnnnnnnnnnnnnnnnnnnnnnnnnnnnnnnnnnnnnnnnncctgaggcccaggagtttaagaccagcctgggcaggccgagtacggtgctcatgc

SEQ ID NO: 332006 - DNA, 374 bp, Homo Sapiens
  misc_feature (60)..(60): n is a, c, g, or t
  misc_feature (76)..(76): n is a, c, g, or t
  misc_feature (100)..(100): n is a, c, g, or t
  misc_feature (180)..(180): n is a, c, g, or t
actcctccctcccttcccccgggttttgaagggcccgccccatggtgaatgaagatgaancatggacctggaaagnacacaggatgtgtcccatttgganaacacagaaaagctttccaggaacttggggtttcccaaaggttgggcatgcaggccaaaagggcagaaaacctctgtatnctccacgggcctatattctcttttaagctggggctacacacgtgtcccagcttaacgactccgttgtctgtgcagggtgccccaggagctccttttgctcccagccaattgttcaagccacctctgaggagggctgcaggtctctgtgagccacagacctgaaggtgagagtagtgacagaggcagagattgcc

SEQ ID NO: 332007 - DNA, 429 bp, Homo Sapiens
  misc_feature (134)..(134): n is a, c, g, or t
  misc_feature (320)..(320): n is a, c, g, or t
  misc_feature (384)..(384): n is a, c, g, or t
  misc_feature (395)..(395): n is a, c, g, or t
  misc_feature (411)..(411): n is a, c, g, or t
tgagaagctgacagtttttcactgtatttctcttttgttctttgcaccttttccccttgaggcagtcacagtttctcactgattcacagctacttcggcttattaaggtcatttaacccttcaattgtcaactnggccacaagtgcgttttcccaggtcacccactcgcctttcagactggtttatgggcgaggctggttgctggtctgcttttccacgctcaagggtcactttgttatggagccaactccagctctccttgcctttgtgggtttctgtcttcttgaacagaacgagccaaggtttgagggtcttgcggnatctgtttgggctgattcctactttactggggtttgaaaggcgagtaaacaaatgttaaaaggnttccacttttnctgccccaggcaaggncaagggtgtttcatggcc

SEQ ID NO: 332008 - DNA, 388 bp, Homo Sapiens
ggcacgagaaaaaagatatatacttaggtgtgtagtagctggttcacaggcatgcatagcctcaacttatataagttatgccaacttgtgttctgaagtgggcatggcagcttatgctcccagcaggagtctatgagaattcttgttgtacatcctcaccaacatttgggattgtgagacctcatgttttatccatctatttcagctgggaagtgaaatctcaggaggggtttttaagttgcttactagtgaggcatgagcatctttttcatatgttgcttgggcccttcctgtttccccatctgtgatttgaccattcaaggtgtttgcctacttttcaatggggtctattctttttgtttattgatttgtaggaaatcccatatta

SEQ ID NO: 332009 - DNA, 404 bp, Homo Sapiens
ttttgtggagcctccaatttattttacgtaatattttcttgtttagatatgctctaaccttatttatccccaaaggacgtgcatttgggtcattttcaatcttctgctatggtaagtaacacttcagcaaataaatctttgctcatcactgtctctcttatataaactcctgggcatggaatttcaggtcaaagaatgtgcttgctctgaaatgtaatggattttgccaaattgctattcacacgaagatatacccacttacactgccccaaagcctacatttttctcactttagtttgggtcacattgtcctggggttggatactttctgtctcctgtatctcatagttgggagatatcctaaccatgggcctcctggggacactgtggcagtttcctttcgg

SEQ ID NO: 332010 - DNA, 503 bp, Homo Sapiens
  misc_feature (33)..(33): n is a, c, g, or t
  misc_feature (41)..(41): n is a, c, g, or t
  misc_feature (44)..(44): n is a, c, g, or t
  misc_feature (52)..(52): n is a, c, g, or t
  misc_feature (68)..(68): n is a, c, g, or t
  misc_feature (403)..(403): n is a, c, g, or t
  misc_feature (457)..(457): n is a, c, g, or t
  misc_feature (478)..(478): n is a, c, g, or t
ttgatttagcagttttcttgggcctttctcttntgttccanccnccttttgnctgttcttgttagttnaccctgcccatcttctgctggctgttcctctgcagcacagatggactgctccttttcaaatacttcagccattgtttgccttgtcaacttaaccaacactgtaactaaggatcctactgtgatgttgttgctatcttcatcatctaacacctgtgattttatatccatggtcacatatggaaaactcccaaggacagccataacctcttcatatttttaatcttcaaggaagtgcagtagagtgtgacgatctgattcttttaaactcaccaaatcctgggatagttttaattttatacttcttatgattaggaaacccgtctaaggattgtccntctttcaatatgaggggagcctgcagaagggggagactttaaattgctgaaggnccctgaacgggccatctgagnaaaggttcaatgcaggttttctagg

SEQ ID NO: 332011 - DNA, 393 bp, Homo Sapiens
  misc_feature (144)..(144): n is a, c, g, or t
  misc_feature (229)..(229): n is a, c, g, or t
  misc_feature (271)..(271): n is a, c, g, or t
  misc_feature (380)..(380): n is a, c, g, or t
tgagttcatgcatgcattaatcataatgtgccattaaccaagaggactgactggctcaattctttgtactcgatattcacgtaaaggaaaaagacatagtccatgtgagcttctctcactttaagtttacacaaatctcatggnggaacttgttaaaatgcagattctcattcaatgtctggggtgggggcttgaggattctgcatgtgtaacagggttcccaggtganatgctgctgttgctggtggtctgagtaacaaggaggtaggtnttcccctcccttctcagttctcaaacttgcatgatcataggactcacaaaaggaacttgtcaaaaatgggatctgaaggccgttcccttgaggatctaggattgggggncccgcatgtacct

SEQ ID NO: 332012 - DNA, 425 bp, Homo Sapiens
  misc_feature (23)..(23): n is a, c, g, or t
aaagtatactacctgatttctanaattaccaaagtgcccccttttccccccattatttaaaaaatattgttctagctctgcgcttaaggtctggacctttcttttttaaaatgttatatttttataacatcttattattaccaccaccaaaaaaggactcagtttctcccactttacactatatctctgtccccaaagtaaataactgaagcaattatctgcaatttttttaaaatgtgggtatttcagggtaaagaatttggactgcctaaattactcaggtgattgcctgaattattacatatgtcccatcattctttgtacaagaagtcttgatttatagaaaatttcagacaatgttcaaagaaggaaatatgctacccaaacaatctacttaagacttcaggttggcaaccctccctctt

SEQ ID NO: 332013 - DNA, 158 bp, Homo Sapiens
tttaacattgaaattaactttatttttaaatttttgtgggtacaaagtaggtgtatatgtttatggggtacatgagatattttaatacaggtatgaaatgtgtataaacacatcagggtaaatgggtatccatgacctcaagcacccctcacaaaatc

SEQ ID NO: 332014 - DNA, 443 bp, Homo Sapiens
  misc_feature (421)..(421): n is a, c, g, or t
  misc_feature (428)..(428): n is a, c, g, or t
aaagagtaagagcattggaattttatttaactctaggtaccatggatttgacatcagtaggaaagactaatgaataagcagccatacaacttttttggtcactgtgcttcccaagcaccaaaaaatggagctatttttccaattcagtttcatctttaataagctagacagatcctgctgcattctttgtttctagtttaccagtacatcattatgtagtttactgcatgtgtggagcaagtcattatgtagtaccaagtttacatcatcataggactacaacatgcacattctacttaatgtagctcaagcaacagggattacaagaggaacgggttatggggtgggagacttgcctttggacaaggtcatggatcacacttaactatagggtttagggaaatcttattaggggaggggnccctccngcgggttcttccatt

SEQ ID NO: 332015 - DNA, 504 bp, Homo Sapiens
  misc_feature (370)..(371): n is a, c, g, or t
acccactaccagatagactttttcatttcaagcataacttgagtctgcactggggagacactcgtggtgggggtggctgtgatgagggcacttgcgagtcccgacaacagacactggctcctgcacccacatcaccaccatgtcccaggggcagcctggaggggagtttgtggtcagagccccagccaggaaaggagagagttccagaatgttccaagagtctagccgcaggtcccagacaccatgagctggagggtcgggatggggcagcctccctgggtgcaatcggcacctggggcccccgggctgtttcagttgctgtcgtgaggtcttttctgccctggggtcagagcagcaggcagagcggcgnncttcttctgccgttgcgccttcttcagagcgctgagagccaccttggcggcctcccggaagacgtcctccacattctcccgaaacttggcggaacattccaggtagagagcagctcggatctgttcgcaggcg

SEQ ID NO: 332016 - DNA, 385 bp, Homo Sapiens
ttttctctctctgtctctcttttcatttcaacggcgatgatcctttcccgagaagtatcttcagtgtcttagggaggtcacagcaacaaggcaaaacaataattaaagtacaacagaaggtagtgcagttctcgctgtggaaggaagcggtccgcaggcagctggcccgggatgcctgcacccaggtcgaggctgaaggacggggggtctcggttttcccgcagctctaaggctttggctgggggctggctcaggaagtcatcttcagggtgatgtgggggatgcaggtggaatgcggttaggagaagaggagggcgctgggctccgggcccctgtcacagagtggactccaaagaggagtccaagatgtcatcgtgatggctgt

SEQ ID NO: 332017 - DNA, 409 bp, Homo Sapiens
  misc_feature (16)..(16): n is a, c, g, or t
  misc_feature (21)..(21): n is a, c, g, or t
  misc_feature (32)..(32): n is a, c, g, or t
  misc_feature (51)..(51): n is a, c, g, or t
  misc_feature (60)..(60): n is a, c, g, or t
  misc_feature (69)..(70): n is a, c, g, or t
  misc_feature (78)..(78): n is a, c, g, or t
  misc_feature (82)..(82): n is a, c, g, or t
  misc_feature (85)..(85): n is a, c, g, or t
  misc_feature (96)..(96): n is a, c, g, or t
  misc_feature (105)..(105): n is a, c, g, or t
  misc_feature (111)..(111): n is a, c, g, or t
  misc_feature (141)..(141): n is a, c, g, or t
  misc_feature (147)..(148): n is a, c, g, or t
  misc_feature (153)..(153): n is a, c, g, or t
  misc_feature (156)..(156): n is a, c, g, or t
  misc_feature (172)..(172): n is a, c, g, or t
ccgtttgtttgaaaanccttnactgtggaaanaaattcctttccttacctnaaaaggttnaaggtaagnngctggctnaggncgngggcgctgganactctctgncctgcntccctctgctgtgttcccacagacagaaangcctgnncctgnccnaagtcctggtgtctcnagcctggctctatcttcctccttgtgatcgtcccatccccacatcccgtgcaccccccaggaccctggtctcatcagtccctctcctggagctgggggtccacacatctcccagccaagtccaagaggcagggccagttcctcccatcttcaggcccagccaggcagggggcagtcggctcctcaactgggtgacaagggtgaggatgagaagtggtcacgggatttattcagcctt

SEQ ID NO: 332018 - DNA, 415 bp, Homo Sapiens
  misc_feature (271)..(271): n is a, c, g, or t
  misc_feature (315)..(315): n is a, c, g, or t
  misc_feature (319)..(319): n is a, c, g, or t
  misc_feature (333)..(333): n is a, c, g, or t
  misc_feature (381)..(381): n is a, c, g, or t
  misc_feature (392)..(392): n is a, c, g, or t
  misc_feature (397)..(397): n is a, c, g, or t
aattggaaaagactgagctatgtgtaaatagaataagacaggaagagtgtagacacaggaaagagggcagacaaaaacaagtgcacagttatctaagggaaacaatgggatcaagctgcaagtatataaacttgtcttgatagaagaatccttgatctggtttattcagtgtttggtccaaacccacatccctgttctgcctgtctctgacttgctctgtgccccagaagcccagcttctacagatagcattagctggggcagccctgccntctttgccaacagctggatttggccagtgatcagcccagcaggntatntagatggcaaaggngagagaggtttagtgtacttattccctgcatcacccccctgctttggntggggcagctntttcntcccaccagttccccagt

SEQ ID NO: 332019 - DNA, 423 bp, Homo Sapiens
  misc_feature (250)..(260): n is a, c, g, or t
  misc_feature (278)..(356): n is a, c, g, or t
acgagcccctcagcatcttacctctcaacgttccttctctctgctctgaaacatctttcccaaagctgcatttcagtttcctcaaggacaacactgatgtacagaaatccttgtccccctaagtttgattcaaatatatcttctctggccaggtaaaacccataatcccagaatttggatagcccaggccgacttgaggccaggagcttaagaccagcctggggaatgtagcatgactccttcctctacnnnnnnnnnnntttaaattagctggcatnnnnnnnnnnnnnnnnnnnnnnnnnnnnnnnnnnnnnnnnnnnnnnnnnnnnnnnnnnnnnnnnnnnnnnnnnnnnnnngttgcagtgagctataatcatctactgcactccagcctaagtgacagagctagaccctatctctgaa

SEQ ID NO: 332020 - DNA, 137 bp, Homo Sapiens
ttggactcaagcgatcctaggaagaaaggaagaaatgtaattctcactattaaaacaccattactgcatactttttcaagagctataacagacttcatatctgctccaaaagcaaagtagtaaaatttttaaaaagg

SEQ ID NO: 332021 - DNA, 426 bp, Homo Sapiens
tttctttatttatcacacaagatccagtggcattagacttttgtctcacccaaaacagtgtggccttcatgaaccactaagcaatgggcagaaaaatggcatgcttccattcttattttctttgttcaaagttagcatctcaggagatgatttgtaagcagcaagttaagagcacgtgaagaatatgggcaggtctatagtggctctgaatatgcaaagggatcctcatcataaacctcatctgaagttttcctttcattttcttttgcattgtcacctaaaggtatctgaggatgatataatactgtttgttctactctggattcccatgctatttgcttagggaaaagagaggggagttaggttctcgggctgggtaaggaatagactgggtgaatacaatgtctcaggtaactggaatccaat

SEQ ID NO: 332022 - DNA, 525 bp, Homo Sapiens
  misc_feature (21)..(21): n is a, c, g, or t
  misc_feature (47)..(47): n is a, c, g, or t
  misc_feature (181)..(181): n is a, c, g, or t
gtggccccctaacaaaacaancgtggaatggtccaatactggtgaanagttgtccccaggaatcagtgcgaaatgttgtatgcttccaacggaagaaaggtgggctgtaccatcaaatccccccaccacataaatatggtcattccagcagggctactcctgcaccagaacgcttggtggnccattggtgtaaacattaagtccaatgtcctgtatgagggtcgtatttctcaactgaatttaagatattcaagccgtcatatcctcctagacagtagatcactccactggccactacgagtccggcaccttcccgggctgtctgcatatctcccagcatgctccactggtcaatgtttggatcatagcgctccatactggtgtgacgcctgcttccatcaaagcctccagagacatagatcatatctcccagggtggtggctccagcaagacctcgtcggacattcataggggccacagaataccagaccccatcctcatctgctgtgtagtctagacattcca

SEQ ID NO: 332023 - DNA, 328 bp, Homo Sapiens
  misc_feature (28)..(28): n is a, c, g, or t
  misc_feature (89)..(89): n is a, c, g, or t
  misc_feature (276)..(276): n is a, c, g, or t
agtatgttctgatctatgaagatcctgntggaaactcctcccccttgaagctgtgcctctgttgctgtggggccactgtctgctggggnaacttccctcctgccgggcagtgttggcagattaagctaggactggcaagcaggaccgcgacgatgacgacgacgaactttagggtcttggggatccgggccatggtatggttcccgacgccgtcctgggtcctgggtcgcaccctgcctcggccatcaggcggccggggcgctctgtccccagagnttcctaacggtaggaagcgctccttcaccccttgcatctctggtcaaactcc

SEQ ID NO: 332024 - DNA, 408 bp, Homo Sapiens
  misc_feature (358)..(358): n is a, c, g, or t
  misc_feature (364)..(364): n is a, c, g, or t
  misc_feature (382)..(382): n is a, c, g, or t
  misc_feature (396)..(396): n is a, c, g, or t
aagattattagctgtttcttcacatagccctttcacagtgctttccatataaaaaatactccatttatactaggcagcttaggtattataaaaaatacgagctttggaatctcagctctgccatttatttggtctatggcaaattctttagacttaggatttgtttaaaatgggggttattaacattttcctcacaaataagagggattaaaatgaggaaaatacggtaaacattcccaacagagtaaggtacttcagtgtcttttcttccccttctttggatttggattgtttcacacccttaaaattgttattacagccatggggtctttaccctagctggcacattggggatccncccggnggttttttggattaaacncgggtggggcttcngcccccaccccc

SEQ ID NO: 332025 - DNA, 434 bp, Homo Sapiens
  misc_feature (67)..(67): n is a, c, g, or t
gttcggcacaggcctggagaccgccgggagcccgacttcctggcgctttgccttttgggaagtcggncaaaggaacagcgccaacctctctccacaagccagggaccctacaacccaccgcctcaggccagaaccagcagctgatttagataccatcaagacacctaaaaccttatcatgagccagatgctgtggaagagattctgggagaatcctgaggaccccccagttgcagccatgtcaagactgatgctgaggaggaccccaactgttcacgagcaacacccgttcgaacacagccaccttatttggggaaagattcaagaagctgttcacagatggtgggaaggaaaacttgagggaaagcggggacaaccagttcacaattgagttattttaattgttagctattgaggagcggttgttccaccttt

SEQ ID NO: 332026 - DNA, 426 bp, Homo Sapiens
  misc_feature (71)..(71): n is a, c, g, or t
  misc_feature (81)..(81): n is a, c, g, or t
  misc_feature (127)..(127): n is a, c, g, or t
aacaaaaccctttggttttcccgggggttgaagctcccctcctccatcaaattaatcgggtaataaagccnaaacaacacnggaatccccaaaaagatcctaatgagcccacagaaacagttgtccnaaaggtgtttccttggattaacgtctgataaaatggtttccgtgtaaggacagaagccccagcttacaccggtttcttcccagacaagagcgacgtgcagctatctgccacaccatagactttatccttatctaaatgttgttccagctgagaacttactcctcctgtcaccagcatctgaagcaattccaggacatgataattgtagaaggccttttagcattgcttgcaggattaagtaaaatatactgcacacattgctaaattctgttttctttatcattgcttctcatgtatct

SEQ ID NO: 332027 - DNA, 544 bp, Homo Sapiens
  misc_feature (364)..(377): n is a, c, g, or t
  misc_feature (407)..(407): n is a, c, g, or t
  misc_feature (461)..(461): n is a, c, g, or t
  misc_feature (472)..(472): n is a, c, g, or t
  misc_feature (489)..(489): n is a, c, g, or t
  misc_feature (502)..(502): n is a, c, g, or t
  misc_feature (512)..(512): n is a, c, g, or t
tggtaaagtaacagctcaccttctgtctctgctgaaactggggtatctgttcccctgtggaggactgtcctccactggttgccagctcctcctccacctccctcagccacccggtcagttcctcataagtagactggaacttggtggccagctgccgggcttgctctaaagttctgagggccttggagctagtaactgtgatgtctgcgtaacgagtctttataccatctagtttttcctgggataagtaacacctcctcacctatggaagatagcacacaattactcatatttaagagatctagggaatgagggagtctctgatcccctttcttcaaatcaggagctttaatttcatagacgnnnnnnnnnnnnnngtggtaatgatttcacctatcccatactanagggcaaatggggaaataaaataaactttccactggataaaagaagccacttcntgaattattanaatcctgagtcagcgtnaagtgtttctagnagtttccagnaacctttcaaggtccatgtttgggaattcaag

SEQ ID NO: 332028 - DNA, 496 bp, Homo Sapiens
  misc_feature (117)..(117): n is a, c, g, or t
gtgaaaatgatcatgaagacatcagttctgctcagctgggagttccctgacaactacaactcacccacaccctacaagatccagtacaatgggctcacactgggatgtggatggccngtaccacccaaagaagctcatcacgcacctcaagcccccacacctttctacaaccttgtgctgaccaatcggggcagacgcctggggcggcctccagcagacggtcaccgcctgggactgccttcaacctgcttcaacggcaagcccagcttcgcccccaagcctgatgctgacggcttcattcatggtgtatctttctgacggccagagccccgtggcctgtccagagctatttcattgtgatggtgccactgcgcaagtctcgtggaggccaattccttgacccgctgggtagcccagaggacatggatctggaagagctcatccaggacatctcacggctacagaggcgcctgcggcactcgcgtcagctggaggt

SEQ ID NO: 332029 - DNA, 515 bp, Homo Sapiens
  misc_feature (57)..(57): n is a, c, g, or t
  misc_feature (476)..(476): n is a, c, g, or t
  misc_feature (487)..(487): n is a, c, g, or t
gctgtcatccagacttggagtgcaacgcgattattcagagttacaaagcctctatcncctaggctcaatcaatcctccctatgagcctcccaagtagctacgactacaggtgtgcaccacccaagtagctacgactacaggtgtgcaccaccacagccagctaatttttgttttggttgttgttgctattttgtagagacagtgtcttgctatgttgcccaggccagtcttaaactcctgggcctcaaattatcctcctgcctcagcctcccaaactgttaagcattattttgtaatactcctaaaatttaggatttttattatagtctccattttttaaatactccattctaggaggaactacccacccaaacggatctaggactgtgtttatcatgtaggttaaatccaaaagggtattaggtgcatgtatcccataccaccaaggggaatatttattatattgagggacaggncatgggggaancaatccaatggggatttcctaaatgggg

SEQ ID NO: 332030 - DNA, 520 bp, Homo Sapiens
  misc_feature (446)..(446): n is a, c, g, or t
  misc_feature (498)..(498): n is a, c, g, or t
tttatggtcaacaaatatttattgggcatttattgtaagccaggcaagtcagcagaaacggcctgagcagtgcccaagagcactcactcactctccctagcaaacaggctcagaactctctcacacatgtcatcctctttcccactcaaaactcccaccccaaccttcctggaaggcagggctaacaggacctcctgcctgcctgctcacgactgattactttcaatcccagctgcaatgcaaactgaaactcattctgtatatcaccactctacaggagaggtctatttctggggcacccagaaggtcagcacacatactgctggggaccagggactacgtaattcgccttggtccaactccttctatggggtttagctgccctcattcctgtggggtaatacaagatcaaaacagtccacaactttgcctgtctttctctgctnccctaagggccctcttccttcgccgtaagatgtgactgaccagtacagtttntcctgaattgacaaacttgaac

SEQ ID NO: 332031 - DNA, 423 bp, Homo Sapiens
tataaacttttttgtgaaaagtatgctcaatgttttttttccctttccccattcccttgtaaatacattttgttctatgtgacttggtttggaaatagttaactggtactgtaatttgcattaaataaaaagtaggttagcctggaaatgaaattaaaattcacaagtgtgtggtctttatttcaatacccaaccctcttccttcaccctactattttgccgctgcaatatgtagtcacatcaccatttccattcctctaattagggaaacattaatctttgttatacagaacaagatatcaataccacttcttgttctttcccaatggattttattcccattgtgtaggccccaaggagggtgcaggccttccaccttgggaaacctttggggatttggatgtaggggggaggctttgccgg

SEQ ID NO: 332032 - DNA, 433 bp, Homo Sapiens
  misc_feature (13)..(13): n is a, c, g, or t
  misc_feature (30)..(30): n is a, c, g, or t
  misc_feature (37)..(37): n is a, c, g, or t
  misc_feature (48)..(48): n is a, c, g, or t
  misc_feature (81)..(81): n is a, c, g, or t
  misc_feature (88)..(88): n is a, c, g, or t
  misc_feature (104)..(104): n is a, c, g, or t
  misc_feature (122)..(122): n is a, c, g, or t
  misc_feature (135)..(135): n is a, c, g, or t
  misc_feature (159)..(159): n is a, c, g, or t
  misc_feature (181)..(182): n is a, c, g, or t
  misc_feature (191)..(191): n is a, c, g, or t
  misc_feature (198)..(198): n is a, c, g, or t
  misc_feature (221)..(221): n is a, c, g, or t
tccaaaggttggnaaacccccaaactgtantaatagnactgaaaagcnaaaaacaaaataacaacaactgaaaacaacaantatatgncaggttaatccccagncaaagaacaggcaaacgncaaaacaacaaantatatgccagtttattgaacaaanaacaggtgccacaaggccacanncaacacaanagtgaanatgaaaggccagccctaaccgancaaaaggctcctgccagcacggagggcctgggaaaggccatcgcctcgagttaatcccaatccccagtgccttcaggacaccttgggcccacgttgacatctctcttttccttgggaggagccctagggtacagctgcatggttccatgggagtttcaggcgtctgccagctctgtttcactgtttgtggttaaactgctttctcctttttt

SEQ ID NO: 332033 - DNA, 431 bp, Homo Sapiens
ctacccaggtccccagggccaggccacttggggtgtggccagatcagacaataccccacatttctggtttccttctccccctgctccgacgcccagaggaatcccttgttgggaacctgacaatttgaggcctagatcagtcctggaagaaggagcctgaaataagcagtatagcatccgtacaaggagcacccagcttttgagccagatagtactggcacccaaaccccaggctatgacacttccccagttgcataattttggccaagtcacttaattcctttgagtctcagtttcttcatttgtaacacgtgcataataatggtacctactatgctgtgaagtatgaataacagctaatgtttaataaatgcttacctacaatgccatgcacctgttctagcagccaagggatagctaaatgtcaataa

SEQ ID NO: 332034 - DNA, 445 bp, Homo Sapiens
  misc_feature (24)..(24): n is a, c, g, or t
  misc_feature (33)..(33): n is a, c, g, or t
  misc_feature (63)..(63): n is a, c, g, or t
  misc_feature (373)..(373): n is a, c, g, or t
ccccggcatgcaggagcaccccangggtgaagncccgtcctcaggtcctcgacaaattaagcnagttgtgtgaacagtccattcctggttcccttcctgcctgacccctgggagacatatcagtaatggatgtacaaaagcaggtctgttttatgtcttagtataatttccagatgaattgtattgaaaaaatgctgaggaatgaatgtgtcaaaatgggttaactgtgtatattgactttcatgtcgtcatgcatctgtcatgaatgaatgatactttgcactgggctgtacgacagtgaggaccttaggcatgaagcctttttcctggtcccagcagcatctgccctgtgaagtttgttttctcccacctnctccaggccccactgatacccccaaatagatgctgggttatgagaaccagcgaaatcccccgagccctatgc

SEQ ID NO: 332035 - DNA, 767 bp, Homo Sapiens
ataggcaaggctttatgttatatttatttattttccagcttgtacaaactggatgtagaagcataaacatagtacatttctaccatcttcaacaaaaatataaccaatatgtacaattattgtattaaaaatacaaaagggatacagactccaccaatgtctttctaaaagacatacaggtacaagtagtatcaaaagtatgaggaaatcaccagttaattgtacattctgcacttgacatcacagagcgaactgagattagcagtcctatgttctacaattacttaatgcttagataacatttgtgcaacttgtggtagagctagatttctgtctttctatatgcacatgaggtccatagcctatataataaaactggcaaataatgcatattacatgtaaaattacaaatgcataattgacaatgtaataagcaagtagacaaatgccatgatacagaagagaattattaaataaagcactgacattgtttgatacagtgaaaaaacactgcaattccacttttaaaatttgaagctatttacgtttatctactgatcaatatgatcagctgaatttaatggaaaaaaaatccaagaccagcagttcctcacatttgagtactactcagattggcagccttcacttttccggagtctgtgcaaaacaacacaaaaatagagtggaggggtcatttcagtcattatagggttaatagcagctgtgagcagatggttgctacacttaggccttctctatatgcagcg

SEQ ID NO: 332036 - DNA, 243 bp, Homo Sapiens
  misc_feature (47)..(47): n is a, c, g, or t
  misc_feature (94)..(94): n is a, c, g, or t
attcggcacagattgtatgctgaaataatctatggatgacaagtcanccctcccagaataaggcagtattttcccaatagagtttccacaatantcctaccccaaattaaccttcaattaaattcccattgcctacaaatgcccatgagtgtgaagttggcccaaataaaatttattaatccaatgcctaccctagagaagtcctctattaatgacaagttttttaaaaaggacatctttggc

SEQ ID NO: 332037 - DNA, 364 bp, Homo Sapiens
  misc_feature (315)..(315): n is a, c, g, or t
  misc_feature (328)..(328): n is a, c, g, or t
  misc_feature (342)..(342): n is a, c, g, or t
gtacaaacatttaatattgcttaaagaagagcaggcatgtttgggtggcagggagatgagatggtggaatcccacactgttacctcccagacccaaggcttacatgcaataggatagaatggtataaaagcccttttatactgtgggttatacaaggaattgaagttgattgcttagaagaagagaaggatttgactaagggcagggtttagggtgaaagtagtaactgtaggcacatttctgggagctggctttcatcaggagtcactttggcaggctgagcatccaagatgaagtgtcctgtattctccacantccatccccctanttcggctcttacantctcacgcgccttccgcttcca

SEQ ID NO: 332038 - DNA, 403 bp, Homo Sapiens
  misc_feature (387)..(387): n is a, c, g, or t
aaggtcttgctctgttgcccaggttctagagtgcagtggtgcatgatcacggctcattgcagcctcgatcttgagggtccaagtgattctcccaaagtgctgttactacaggtatgacccaccacgcctggcctctgaaggagatttatataagtagaacaatggcaagtaggaaattagaagtattactttattattaatttgggcttttggccaaaataccaatgtaaatttgtgtagtaaacagggtgacatcatattacttaagctccagggactagtcaaggggctctctcatcctccctaaatttcactgtccttactactctttgggttgatgggcttttcagaaggaccccaacaaattaggtcttttaggaggtgtgntaggaggtggaaatgg

SEQ ID NO: 332039 - DNA, 381 bp, Homo Sapiens
  misc_feature (18)..(18): n is a, c, g, or t
  misc_feature (51)..(51): n is a, c, g, or t
  misc_feature (79)..(79): n is a, c, g, or t
  misc_feature (91)..(91): n is a, c, g, or t
  misc_feature (118)..(118): n is a, c, g, or t
gttacaaccctcaaattnccccccaaaattatttgccattaaaaaaccccnattaggggattataagcaagtgagcccnagaggtcccccncccttgggtgtatatggaacctccccngggcaattccccatagcctattttttaccttcaaagaaaaagagtaagataaatccatacaactgtcctcaaaataatgggagttttagccttgacaaaacaaacgtgaaggacttgaggcctgttagtggactgacaggaagttcagtgggcctgatgtaagtcaagggaaatagtaggaattagtaccctaagttgtgggacgtcagatcgcttaggaccttccaagctatgatagaagtttgaatgttatttttatttat

SEQ ID NO: 332040 - DNA, 402 bp, Homo Sapiens
  misc_feature (378)..(378): n is a, c, g, or t
aaattattaatgttatagatctttcattgtagtacttctgaattaaccaaaatcacagtattctgaagatgattctacaaagcctgctgtttctacaaaggctgctgatgatttctacaaagcctgctgtagtgttgctgtggcctctgcttaaaaaagtagaaaacacattgatgcagcatgttcaccccaacctccctgcctaaaggctcagggaccatcttgggaagagggaaggcgcgtgagattgtaagagccgaattagggggatgggagtgtgggagaataaggacactttcatcttgggatgctcacctggccaaattggacttcttgatggaaagccagctcccggaattgtggcctacagtttactanttttcaccttaaaccctggccctt

SEQ ID NO: 332041 - DNA, 396 bp, Homo Sapiens
  misc_feature (326)..(326): n is a, c, g, or t
  misc_feature (374)..(374): n is a, c, g, or t
  misc_feature (381)..(381): n is a, c, g, or t
ggcacgagcgcttttccgactggaatcagccattttaccaagaaagttgggtttcttttactggcaaatagtacttcaagagcacagtcttatgtaagaagtacagtctatataaagactgtccaggacaaaaactggccactccattcagcattgacaggcagtatttaaagctggtgcatggtgaggtgaagtttctcaagggcaaagacaatgccttcatgcatgttcagtgtctgcccccgtggctttttgaagtgatcgctgacaatggggggatctggcagtggactttcttctggcctcttgccaaagcccagggggtngctggctccctaattcttaaggggtttttaattgaggacttcaggagncaggttnttaacacaggggcct

SEQ ID NO: 332042 - DNA, 398 bp, Homo Sapiens
gggggccaacagaagttaggggacctaaataaggcccagccaactccagggaaaattaagccctattccatcctggataatatttgggccctcccataaaactgcccatggattcccaactgtactcaaatataatacaacttccttcaatgcctgcctttataaatctgactgaaaaccttatttaaggagtcaagatgctgaacaccctaacaaaagcaaaaacaaaattacggcctatgtggtgtcactgttattaccactctttacaaagcactaagtacacataggtgtttggcattgtctctggaactacaaaactatggcctatgtggtgtcactgttattcactctttacaaagcactaagtacacacaggtgtttggcattgtctcctg

SEQ ID NO: 332043 - DNA, 407 bp, Homo Sapiens
  misc_feature (41)..(41): n is a, c, g, or t
  misc_feature (192)..(192): n is a, c, g, or t
  misc_feature (289)..(289): n is a, c, g, or t
  misc_feature (292)..(292): n is a, c, g, or t
  misc_feature (367)..(367): n is a, c, g, or t
  misc_feature (389)..(389): n is a, c, g, or t
gaaattgaaagagtaacatttatctttttgtagcattcttnggtccctgctgttctgattaatattttatcagtgataaaaaataccaaaatatagtgtgtttgctcatcagatttgcaaattacaaaaactaggaggatatttcagtaatggtgggaggctaagcttctgtaacaaaccgctgacacagtnggctcaaagagcggcaggatgttcatttcacttttgtaaccacccgtgtgggttagggcaggctctgtaccggtaagtcgtcaagggcctgggtctngtnggagcacctctgctttcctcaacatgtgccttccaagggagggctccatgggcttctgctttccagctgggtgtnggaaggaaaggaagggggcatntcagggagggaggggatt

SEQ ID NO: 332044 - DNA, 612 bp, Homo Sapiens
  misc_feature (79)..(79): n is a, c, g, or t
  misc_feature (164)..(215): n is a, c, g, or t
ctccagtgctcagagcatgaaaattttctgctgtctttggaactttgtctacaaacagttagaagatgcagcccaaggntcaccatgggtggcgatgttgaagaacatggtgagtttgactgtggctggtggcagaggtctctgtgtgtcagcggcatctgcannnnnnnnnnnnnnnnnnnnnnnnnnnnnnnnnnnnnnnnnnnnnnnnnnnnacttccttgaccaaactttaattgggctcatctgagcattctgcttaaccaggggcatgaccttggtctgccatttaggcaaggaatcctgctaagttattttagagagaatctccgcaccttttatatctaattacctttgatatctgatcaagtttcttattccccacccttgatgtctaagtccttggcttccctctaccaagaatcctattagacaattttagcaagaatccccctacccttgatatctccttttgttaattctctatccactgaccttttcattcttctctttggcaatacatctatagctatctttgctgaatttggagtaagtgcaatctctctcccctcttgtaatagtcttgaataaagtcttccttaccatttcaaa

SEQ ID NO: 332045 - DNA, 466 bp, Homo Sapiens
gtaaagattacggaccataagaactgccccccgacccatacacacacattttatagcgggtaaaaccaactgaaaggaacaaattaatgactttcttgaacaaactgattacgaaagtgaaaggctaacagggtgattactaaatcctagctctgcgcccaggcaggagatgaggaacaagaatcccaggagaaggggtaagaatcaaaggctgcggctctggcacttacccgctccttgtagtagaaggagctgatggagacctgctctttctcgctgcgagtggggctcccactgtataaacgaaggttcccaggggcctctgtgcggatcttcatgggcgcgatcaagccagtgtgataagcagacaaggctgagagagatctgtagttgaaaatgataattatccacactggctgcagtcctgtcatatttccaagtggtgctattcttagcacttgatacc

SEQ ID NO: 332046 - DNA, 426 bp, Homo Sapiens
gaagagtgtaaggtgtatttcaaagcatagttccagtatcaaaaattgtcttgcattttctcatcagcaggtcagtttgagaaagcacgaacaaagttatagtagttaattttgccttctccatgagagcacatcctgattaactccttaaccaaggagtcatccactgggacgttaagcgattcacagattttaaagaacatgtctctgtccacatatcctgaagcttccttgtcataaatttgaaatgcctcacgaatgttgtctttgcatgagtgatctttcagttgcttctgaattgtgtctattaatgcttccaattcctgcacgcctggatccttttcagtttgcttgctttctgcttctggagcaggcgcttctcgctttcggacatggttctgaattgacgcgagtgcttctggtgaa

SEQ ID NO: 332047 - DNA, 523 bp, Homo Sapiens
  misc_feature (155)..(155): n is a, c, g, or t
  misc_feature (170)..(170): n is a, c, g, or t
  misc_feature (209)..(209): n is a, c, g, or t
  misc_feature (217)..(217): n is a, c, g, or t
  misc_feature (254)..(254): n is a, c, g, or t
  misc_feature (287)..(287): n is a, c, g, or t
  misc_feature (289)..(289): n is a, c, g, or t
  misc_feature (298)..(298): n is a, c, g, or t
  misc_feature (311)..(311): n is a, c, g, or t
  misc_feature (316)..(316): n is a, c, g, or t
  misc_feature (346)..(346): n is a, c, g, or t
  misc_feature (357)..(357): n is a, c, g, or t
  misc_feature (364)..(364): n is a, c, g, or t
  misc_feature (370)..(370): n is a, c, g, or t
  misc_feature (375)..(375): n is a, c, g, or t
  misc_feature (406)..(406): n is a, c, g, or t
  misc_feature (416)..(416): n is a, c, g, or t
  misc_feature (422)..(422): n is a, c, g, or t
  misc_feature (435)..(435): n is a, c, g, or t
  misc_feature (475)..(475): n is a, c, g, or t
  misc_feature (482)..(482): n is a, c, g, or t
  misc_feature (489)..(489): n is a, c, g, or t
attttttggctctagagggggtagaggctgggaaggcaggcggcacccggggacaagtgagggcacgggctggactggggccccagcagaggtgacagcagatgccctgaggcactcctccagcaccaacgaaattgagatttttgcccccagantctgctatcccagantctgctatggaggcacagggagcacagagaccacgagantgaaaatntgaactcaatgacggagggcctttgggaaccaaggantggcaacatgggacatgcagatggcaagttttntntaaaaaganttttccagagagntcagntgagagaagaaggcaggacagcaagttttntttaaaaagcnttttccngagagntcagntgagagcagaaggcagggacagcaagttttntttaagcatnttagcntttttcagacagntcagctgagagaagaaggcaggttagcaactattggaggncacggtnttaaggntgttttcgtttttttaaaaagttggagtaaactt

SEQ ID NO: 332048 - DNA, 621 bp, Homo Sapiens
  misc_feature (457)..(457): n is a, c, g, or t
  misc_feature (585)..(585): n is a, c, g, or t
gaaaacaccagcttcatttttccttctggaatgatacctcttctcacactcaaactaagtggttttggtatagctgatttcatcccccacactgagttgacatatgacccaggtagggttaccagataaaacacaggatgcatacttgggaatactaatccaaaaaaatttattcattgtgtatctgaaattcaaatgtcctgtatttttatgtgctaaatctggcaactccacatccaggcctattaataggacactagattgatttggaaaagggccatgagtcctaaggtaggctgaggagagtcatcctttggacatctgctgggagctctctgggaaagagcctgtcttcattctactggggttgcaaagctaagcagaacatatgatcagctgcagatatgtgcccatgacccaaatctggtccatcagaatactattttccccaattacnatgtttgactgatagctgggcatataaccccaccccaagccaagtcagcaagacttgaccatggagctgatgacggaattaatggggcaggagaatctctgtccacggggagttgctgagcttgaggnatgtaagcctgaagctgctggcagatatctcacccc

SEQ ID NO: 332049 - DNA, 841 bp, Homo Sapiens
  misc_feature (695)..(695): n is a, c, g, or t
  misc_feature (769)..(769): n is a, c, g, or t
gtagagatggggtcttgctatattgcccagggtgtcctcaaactcctggcctcaagcaattttcccgcctcagcctcccaaaatgctggatgacagctgcaagccaccacaagcaactctgtcataatgcagtctttataaccagctgagcacaatctctactctcaaaatagggctctgaagtctaggaacaagtcctcagctcctgaaatgacagaggaggaagtgagtgaagtgaatgaatgaaggacacagtcaatattgagaataatcacagtgattgcaactgtaaaccctccctgacgcggccttgctctgaatgctactctgttggtctttcaggatggtatcagcactcccagcagacagagtggctcagggctcacaccaggtccctcagcccacacccatcagacttggggttcaaactcagatctgtctgttttcaagacagagcccaaccagcctgcctgaaatcagccagtgaagacttaattgagggattgctaggagacagatggtctcactgggtagatcataatcaggcaatgccagagggaggatccccactggccaccccattcctactgtgtctgaggacacatggacgaagcctcagctcagggcttcgtgttagggtcctgggtttggggtgggggggcaggatgtgccttgtcggggctccctgctcaccnacgccaatggctcagccttgtcgctgctggtgggccgcctctgctccttttctcttcactccctctcttcttcnagtgatgctttgttcttttccctttgacgtttccagaagatgcagatgcctccagctattacgagtcccaat

SEQ ID NO: 332050 - DNA, 328 bp, Homo Sapiens
  misc_feature (269)..(269): n is a, c, g, or t
  misc_feature (277)..(277): n is a, c, g, or t
ggtattttttagaatcatatactgtcttaaaatacatcagtgataatgttaacacttcttcctacctgcataaactgatgatcacaatgaaaaaatagattaatgtctttttttaatgctgaactcaagttctctttgttaagtatacttgcacatttttatcttggtatattgaactctcttggtcttatacagaccattccaagtggtctgacatacatacggctgataaaatagggacattgcccaggattatttctactttcttntcccaccnaaggaatgtgaccgccccacacatacacaccctgggggttactttggcggg

SEQ ID NO: 332051 - DNA, 390 bp, Homo Sapiens
  misc_feature (265)..(265): n is a, c, g, or t
  misc_feature (313)..(313): n is a, c, g, or t
  misc_feature (323)..(323): n is a, c, g, or t
  misc_feature (330)..(330): n is a, c, g, or t
  misc_feature (340)..(340): n is a, c, g, or t
ccaatctgatgcgtacagaactttattgagggtaaatcagactctgattagagtctgagcaactgctggtacaatgacaacactgctgcaatccagaggttcaggcatgtaacaagctgacacaaaaatactaccactctatgaaagccaatatggatcaccagttggctcccctgtatttctctcggccctcacaggttgtcacagcctacagtgctttcttctggttatcacaaatcctcaaaaattaatcttattctttggntgactcatattgcttttaaggaaaagttatcaagggtcactcacaggnctgatccggnggaaaanggaagttgcngagatgttatttattcatctgaaggtatttcccaaattactcattttaat

SEQ ID NO: 332052 - DNA, 756 bp, Homo Sapiens
  misc_feature (503)..(548): n is a, c, g, or t
  misc_feature (556)..(622): n is a, c, g, or t
  misc_feature (633)..(633): n is a, c, g, or t
  misc_feature (658)..(658): n is a, c, g, or t
  misc_feature (666)..(666): n is a, c, g, or t
  misc_feature (704)..(704): n is a, c, g, or t
  misc_feature (713)..(713): n is a, c, g, or t
  misc_feature (728)..(728): n is a, c, g, or t
  misc_feature (736)..(736): n is a, c, g, or t
catcgtagcgttgtgactgtctcctcctgcttggaagacgaggcatccgtgggcaggacaagtcttctcctcttgagaccccagtgcctgcacatcatgagctttcagtcagggtttgtcagaggaacaaaccaggggacactttgttagaaagtgcttagaggttctgcctctatttttgttggggggtgggagaggggaccttaaaatgtgtacagtgaacaaatgtcttaaagggaatcatttttgtaggaagcattttttataattttctaagtcgtgcactttctcggtccactcttgttgaagtgctgttttattactgtttctaaactaggattgacattctacagttgtgataatagcatttttgtaacttgccatccgcacagaaaatacgagaaaatctgcatgtttgattatagtattaatggacaaataagtttttgctaaatgtgagtatttctgttcctttttgtaaatatgtgacattcctgattgannnnnnnnnnnnnnnnnnnnnnnnnnnnnnnnnnnnnnnnnnnnnnagatggannnnnnnnnnnnnnnnnnnnnnnnnnnnnnnnnnnnnnnnnnnnnnnnnnnnnnnnnnnnnnnnnnntgggttcacgnaatcctccctgagtagctgggattncaggcgcntgccacccacgctggccaatttttgtactttttaagtngagacggtntttccgcaatgttgnccagggtngtttcaaacttcctgaccct

SEQ ID NO: 332053 - DNA, 642 bp, Homo Sapiens
  misc_feature (20)..(20): n is a, c, g, or t
  misc_feature (137)..(257): n is a, c, g, or t
  misc_feature (280)..(280): n is a, c, g, or t
gatggagtctcgctgtgttncttaggatggagtgcagtggaaatcttggttcactgcaacctctgcctcctggattcaagtaattctccagccttagcctcctgagtagctggaagtacaggcatgtgcaccactannnnnnnnnnnnnnnnnnnnnnnnnnnnnnnnnnnnnnnnnnnnnnnnnnnnnnnnnnnnnnnnnnnnnnnnnnnnnnnnnnnnnnnnnnnnnnnnnnnnnnnnnnnnnnnnnnnnnnnnnaccacacctggccatttatgtantttcttaatctgccccagtttaagagccttttaaatattttggaggaagtctataaatatcagtggcagttaaaatgaatttgtttacctttttgaatagacttgaattagctgtgttacaaagcatattgaaaacgtccctttaattatctgttctctaaattcatctattttacaattatgatctggaaattaagtaaacagtacctttccaataaccccatctgtctagaaaaggtagatgaaataggctgtggccagtgaagacaaatgttaaaagaggtggatttatatagagatttttgttatttacccccaagaagttcttaacacccttcaggcctattgtacattttatcagt

SEQ ID NO: 332054 - DNA, 392 bp, Homo Sapiens
  misc_feature (68)..(188): n is a, c, g, or t
  misc_feature (376)..(376): n is a, c, g, or t
tggattcaagtaattctccagccttagcctcctgagtagctggaagtacaggcatgtgccaccactannnnnnnnnnnnnnnnnnnnnnnnnnnnnnnnnnnnnnnnnnnnnnnnnnnnnnnnnnnnnnnnnnnnnnnnnnnnnnnnnnnnnnnnnnnnnnnnnnnnnnnnnnnnnnnnnnnnnnnnnaccacacctggccatttatgtatttcttaatctgcccagtttaagagcttttaatattttggaggaagtctataaatatcagtggcagttaaaatggaatttgtttacctttttgaatagacttgaattagctgtggttacaaagcatattggaaaacgtccctttattatctgttctctaaattcanctattttacaattatg

SEQ ID NO: 332055 - DNA, 403 bp, Homo Sapiens
  misc_feature (48)..(48): n is a, c, g, or t
tatgtattcccctaaacctgccccccagtttaaagagcctttaaatantttgggagggaagtcctataaaatatccagtgggcaggttaaaaatgaaatttgtttaccctttttgaaattagacttgaaattaagcctgtgttaacaaagccatattgaaaacgtcccctttattatcctgttcctcctaaattcatcctattttacaattatgatctggaaattaagtaaacagtacctttccaataaccccatctgtctagaaaaggtagatgaaataggctgtggccagtgaagacaaatgttaaaagaggtggatttatatagagatttttgttatttacccccaagaagttcttaacacccttcaggcctattgtacattttatcagtgctgtgccga

SEQ ID NO: 332056 - DNA, 464 bp, Homo Sapiens
  misc_feature (30)..(30): n is a, c, g, or t
  misc_feature (42)..(42): n is a, c, g, or t
aaccccaggaaatcccctggaaatttgggncggatgcccaanactttttgggtccaggagcccctgaaagaagtccttcggtccctatcccgcctagccatagttgattccttgtatgaatgtatatatagtcctacctgttaaacaaatgaaattaggtaaagacagaaggaccttatgaaattattaagaataattagtgtataaaggccatatcttgaatcttttccttacccaaatttcttcttgtttggcatgtgcattcttttccttttcctgtttcgaacggagctgaaaataacgtgattgattttgctttaaaggtacatgactgggctgggtgcggtggctcacacctgtaatcccagctctcagggaggcaagaggtgggaggacagcttgagcccaggagttcgagagctgcctgggcaatatagcgagaccccgttctccacaaaaaggaa

SEQ ID NO: 332057 - DNA, 475 bp, Homo Sapiens
  misc_feature (124)..(124): n is a, c, g, or t
  misc_feature (357)..(357): n is a, c, g, or t
  misc_feature (416)..(416): n is a, c, g, or t
cttgagttcacgtgatcccccaccttcaggtctcccaatatgctgggattacagacatgagccaccacgcccaactccagaagtgctcacttctaaactcctacaggaacttcaaccaatgcgnttcctatggcaacgggcacagtactcatggccacaatgatgacaacagtaatggctgtgaatatgtgttgagtgcgtacaacgtcctggggtgttggcatgagcactttatatgcactatctcatcagacctcagtaaggagttcatgagggtgaggtacaattttgtccccgtttttacttgataaggggaaaggaaggcacaggacagggcttacacacctgccgaggggncagttggacagctcttactaggtcttcgtctgggagcttttcttaaatcttgtataggncatgtaacgtcatgattttcttgtgtcttgcttttcaggtttaggcagctccgggggtt

SEQ ID NO: 332058 - DNA, 528 bp, Homo Sapiens
  misc_feature (19)..(19): n is a, c, g, or t
  misc_feature (34)..(34): n is a, c, g, or t
  misc_feature (151)..(151): n is a, c, g, or t
ttgggatttttgccctcgngccccagattcggcncgagaccatttggaagagtttaagccaaaagttgtgcagagcctgaaccaggccggtccccccggcgagtccagatccagggagaatgagcctgagggagaagccatgggagggaanttgaaggaagggaaaaccaaccctcccttaagaggtcccctcctgagcaaaagggcccagagaagtctgcccccctgggggcagaacctcaagaacatcaaacagtgtttaaatcagagccagaattttgcagaagaaatgaaagcgaagaatacctctcaggaaaccatgttaagagatcttcaagaaaaaaataaatcagcaagaaaactccttgactttagaaaaactgaagcttgctgtggctgatctggaaaagcagcgagattgttctcaagaccttttgaagaaaagagaacatcacattgaacaacttaatgataagttaagcaagacagagaaagagtccaaagccttgctgagtgctttagagttaa

SEQ ID NO: 332059 - DNA, 578 bp, Homo Sapiens
  misc_feature (515)..(515): n is a, c, g, or t
  misc_feature (533)..(533): n is a, c, g, or t
  misc_feature (552)..(552): n is a, c, g, or t
tttttaactctaaagcactcagcaaggctttggactctttctctgtcttgcttaacttatcattaagttgttcaatgtgatgttctcttttcttcaaaaggtcttgagaacaatctcgctgcttttccagatcagccacagcaagcttcagtttttctaaagtcaaggagttttcttgctgatttatttttttcttgaagatctcttaacatggtttcctgagaggtattcttcgctttcatttcttctgcaaaattctggctctgatttaaacactgtttgatgttcttgagttctgcctccaggtggcagacttctctggccttttgctcagagtgactcttaaggaggttgttttccttcttcatttcctccatgcttctcctcagctcattctccttgatctgactcgcctggaacgcctgttcagctctgcacaacttttgcttaaactcttccaaattgttttctagctgttgctttactgatgtgagtttatccagttcagcctgcangacgttgtgcatattctnggcttgctgtaactcctgngtgagtctggccttcatcttgatgca

SEQ ID NO: 332060 - DNA, 255 bp, Homo Sapiens
  misc_feature (19)..(19): n is a, c, g, or t
aaattttgccctggggccnagaattcggcacgagtttttttcaaagaagaaatacaatttatttcaaagaagatatacaaatggcccaaaaagcacatgaaaaggtgctcaaccatccattagcccactggggaaatgcaaattcaaaacccacattgaaaataccccacttccgtaccccaacaggatgactaaaataaaagagtcacaaatgctcataaagatgtggaaacagccaagtgtggtggctcacac

SEQ ID NO: 332061 - DNA, 556 bp, Homo Sapiens
  misc_feature (44)..(59): n is a, c, g, or t
tactggatttgtgattttatttttaagctactccctctcattcnnnnnnnnnnnnnnnngtctatctccataattagattcagagaaatgtcctttattgtttttttcttctgaagagaaccacatattgatcataacattttccatacatacgtaataacttacattttgggacagagggagttggtatggcccaccttggtccatcctaacattttccaatcaagtcaaatactatctttggattaattagctgttgatggaggtttgatagagggaatactgcatgatcttctcatgataagcctgacttctatatctggtagattatcctgcttagtctctaaacacccttcatcagtggctgctaaatgaagatcaaatcgaagagaaacagactttttcctcaatcgaggggttatctttaaagaaagaaccttcccattctttaataacttcatccactttctctgtctgaatagtgccatgagcttcagtgctctccttaacgatactcccatttaagattgcctgtttggttactgtttctacattt

SEQ ID NO: 332062 - DNA, 420 bp, Homo Sapiens
tcagaaataattgatctgtgaaacccaaactctcaatactcagaaagctgggaggcaacctcgaggcctgggcctacgagctgcatcttcgctacggaagggccagggcgccatcagccattcccaaaacacaaggcctgcccgtccgccagtgagtccttggtttttaataatgagaagtcctttcccccaaggtgtgagcattgcagcgcagtgtgtgtgtgtggttagagccagcttagtccttcactttgtcgaccgaagtgggagctcaacagctgcatgaggagggcagcgcgtgcattagccagtcgccactggagggctctgctgcctccggtcaatacactgtagttactgcctagccagcagcagtcttctgcatcaagaactgaaaccttgctcggaggtgatttttat

SEQ ID NO: 332063 - DNA, 620 bp, Homo Sapiens
tgtttttgctttgttcacttctattttttaaacacaacagtcccttttctcagcataggaaaagacgacttgccaactgctttttgaacctcagttcatgaaaaaaggagctgtttacgctgagtggtgggaatcagggaattcaaacagtgcatgggtggatcccataaaagacgcaatatctccaccctaaacgttttccgactagtttacactcaaatagaatgaggtgctatttgtctaggggaaagcataccagcccataaacgaaggttcgttaagtcccgtgggaagcaggaggatctatgagtatttgtttctatcccagacaatccgagcagagccataacattgtcaaatccaagaggcctgtgacttttcagcagaaccgatgccaaaaaggcggtggccactctgcagatgttagctccacatgcctggtgcagcaaattcacagggcaagcctgacctcacttgttaataaccatgaccacaatgccaatttcctctggggtttatgattagaccttctataatcatgtgaacaagtcttaaaacacaggcatgcccaaagtaacccataacacaatgtcagaacaacagagagagctcctgtaatg

SEQ ID NO: 332064 - DNA, 235 bp, Homo Sapiens
ttgaaaagcagataaggatactttttgctcacacccaggaaaagaaacaaaacaagagacaaaactaagttaaaaatatcttccagacatagtgttcattcttgccttaggaacggtaagaaaggcccaaaatgtccagaagaagctgcagaggacagtgtagcccccggtgggaggggaaactgaaaaataattattagcaaatccaaagatcttgccacatatagtttgtact

SEQ ID NO: 332065 - DNA, 674 bp, Homo Sapiens
ttttttttaaagtgacacaaaagttttatgatcagtaacactccatgtctccagaattatatccctaggaggtggaatgccaaaaaacatttctgttttgaacaccatgatacacagcagaaggaggggggaaaaacacgtagatattgcccttcggcttaaaatccagtcctgctcaaatgacatcacttaaaatacccttgatggagctcaaagctggtcctttcttccaagatgggatgcctggaacaatgattccttcccaataatcctagtgcagtgtcatttgtacagtggttttccttaagaggtcctggtgcagagatgtcagcagtatttctgatcaggacccataggcatgccagacatgggcatggggttcatgttcattttcccatgtgaccactgctgccattcatgtgcaccatactatacactgcaggattcccctggtgggcaaactgctgctgggaaaaggagctgttcctggccaaatttcctgatggccagcccttcatttctgaggactgatagatggatgcagcctgcgggtgttgcatcatgggattctgggagggacccattcttgacgacatcattgcattgggaggactagacactcgaccaaaggctggatctggttgttgtcccattccataatttggttgatatgg

SEQ ID NO: 332066 - DNA, 505 bp, Homo Sapiens
  misc_feature (32)..(32): n is a, c, g, or t
  misc_feature (55)..(341): n is a, c, g, or t
ttagggtgtgtgtgtgtgccataggctcaggnaatagattccatgccaattatgnnnnnnnnnnnnnnnnnnnnnnnnnnnnnnnnnnnnnnnnnnnnnnnnnnnnnnnnnnnnnnnnnnnnnnnnnnnnnnnnnnnnnnnnnnnnnnnnnnnnnnnnnnnnnnnnnnnnnnnnnnnnnnnnnnnnnnnnnnnnnnnnnnnnnnnnnnnnnnnnnnnnnnnnnnnnnnnnnnnnnnnnnnnnnnnnnnnnnnnnnnnnnnnnnnnnnnnnnnnnnnnnnnnnnnnnnnnnnnnnnnnnnnnnnnnnnnnnnnnnnnnnnnnnnnnnnnnnnnnnnnnnnnntagtagggcttaccacttcaaaggaacaaataggaaaagataacttattttgttagcttaacgttttaaattcaagttaatcatgaaagcttttttcctctgtaaccagagtgcgctttcatgctatctggactcacttgaataggacttacagagtatgttct

SEQ ID NO: 332067 - DNA, 458 bp, Homo Sapiens
  misc_feature (369)..(369): n is a, c, g, or t
  misc_feature (406)..(406): n is a, c, g, or t
  misc_feature (425)..(425): n is a, c, g, or t
gatcaaacccaggtttctgtgacactacagcgtactcttcacacctcaccaagctgcccctcacaagagagtaggtgtgatgcctgggctgatgaaatggcagcttaggacgtaaagtgaccatttcaaaggcagcaaaactgcgatttcatctttgacgttaataaaacggcaacaagaagccatctcagtaaatctcgtacaaagaaactctccagaatctaatgggcatcaagatcctcgatcaggaatataaccccgattgtcttgtttctatagagaaatcaggatttcatttcaggtattttatttcagtttacagttctttcttcaagggacttgaataacttaccaaataggccgtgtttnttactatggaaggtacatcagctatctcttggaggtnttttattttgtatgtaggngtttaaattggggtttgtaggtatttggattac

SEQ ID NO: 332068 - DNA, 468 bp, Homo Sapiens
  misc_feature (352)..(352): n is a, c, g, or t
  misc_feature (364)..(364): n is a, c, g, or t
  misc_feature (427)..(427): n is a, c, g, or t
gggtacatcattacataaatgcaagaacatcctgtttcaaatgatgacccagaaaaccacactgatggcagtgatggccagccctgaggtcttgtccccgccaccatgtcgagagttttagtggaatcactccgtgaaggtgctgttcagataaagccaaaaaccacgccaacaaacgtttcctgagtgctgctttgagcaaggtgcaagctaggttcagagaggggagggcacgagagccgtatttatctcaccctgggagctgcttaaatctggcaaagcaaggacacaaggaaaatcatggacgttacatgtcttattacaaggtttaggaaagcttccagacggagantagttaggagcntgttcattgttcctttcgggcagggtgttgttaggcctgttcttgttgctttcttttcccttnttccagttaaaaacggggggaccaaatttgttacttcacct

SEQ ID NO: 332069 - DNA, 492 bp, Homo Sapiens
  misc_feature (386)..(386): n is a, c, g, or t
  misc_feature (415)..(415): n is a, c, g, or t
  misc_feature (457)..(457): n is a, c, g, or t
  misc_feature (470)..(470): n is a, c, g, or t
ttgccaagaaaagacctcaccaaaaggtgtcgagaaccctgctgtacaagagagtaaccaaaaaatgttaggtcctcctttggagtggctgaaaacgttagcctctaaaagaaatgctgttgcttttcgaagttttaacagtcatattaatgcatccaataactcagaaccatccagaatgaacatgacttctttagatgcaatggatatttcgtgtgcctacagtggttcatatcccatggctataacccctactcaaaaaagaagatcctgtatgccacatcagaccccaaatcagatcaagtcgggaactccataccgaactccgaaggagtgtgaggaagaggggtgggcccccgtttggatgatggggcgaattctagggnaccccaggactaccttggcacctggaggntgtttactagggcaggggcccatgggtcctgcgggttaggantgggtgggggcantggggagttttgctttgttttg

SEQ ID NO: 332070 - DNA, 355 bp, Homo Sapiens
  misc_feature (225)..(225): n is a, c, g, or t
aaggtccttcttccatcctggccgagttgctcctagcacgttaggaactgcatgtcaccttcatttatgttccctgggcaccttgttcagcgccctggatccgccaataagtatcagggacctggatgtccgtgggcccaggaggtaaagatcacctgtgccattcaccaagcacctaacaagagcccacgctctcagcgcatgtcactggaaagccctcccggnccgcaaggcaggcagtgacctccattacacagcccgagtggggagacctgagaaggttaattggcctcctcaggcacacacattccagcacgagtctcatccagacgtggctcttacacctggcagcact

SEQ ID NO: 332071 - DNA, 433 bp, Homo Sapiens
  misc_feature (384)..(384): n is a, c, g, or t
  misc_feature (413)..(413): n is a, c, g, or t
ttcggcacggtggctgaggaccgtgtggactttatggaacgcagccccaacatctcctggctctttcactgccgcattgtctctcttatgttcctcctgggcatcctggacttcctcttcgtcagccacgcctatcacagcatcctgacccgtggggcctctgtgcagctggtgtttggctttgagtatgccatcctgatgacgatggtgctcaccatcttcatcaagtatgtgctgcactccgtgggacctccagagtgagaacccctgggacaacaaggctgtgtacatgctcttacacagagctgtttacaggctttcatcaaggttctgctgtaacatgggcctttcatggaccattcatggattcaagggtggcacacntttccccccccctaaggattggtaacccntttcctttttcttaaccctg

SEQ ID NO: 332072 - DNA, 319 bp, Homo Sapiens
  misc_feature (221)..(242): n is a, c, g, or t
ttttttcacattcttatccaatctgatagcaaaaactcttggctttaccttcaaaatatatctagaatcttattgcttcttaccacctccactgtgctactaccttaatctaaaagccactatcttctcttacttgtacttttttactagactctgtttcctctgttaacgtctttgctttattacagtctcctttcaacatagtaggcctgagtgacccnnnnnnnnnnnnnnnnnnnnnngccagacagaggtcttgctctgtcggtctagggccgaggattgtgtcactggcactctagccggggggtgacaggag

SEQ ID NO: 332073 - DNA, 403 bp, Homo Sapiens
actgtcctagcaaaaccaaacaatcactatcttttcacacagctgacactttcccaccatttgccatctcatcgctggagggcacagaaaaacgacactcaaaatgcttgtgcttttgaggctctgctatatacactaagtgaactactggcttccagttgggaatggagggctgaggacaccctaattcagtgtttccgcagctagcactcttcagccttccctgacgttccccttacctgagctgggggatgaagagcagggtgacagtgggagtaagtacagaattcctcaagccttggtagccttagagaaatgctctgggcttatactgaggctcatctaccctaaaggccatctctcaggaaaacagagctgttgtatcataaagcttttcaggggg

SEQ ID NO: 332074 - DNA, 702 bp, Homo Sapiens
  misc_feature (45)..(62): n is a, c, g, or t
  misc_feature (106)..(106): n is a, c, g, or t
  misc_feature (242)..(242): n is a, c, g, or t
  misc_feature (539)..(539): n is a, c, g, or t
  misc_feature (550)..(550): n is a, c, g, or t
aaatccccaaaggatcttgcccccaacatatggtttgttaccctnnnnnnnnnnnnnnnnnnttactttttccaaaagtgaatggccaaagtccaaaacaaaaaanagaaacatatataaaaatgccaaactgatggagtaaacatggaggtatgaaataaaagtgccttaagagagagcatcctccctccccttggtctgggcattgcctagatactggaagcccagagtgaatggtaacnacagtttttctaagaaaaccttctaggaaatgcgagtctcaagttagattttgaaagagggggaaaacatggcctggcagcaggaggagctacagtatttccgttggtactgtctgtcttcagggccactgacccccaagtccttgactgtctcactatagaatgaggccagcacataccaccagacacacagattcctatggcatgggtgagagacaaacagggacaatacattgctcaccttgggatactgacgggtgacatacttcagcaagatgcagcccagtaaccactccnagtctagctgnaagccgctggagcagcaggccctacaagggtggccaacagaaggatccagagcaactaagaagaacaaaatctcctgtaacactcattaacaactgagtttttgtctgtttgtttgtttagttgtttggaacatagtggtaatctgcattca

SEQ ID NO: 332075 - DNA, 520 bp, Homo Sapiens
  misc_feature (36)..(36): n is a, c, g, or t
  misc_feature (435)..(435): n is a, c, g, or t
  misc_feature (448)..(448): n is a, c, g, or t
  misc_feature (507)..(507): n is a, c, g, or t
agtaaagttcttttattcggatttaacctaaaatangttcgcttgatctctctttgatagagaaatgaaatctccagttctatagactataatggaaaagtattgaatttgcatatttccaataaaagatatttgcttcatgctttgggcatctatcatagttgcccaaaagactatgtccagtaaacataactgtcacagtactgaagcgcaaacttacaaaattgtctttgtgttaccacaacacacacagtctttaggtcagctgactattcatgttgtttggaaaggcatggaaaatacagggtttttaggcatggcacacccagttggggaaagggacttgctcctccggggaaacacccattcattcgctttgggcaggagctggaggaggcaccctggtgccatggtggaaccaggcgggtggggggnatctcactggggnttctggcaggtccatcactttccttggtgggggaaggtttttggtacccgccggggggnagagtccgggggg

SEQ ID NO: 332076 - DNA, 404 bp, Homo Sapiens
ttaaaaaagaaagtgagaactttatttcccgtgtactgaactgccaacaaaactgagaggtagatattatccccattttaagccgagacaaacaagacagataccataagacaggatcagaacacagatctgtctgattcccaaagcttttgttctctctaatacatgagaagaaagacaggcacattaatggtcacatgcagaagcggttaatggagttcacagacaagaaaggaaggaaagagagcaaggaggaaaatgaacatcaaaaaataggggaggttgggaataccttgacagggtcaaagcagaggaggaaaggacaagactttacttaaggcaaggactttaggttgcacaattagggaaaattgccaaggggaggggaggatttttggggtgac

SEQ ID NO: 332077 - DNA, 373 bp, Homo Sapiens
  misc_feature (19)..(19): n is a, c, g, or t
  misc_feature (351)..(351): n is a, c, g, or t
  misc_feature (363)..(363): n is a, c, g, or t
tttgatttattcccaagtncttgttttgacctatctgtagcatgagccaatttaatccttttttttcatccttcaagtactttcttcatttggcttttaagatactattctctcttgatttttctcctacctcaccagcaactttgatagttcctccttatgtccctgatggctaaatgttgtgtttcaggattcagtctttagaccttttctctgtctgcacccaccctcttgggggatctcatccagttttatgggctttaaataggcatctaaagggcgtacaaggtttcaaatttatttctatctcggacttctttccttgaaattctgttgcatgtagccaactgngtaactggcggnatctacttgg

SEQ ID NO: 332078 - DNA, 419 bp, Homo Sapiens
  misc_feature (190)..(190): n is a, c, g, or t
  misc_feature (193)..(242): n is a, c, g, or t
  misc_feature (248)..(248): n is a, c, g, or t
  misc_feature (260)..(260): n is a, c, g, or t
  misc_feature (268)..(268): n is a, c, g, or t
  misc_feature (307)..(307): n is a, c, g, or t
  misc_feature (314)..(314): n is a, c, g, or t
  misc_feature (377)..(377): n is a, c, g, or t
  misc_feature (382)..(382): n is a, c, g, or t
  misc_feature (391)..(391): n is a, c, g, or t
ttttttggtttggaattcgttcttctcttttgttaaaagggggaaaggaagtggatgcgggtacccccaggtgcaggggaggcatgcaggcagccccagcaggcaggcgctgggaggcggtgggaagagtcctggagtttcccacaatccttttctctgcaaggaacagcaacgtggcttgacgaggggntgnnnnnnnnnnnnnnnnnnnnnnnnnnnnnnnnnnnnnnnnnnnnnnnnnntcacantaacatgcaaantccagctnccccagggaactaggttgcttcttgaagagcgacacacntaggaantacacagacacggccacgcgcacacattcgggagaggctcttcatttccctaagggttggggntcgangccttccgnccccccaaaggagcttcccaagccaggg

SEQ ID NO: 332079 - DNA, 198 bp, Homo Sapiens
aaactttctaatccaacataaaactcttgacattcctatcgcttcaagtcaaacacttcaaatttcttgtagacttttcttagaaaagcaactaagttgttacttggatatctttttgaacaagcatgatagataaatcatgatatgggggcttaaaaggaagccctttaggataaccaacttacattataatctatg

SEQ ID NO: 332080 - DNA, 591 bp, Homo Sapiens
acaggcatgagccactgtgcctgggtctatatctctccatttctttatgatcagtttcttaagatttattttgttcccttttgtgtcatatttctctgtttcttcgtgttctttgtagctttgcattggtatctatacatttgaagaaatagccacctcttcctgtcttcccagactggcttttacaatcagcccagatagagattctggggaccttcaattctactctgtgaaagtatcttctctgtatttgtgcatgtagattcctaattagagggatttcctggtttctgtttttcaggaactggcaatctcttgctttctgtggtatctgtctgccataccatgagtcctctgatgcagcagcttaacacccagctgtctttgttctcagtagttctgaggcatctagagtgcgtgtggggtcctactggcataatggttgggctagaaaaaaactaatttcttgggcagctccctggaaaatcagtatatcagacacatactgagctcctttccctcctgagggagaaatctcaagttgtgcatattcttttcattgcactgagctgtgtgagtcacagctttcct

SEQ ID NO: 332081 - DNA, 501 bp, Homo Sapiens
  misc_feature (64)..(64): n is a, c, g, or t
  misc_feature (176)..(176): n is a, c, g, or t
gaaaaacgtgtgaatccccccgtgaggctggaaaggaagaaattgggaaatactgtaagcctcnaggtgaaaggcatgcccaaggaactgccccagattaccctgaaagcctaggatgggaggcatgcaaataggttccatccccctagaaccctcggagggagcacagtccctcngacgcccttgattgcagagtttcccttcctcccagaactatgagaggataaatttgttgtgtcaagccacctgttttgtggtacttggttatggcagccctagcaacctattacaggggccaacatgtcagttctcaaatttcccccttttgtttgcccacaggacattatagcttcagcttgcgaatcaggaaatgtaatttcactcacttccatagtgccatcaagagaatgataaaatactgtgtgtttgttcatgtggtatgcccataccaattcagtggtcactgttcttaactgaacttaggtgtctttgggagaccaa

SEQ ID NO: 332082 - DNA, 444 bp, Homo Sapiens
  misc_feature (31)..(31): n is a, c, g, or t
  misc_feature (40)..(40): n is a, c, g, or t
  misc_feature (78)..(78): n is a, c, g, or t
  misc_feature (84)..(84): n is a, c, g, or t
ctgcaggacctaggaagcatccctaacaaantccttgganttggagctcctcaggttgcccaaaaactgatgctgaanatcccnctgcatttttccccagccttgggccgctttttccctgtaatgatgagttctcccagcttaagatcttcctatcctcactggctgttaacgctttatagctttcaaattgagcagtaacatcttcaaggctttgcaccatactgtcatactttttctgcaaaagcagggtggcctgggtatgagcagcactacttttctccagttcagcctccttccctttcagcttttcttctaggagttttaattcttcagctctagattttgcttcctcttccaattgcttgaccagcctttcagcttgttcctccttttgctgtaatttatcaagctcatccagtgtttgctttaattcccctcaaa

SEQ ID NO: 332083 - DNA, 469 bp, Homo Sapiens
gccctatagcaagcacttactgaatgttaagctataatcacttaaaacagacacaggtttggaaaaggacaatttctaagtttaggccagtgatactgacggtgtatttaggggtttctaataattggttactcatagtcattcacggagcctctgcctttctagtctcccactatagaggctgaaacatcgcagtcacttttccagcctcccctgtagccatgtgacccatttatggccaatagactagagagggggcgttgaggaggacctctctttgcaggcctctcccgtccccagcgttggaacacaggtgtgaacttggtgcttgccgcagctgctactgtcatctccccaccttgaggggaggaccaagagagttaccaactgtggcccggatccctgaccttgtacaaccagtgaagcaaagcacaaagccatctgcccccagaattcacgttatgtggaa

SEQ ID NO: 332084 - DNA, 490 bp, Homo Sapiens
  misc_feature (16)..(16): n is a, c, g, or t
  misc_feature (22)..(22): n is a, c, g, or t
  misc_feature (96)..(96): n is a, c, g, or t
actgaaggttaattanaacccnagaaagagtgatggaagtataaagacaacgtcttttccaaaatagactttgccaaagactttcctgcccttttncaagtggtaaaaaggcctaaagcagtggtttggcctgctttgcccctctgtgggttacagaaaggcctttgccttataaatcccatggagctgaaggtcacatgaagggcttgcctgcactagcttatttactctaggatcagaatcaagacctcagttaatctcagttacactagtgtggcatatttcccacctccacccatatccacccactagttctggccccagattgtctctgagctgccctgcccactggtcagaacagattggcaaatgatcattccttaggacagccctggcttgtacaacaggcaggaatgaggtcagaagaaaggctattgtccccatatccttggtagatggaggcttatgttaccttctcatgttgctttaa

SEQ ID NO: 332085 - DNA, 490 bp, Homo Sapiens
  misc_feature (19)..(19): n is a, c, g, or t
  misc_feature (31)..(31): n is a, c, g, or t
  misc_feature (47)..(47): n is a, c, g, or t
  misc_feature (60)..(60): n is a, c, g, or t
ggggacaaaaacccttccnctgaccctcaancccgccctgttgtaanaaccccgggctgnccctaaggaaatggatcaattgcccaaactgttcctgaacccagtgggcagggcccagcttcagagacaatctggggcccagaactagtgggtggatatgggtggaggtgggaaatatgcccacactagtgtaactgagattaactgaggtcttgattctgatcctagagtaaataagctagtgccagcaagcccttcatgtgaccttcagctccatggatttataagcaaaggcctttctgtaacccacagaggcaaagccagcaaaccactgcttagcctttaccactgaaaaggcagaaagtcttgcaaagtctatttgaaaagacgttgtctttatactccatcactctttctggattataataaccttcagttctcaccgaatattctgtactcttttttccccccaggcagcataactacaagc

SEQ ID NO: 332086 - DNA, 404 bp, Homo Sapiens
cagtgccccaaaaaggggatcccaagatgaatttcccccaacccaaagagaagcacagcccttccatcctgtaaggaaaaattgggactgatgtggatcaagtcctcctcacttgcccaggaattgaagctgggtccagggttgggctgcacttcctagtaaggctcagtcccaagccttagtaaggctcatcctcaaggatggttccttgacggtgaccatcctaggcttttaatttaggatctggagtatctgtctttttggcccacaaacactacaaaagactacagatgaagttcagttttatctttgcaaactagaagcgtactctttagctttcttgcccatgcaacttgggcaggaaacatgacatgggagactagttatgtgtttgttgcaagccc

SEQ ID NO: 332087 - DNA, 599 bp, Homo Sapiens
  misc_feature (89)..(89): n is a, c, g, or t
  misc_feature (94)..(94): n is a, c, g, or t
  misc_feature (304)..(304): n is a, c, g, or t
  misc_feature (340)..(340): n is a, c, g, or t
  misc_feature (466)..(467): n is a, c, g, or t
  misc_feature (478)..(536): n is a, c, g, or t
ggcacgagctgacggcataaaagggcagaaccatagcagggtgcggctaagttggggaagagtttttggagagggtgaattttgcattngaccngacagaattgtgtatggggaaggggagcggttattctggtctgctcacatctctcatactcaacctcatttctcctaattctgaaatcttgagatcctctatcactaagaaggaaaactactgtccaacagggacactttattgctcaccccatatgtgaaagtttgtcatagctaaggctagggtgcttttggtcagtatcagcagcantatatgccccctttcttttgtcagcattacttccgntttacaaagcccttccatgtagatgacctcatctgagcttcctaacaaaggagctggtattagaccccattttacagtgtgcctgggtagggaagagagtgtagtggattgagcagaggccttggnnccagacactgnnnnnnnnnnnnnnnnnnnnnnnnnnnnnnnnnnnnnnnnnnnnnnnnnnnnnnnnnnnggaaggagtctgtataaagcaaggggaaggggattgggtcataggaagtgggtaactgtgttt

SEQ ID NO: 332088 - DNA, 481 bp, Homo Sapiens
aaagaataataaataaattccactatttcaataacccaagggccaaaaacccttggttctgcaaaccagaacttccccagcacctaagtgcccagtcctcggcctcctacccccactaaccagcctgtgtgaccttgggccccagtttccctaatgtgtaaagtggggttaaattaatggtagataccttaaaacctttaaaatggggtacaggtatgttacctgaaacagtgctttgcctcatatcagcatcccagcgaatgttagctaccattatgccttcagtaccatgtagttaactgttgctaattactttgaggcacatggcaagattctgaaattgccttctgaatggtgaaagagaattttgtgtggtttttatgggtactgtaagcctagaaagtcaatgaaaatttgggcttcacccttatcccaccactgattctggataattttggataagagtttatttctgttatct

SEQ ID NO: 332089 - DNA, 854 bp, Homo Sapiens
  misc_feature (659)..(769): n is a, c, g, or t
acgaattgggacctcacatgcttgccctttaccctgagcagggttaccttggacccctccctagggcgcagcagtcctttcaagccctaatccggcggcccttaagcagggcacgaactcctgaagaccactacggatgttaaaaccctgctgaagcacagctttgttcacactaccagtatactccgagaggatctagaaccagacacattcatttaaaattgtctcataaagttctaattatgctaaaataaactcctattctatgtaaatgtataaagtagcaactacataggacagaaactgaatctgcctgttctcacttataagtggggctaaatgatgagaacacatggacacagaggggaacatcacatactggggccttttggagggtggacgggtgggaggaggaagaggatcaggaaaaataactaataggtactaggcttaatacctaagtgatgaaataacctgcacaacaaacccccatgaccaagtttacctatgtaacaaacctgcacttgtaccactgaacttcaataaaagtttaaaaaatgttataaagtaataattgaaataactttaagttgtctaagtagagattgtttattggctcttcagaagtgtataaccaattactcttttttgaaaaaatnnnnnnnnnnnnnnnnnnnnnnnnnnnnnnnnnnnnnnnnnnnnnnnnnnnnnnnnnnnnnnnnnnnnnnnnnnnnnnnnnnnnnnnnnnnnnnnnnnnnnnnnnnnnnnncgagacagggtctcaaagtgctgagattataccatgcctggcctaaataataaattattcttaactggtatatattttatttcta

SEQ ID NO: 332090 - DNA, 441 bp, Homo Sapiens
  misc_feature (28)..(28): n is a, c, g, or t
  misc_feature (63)..(63): n is a, c, g, or t
caaaagtgaaattgaacttctggtgcantttcttgtccccgttgaaagggtaaagtacttcanctgtgcagttcaccttaacttgtttttgtaataatttcttcaaacagcaaaatttaaggcgaatacttatgtccctccttccctggaaatatcctcccatgctggcttgtttgaccttctgcacctcaaacaccctgtgcggggtcccctgctggtagttgatgtagttctgtgccaccaaggccgccctggaggctgggtagttggtcggcgggatttccattccggatgagcagtgacttcagggcttgggctactctggcttaacgggaccagtagcagagcgccgcccgtcctgcttgctgctgggtccggttgccgaggcggaataatcgcaagctccttcagtctgtcttcttcctcagctccttccgactc

SEQ ID NO: 332091 - DNA, 517 bp, Homo Sapiens
  misc_feature (206)..(206): n is a, c, g, or t
  misc_feature (401)..(401): n is a, c, g, or t
aaatctgtaatactttggctaaaattcataaagtaagccctagaggaaatacttgaccaccaaatttttgcccaactatcatcacctcccttcccccgcctctgttcttgccttttgacatctacatggaagacaagttctttacagcaaatggtaagaggcaggtgacctggtgtgtttgctgtgttgtagttcattgcctgggnttggggactccttttttaatggagagactgagctgtgcaggtgtgtgttggatagggataaagtgctcacccctgccctctctacagtagttggtggtagatttctctctcattttgcctcataaatcactttcgagtgcatgtatttacctaagggctgtagctctgtggggatgctaaccagcatattgggantgacagaaatttgattaccttgccactccaacctacgtaactgagtgagtgctccagccactcagtgaaaaccaacaaaagtggagtccttgggttttaccttccaatctggggtc

SEQ ID NO: 332092 - DNA, 571 bp, Homo Sapiens
  misc_feature (53)..(53): n is a, c, g, or t
  misc_feature (227)..(227): n is a, c, g, or t
  misc_feature (314)..(314): n is a, c, g, or t
  misc_feature (365)..(365): n is a, c, g, or t
  misc_feature (396)..(396): n is a, c, g, or t
tttgtgagatttccatttcttccatagcatttattcacatggttgccaagtgnctttgcatatcaattttctattgccatataacaaaccactaccaacttagaggctaaaaaacaacatttatttaaaatttttcagttctgtaggtcagaagtttaggtggagctgactgggttctctgcttggggtctgatctctcaaggccaaaatcaaggtgccagccaggntggggttcttgtctggaaaagaatctgcttacaggctcgtttggttgttggcagaattcagttcccttaaggtataggactgagggncccgtttctgatgggttgttaaccacaagcctctcttagctcaagaccctntcacatttcttctcacatggccccgtccatntttcaagccagccaaccgggaaaagtccttctcatctttcaaattgctctgacttgcagttctgctttgagcccgagaaaacttttatgtttttaaaacagctcatgtaattagaataggcacacctaggtctccttttttaaactaaagtcaaatgattagtaactttaattac

SEQ ID NO: 332093 - DNA, 522 bp, Homo Sapiens
  misc_feature (441)..(441): n is a, c, g, or t
tcccatcttttcccccttttacacttcactccaatcacactgacttgcttactgatgcttgaacaaaagtcaagcttcatcccacttctgggcctttgcacatgtgctccctccaactgaaaagctcttccaccagacctctgcgtgtcacttcactcaggcttctgcttaaatgtcttttggaaagtctccctgggctccctatgtacaattgtctctcaaccccggattcccttgtccccaggcatgctctctggaccctttgttctgctgtaattttgttcacaggcacctgggtgcatttttatctgtttatttaggcttactggccccccaactattaggaatcttttctttttcaactgtgggttttatattcagtgaaatacaggggatttcaaatgtccaattcaatggcattttggataaccatatatacanattttaacctaaccccatttaaaacggaaatgttcatcaccccgggaaggggttcacaagggacattattttttggggcac

SEQ ID NO: 332094 - DNA, 524 bp, Homo Sapiens
  misc_feature (406)..(406): n is a, c, g, or t
gtgaagtgactccaggacggacctgcgggggcaccagaggtcctaagccccaggactgagggtcgtgcatcaccactcgggtgtcccgggaggtgcccctgggcccggggacctcacaggcaggacggcgacactaatgcagggagagggagtctggccccagcttttcctatcagaggcgattttccttcacccaggggatgggcaggaaagaggcaggggccccagaagcttctgtccctcatcctgagggcacgggggacacttggaggctgctgtcaccactgtgcgtccaaggccatgctctctgcgggtcagtgcctgagtctcgcctccctgctggtccctgaagccccctcagaagccctgcctgtcacgtcggcatttgtgagacctaccctgtaangcctgcccctctcagcccaacatcagcttcctctttctcccttgctgtagacaggctggattccagtgttgggacagtcatctccagaaacctgacttaagagagtaagatgcaaaaa

SEQ ID NO: 332095 - DNA, 446 bp, Homo Sapiens
  misc_feature (419)..(419): n is a, c, g, or t
  misc_feature (431)..(431): n is a, c, g, or t
gctgaatgaaatccagaagaattagttgaagctgctgaagaggaaggaaaatgggatgcttgttctaggaggtagaagcagaatgtgcaaagccttaaagctctacattggaagaaatccagataggttagtatagctaaggcttgtggtattcccagtgagcattacagagcctaacattagattttcagcaaatactgaataaataaataaataactgatgtaagggaaggagttttttaagagtaggaagtctgggaaagcagacacatagcagtcacatgcagcctacccttgtgtctagagcaccagaattctagtcaagaaggtacagcaaattcaggtctctacagacttgaccagtttgttcatccgggtgtatggtttctttctgaggtacatagataacccacccgggngtttagttaacntataattaaagtact

SEQ ID NO: 332096 - DNA, 416 bp, Homo Sapiens
  misc_feature (15)..(15): n is a, c, g, or t
  misc_feature (283)..(283): n is a, c, g, or t
agagtaggtgatttnccctaaaatcggggggaggaccaaaccagggaatttttataaaatggtaatatttgccgggtatttaaggtatacctttgggtggtatccttggctggcgttcagagactgttgaaatcatcttgattgtgaaaagtcgctaaatggagctgttaaagtttgcgtcgcaaattacatttagctgcaaagtattggttcagtctaggcctcctgaatgataacacctattatatagatgttctctgtccacatcccacctgaggaaaanaaaatcacatcaggtttgaagttcagttgaggcaaattttatattagtaatatcgttcattattgagagagatctcggctgctgacctgcgtatgaagcacttgccccatggaacgtttgtgcaagccaagtc

SEQ ID NO: 332097 - DNA, 476 bp, Homo Sapiens
  misc_feature (300)..(300): n is a, c, g, or t
  misc_feature (389)..(389): n is a, c, g, or t
  misc_feature (437)..(437): n is a, c, g, or t
tttttttagcggggttttatttgtttatttcctcaaaagcagggatcaggagttgcttgggagaggggcagttgggagctgctgggggctgagccaggggtcacctgtcccctgacccctttccagtctagggctaaaaatgacctgaaatcgtctggtgtgccttggacatggccaatttcaaccacagtgcttgccccccatgtgccaagaaacccggttttcccagcacctcctcctgccctactcttcagtattaattggggtgtgctggggagaaggggatattccacatcacanctcccactctctgcagccagggggaaacggatcctaggcacccagtttccaggggccttgaaatctagtgtgttccaatcagggtgcanttgatggggggccgcttctacagctcaggggggcttcagatgggggangggacctcagggttacaagattgggcagggttacctttt

SEQ ID NO: 332098 - DNA, 675 bp, Homo Sapiens
  misc_feature (218)..(218): n is a, c, g, or t
  misc_feature (400)..(400): n is a, c, g, or t
  misc_feature (471)..(471): n is a, c, g, or t
  misc_feature (498)..(498): n is a, c, g, or t
  misc_feature (508)..(508): n is a, c, g, or t
  misc_feature (534)..(534): n is a, c, g, or t
  misc_feature (575)..(575): n is a, c, g, or t
  misc_feature (588)..(588): n is a, c, g, or t
  misc_feature (638)..(638): n is a, c, g, or t
  misc_feature (647)..(647): n is a, c, g, or t
cactttaaaaaaggaatattttctttccaaaggagagggtaagattaaattacttctgttttttaagttatttcatggctttaaaaattgttagggtttaatggaaaagaaaataatgatataatcaagttaaatgtcatttttaaacaaatctgatacctgaatagtaaataactattctgatatcttttaagcagaaaataattacaaatatctcntcctgtttccagtataacaaataagtacaaacacatacttaactgcacaactgcagtttgtactgttagcatttgggttaaggggaacctacatttcccaggaatccttttctatacatgattctaggctacagctagaggaattcaagaggtattcacttgagattgggaaggaggagctncagcagcagcactctctctcaagtcattatcctcttcgtggttagaggtgacagacacaaatgctgcaggnccagcgtgcctaacacacctctctctnttgtccaggntccctcacaaatattagcctattggnaacaagctccggcccaccaccagatcgtggaggagacaagnagtgcattcaagnaatagtccttattaccaaggtatgtttagaagctataataatgcagtacnatgagtagnacctcctcacacggtagcttcagtgtgt

SEQ ID NO: 332099 - DNA, 384 bp, Homo Sapiens
gaatgcttcttcatgagatttgtctctccagtggtttctaagttttttcaagacagagatattgtagatattgtcttattcatctttgtatgttttggagtctaacacttactttattcaacaaacatttgtggactttatgaatagcacaaaaatggtgctaaatcccttggcatcagcacagccctgccttgaaggagctcacaggacaggtggcagcaggacaggtcaacacagaaaacatcagcatgagattagagagtgtggcttctggccaaggatagagtcacagggattgaatctatcccctcccacccgaggcggcagcaaccacaaacccaaaaaacaatgacataaacaacagtttccagacgctggaattgg

SEQ ID NO: 332100 - DNA, 354 bp, Homo Sapiens
  misc_feature (232)..(232): n is a, c, g, or t
  misc_feature (253)..(253): n is a, c, g, or t
  misc_feature (303)..(303): n is a, c, g, or t
  misc_feature (314)..(314): n is a, c, g, or t
  misc_feature (327)..(327): n is a, c, g, or t
ttgaacttctaggcaccatttggattcggttttagtgtatgggttggagaactgtagctgtttcttgacctgcctcttaatggtagagatgtagaagggcaagcaagaccacaaggagaccggctgtaggctgtagggcactgttggagggctttgtggtttcggctgcagtagcttccggcatactggttaaaggaacaaatgaagaaacctgcacgggtagggagcagcnccagaagtagcagacccagantgagcatcgccacccatccccttacccatttgggatccagtgtgcccgtntgtccagcttnctgcttcagtgtncttggaggatggggtggctcctgggct

SEQ ID NO: 332101 - DNA, 470 bp, Homo Sapiens
  misc_feature (21)..(21): n is a, c, g, or t
ggaccctaggtggtgagctanccccaaagttcatcctcaacgtctttactgcactgtttagggtcagatacacatatatatacaactttgggtgagctcaggagtttataagctttatgggcttggtgttttgatttataaacaggagtttatagaactttatgggtttgcttcctctttctgccagttccttggtattttccagcccttagaactcctctttcgggtctgtgtcccaaaagctgtttctttagttaccctactctgttgaacagtttccacagctgtgtccatgtcctaggccacatggtgggaggacaggggaaggggaaagcaagggggttcgctcatgccctaagaactcgggttcctctgagtcgactcctctgttgtggacatctgtagcctcctgctgctgcattgcctctgacacttcaggattgtctggggtctgaaatctaagtgagaat

SEQ ID NO: 332102 - DNA, 393 bp, Homo Sapiens
  misc_feature (158)..(158): n is a, c, g, or t
  misc_feature (160)..(160): n is a, c, g, or t
  misc_feature (162)..(162): n is a, c, g, or t
  misc_feature (171)..(171): n is a, c, g, or t
  misc_feature (251)..(251): n is a, c, g, or t
  misc_feature (290)..(290): n is a, c, g, or t
  misc_feature (353)..(353): n is a, c, g, or t
gttacgccgtcaatgcagcaggcattgaggggaatgacacagccctctcattcccggaacgtagtcaatctcggctctgcggattttcacagaacacactttgcctattgccggctccaacaagaagtaactttccaggaagctgccggccccgcgcngncncaggatcgntgcctgcgctgcgctggccgccggggattcacccggggaggcggggccgttggggaaggctcgcggggaatacagcacantttcccctaaatccctcgtccgcgccgagtgcagggttntcagagttcacctagtcccacctttaacccacaacagtttataaatggggaaggtcagacaanttagtagcagagtggggtttagaacccgggatttcgaatg

SEQ ID NO: 332103 - DNA, 298 bp, Homo Sapiens
aaagaagagtagtgacacatgtcggacagctgccgtgttcagcacagtcccagaagcgcgccataatataatgaacttgttgttcctcacctcaaccctgagaggtggatttcagtgtgtctttggatggcaagacattaagagaagagtcctaacacacagcctcaggtgcttcctctctatggtgggtttcttctccaaaccaagactgcttccctggtgtgccataaaaccaccaggttggtcacagctcttttggggcatagtatgtaagggaaatttcacccatgtggtagcc

SEQ ID NO: 332104 - DNA, 457 bp, Homo Sapiens
ggttttgaaatagatatttatttaaaataggtttcacactgatttcaataaatcaggcactccagaacacaatgtatagggtggcaattatatgttgacttcttaatactccaagagataaagatcttttccaaataagcaaaaaaagtagtcattgtgcaatattagcctctaagagcaatttccctttatagactacaatattactgacagtttcatgcacttttgctttataaagaactccacaggaagaaatttccccagtctttcccggtagacacagctacattttctgtcacacacaaaccattgtcacagtacagcatgtccagatccaaagaatcaaggggtttcacaattgcttccccaatgtatgccatgaggttggtcagatttgaaaccattcccgtgacaggatcaatctttataattgtgcccctgccgtatggatggtttg

SEQ ID NO: 332105 - DNA, 371 bp, Homo Sapiens
  misc_feature (55)..(55): n is a, c, g, or t
  misc_feature (301)..(301): n is a, c, g, or t
tttttggtatatttatttatttatttatgacaggatctcattctgtcatccaggntggagtccaatgacacaatcatggctcactgcaaccttccactcctgggctcacaccatcctcccacttcagcctcccgagcagctgggaccacacgtgcacacaaccatgctcagctaatttttgtagagatgaggtttcaccacgttgcccaggcgggtctcgaactcctaggttcaggcgatctgcccgcctaaacctccccaaatgctgaggattacaggcatgagccacttacaccagggncccttcctttcttttaaatttctgagccaaaagaggaaacccaactttgttgaccctgcagcccacgggg

SEQ ID NO: 332106 - DNA, 443 bp, Homo Sapiens
  misc_feature (99)..(99): n is a, c, g, or t
  misc_feature (249)..(249): n is a, c, g, or t
  misc_feature (295)..(295): n is a, c, g, or t
  misc_feature (340)..(340): n is a, c, g, or t
  misc_feature (363)..(363): n is a, c, g, or t
  misc_feature (407)..(407): n is a, c, g, or t
tattttgtggttacttccgcagatccaaaacacacacagagccgtcggacgcgctggcacccactttgtctcctcgggcgttccagcacacctcgaagntgccgccagtgcctcggtagctgtggacaagatttccactctgagtattccagatatggacgcacttgtcgaaggatccactggccaagtacttccggtcagggctgaaagtacgctatagacaggctcctgatgcttcgtgagcgtttngggtgcagacgcctcgttcttatgtcccacagtcgcaccgtaggantcaaacgaagcacttgccaacatgatgttgggagtttggggttgntgggtgggcggggcccagtgggnttccactttgatgggtgtagatctctttattgtgagcctgaagntcatgttcatccgagcaggatgccaggcaacattcc

SEQ ID NO: 332107 - DNA, 190 bp, Homo Sapiens
tgagccactgtgcccagccacctacttcttccttctatggctaggtggtaagtaaggggaaggcaataagaaccactatgaaggaccttgaaggagtttctattaacatcttaaacctaaattttagtattttaacaaagcaggcactcctatataaggaaagccatgcccctctgcctctttgcggagg

SEQ ID NO: 332108 - DNA, 554 bp, Homo Sapiens
  misc_feature (442)..(442): n is a, c, g, or t
  misc_feature (463)..(463): n is a, c, g, or t
ttttaggagagagacggggtctcgctatgttgaccaacctgcttttgaaattcactgggataagaggcaaggtagagaggctccctcagagaaactataagtcatttgtctccctaccttccttccctctaggtgctgtgagaagccatctttccgacttcaaaaaacaccgagctgctagaattgaccactatgttgtggaagtcaataaactaataatcaggttagagaaggtaaattttgttgtcttaaaacatttttttctacaaatacacattttctggggaaaaataatcacatttctatagcctgtgttgtatatatcatatacatctgatggttggcagagaaacaccttctctagagaggtgcaaaggacatggtggacagttctagcctgggccagcattccttaagagaatggcccaggttgacaaacttngccacatggcttagcttcccnttttcccacctatgaatccccactcagggtgctgggaaaacctttcttccttcagattcttccttttggggtggtcccaggcacaatcatc

SEQ ID NO: 332109 - DNA, 901 bp, Homo Sapiens
  misc_feature (189)..(197): n is a, c, g, or t
  misc_feature (334)..(384): n is a, c, g, or t
tttaagtcactagccacaaacatttattgttggggtcaataccgtatatccttttgagaagtgtttcgagccattcatttgataactacaaacacgtcagaatctgttttactggtatatttttggcttgcatgacaagggaaaagagattattgcaaaattatgaatgaagtccaaaaggcctgattnnnnnnnnntctataaaatggaaggattaaacactgcccagccctactgtgtcaacaaagacggtacaattcaaatcaagaagacaatcccatacaagtccagcaaggcagatgttggcaagtagaagttaagcaatctgttatannnnnnnnnnnnnnnnnnnnnnnnnnnnnnnnnnnnnnnnnnnnnnnnnnnttagtcagaaaactattactacataaagccatataagaatgtgtattagttgtttcctttaaggggaaaaggaaatcaaactgttggttttctatttattcagaagaaaaaataaaggaaagtgtttggaaaatatttctgatattaagtgaattatttctcatctgctaccttagagtttacaaacaactgacttatccttgtcaatctgtggaaatgagaaaataaaatcagcgtctggccttcgtgggatactcataacaccctgaatgaggtccagagtaatcctagatcgggggatgtcaatgttgagtacttggacttccactctttctccggggcccagtccaaggcttcttctcttctttgtttttgaaagttttgcttctgttacatttcgtatgggaatcagcccagatttccccactcctatatccacaaaaattccaaagagagtggcattctcaactttgcctgtaagaactgtcccaatctgcagatcttccaggcatactat

SEQ ID NO: 332110 - DNA, 510 bp, Homo Sapiens
  misc_feature (337)..(337): n is a, c, g, or t
  misc_feature (421)..(421): n is a, c, g, or t
  misc_feature (449)..(449): n is a, c, g, or t
  misc_feature (496)..(496): n is a, c, g, or t
aggctaaattcttatgaatggaataattgaaccaaagatacagatacttgtagggagattcttttattttgctttttctatcagtttttcacaaggaacagagagattactcatgctaactcaaaaagaggttttgttctgagggatataattgtgggagctgggaacagggcctgggacagtcctcaggaaaccaaggcctaggaggattgggctgctctgcttttcttcaaggacaccagttgttctctggcctaggctctgggccacacacttcttacttggtacactgactgctagctcccctgaggtctactatattttatggctgcctccnggggccatgtggatggaacataggttactttacataaagggccatggtataaaaactggaccctttaggccttcagggggttgncttctctttcctcattcctaataggtgntggaatgtacccattacaggccactcggttacatggggaggtcgggncacatagggtggtg

SEQ ID NO: 332111 - DNA, 590 bp, Homo Sapiens
  misc_feature (314)..(314): n is a, c, g, or t
  misc_feature (369)..(369): n is a, c, g, or t
  misc_feature (448)..(448): n is a, c, g, or t
  misc_feature (515)..(515): n is a, c, g, or t
ttttttacacccccccagacgctttattgtttacaaaacagatggatcccataggagaggaacacaatcattatgctgacagcagcgaacagagaggggaagaaaaaaggtgagctttaaagtaatcgcaaatcactgcctatgcgaagaggctgcttccgggcacctgggctgtgactcaggtgctgacatgaatacatcagcaaggtctcaattcagccacagtcccaagtcccccaaccttcctgattgcatctctattttaaatgacccagcctgggacatcaagggacaatgatctagggagggcgggntcaagggaggacagccaggggcaaagttcaggaacaggacttggggggctttccngggggttatgccccgggtgacagcttgagcttctttcaggaaatgcgttcacatttcaggcgtttcactttcctttcgntttccctccacttaccttttgacataggcgggggggaaaggaggacaaccatgaggagaggggggtnccttccttcggttgcccttcttcggcagcttgtgcttttgaggttttcaagggggggagagggttttttaggggg

SEQ ID NO: 332112 - DNA, 401 bp, Homo Sapiens
agtagagatgaggtttcaccacgttggccagactggtcttgaactcctgacctcaggtgatctgcccacctcagcctctcaaatgctaggattacaggtgtgagccactgtgtctggcttgaaaatttttaaaaagggaaaacagattctatgctgctgaaccctctactggctattgctgatttgggggaagaataatctttggtgaactggaacacatgataatccccctcctcccattttaacagagacagaaaataataaaaaaggctatttccagtgttctaaaaggaagtgctagggagccctcaactataatgttttagggatcaaacccccaaacattaatcctggggctgttactttatttggaccccagtcctcccagcctcactgcttca

SEQ ID NO: 332113 - DNA, 226 bp, Homo Sapiens
gagattagttggactcgaggtatgttaaaacccaattttatccaaaaaggctacagaataggactgagggagccagtcaatcagattactcatctagtcaaccgttcacaggggttcattcgcacgcaatgggcatttaacgctgcgcaccttttgcgctactgcagggtcacagcgcatcatcagaagagcagaatgctgcaatccaaacaaagaagaaaaaagg

SEQ ID NO: 332114 - DNA, 516 bp, Homo Sapiens
  misc_feature (14)..(14): n is a, c, g, or t
  misc_feature (30)..(30): n is a, c, g, or t
  misc_feature (52)..(52): n is a, c, g, or t
  misc_feature (58)..(58): n is a, c, g, or t
  misc_feature (78)..(78): n is a, c, g, or t
  misc_feature (97)..(97): n is a, c, g, or t
  misc_feature (107)..(107): n is a, c, g, or t
  misc_feature (378)..(387): n is a, c, g, or t
ctccagctcccaanccggctgaattccacnggacacaggaagagtactcccntccacnggaagcaaggaaaggccccngatagatttaactgtgtantattaaggangaatcagttcccagtgtcgttaaacaagaaatgggtgaagtgcttagtgagattccgtatttcccctttccgtggtgccgcttttaagccagatattggcatgccagggtacaacccagcatgacgcagttattagcttgaattactcagtaatgatctctggcgcctgcatgaattttccagatagctgaggcttactcatcactgaggaatatctgtctaaaatatattttgtcttctgagacaacattaaacatatttagactttttnnnnnnnnnntcagaaccatcactaggaacacccacttataacgtgccatataacgtggaaaaggtttgtagccgtggagggttgttggtctaatctctcagcagcccaagcgttttgtgttcttgtgtccagttttaa

SEQ ID NO: 332115 - DNA, 422 bp, Homo Sapiens
  misc_feature (357)..(357): n is a, c, g, or t
  misc_feature (410)..(410): n is a, c, g, or t
tgactctgaagctggagtgatgggaccccagctatccttgttttttaccgccttgtctggcactgtgaccacgcttcagggctgcttctgggggtcttggtccctggatgtgccatttccttgcccttctgaccctcacacttcttccaaagtcttgagcagagttgggggccaatggtagcattgctgttcatctctgggaggagagtgagtatacaagtcagtgacagttcagccagggctcccttgggtttggggaagaggcactgcccttgctgtgctgtgggatcctgcttgtctggctctgggagtccccccacccttgccagggagctttcacaaaccagagacgggctnttcagcaaagagctcagacaggatgtgggtgcaagtgcaggtgcagaagtttnaaccctcagctg

SEQ ID NO: 332116 - DNA, 526 bp, Homo Sapiens
  misc_feature (312)..(312): n is a, c, g, or t
  misc_feature (375)..(375): n is a, c, g, or t
  misc_feature (383)..(383): n is a, c, g, or t
  misc_feature (395)..(396): n is a, c, g, or t
  misc_feature (399)..(399): n is a, c, g, or t
  misc_feature (409)..(409): n is a, c, g, or t
  misc_feature (414)..(414): n is a, c, g, or t
  misc_feature (439)..(439): n is a, c, g, or t
  misc_feature (447)..(447): n is a, c, g, or t
  misc_feature (459)..(459): n is a, c, g, or t
  misc_feature (465)..(465): n is a, c, g, or t
  misc_feature (467)..(467): n is a, c, g, or t
  misc_feature (482)..(483): n is a, c, g, or t
  misc_feature (487)..(487): n is a, c, g, or t
  misc_feature (500)..(500): n is a, c, g, or t
ggcaaatttaaagttacctcgaatctttgcagactcagtatttgttctgtcaaatgcagtgagctgaccggaagaaaatagtgccaaatgaaattaaccaggtgatgtatacatgctccacactttccaatacatcaagtgggaaattagcacatttgcattcctcaagtctcatctgtcatccccaacgccacaaaatcacaaaaacaatttcacatgggacagggtattagttttgcatctagaacccacctcgcttcctataaacccacttctaatctctttattgtcagttacccattttaggcaatnaaccgggggtagggcaagggatggggtaaggggcaacggactggaaaggcaacaggaaaactnttccattnttccacgggtgnntcnggggaccctnaaaantgggcccacatattttctggccttnacaaagtnacaccttaaggnactgtnanttgtggtttgctaanntggncccggcacacatncggggttaccacacaacaggcacatt

SEQ ID NO: 332117 - DNA, 463 bp, Homo Sapiens
  misc_feature (11)..(11): n is a, c, g, or t
  misc_feature (37)..(37): n is a, c, g, or t
  misc_feature (47)..(47): n is a, c, g, or t
  misc_feature (78)..(78): n is a, c, g, or t
  misc_feature (85)..(85): n is a, c, g, or t
  misc_feature (386)..(386): n is a, c, g, or t
cctaaaaaaanaagctaaactcccgcccgctgaaccnacctctcctnaaaactgtgcctctggtgcaaacttaagtgnaaccctncccctcccaaaaggtgaaccctgttctctgtgcctaggataaagactgtgtcacatgatactacgggtgtctgtagttggctcctctagagcatactttgtggcacagagtaggaatccaacaggggccaaaggtagccaagtacactttttgctgcctgatagtccccaggttattagttggtagatgattacatgcgtttgatggagttttgtgtatttgctttattttatcaagttacatactacagtgcttatttatgtgttgtattataggtctaccactatagacagtttaaccngggctgttaagttcactgttgctgttttatttgcattacagttccctaattctacgcaaacctcactttctcgtgcc

SEQ ID NO: 332118 - DNA, 517 bp, Homo Sapiens
  misc_feature (19)..(19): n is a, c, g, or t
  misc_feature (27)..(27): n is a, c, g, or t
  misc_feature (38)..(38): n is a, c, g, or t
  misc_feature (46)..(46): n is a, c, g, or t
  misc_feature (58)..(58): n is a, c, g, or t
  misc_feature (67)..(67): n is a, c, g, or t
  misc_feature (77)..(77): n is a, c, g, or t
  misc_feature (243)..(243): n is a, c, g, or t
tcccccgggttggcccctnagaatagncgggttagagnagagaagnacagtgagtaantggcccctnaaaccctagnaagaatccctggggcaggaagctggccttaagccccctcctcagaagctcaatatccatccctccatcttcctcagtaacacctgctcccaagaaccacacattttaacagccacatggagcccaaggtaaccctgagatatacaggaatactgccccaataactnccccagggctgttactcctcaaccttccccaggtattggacaccatattccagccccttctgtgtttctttgatggaatgctcaggtttggagctgatattctgactttcctaaataccacttcctgttaggttctgacttccaaaagatatgaggtccagaagtgacaaatacaagatacaggttaacagcagagccgagacccaactcacagctcctgcactgttgtctgctaagtccggggaatctgattcaggaaactgacactcctgtc

SEQ ID NO: 332119 - DNA, 375 bp, Homo Sapiens
  misc_feature (43)..(43): n is a, c, g, or t
  misc_feature (68)..(68): n is a, c, g, or t
agaaaatgtgggccaaacttcaacggcccatttcaaccaaccnaaaagcctttacctaatagttgtcnaaaagcaaaattccagctccctcctcccgttgtacccaggtaaggcttcctgggccctcatccaagttcaacaagaatatttcccactacttcctgccaggaagatctgcctatttgagcttttactgcctttgggggtaggacctcgcctacttgtgatagcaaaggcagctttctggtgcctgtagagtgtaattatacctctgtgcttggtgacagtatggtgcattccatctttttctgaggtggatcctttagaattttcctggccactttgtgttggtactggacatgtgacacaaggagt

SEQ ID NO: 332120 - DNA, 633 bp, Homo Sapiens
  misc_feature (47)..(47): n is a, c, g, or t
  misc_feature (56)..(114): n is a, c, g, or t
ctggaagccgggaactccaagagcatggtgctggcatcttgtaaggnttttcatgnnnnnnnnnnnnnnnnnnnnnnnnnnnnnnnnnnnnnnnnnnnnnnnnnnnnnnnnnnnggcacttcagagaggcactcctagattctggagacattgtgacttcaggaccattttcaggtttgggccaggacaggttctgaaagatctacttcacctaaaactagacagaaaatgcagtccagttggtacaagcctattaagagaaaggaacaatccaggctgtccttcacgctacgccccatgggttctagtttattctctctcagggctgcttcatgaacttactctgatagagtggtattcacatccatcttttgagtgtacaagccaaatgtgtaccacaggaactatctgaaaggctaaaacatgttgcataaacaggtacttcccaaaatattctctttctccatatgcttatgtggttgtataacaaaaagattcatctgaataagtcttaggcagctattagaactgttgtattttgataaaggtgtcttgagactaaggtcatacttcctgtgggtctgaaatggactctctcctgaaaggatggctattcagtgtcagtcatttagg

SEQ ID NO: 332121 - DNA, 400 bp, Homo Sapiens
  misc_feature (107)..(107): n is a, c, g, or t
  misc_feature (371)..(371): n is a, c, g, or t
  misc_feature (390)..(390): n is a, c, g, or t
gtcctggggttttaaagaatgtattaatttattacctggtcccttaaaagtgacttttcttatatatcaccttggcttgcatcgaatgcacctgcttttcagttctntttttttcacatagtacattaaataagagtttgttgaatgactattttctttttgtccagaattttgtatatgcttagcatagtatgtaaacaatgaaaagcattgtatagattttttgctcaattaagcatccagacatattgactcagaaatcccataaggaatatatcttttgttaattagctgggacgtgggtggtgcgtgcctgtaggtccccaggctactcggggtgggctagggcaggagggatcgctttaaacccngggagggcagagggttccngtggagctgg

SEQ ID NO: 332122 - DNA, 521 bp, Homo Sapiens
  misc_feature (270)..(270): n is a, c, g, or t
  misc_feature (298)..(298): n is a, c, g, or t
  misc_feature (367)..(367): n is a, c, g, or t
  misc_feature (445)..(445): n is a, c, g, or t
tttttgtaagaaaatgcttcatagtttattcacatacacaaaaataatctcatatgattcttaaaaagaacaggacaatgaaattctgaacataacttaaaagtgaagatattgtctgatcagactaaataatgataagctccctacttctctcatctctaaaatgtttacaccaaaagataaatgggaaaatatcaccagggagaagaaagccagtgctgagcctgagggtcagtggggagagcaagggcatgagggagcctcaagccntcaaaagctcactggggcctggggcctntgtctttttattctgtttctcggactccctaccaatctgtggatcccatggatatttaaatatccgganggtcatgggtgtttcccttatggggttggatggttcctttggttggtacctttccctttcttttttctcatcctgctnggggggctggaatgtttctggtccccctccaaaattcatatggttgggaacccctacctctagggggtaaggctgg

SEQ ID NO: 332123 - DNA, 417 bp, Homo Sapiens
aagaaaatgcttcatagtttattcacatacacaaaaataatctcatatgattcttaaaaagaacaggacaatgaaattctgaacataacttaaaagtgaagatattgtctgatcagactaaataatgataagctccctacttctctcatctctaaaatgtttacaccaaaagataaatggaaaatatcaccagggagaagaaagccagtgctgagcctgagggtcagtggggagagcaagggcatgaggagcctcaagcatcaaaagctcactgggcctgggccttgtctttttattctgtttctcgactccctaccaatctgtgatcccatggatatttaaatatcaggaggtcatggggtgttcccttatgggtttgatgttctttgttgtactttccctttctttttctcatcc

SEQ ID NO: 332124 - DNA, 441 bp, Homo Sapiens
  misc_feature (45)..(45): n is a, c, g, or t
aaagctctcggtattccagatacgcatccctcattgtagagcccncctagtccagaatagccccaacacaaaaacaaaaattccatggcaggccgcaggtagggagtaactgaaaggaacagtaattgcaaagtagattaaggaaggtttcctttagcattttgactggtcttcatgatgagtttcattttatcagagatttgaaagttgaacacttaagaagaagtgtatgggctaaagaaagctatggaaatatataatgtatttgtgggataataaaggagttttaattctgtataagcagaattttacagggcaagtagattcttgcttgggcaagctctggaaataaaactttaacagaaagtagcacattcattttggtactctttgtgttagaaaagcatgcttcattgttatatttgagggattttttaaaca

SEQ ID NO: 332125 - DNA, 462 bp, Homo Sapiens
  misc_feature (169)..(169): n is a, c, g, or t
  misc_feature (230)..(230): n is a, c, g, or t
  misc_feature (331)..(331): n is a, c, g, or t
  misc_feature (371)..(371): n is a, c, g, or t
  misc_feature (393)..(393): n is a, c, g, or t
  misc_feature (411)..(411): n is a, c, g, or t
  misc_feature (423)..(423): n is a, c, g, or t
  misc_feature (435)..(435): n is a, c, g, or t
  misc_feature (451)..(451): n is a, c, g, or t
aggaaaacacagaaaatttctgatgtattttacaaagtggttacaagaataagaaaaatactttcttaataataaagctggtattaaactgacaaaacaaacaaacaaagccataaaacacagagaacataacttctataaaaataaaatacacccaacactgtaaaantttccccccagcaaagggaacaacacatttacatgcacacacattgctccccaaacctgangttggaaggcaggggattgttttattgacttcaactactttggattttgtttttcaaggtggctacccaccaatagggatattggtaatttaaactggggncttggaatttttgatgggggccttcacctgggaacccccnggttaagggctggggggatggnttttttcctcatttcccnttattccttttntagggtcggggnaattcttttaatgggnacctattgggt

SEQ ID NO: 332126 - DNA, 835 bp, Homo Sapiens
  misc_feature (698)..(698): n is a, c, g, or t
  misc_feature (722)..(722): n is a, c, g, or t
  misc_feature (780)..(780): n is a, c, g, or t
  misc_feature (785)..(785): n is a, c, g, or t
  misc_feature (816)..(816): n is a, c, g, or t
cctcctcttttggtatctgcacacaaatgtggtgcatgacagtaaatgatgatgtagacacatgggccctttggagctgatatttttttcaaccctgctctgcctgttggctagtagacacacgagtcaaatctttctacctaagggcatagttgggttcttggaataagtgacacataggagaagtcggatctgagctcttttgtcacacaagtgctaacgacacagaaaatgagccacgacagttaaacactgaatggatcgcaatgtgcttttcccttggtttcccataaaaacgaaaatgaaacaccttgtgcaaaaaaataggatacgcttttactggttggtttaatgagagagaaccacttttggccattatcaccttacgttactacaaatcctgaaaggaaagcagctttgagtcttgggctcggctgaaccccctgcatggaccggggctaacagtaccctctacgactcccacaggtctctctttgtgtccagatggatggcgactgtgagtcagcaacgccagccaagacttcctcgcctttaccgtggcattggggcagtttttcaggctctctacggagagaggaagtggggccagtaaggggagaggggctaggagagagggacaccagttttacatagggggttgacttttcacttgtggtgtaggtaggcagtttcagganttttaaaaggaaattttcccttgncaggaaaggaatgtctttcctcttggggcccctctttaatttttttatgtttttattnatttnttaatctttggggcagcctagggactgattntgggggccccccgatggca

SEQ ID NO: 332127 - DNA, 450 bp, Homo Sapiens
  misc_feature (431)..(431): n is a, c, g, or t
gtacatgaaagagtatttattgaaaacatggttactgacaggaagctcctggctgctctctggttacaatcttggctcacaactggaagtgttacatactttttacttcccctcaattttatttttccccaaggttccatcctaagataggtagatcttatataaatatatatacacgtctgtataagtatggcctatagtaatgaaaatatatagtacactcttcattggggtaggtacctaccatgccagggccaccaatactggaatgccaatgtgctacggtatgtccgggggagagagggctgtgtgtgtgggtttacaaggtgctgcagcccaggggggaaggccccactgggcacagggtgtgggccctcagccgggccttcaggccaggcttcccctggaaatcatggggccaatgggagggnaaacccataggcactaggg

SEQ ID NO: 332128 - DNA, 467 bp, Homo Sapiens
ctaattctactcgtagttttatttccacaacctgttcaatattcgaccaaaggcactctatctcccgggccgtggaggcggctatccgcctcagtctgctctgctcttccttcttccccctttcttcacggagctgcttctcctcgtgatggcgcaccacagttctaacgagcttcttcgcagcagccaccttccacctcctctcctgggcaaagtctgtggccatccactgcatctcctccagcagatagtcccagtgggacttggggcgtggggcctcctgcagctttggcagacgcctctgggaccacagacctgctttcctcagctccgcaatgcgctgatgcacctggttctccagagttatttgttctgtcagcgtatcctgagaactgtcttgggacgaggtggcattctgagcaggactctgtggtttggtgggggcagatgccaccacccctggggtc

SEQ ID NO: 332129 - DNA, 412 bp, Homo Sapiens
  misc_feature (269)..(269): n is a, c, g, or t
  misc_feature (343)..(343): n is a, c, g, or t
acacatcgcgcctagctgcgctggtaaaactggctaacgcgatctatcttaattagccacccacagctgctaccgccgccccatccccagggaccacacagacccaggggacaaagaagggcgcgggagacagcggcctgaggaagcctttactgcggggcggccggagatcgccgagctcagggtccccaccgcactggcccggcctcgtcctctgccccagggccctggcccgccccagcctcggccccagcctcggcctttgtgcnaacgtcgccgaacacttcccggtgcatggcggtgacgtagttggagccgctggggtcgtccaggcgcatcgcancatgggcaggaagcgctcggtggtgaagtagcgcaggtcggcttcggggcgcgcaagcttgaggaagac

SEQ ID NO: 332130 - DNA, 494 bp, Homo Sapiens
  misc_feature (375)..(375): n is a, c, g, or t
gtgtcccttcaaagtccccagcagtggctactaccttcaactccatttcacagatgaggaaactgaggctcagagcactgaagttactttaatctggttgtatccattactgatatctacctggtccacacaggtgtggcttgtaccagctgttaaaatgttcagatattgtgtgttggttgagaattagctgcttccctgatcccccacctccacctctaccccatgatccaaaaaccaaaaggataacatcaggcacagcaggggcttttttactgtgctccaaagctggtaattgactagttaggttcctggaaccatgtcatttgttaaatattttgaggtattacccctaggttacatgggctgatgggntgccaacattaggtttgaggcccatgtgtaggctggggtctaaatgccagttgctctttttcatgctttgaggccacggtcaaggcccaggacaagtggaggataggtcctgcttgcaa

SEQ ID NO: 332131 - DNA, 607 bp, Homo Sapiens
  misc_feature (207)..(207): n is a, c, g, or t
  misc_feature (299)..(299): n is a, c, g, or t
ctctctaatggagcctatgtccaacaaggaggtggatggctggattcagggccctgggaggacttcatgtgggaagcagacctcaggaagggcccttaagtgatggtgtgggcccagggttctcacctccttagtctcctgtcctgtccatctccgcagcatcctaggcaaaagaagcggagaaacactcaagccactggggtggtntagggcacactggtggcaattgtttaaaaccttaactaaaacaaggttaagcaaaaggagtttacaggctctcatagatggggaaggatgtngggagggtcacagactgagaggaaccagggctgtggctgctggaaggagcctcaccaccgccagtgtgtttcctccccgtcgtcggcatctctgcttctctctgcacgccagcagctctctcttagggcacgcagacctttcctctgcaggggaacacgagtgccggcagccccgagttagtgactatcatagaaactcagtgtatttctctcttgtttatcattccgagtcctgagtcacaggcttgtccagcactcaagactttttcttttctctattttttgaaacagagtgagactccatctca

SEQ ID NO: 332132 - DNA, 592 bp, Homo Sapiens
tgttcttacttaagcaaatgtttttaacatttttcttcttttctactttaatcttaggttcaggagatatatgtgcaggtttgttacacgggtaggttgtgtgttgctgaggcttggtgtacgaaggatcccatcaccaaggtagtaagcacagtacccaacagttagtcttccaatccatgcctcccccaccctctctctcaagcattccccactgtctatcgttcccatctttatgtagtcaatgtttagctaccacgtataagtgagaacgtgtgctttttggttttctgttcctgtattagttcgcttaaaataatggtctccaggtgcatccatgttactgcaaaggacatgatttcattcttttttatggctgtaaatattcatcaaattttctatgtagaatcaggaaaagacacttaaaagcagaaagaaattttatttacgggaaaagaaatggtgtacctaaaattctgagattcatatataaatgccagagctgtccttaactgtgtgattatatgggcaaaatccagtcccaacttgcttttggaagaacagctgctccatgaacttgctaaggtgggtc

SEQ ID NO: 332133 - DNA, 409 bp, Homo Sapiens
aaagggcagtttcccctgcacgtgctctcttgcctgctgccagggaagacatacctttttgctccttcctttgccttcccaccatgattctgaggcctctcccagccttgtggaactgtgagtacattaaacctctttttctttataaattacccagtttcccagtatttcttcatagcagtatgaaaagtaactaatacactacccgagacatcttaggagatttgtaatagctgtaatgccaggtccaccatatttttagcataaagcaaatgtttacgcgtgatatgactgcacgggctttctttcagctggagccatagcaactcaagtagtaaccctatcttagtctgattaaaagtaaatattagtctgggcatggtgggacatgcctgtaatcccagtactt

SEQ ID NO: 332134 - DNA, 304 bp, Homo Sapiens
  misc_feature (244)..(244): n is a, c, g, or t
  misc_feature (252)..(253): n is a, c, g, or t
gggtctcactacgttactcaggctggtctcaagcaatccccccaccttcagcccccaaaatgctgagattacaggcatgggctattgtgcccagcctcctagttttgagttgatgctttaaaataatcaaaatgtatatctctaaaaccattctagaactcacaaactccacaaaattcataaaatttttcttatacaggtaaggaaaatctgtaaatccatcagcccttgcaatcccacccanttgctttnnacttctttctttgtatttctttctcaaaaagccttagagaaaattatttta

SEQ ID NO: 332135 - DNA, 530 bp, Homo Sapiens
  misc_feature (345)..(345): n is a, c, g, or t
tgaaaggcctagccaaaaatctcgttttattttttggagaatctaggactgggtcagtctattgaccataggactcctgattctggccaattctcattatgcatgatgtctgcaaagtcagatctgagtgaggacttccaatataaattgtgtaagaagtaagaaaggagaaagggcagctgaagggagatgggcacttcatccttctgctgcccactaccctgaacctgtctgcccctgtcctcgtgagcagggctggatgtgaacagaggactagatgaggtgacttccagacaccctctggttctgtgatttgatagattctgcctgaagtccaggggactntgccacccttctgggcagcagtagttggcagggggctgcaagcttgggggggttttccagggcttctgaaacaagaggtcagggttggtgggggagattaagaggggtggtaagggggctttggcaaaagaaagcttagaagcagtttcactaaaaatgctgggcctcatcgtctgttctcttgt

SEQ ID NO: 332136 - DNA, 297 bp, Homo Sapiens
tgagccactgcgcccagcctcaaattttcctaatatgtactttagcctttaaccaaaagcagaacacagcagttacattccctgtcaaaattattacaaggttgtcagagaatggtttctacttatccatagataaggatttttcttaggggaaaaaattaaacctctttctaccacagtaatttgattcagcatccaaagcacttggaatttaagcctgacaaacggggatgaatgtccaatgatcaacgtcaggcttaactaatttgtaggcaggttccaatcaccttaggctaa

SEQ ID NO: 332137 - DNA, 744 bp, Homo Sapiens
tagctgctttttagtaagtcaaaaataattaccaactataaaatgggtaaagactagtgaggttggaagaggggtggtacctcaaccatgaactacaggtcctaggagctaagaaagatgtaaattgtaagactggtaagatctttagctcagatgtaggaaaaatcatagagaaacagctctaattactatcatgctaaagcagaaaccatttcaactgtcaaattgtgataaagaacattcacagccactgaggttgagatgaggggcactttttatatattgttagtagtagtggagaaaactatatatgaaaaaattaggttataaatactaagagccttaaacaacttaataccctttgacacagcaaattaacttataagacgctattttaaggaaagaattagatattaaggaccaagatttagacacaacaacagctattagtattacacatattatcaaaatattaggaaaaacttaaatgttcaacaagcagagagagttcagtaaagcattgcatattcatataagagtataaacatccactaaaaatcaagttcttaaaaaaaattgataatatagataaacactgatcatatctacagttagaggatcttaaactcattcacagaacccttagtatcttagtaatttgttcacaggaccctacggcaaaggaaatacctaatgattccatttattacataattaggtaaagtaatttagtaactacttatg

SEQ ID NO: 332138 - DNA, 171 bp, Homo Sapiens
tatatttggtatttgtttagtgttttatttgctgagatcacaggttggcttagaacaattttcccagaacttccagatgaaaatgattacctgcagcatttaaaaaacacagtttgggggctctttctctggcatatatggttcaatagggcagagaaaagaactggcgaa

SEQ ID NO: 332139 - DNA, 378 bp, Homo Sapiens
  misc_feature (366)..(366): n is a, c, g, or t
taaagtatgaattgttttgttttgttttcctcaattgaggaagctgatgttattaattcacaggctaaattcggtaaacaccactgcccctaccacgggtaatgagaggtcactcacttgaactttgccattccaggcattctcagagtggcgaggggccactgcaagtggagcacaacttggtgctctttactgtgtccttcagaaagaataggtgtacagaaaggaaatgggcaatcttatgtgtgctggaacaaagtttttcaacaattcctagttgtgcctttttaaaccatggcaatatttcagggatagttttgaatcaaagaagttaaggaggctgctatttgggggtaactttatttnctctgtggggga

SEQ ID NO: 332140 - DNA, 393 bp, Homo Sapiens
  misc_feature (12)..(12): n is a, c, g, or t
  misc_feature (339)..(339): n is a, c, g, or t
cgctggaagtanccttaagcatgaagcaacagagatcccccattgcccgaaaataatcggaaatactttcccttgaatttcctcaagaagaagactcatggagtcccgtttccagctggctggcctagactgtttgtgcgcccaagaggatggtcagcaactgctttcccagccctggctctgctggggcgctggcatctggttcagttcccaccattctccctgctttctttgccaagtgtgatattcacccaagggcaccagtctctatgctgagaggtgggatcaaagaagcttcgggaagatgtgtccgaactgctggaggagcagaggcgagcntcgcttggctttccgcagagggctagatggtacctccaggccaggggtgtctcc

SEQ ID NO: 332141 - DNA, 466 bp, Homo Sapiens
  misc_feature (16)..(16): n is a, c, g, or t
  misc_feature (31)..(31): n is a, c, g, or t
  misc_feature (56)..(109): n is a, c, g, or t
  misc_feature (387)..(387): n is a, c, g, or t
  misc_feature (403)..(403): n is a, c, g, or t
  misc_feature (440)..(440): n is a, c, g, or t
aggttccccccaggcnggccctcaaaccccnggggcacaaagtagtcctacctgcnnnnnnnnnnnnnnnnnnnnnnnnnnnnnnnnnnnnnnnnnnnnnnnnnnnnnntcccattgcctttttaaaaatcttaattcttaaactaataggcatatctgtactttgcttttcctgaaggagaataagcctgatctaaccataccttaaatctaagtttatgaatgctcattttttacatatatttttcacagttaagaagacatctgactttgttattgttttctctctcattctgaccaccttatccaaaaatgggatggttctgtcttgcaactttattctatctcaggctataagccttgcttagggatatggttttctatttngtaattaggctttttntaattctttcaattctaacttatctggtatactattnataaaatatttggaatgtaactaagg

SEQ ID NO: 332142 - DNA, 375 bp, Homo Sapiens
  misc_feature (332)..(332): n is a, c, g, or t
  misc_feature (352)..(352): n is a, c, g, or t
  misc_feature (365)..(365): n is a, c, g, or t
gcaagagttaattgcagaattaagaagacgacaagttaaagataacagacatgtatatgagggaaaagatggtgccattgaagatattatcacaggtaaaagatatttcttcactgtggcccatggagatcccactggcctcacctagactgggatgcatgcagattttgcagcttcttttgtccagggttgtcaagttcattagttgactttattcacacccagagtgatgcagagaggctttgaagtccatttacagcagcatgtatactgccccaatactctgcattgggaaccctgttaagttttcaggcagagcttcctttcatttnaaagggatttccattggttnatttgatatggtncattcatggc

SEQ ID NO: 332143 - DNA, 566 bp, Homo Sapiens
  misc_feature (22)..(22): n is a, c, g, or t
  misc_feature (126)..(126): n is a, c, g, or t
  misc_feature (164)..(164): n is a, c, g, or t
  misc_feature (213)..(213): n is a, c, g, or t
  misc_feature (221)..(221): n is a, c, g, or t
  misc_feature (237)..(237): n is a, c, g, or t
  misc_feature (479)..(479): n is a, c, g, or t
gtgaaccacgtggaggtggggnctttgcacaccccccagaggtgctgtcttttcagaacttttgttaaaccagcctttgctttcaaaagcccccagtgaagccccattccgaccgtgcccaccacnggggcaagtgtttcatggagttttaaacttctgctccngaatgaatcatacgaatacaaaagtggtcaaatcgtctttccgaccacntcgatccnttgtaaccaaaccganggcttcccatgaggttgccgggtgattgcagatgcatttgaaaatcacggtttctgtagcaactgctggctgcctgcgttttcttttcccttttggtttcaaatacgtttgtagcccagggatgctcacaccttttctgctgtcttggccacatttctgcagcacttttgaaaaaacagccatgtgcatgaagaaaaagcaacatttccaacaagggtgagtgctgaaatcacagcagcgcngactgggccttctacccaaggccacgagtccgtgacctgatggagctggctccaggcttaacgatctccatttataaaggtgaagtc

SEQ ID NO: 332144 - DNA, 410 bp, Homo Sapiens
  misc_feature (21)..(21): n is a, c, g, or t
  misc_feature (49)..(49): n is a, c, g, or t
  misc_feature (72)..(72): n is a, c, g, or t
agttcctgcaaaactgttaancaagcttcctccggcccaacgtggaaanaaaatgtgtgaatgaaccccagngcccgcctgcggggctgtggggtttgcctgaaggatccatgaagctgcaccccactgtgaagacgctgttgaaagagggaagatgaaaccgctcccaggacggggttgtcccacagtgcagcccatgagtcacgaaactgtgatagtcctgaaacaggatcttgcagaaggagcgatactccaagtaggtgagaatgtccgccagctccatgggctccaggtggtcaaacaacagggacatcttgcgctttttctgtccacagggttccgctgagtcacctgccgcttccacttgtaggtagggacgctgtctatgtcgattaggctgcctgctcctg

SEQ ID NO: 332145 - DNA, 275 bp, Homo Sapiens
tttgaatgtctcacgaaggtttatttgaatagagttacatctagagttctcatttcagtgtacaaacaactcagtgcagtgtttctaatacaagtcatataaaactggaacacactaaatgaatagtgcacttgatagaaaaataaattacactttaaatgctactgcaaagttttacacatataaaaggtaaacacaaaatagttagtgagaccctcataaccacttatcatatccagataaggagataaaaggggcaaaggaatctgtgctat

SEQ ID NO: 332146 - DNA, 575 bp, Homo Sapiens
  misc_feature (132)..(132): n is a, c, g, or t
  misc_feature (142)..(142): n is a, c, g, or t
  misc_feature (289)..(289): n is a, c, g, or t
  misc_feature (372)..(372): n is a, c, g, or t
  misc_feature (383)..(383): n is a, c, g, or t
  misc_feature (387)..(425): n is a, c, g, or t
  misc_feature (479)..(479): n is a, c, g, or t
  misc_feature (505)..(505): n is a, c, g, or t
  misc_feature (520)..(520): n is a, c, g, or t
  misc_feature (531)..(531): n is a, c, g, or t
  misc_feature (540)..(540): n is a, c, g, or t
tccatcttctttacttactgaatactatgatattgcaagtacaaacaatgccaaagaagaaagaatagtaagaacagtgccaaagagcacatattctacttgctgaaaataaaaagaaaactccttaaaganttaaaaagantttaaaagtgttagacaattttgtgtctgcgaaagtctcagagttggtatgtccccattaaactctacagctccccagggtttatcttgtccaagaaagttacccgcccaacctctagggtctagttcattattaaaaggtacccgnttaaaattgggaaggtacacaggaaggaaactttttacaggggtaaaaacattttaaaacttatggtggccaccaaaacaaantaggactggtnttannnnnnnnnnnnnnnnnnnnnnnnnnnnnnnnnnnnnnntccatggttggggactgtaggggctagggggggtctttcgagggtttctggggnacaaattccctcaatactgggggttnccttcctggtcccgnttactggtganggggggggnttttgaggggcagctaggggttttctttgggggca

SEQ ID NO: 332147 - DNA, 517 bp, Homo Sapiens
ttaagtttgtctggtttatttgcaggctgtagagatgatatcccagtccacgcacactcccatgcacacgcacacacatacttcatccacctgaatttgcccgacaaaccctcctctgagtcatagggacaaagccatacttggcagtcctcacgttgctggttacattagatttggtctttcagaaagaagatggttgaagtcccaagaagctgagcccttagccagagaagtaagagtcctagaaccaagagccacaacctgaaatagatgcagactgcccccgccctccttccaggggacaactcttgaggaccctctcctcccgggagttgagtcttcaaggaaatgaaggggacttgatgggggtttcccggggacacacggaggcccccacccccatttcaatgaggaaaaccctcttctttcttgccatttttccagaagctggggggccacaactggctttgcttcttccttcccttaagggggaatttcctggcagtctttttaggaa

SEQ ID NO: 332148 - DNA, 511 bp, Homo Sapiens
  misc_feature (34)..(34): n is a, c, g, or t
  misc_feature (40)..(40): n is a, c, g, or t
  misc_feature (78)..(78): n is a, c, g, or t
  misc_feature (153)..(153): n is a, c, g, or t
  misc_feature (199)..(199): n is a, c, g, or t
aaatgggtcctgttggccaaaaatggtggcccanagacanctttggggacataaaggtccttgaggttataaaggatnaaagaaaacagttaaatccaagcaggagacaacctcagcatgccttcccagagatgcaggtttctctggtccctnagtagagctgacaatgtaactgggaaaatgggatttgaaggggaanttctccttgggcattctcacagtgatcgtccatggcccctaaccccaccagctgcactgttctagaggctcttatcaccagtcggcctgctccccaggtacaagtaactaatgcataataaatcagcacatttcagagcacagggacaaaggctgaaccgaaatgtaaatttctcaggtgtggcatttcttggaaggcttaggcttcaaatctacaatctattttctaacctttcagtgtatttgctctattaaacttagcaggtctaatcttcttgtttatctaaagcaatttcttacattttatcaggaa

SEQ ID NO: 332149 - DNA, 319 bp, Homo Sapiens
  misc_feature (205)..(205): n is a, c, g, or t
  misc_feature (304)..(304): n is a, c, g, or t
gtgtgagccactgtgcctggctttgttggttttaacagttctttcccatgcaggctgcagctgaacagccaagtcccctccttgggtcacatatttttctgaaaatgttataaaaaaattgagtccactggcctggggctaattacctagcagaacatccccatggtttgggtgattctgaatatcgctgccaaacaagcacttnttagaggctcaaacaaggccataaaacatgggcaatggggggcgcgcttccactcttggggaaatgaaaatcttgaccgataccttttgaatttcaatnggatccaaggttaat

SEQ ID NO: 332150 - DNA, 252 bp, Homo Sapiens
aaataacaaaagggctttacagatgaaacacagggctgtgaggcctgatatttttcttagcaaataaacactggacagaaagtagttcagagtgtaagaagtgcctgaccaaaggcctgaatcgcagcttttaagtaaattataggaataattacaaatgctgtaatcaaccataatttacatattagtacatgtatactaagtataaagcttcctaaagtgaagagagcaacacagtaattcataactcaa

SEQ ID NO: 332151 - DNA, 298 bp, Homo Sapiens
  misc_feature (79)..(79): n is a, c, g, or t
gcaccccccaggatcctcaaaaaggcctcccttcaaacgcctccccccagggtttggggataccaccctcaaggttttnaaccttaccgtaccttcaagtttccttttattccaattaggatacaaacccgtctgacttttgggcttcctgaaacaggaaagtcaattttgttgttttcactgtacccatgcttttttatctcagaatcttgatgaactctgaaatggaccctgatgggggcatgcctctatttatgctgaataagagccattttacattttactacaggttgagtgc

SEQ ID NO: 332152 - DNA, 432 bp, Homo Sapiens
  misc_feature (177)..(177): n is a, c, g, or t
  misc_feature (209)..(209): n is a, c, g, or t
  misc_feature (409)..(409): n is a, c, g, or t
ttcggcacagggcccattttctgcccagcacagagactgctatgacccagtgatgacattgtgccctaagaacttccccacattctcttcaactcacagacgacctcagatgtagctgctctctcaggccttcaatgtacgtctccacccaaatgagtaatatttgcattacaaggnggaaaggagggagggaaccatcgggtacctgnctgtaccagggcacattatatgctattgtccctgttttccagatgaaggccagatactcctcttatggaagttaaatggactgggttcagtgtttaacactggctagtggggcggacaggggatggggaattttggaacggcacacctgttctggacttccaccttggtggtttcctttccacaggggccaggcaagctntggttggttccccaccttgggca

SEQ ID NO: 332153 - DNA, 511 bp, Homo Sapiens
  misc_feature (261)..(261): n is a, c, g, or t
  misc_feature (443)..(443): n is a, c, g, or t
  misc_feature (471)..(471): n is a, c, g, or t
  misc_feature (482)..(482): n is a, c, g, or t
  misc_feature (493)..(493): n is a, c, g, or t
agctggcccaggaaaggctgcctgcagaggacaggtgtgttgggcgtgttgagagccttgaagtgactacctgtatcttagatctgagtacaagcctgaggtttttcttttgtctcttttttgatgaggggctcactccacgcttcatataggtgccaagacgtttctgcttctgaggttggctctaacatctctggtctttagagccaccagatctctctggcccatacagatatcagagcagacggaaatttctccctngcaagcgctcagtctcatcccagcaagtcaaagacctcctggccaagtcctgccctcttaagtctccaggaacgctgcagggaaaacccagctgaggcctgggctaagaactgtggtgaggtcactagattctaactgctcttcccccacattaataccttttccttcctcagagagaaatnttcccttaacctgaattgcagccccttncagtttgtttnctttggccttncagaccccaggaagttgg

SEQ ID NO: 332154 - DNA, 431 bp, Homo Sapiens
  misc_feature (92)..(92): n is a, c, g, or t
ccagtagatcggttttaaaatttataagatgcacgcattattttaacttcttatgttatcaaatttcccatctcaatagtagtaataacagncaacaacaataaaaaagtgttcctttgtaatgtctctgagtgccaatgggataacatatttcccaaagctttataatattaaaccaatgctcagggacagttatgattacatagtaagctcatttcaatgctccagtttttattgtcaccttctcttatggaactctagggcactaaagtggaggatgatcagatcgctaacggtgttttgaagaaacggagcgcaggctagcagtactgtgcctgcccatgggtctgtacatcccacactgaggtaataatggtaacgttaagaataggaagccaaaccgacattagtcagtgagtaataccaatggg

SEQ ID NO: 332155 - DNA, 537 bp, Homo Sapiens
  misc_feature (17)..(17): n is a, c, g, or t
  misc_feature (21)..(21): n is a, c, g, or t
ctggacctggtcaagcngagnactgaagggaagatcacgctgcaggacctgaagcgctgcaagctggccaacgtcttcttcgacaccttcttcaacatcgagaagtacctcgaccacgagcagaaagagcagatctccctgctcagggacggtgacagcggcggccccgagctctcggactgggagaagtacgcggccgaggagtacgacatcctggtggccgaggagaccgcgggagagccctgggaggacgggttcgaggccgagctcagccccgtggagcagaagctgagtgcgctgcgctccccgctggcccagaggcccttcttcgaggcgccctcaccgctgggcgccgtggacctgtacgagtatgcgtgcggggatgaggacctggagccgctgtgacgccgcccgcgagaacgccgccacggggccgctccccacgtgccaccaccgggccaccgcggctcgtgtaaaaactgttgtggaaaatgagtgcgtttgtacggaatgataaacttttatttattcacagaa

SEQ ID NO: 332156 - DNA, 433 bp, Homo Sapiens
  misc_feature (382)..(382): n is a, c, g, or t
  misc_feature (407)..(407): n is a, c, g, or t
atttttttatttttcagtgtaaaaatcaaacatgataaacctagaaaactatcagcagggctatttcttacagggttccagcaagggttagcattgttacatttcagaagctgactttctttaaaccatctttacagaggagtaaacttcacagttccacacatggctgggctccagggtaggaactccataggagtgacgaggggaaagtcaccactggggcagggagggcatttctgaggaaatgcaggatgagagggagaggctgtgagcacaggctgtgttcaaacccgggggcaagggctccctcccgcctttccctcccagtgggggagggccaccctgaggccccaaaccacattctgttccttcctcgtcattntgcaggacaatgggtcatccacagnccacacgtgtggtgggctttgggcaa

SEQ ID NO: 332157 - DNA, 413 bp, Homo Sapiens
gaatgaacgagggaaaagtccacccactgggccagggaagggcatttcctgaagaaaatgccagatgaagaggaagaggctgtgaagcacaggctgtgtcaaaaaccccagggcaagggctcccctccccgccttcccctcccagtgggaaggccaccctgagcccccaaacccacattctgttccttccctcgtcattctgcagacaatggtcatcccacagaccacacgtgtggtggctttggcaaccagaaatttaaaataagctatggtttttccagtagccaaaatgatcctgcaccaaagctcatagactgagaacctgagcatgcaaaaccacagtctgggtgaagggatgtctgctttgtaaatgacctgctaattctttgcaacccacagtaatttggtttcct

SEQ ID NO: 332158 - DNA, 543 bp, Homo Sapiens
  misc_feature (69)..(69): n is a, c, g, or t
  misc_feature (154)..(154): n is a, c, g, or t
  misc_feature (193)..(193): n is a, c, g, or t
  misc_feature (524)..(524): n is a, c, g, or t
ctttcttaaagcatgtgctgagctgatgaagagagcagtttggcaattaaaaaggcccagcggcttggnagcagcaggggggtgccaggtgagggtcaggtagtccctctttcctgggccagggagcagcaaagcccgcactaacttcataaantataaaacaagggaggggcgaagggaagagggagatttntaaaatacaatatcttaggggattggccaataataaaaaataaggttccattatttacaaacattttctgttcttggtctctgtacagtgggggtggggtaaggggtgtctgtgagtggggtgcgttgatgtgtctgtttgggtgcaggtttggggggcagggaggcagtggtcgtgttgggcatatgagagaggaggtggggtacccagtgagtggtttgtctgagaaggacggatggatgttggtgggaaggagaatgagaacagagtggtcggcccaagggaagagtccaaatgtcaggggcaaggaagggctgggaatgtaggtacngctaccacgccgagcccta

SEQ ID NO: 332159 - DNA, 486 bp, Homo Sapiens
ttgtgaactgcgcatgcaagggatctaggttgtgcgttccttattccttatgagaatctaatgcctgatggtgggataatttttatcctgaaacgatcacctttccccttcccctacctgctgtggaaaaattgtcttccatgagactggtcccctggtgccaaaaaggttaggaaccactgctttatcagatcttcagaggggacagggaatcaaattcgtataagaatcacagttcatttatgatgtatatgctattttttgctgctaatctccagattttgtggatataaaatatattgtcatctgattttatttttttccaataaaatgtgatttcagtgatctttattttttctatctttaagtaatatatccctatactactatctcatcacttgtttaatttttgctaataagaatttgtcagttttactctttttttcccccaagggagaggcagctgttgggcagattccttttttt

SEQ ID NO: 332160 - DNA, 506 bp, Homo Sapiens
  misc_feature (444)..(444): n is a, c, g, or t
  misc_feature (473)..(473): n is a, c, g, or t
  misc_feature (489)..(489): n is a, c, g, or t
taatgttcatatttttccatttataaggcacaaaacccacaaatctcacaaaaaggaagaatttaaaagatttgaagacaataaaggtaaactcggaggaggttcatcaaactggagttaaatcatgtccctttttagtaactaagggacctcatactgacaggaatcattgcctctgaaaagagggcttttgagccctttttttgacacagcctccttcactggattagtgcagaagtcaatcctcagggagggctgcatggccacaacacatcaatcccaagcaccacctatcccataggaagcttctggggcagcaatgctcccaaacaaaccaggggtgcctggggttcacatgtttctcacccaaagggaggccttcagggggacccaatccacaggtaaacacacatgcttgcctttcccggtacttgaggtattttntgggggtctgctctaggttgaaggcgggncttgcctgcctgaggnaccctggaactagggtt

SEQ ID NO: 332161 - DNA, 376 bp, Homo Sapiens
  misc_feature (320)..(320): n is a, c, g, or t
  misc_feature (356)..(356): n is a, c, g, or t
  misc_feature (362)..(362): n is a, c, g, or t
gccaaaattagacaattattgtttatttccaaatgagtttagatacatactgtcacagaagtacactgacagtgttggaagagccttcaactctcatacaaatataattgctaataggtgtaaacattttaactacaacagaaacctattttgacatgtcttcattttaaaatatacctgggagtctggaaaaatagaggtggccttagccgtgtgggaaggtccctgaagcaaccactcttgatcctcctcatttttcctttaattataaggggcaaggaacaggaattcacattgttttgccaaatgagggaagcgtncagggaaagagggccaattaaccatggccctggggngctctnggggggaagccaac

SEQ ID NO: 332162 - DNA, 486 bp, Homo Sapiens
ttgatgacttcaacttttattgaatgaggtctttattttttaacattacaaactaacactccctttctgaaaaggcagatcttacactcaaagacaatcttcaagcatttttttgttgttgtttaagaaattgagaggggaaatccacagtttattaacaagaagattcaaaacttcattttacagtaataatgggacaacacctaatacatttcacaatcaaaagtggttcaagctaagaatatctagaacagattttaaaatctgggaaagatgacataaactggacaattatcagtattgctcatcacaattttggctctaacagtacaggacaaatgcttgttttgcactgtgcctaagacggccccttcattaaggttcaccaggacacaggcagcatccccgcctcccagtcatttgtacaaatcattaaggcaaatctacaaaggaccagtaaggcactggggcacagcagctgactgc

SEQ ID NO: 332163 - DNA, 470 bp, Homo Sapiens
aagtttaaaacccctggtggttccccctttgtcccccctttaattaaccaggggaacctcctgaacatgtccccccatagcctagggtgaacaagtaggatcctaccccgaaaagttagggtggccagtaggatcctaccccaaaaaccgtccctgcctgataacaggacccaaagcatccctgttgttcctcgagcctataaaaagagcctaatggtcttgcttctcttaactgtggcctcctacactgtgttttggatgattggtgatgtcttggatattctgtttctttggaactttgaatatacaacactttactagggaattagcaatggaagcagagcaaagatgtacagaggaaacaatgcgtaactctgatggaattgaagtcatgaggcagcagagagcttaaattacagctttaaaaatttttattttttagagggaatttacttgggagtaacagcagt

SEQ ID NO: 332164 - DNA, 454 bp, Homo Sapiens
  misc_feature (19)..(19): n is a, c, g, or t
  misc_feature (41)..(41): n is a, c, g, or t
  misc_feature (46)..(46): n is a, c, g, or t
  misc_feature (66)..(66): n is a, c, g, or t
  misc_feature (78)..(78): n is a, c, g, or t
gcctttaatgcagacattnggtgtgaaaaattcagtgtttngtttntttttccagtgtcaacctgnacctaaagcacnaaaaggtcacttcaagtcaacttcaaatgtaataaccaattcccattcatcaacattaccagtgaaaaggggaaataattcactgggctagaaggaattagaagtcgggaataaagaaaatgcccctttggtttacacttactaaagagaatgtcctttaactcctcccaaggaatacccattccgctttgtgaaattataccaattaattaggactcctctatattcccattaatgtcggatcattacataacttcaatagaataaacacttttttcccactttgctataataatagctagggatacctcaacaatataataatggtttaaattatgaccatttctctttggccttgtggtatttaagcttagag

SEQ ID NO: 332165 - DNA, 367 bp, Homo Sapiens
agcctccacctaacccctaaaattggtaggatccatagtagggtagatgtatacatcctatcctattggcccaaagaggtataccttattttgacaacctttcctaaataattttatggtaaggccaataatataaaaatattatacacagtacagaaagaattaaagttaatgataaagaccacaaaataaaataatccaagcttcttatttggaaaaagaaaatagaaataatactataatatttagtacctaatatgaaatctccactcattataagttgtcatgttgattgaaattttgcagtacaacgttgcatgttactaatgagaaaatcaccagatagctcttgtcgagtcctatgaac

SEQ ID NO: 332166 - DNA, 552 bp, Homo Sapiens
  misc_feature (28)..(28): n is a, c, g, or t
  misc_feature (119)..(119): n is a, c, g, or t
  misc_feature (359)..(359): n is a, c, g, or t
  misc_feature (391)..(391): n is a, c, g, or t
cacagagaaggacagaaggctgatgcgngagaaattcttgatagggtcacccatgtgggcgactggagacctcctgaggagtcttcaaggagcgtcttcagaatgttcctctacagggnggagagagggaggcctgtaaccactgctcctgtcccccatggccttgccccagtggacattaattatctgtatttccatgcatagaatatagaactgctgggggcctcagctgggagccccagagcaggggcaagagatacagaatgcacaaaatcacccccagaacctctcctaagtcactcgtaaagtgcaccccggggccttacttagtccttttttatgtaggcatcctgcagaanacttgcctcagtccctgtaactctccattcancaaggcttccctgaccttcagttgattcatctatttcttcctgaagaagtcaacagagcaacggccaccgaccttgcctaacgccagaacattgtgtttcatttgtctgtcaattgttcatcaattcctggataattcccattcttttcatacatttcact

SEQ ID NO: 332167 - DNA, 340 bp, Homo Sapiens
tctgtgtttagcatgtcttataaaagaataagatggcatttgttcagttaattttgtttttgaaatggtgttttagatgggtgaatatgaaaataagcttacctcatcccactctaaaaggtagttggtgatttttgaaccgttgtcaattggtgccttccactgcagggttagtgaacttttgctcctatgtgccagcttaggggggaaaggacactcgggtgcacagctgtgggtggtgaagctaacaggctcggagcaggatccctttacggaattgtacatggcatacaccctcacatgataatctgttgctggtctaagatctttcaggttacat

SEQ ID NO: 332168 - DNA, 423 bp, Homo Sapiens
  misc_feature (339)..(339): n is a, c, g, or t
tacacctttggatggcctgaattcgatgttgttcaatatgaaatcatacattgaggggtcataaagccaattacataaacgtagaaggggaatgacctgccttgtcaccacagtgacaatctcaagtgacccgcagtgtgatgggaccactaatgaaactgacaccacttaaatgatattagggaagaggggagatgtcaggtgtcctactttttattgggtgagatcacgcttgtctccagggcatgactgtccataatgtgggagaggggttgggtaaacagaggattattttaggacggagggcacaccagccttacttgatggagtcttccagcntttctggggggattttttgggaggcagttccctgttccattactgggggtgagttgaaacccctttttggaggttggggttgcc

SEQ ID NO: 332169 - DNA, 386 bp, Homo Sapiens
  misc_feature (15)..(15): n is a, c, g, or t
  misc_feature (28)..(28): n is a, c, g, or t
tttggtccccttccngtccctgagacangaaaaggtggtaaaaaaacccatgttgaacaccctttggaacgaaatgtgggatgtaacaaaataaacagccttcaaaattccctcttgtacttgacatcaacaacatccgtagagtttcttcaggaagtcggagtcccaggtgattgtattcgctggtcagggtgtgaaaatacactaatacatactccttcacagcaatgtgatccattacatgaatgaaatataagagagccttgtccatatctattaatgttacaggaatgtttcttccaactaccaccatcactgttcgaccacagttatcaacacctgtttggtataaggcttttagagaagcaatatcagacagatcctca

SEQ ID NO: 332170 - DNA, 350 bp, Homo Sapiens
  misc_feature (58)..(58): n is a, c, g, or t
  misc_feature (79)..(79): n is a, c, g, or t
ccacccaacaaaaggggacaaaaaaaaggaattttaattacctgaccctgtttccctngcaaggaaaccaatcctaggnataaggcccactaggttgaagtaaaacgctggccatccaatatggatgaaactatccgaatattgtcccatggtacaaacttaataaatatttcctcaaatatactcaacgtatacactatataagaaccttagaaaggagtgagatgtgtagatgacttacacttatgggtagagaaacacataaacaaattgtttcattgcagcaaatattggaaatcatctaaatgttcatcaagagaggtgaaattaggccgagtgtacttgctcat

SEQ ID NO: 332171 - DNA, 433 bp, Homo Sapiens
  misc_feature (391)..(391): n is a, c, g, or t
  misc_feature (398)..(398): n is a, c, g, or t
  misc_feature (412)..(412): n is a, c, g, or t
tcattgagactctgggattcgggccattacatgaaaatgaagttgtttctgtgattttgctgcttaaatccttttggacacttgagccatccacagctaccctacattccagccactctaagactggcagtccccctacttgtcgcgatggttcacatctccatgcgtttgccagggctcttctctttcttggggatgttcttccccttctggtgtgtttgacccagtttcaatacaccttttaaaaaaactgctttatcgagatctaatatacatactggcaaggtttacccttaaacccatttttaaaattaaaaaatttcaataagtttttaggtatattttacagggttatgggcaaccaccattcattacacatttttttgagganttagggntcaggtgttccctngggggaacctccccggatcag

SEQ ID NO: 332172 - DNA, 404 bp, Homo Sapiens
  misc_feature (386)..(386): n is a, c, g, or t
ggacttattcatttcaccgtggttagcaatgatgctgtccagcacagtcacacagctagctgacaaaataaagcccaccagcaacccaggagagacagacttccctttctcacacccatctctgattgttacataaagggcttgaaacctaatgacaatgtcataaataggtattttatgaaagctgcagaaatcttcctacaatggttcctaaaggcaaaccttgggtaaggaatgaggcctggatgttggaataacccaataattgaggccatgtgggtatttttcaggattgttcttggaatttacatctttaaacattctgggtcggggacatggggtggctggacttaactggccctgtttttcctgttacttacaggcanttggggggaactcagggg

SEQ ID NO: 332173 - DNA, 603 bp, Homo Sapiens
  misc_feature (246)..(246): n is a, c, g, or t
  misc_feature (520)..(520): n is a, c, g, or t
  misc_feature (526)..(526): n is a, c, g, or t
  misc_feature (545)..(545): n is a, c, g, or t
  misc_feature (575)..(575): n is a, c, g, or t
ttgggtaacagtgactactatgggacttttttggggggaggtgggggcacaggttgtttttaatatatgaattaaaaactaacatgattatttcacagtactcaaaaatgaaagaacagaaaggtactcaggaatatataactgaaattacaaattaaacaaccctgcgttttgctgctcagtgaatacattttgagctgaaaatatctgacaaaatctgaaacccactgcctaattatataaaantaactagaacaggtttcttagctttcaaggacagaactaggattaaaaaagtttgttttcactaaagccctggggatgccagaaatggggggtttactctttttcacctgggggggtctttttcaactctcctcttggatcctttcatctaagggtcattaaggataacttcttgggttaggaaagagagggaaagcggggtagggggagagaaggacagggagatccccggtgcctggaacggggacttgattttttcacagctaaggcctcngggggnaaggtcattgtgttaaggncatcctgctgtatttggggttccgggtgcnccattttttcccctccttgccggccgtt

SEQ ID NO: 332174 - DNA, 587 bp, Homo Sapiens
  misc_feature (399)..(399): n is a, c, g, or t
  misc_feature (449)..(449): n is a, c, g, or t
  misc_feature (461)..(461): n is a, c, g, or t
  misc_feature (546)..(546): n is a, c, g, or t
gtaatcctttaaaaatattttattaagcattgatttagaaaacgcaagacaagattgtaacacctcagggcaaaggcttgaaggtgaaacaaataacactataaatattgcacttctaaaatctttttttgacatcttcacacaactcaattctaaaatatccttttacagagatgtataaataaacgcttccaagctgtcaacgcttgacacttttagcttcctatcaccgcactaagtcggcaggtttccaatcagatagctgctcctctgacagcaggcaaagaacttccctcagctatctcggaggcctcatacctccatcatgtgaaggagtcaaccagtcccatctttcgggaatgctctttcagaatatgtaattttataagggattttttntttctactgaggaggaacataggatcttttcaaagggcaatgggcaggantacaggcttaantggggcacaggttcactggttaacattggctgattttttaggggcatccggggggcttctggattcttggggctttggacctcanggtaaaggctgtttgggcctggattttggcctcggccctct

SEQ ID NO: 332175 - DNA, 495 bp, Homo Sapiens
  misc_feature (409)..(409): n is a, c, g, or t
  misc_feature (422)..(422): n is a, c, g, or t
  misc_feature (442)..(442): n is a, c, g, or t
ttttttatccatgaaagatgtttattgatttaggaggagaaggcagtacattccattcaatactgtatttgactctgattacaatttccatgcaaagctactgttacatacacacatgaaaactgaagaaatgcttacctgacaatatttcaagtcagaatttctcagctaatttagaaagcaattaaaagtgaatacagaaagacactatggattcaaacattcttcccagaagagctttctaatgtataaagacctcagagaaaagagccctttccattcgagcagctacagagggcggtgtttcctcctgccctgtacttggggagaacagactgtgcacccatgtttatgggaccgaggttactccacagggcatttcagaccaagggctccgagggcctgcggnttcacgggggaantgacggggggctggggcatnggttaacaggcagggcatcttggctgcgggtccagtcctgtaagggggccccg

SEQ ID NO: 332176 - DNA, 362 bp, Homo Sapiens
  misc_feature (221)..(221): n is a, c, g, or t
  misc_feature (289)..(289): n is a, c, g, or t
attttttgcatataacattttattttttatacttacttagcttttaaattccatgacaaaaatgtttcatctgtacacataattactaaaattatttcatcccacctcttttaatatacattatgtgtatttatttttttaaaaaagcaacaggaaaatattaatagatttaaatacaccatgtagggcaaaacacactaatatttatgtcttctaaaccngttaggggatatacaagggaaacttggttacaaggtcataatgctttccataatctgtcaggaaaagntcacattaacatccctatatgcttcagtacaaatgtatgctataaaccacactggggtaaaaggtaatattcc

SEQ ID NO: 332177 - DNA, 618 bp, Homo Sapiens
  misc_feature (119)..(142): n is a, c, g, or t
  misc_feature (224)..(224): n is a, c, g, or t
caacagtaacaggaacagacctgatccacgtggcaggaaaaagaggaaccctgaacccctctgcaagtattctctttcctgaccagctgggcttgcgcactttgtgagatttgcaaaannnnnnnnnnnnnnnnnnnnnnnnttccataggaaaacaacatcagatgtcttcccctagatgaacgatgaagagtcaaactgcaggttcttaaaacaaaaacaanaacaaaaacaccatgatactaacaacggtggaagggtgagggtgaggaattacagatggagagattccaaatcagaaggaaacgtgacatgggagtcccagggctcatgcccttccgccagaattccagccccgcctgtgcctgggtagtttgtctaaggtgctcccagggtccctcttggtctgcaagagaagtgtccctgccatttctgggtcgcttccttttccactctcctcagcccgcctgctccgtcacacttccagcaatcctggtgggcaggggttcctctgggctgctggcccgctgaggtggactgttggttccttcagcattcatcttcttggtatatttgttcatccagctcctgggactctaggtgctccagacggtctgt

SEQ ID NO: 332178 - DNA, 593 bp, Homo Sapiens
  misc_feature (332)..(332): n is a, c, g, or t
  misc_feature (342)..(342): n is a, c, g, or t
  misc_feature (571)..(571): n is a, c, g, or t
ttaagcttacttttatttctgctttccaatttcgtaagtgaggattaaaagaaatttaagcatgaactctatttaaatttatttataagagccttaattcaaaattgccatggataagccacaacaggcccaggtcaaccaagaactacctatctataaatctgtaaattgtcaaagtgaaatgtcaagtcatgaattacctgagtcattataatctgaggagaatcagcaggtttcgagaacaatttgcactgatcctaggcccttgagttctcaagcactgaaggattgttggaaccctaggatgctgtggatggaataagggagatccnccctctcagntcccccctcccttttccccagtggatgggaggggttcaatttctagggataacatagggtaattattcatattaataatgggaaaaacttggctgccctgctgtgaggagtgagggtcagcaaaccatctcctgctgtcaaatttttcagggtctatctcaggctgtagagggctgcattgccccatgactttcttgggataccccatgaccagtgtctaaggtagggnccgggtaggaaaggttcagggc

SEQ ID NO: 332179 - DNA, 446 bp, Homo Sapiens
  misc_feature (428)..(428): n is a, c, g, or t
actaatatttctgaaagatcgaatttgtttcaggactgatgaaataaactttggtggatcttttcagagctcctctggtcttgtaaagaggacgttcccgcggcctgtaactgaatggctggatggaggaaatgtcttaatagagtctcacttgaccttgtactaacatttgcgataagggcaacccactgacgcttgtcaacattttttaatcacagcagcaaagacaaaggagtgatggcacagcaggttctctgaccaaccctggaaatactttatgtttctaaatgtgcttcctgatttttccagagtcataaagctgatgtgtgtgtggtgttggctgttttcttcacagtctcatgccagacacacaacataatgtttacattcaagctgtgaatggggccacagcggcctgcccgggaatnccctcaggcccgggggtt

SEQ ID NO: 332180 - DNA, 528 bp, Homo Sapiens
  misc_feature (411)..(411): n is a, c, g, or t
  misc_feature (510)..(510): n is a, c, g, or t
ttttaagggaggtgtacctggaagatactctttaataggcaatgcaatgtgtggggatatttttaagttttatcggtacaaatgaaatatattgaacacaaatcgagcaaatatgacttggtcgttaacatccctctgattaaacaggagtgctgctatgagaacgggctgtgccattctgcaggcacacgagagtcgctgggttttagggtagtctctgtggagaatggtgactggaccacgtgggagaggggcttgaggcaggaaggtgagcagactccagagttcaagagatgtttgcatacagcgccctcttgtttccccttacagtgtggctgtggccagtattgaggacccaagtgttcagggaactcatgctgggcctgccgggtcccacctgacctgagagtnggcggggcactcagcgtttcagcaagctgctttcctcaacgatgcttttgatctcttattgttgctgggggaggctggagttccaccccaaatcaagtngggaagttcttttcagct

SEQ ID NO: 332181 - DNA, 533 bp, Homo Sapiens
  misc_feature (484)..(484): n is a, c, g, or t
  misc_feature (498)..(498): n is a, c, g, or t
  misc_feature (511)..(511): n is a, c, g, or t
tttctttcaggctttgaatggtccttttaggttcaagttcaacaggcacagtttctctctctctgtttagaatctgagtgggaggatgagcctttccctctgctacaggagggatggaagccaatgccgtatctgcctttcgtgtctgggaagattgctctgtccggccttcgtccggcttactgctcacacttgcttcagggagagaatgtacatgttcacccctggcttctggaaactcatctactgttgaaactgaaccacaatctttagacagatccagattttccagagacagatccaattctcctttttcatcagagggcaggacaatattctgcctcattactgggattttctatgaatccctgaaaaggggtacccataccaaacatgagggaaagaaagggagggtgcaatagggaactggggcctaaggaatgggattggggtccaaaagatgggctggggggggaacatattntttgccacttaggngactctttcatantcaggcatgcagaagcttgccc

SEQ ID NO: 332182 - DNA, 597 bp, Homo Sapiens
  misc_feature (296)..(308): n is a, c, g, or t
  misc_feature (384)..(435): n is a, c, g, or t
tcagatctagcctgcagaggtaaagatttttcactcattattcattcttttgttctttcttatctatcctttacatttaagtatatttaaaaaaatgggcaaccaggcctattttattttattaaataattttcgtttcttctgtttcaacaaaacctacattcaaaaggcctattttagattttttattgacatctttaaaacgtaaaatatagcactttgggaggccaaggctatattttgagcccaagagttcaaggccagcctgggcaacatggtgaaacctcacctctacnnnnnnnnnnnnntaagctgggtgtgttggtgcacacctgtagtcccagctactagggaggctgcagtgggaggatctcttgagcccannnnnnnnnnnnnnnnnnnnnnnnnnnnnnnnnnnnnnnnnnnnnnnnnnnntgacagagtgagaccttgtctcaaataaataaatacaaataaagtaaaatcttgaaataaaggaggattaatcttctcaattactacttttggtgaatatacataattaagttaaatgtattattattatggttagtaaactgttcactaaactctcgtgcc

SEQ ID NO: 332183 - DNA, 132 bp, Homo Sapiens
gcacgagggaagatcaagtcactaaacccaagaccacacagataccaagtggcagatcatacagccaagccttcagaccctgacatctgactccaagaccattctgagcccatcacttcctcactttgatgg

SEQ ID NO: 332184 - DNA, 518 bp, Homo Sapiens
  misc_feature (436)..(436): n is a, c, g, or t
  misc_feature (459)..(459): n is a, c, g, or t
  misc_feature (473)..(473): n is a, c, g, or t
  misc_feature (496)..(496): n is a, c, g, or t
agcatctcaggtgctcagtagctaggtcagctgggagctgtcatggcacaaggcatttgcgtctggcggaggctgtttggttggtggctccagggcctatattcagcctccagagctttggcagaagtgctgtgcttcatttttcactagggaaaatgcccagccggggtacctcgctgaagtcggcttgcacaccacagaaaaggctccactcccgcctgcatctgtcctcccttccctctccccagggtccgagtgattggaagctccacattgggcattctgccacctgggccttcaggggccgcgggatgccttatttaccagtttgggccttgcactgctggggatctgggcggctgcacagttcattcattcagagaagcaggcgggcattcgtggattaggacactttcggggtgggacccttcgaacntcatgggtttgcagagtggtttncgggccacaccccnggagatggcgatgttcatagttnaggctttacagacgattaattt

SEQ ID NO: 332185 - DNA, 386 bp, Homo Sapiens
  misc_feature (330)..(330): n is a, c, g, or t
  misc_feature (339)..(339): n is a, c, g, or t
gtgaaccacagtgccatgcctctcctcagtactttctcatggtggattatgaggtttactggcctggctggtgggatcgggcattctcccggccccagtgtgaatgctgtctgcggtgccctagaatccttttcggtggttcgttccctgacctcagtcatttccttgcctgcaggggctgattaggccctctgcctcctactcgaaggggatcctcagcagatcttgggtgggctttcatctctccagtcctctgttccgcacactctggactgcctcggcctcccttgtctctcagctccatgtcttcaattcgggaggctgccaggnaccacccgngtcccccctgccatgttgcttcagcctgggccaatgccccaggtggg

SEQ ID NO: 332186 - DNA, 442 bp, Homo Sapiens
  misc_feature (341)..(341): n is a, c, g, or t
  misc_feature (421)..(421): n is a, c, g, or t
tgtaaaatattgtagaataccaaatattttatttttatgtctgtgattcccttttggatagagagtcttctgggcttcagagtatggctcacatataatatatggcctgtatttccatctctctctttttgcatcagaatattctattggtttaaggaatcttgccatagcttgccataattttgtatatttgtgtcttgcaggcatgctgtgcctacaagcatgctttgtagtatattttctgatttgtaaatagtacagttttaactgaagtgtaggatgttccgggggaatattttaaccaatacattgtcatgcagtttcataaaagtgatgttgtncagtttattcatggaggaaggcaaatattgttcagggctgtggaggaggaatgtggattggccacctcagtaaaaagggngatgccattttaaatggaatc

SEQ ID NO: 332187 - DNA, 770 bp, Homo Sapiens
  misc_feature (105)..(105): n is a, c, g, or t
  misc_feature (154)..(216): n is a, c, g, or t
  misc_feature (689)..(689): n is a, c, g, or t
  misc_feature (735)..(735): n is a, c, g, or t
  misc_feature (756)..(756): n is a, c, g, or t
cgcagcacacgctcacccctgaccacagctctgtggagtcaccaccatccagcaccctcaggtgtggcctgtgctgtccaagggctttctgggctatctccgtgnaggacagggtccgctgagacaggggaaacgtgcccaggacctagccttnnnnnnnnnnnnnnnnnnnnnnnnnnnnnnnnnnnnnnnnnnnnnnnnnnnnnnnnnnnnnnnatgtacatgtttatatctagaaaacgccaagtcaagtaatcagtacgtgaagcgggccgagtacccgatggcctggcccggggtgaaggctgtttagtgaccatggaagtgtgtgagatttcacgcacacgcattcatgtcaacaaggacatcaggagaagttaacattatactgaagtcttaagttaaaacatttctgaagtgtatggaaaggtttcactagctgttacttttctaaagtcccttgccctgtgttactttacccagacgcctctgctctttatcgtggatcaaagtccctggggcttttgtgtgtccccgtcaggcggcgtcgttggcctcagcaagtgccttggtggggcgagtgtgaccgttccccccagctgggtccgcggactggacagtgtgggtggttgggtgccatcgcactcagcagacaaggtgagtgaccccagcccaggccctcccttgtncccggtgccatccgggaaggtgctggggaacctgtcctttcccctntggcccggggtggcacctggnaaagcaagcccttg

SEQ ID NO: 332188 - DNA, 581 bp, Homo Sapiens
  misc_feature (364)..(422): n is a, c, g, or t
  misc_feature (509)..(509): n is a, c, g, or t
ccatctctgctacccttgccacagtttttctttaacctcatgcctctttcctgagccacatcattacttcctttacagctttgcctaccagctgctggagtgggccaggaggggagtgaggaaaatgcaaggccaggtcgacccattccctgcacagctgccagaaggatggctctcaaatgcaaagccactcctgggcatacagtgtgtcccacgcctgcttctagtttgcagctgcctgagaggagggactacgttaaattcatttttgacgtccccagctcctcacccaatgactgcacaccaaggacacatgactcggaaaccctgagttttaactctagatatgtaattaactagctannnnnnnnnnnnnnnnnnnnnnnnnnnnnnnnnnnnnnnnnnnnnnnnnnnnnnnnnnnaggaaatttgttaaaactacagggtttgtttgggcctcttctcttgtaatagtcttttgttcggtcatttttggaaacagacttagntaaatggcaactaagcatacctcacacatccaattacacagattcattctgagaagaagaaggaggcaagaa

SEQ ID NO: 332189 - DNA, 446 bp, Homo Sapiens
  misc_feature (353)..(353): n is a, c, g, or t
  misc_feature (378)..(378): n is a, c, g, or t
  misc_feature (403)..(403): n is a, c, g, or t
  misc_feature (409)..(409): n is a, c, g, or t
  misc_feature (425)..(425): n is a, c, g, or t
gtcttatgaatcttcctccaataaatttgctaacaaaggaaacatttagtattactaggccgtagagactagtaatttaatctttaatttttaaatttatatgaagtaacaagagaacacaatttttcaccgcttattttataacctgattggctcccagattcacaatacctgtaggctccagactaaaaaatgccaaactgttagtggaaagtaaccttaaggcatttttcttgatatccatattaggctacaatccttgggcctatttctttgggagtatgtttacatgttttatgaatataattacataggtgggagaagaaaaacatacaaacataatttcaaaaagntgggaaataatgttaataattgccngccacaatttaaacatattgggttncaaaanttttaaacgtatttcnttgttttatgggggttccaac

SEQ ID NO: 332190 - DNA, 779 bp, Homo Sapiens
  misc_feature (361)..(425): n is a, c, g, or t
tctgctggactttgttgaacccaggggtgccaagtagcagctggctatgctcagagtctgaaggttgtccagtgatttgaagcagaaggacaaacactctcccctgaacacctggctccaggccttctgcacctcagccctgtccttccagcatcaatcctttcaaacataaggtacttcagtcttgttaagaggcatgttgggggtttcagagcctactggggcaggaaaggggagggtagtggtggtggtagaatcagacccactgaaatgttagatgggtagatatgccctgccagtccctggcggttccatcccctccgaggcccaggcacatgagtgaagaggccaacgtgtgtannnnnnnnnnnnnnnnnnnnnnnnnnnnnnnnnnnnnnnnnnnnnnnnnnnnnnnnnnnnnnnnnccccaggcgagaaccaccttgttgaaccaggcagcccagagaactgtaaaagataattgttttaagccatgtattgtgtgtgtgagagagacagaaagagagtgaatgttagttttatgaccattagataaagactttcaactttaatatggtggaaagtatcctgggttacaaatgctagaaatgtgcacctgcctgcttagtaatatcccatgtatagctcaacgaatattgagcacctagcagggtccttttccgtggatgaagggctactaaaatatttcatgtccttgttttcatggggaacttgatgcaggacagctcattaataatccagctacctctggtgcccca

SEQ ID NO: 332191 - DNA, 400 bp, Homo Sapiens
  misc_feature (14)..(14): n is a, c, g, or t
  misc_feature (25)..(25): n is a, c, g, or t
  misc_feature (57)..(57): n is a, c, g, or t
  misc_feature (112)..(112): n is a, c, g, or t
attttggtaagaanacggggtcctntcctgtgttgttgaaggctggtcctcaaaacncccgggccttaaagtggaccctcccccccttggccctccccaaaatgcctggganttacagacgtgagcccaccgtgcatcaccctaaagtttgtaattttaatgatgtccgatttatctatttttttcttctgttgcttgtgcttctagtttcagttttaaatataaagtaacctttcactgatgtatacagaatagatctatagccaataatttgcaaatctcacagctaacatttgctttctcaacaagaagtggaaaacttttatttcctctgtctgatctgatgaaaggttattagcagtgaaatggtttatagaagttgacaattcagttaacaggg

SEQ ID NO: 332192 - DNA, 431 bp, Homo Sapiens
agggaataaccagaggtgaaagaaaaatgtcggcggtcccaatctctggctgtggcatttgaccattaacactggcctcagtctgccataggaaagtgggcatcagtacaggtacaatcactttcattctgagcagcaggagcctcttggaaccagggattatgaggataaacagggacagggacctttgggtacatcctgcaggctgccaggtaggcctggtgcagagggtacaggtaagaatgtggggcccacataggacaactgtatgccttcacaccaagattgaagaagaatcgaagaatattcttatctttaggtaggtcctccccagtctgacacagtgaataaggtggtacaatggctcgatctcccttttcattacaaggaaacccaggatagagtgggtcttgataaaggctcaatgtcgt

SEQ ID NO: 332193 - DNA, 414 bp, Homo Sapiens
  misc_feature (79)..(79): n is a, c, g, or t
  misc_feature (112)..(112): n is a, c, g, or t
  misc_feature (147)..(147): n is a, c, g, or t
  misc_feature (190)..(190): n is a, c, g, or t
  misc_feature (376)..(376): n is a, c, g, or t
tgaaaaagtactgaaatccttttgggcttctttaaaaaccttaatttctcttgcccaatgctggggaaccccttcccanctgcccttccgaataacccaatagaactggccnaaaactccctccctctgtgaggtcaactgcaatgnaatcacccccaaactcaactgtgccccaaatcctcctccctgncagcctctgaagcctgggcccaggttgtgggcaaagatgtcccagtcggtgagcatgctcttctgggctcaggtaactccggttgaactggatctggaacaacttgaaggcctctttcagctctagcggctggggaccctggcctaagggggcctctgatccttggctaggcctgccaccaacagngccaggaggcaggaggggtgggcagtcagtgccatgcc

SEQ ID NO: 332194 - DNA, 419 bp, Homo Sapiens
  misc_feature (29)..(29): n is a, c, g, or t
agaaagtggtctaaagcttcccacctganttatccaaaagaggccccatcagcccaaaagaagttaaaaacctgggactggaataatctcccaaggttccattcaagaattataacattacaattttgtgacttcttggcagtggctacagaatgttatctcaatgttatccatttgatacatgaagaaatcgtgactcagactcaataaccagctcagactcacagaactctggtgttgggttggggttggaactcacaactgtctcattccaaagcccatttcttcccactaatcctatgctgtgggacaacatggatttattttaaaataaatttaaatctcagtttcatgcaccacttcccttccttcccaacccacctggtaccccaactgtaacaatccttccgcgtgccgaa

SEQ ID NO: 332195 - DNA, 582 bp, Homo Sapiens
atgtgttttggttcgttcccaccatgccagcatggaaacaattccttactgcagagtgttcaggtccattttctacagggaaactgttcatgacccaaactcccagcacgagccctcgttcctccacagtaggagtgaacttcagagtttcttgcctccgcctcagcttgcggacctggagccctctgggcggttacatggctctgttgatggagaccaggtagagacccggagcagacacgctgtccatgccaggagagcttcttggccgagtttgagaagaagtctcaggaggaaaaggcaggggaaggggtaggtgtttgcccctggccagtggtggagttgaaagcagatggcatcaaagagggggagttgtgtggggcgaatccaactccaagctctggccgtgtctttgggatgaggctttaaaaaggacagagcggttcacttgctggagatgagaaggagggccaggcgtcgtgaaggatgtcgagaggagatgacagggagggaacagatggccgaggcagcaaaatagctggcgaaacgggaacggagcctccagggacgcagaagccagga

SEQ ID NO: 332196 - DNA, 347 bp, Homo Sapiens
ctggtggcagggggtggcgttttaaacttgggggcttggaggggctgaggtcaaagggcagcgggtctttcactggctagaaagggaatagaaaggctgaaggaaaaccatatctggataaagtttaagttcactgagcatgacctaagactactgggagaaagttaatttccagcactcattttaccaaacctatgtaaccctgatcagggatccctgagttagctccagagctggaacagacagggcaaagggacttgagcctccaaccctgagcagtggccaggcactcgacatgacaagctgggaggagccttgaaagaccgagctcttcagaggagaaagaa

SEQ ID NO: 332197 - DNA, 216 bp, Homo Sapiens
actcaaatgactatagagtacatacaggtaatgtaagtgaatggcagtcaagactggggtatagtgaagaatatatgcatcatgtaagaagaacggctgattgttttcatgtgagaatgcaggcctaagattgctagatctgagtcttcaggaaaagccaaaagttcagaggtttatatgatgtcttcatattgggaacttaattccacttaaggg

SEQ ID NO: 332198 - DNA, 245 bp, Homo Sapiens
  misc_feature (54)..(54): n is a, c, g, or t
  misc_feature (69)..(69): n is a, c, g, or t
ggaacctgtggcctgggaaacttccggggaacccaaacacctccaggggtccancctgaaaaacaaaantccctccactggaacaaatgaacatgaaggtccatttaaagaaaggcaaagcaggccccggtgcaagtggctcatgccctaataattcccagtgctttgggcggccctaggtgggaaggactgctttaggcagtctgagaccaccctgggcaacatagcaagacccctatctctac

SEQ ID NO: 332199 - DNA, 337 bp, Homo Sapiens
  misc_feature (230)..(230): n is a, c, g, or t
  misc_feature (252)..(252): n is a, c, g, or t
  misc_feature (307)..(307): n is a, c, g, or t
acccaccatcttatgaagtggaagattaagcacacttctctcaattattgatatgtcgagcaggtgaatagtaaagaatggaagattaaacaataccatttacatgcctgataaatagacatatactatccatacttagcaaaaaagcattcttctcaagcacttttgtgaaaattgactacatactagtccaagaagtaatatcaacaaatttcaaaagtaacgtgagncaccagggcctaggctttgctncccttcaatttccgcttcaggccttccccaggcattcccccatctttcccgcctntaggggttttagttcacttggcccggttta

SEQ ID NO: 332200 - DNA, 189 bp, Homo Sapiens
  misc_feature (102)..(102): n is a, c, g, or t
ccttgaaatcccatttacctaattaacatcacatggaggtttcaaggaaaaagagaattgcttttaatgtgcagaaaagcaattccaaccttagtgatattnttccccctgggatctcagtatcccagtactgagatcccagaaatccattctccataggtgaatcaaggcaatcctattagaatataa

SEQ ID NO: 332201 - DNA, 401 bp, Homo Sapiens
  misc_feature (348)..(348): n is a, c, g, or t
  misc_feature (369)..(369): n is a, c, g, or t
gtacgtgtttgtggactgactgaagcatttttcagggaatgtatatgggtattggagacaattgtcatttagctattgtaataatgttataaaggatttcctgtcctcttcaagtagctctgggaaaatgtgtctgtacatataccatgcttatgaactaaaaatacttttaactaggattgaaaaggttaaaggaaatgtacatacacatatatacatacatatggcacacacaaggaatgtgatccactgctgggtgcaggcatgttaaatacgggaaccacattcctggtgggttggctatatatggggatgagtaggttgtaggttagtttcactttcaccctncaacttaaaaattaaagtggntgtttcctagggaccttagtccttccccccct

SEQ ID NO: 332202 - DNA, 434 bp, Homo Sapiens
  misc_feature (43)..(43): n is a, c, g, or t
  misc_feature (52)..(52): n is a, c, g, or t
ccctaaaaatacctttaaccctagattggaaaaggttaaaagnaaatggtanccataccaccatatataccataccatatggcacaccacaagaatgtggatccaactgctggtgccagcatgtaaaataccgaacacattccctgatggttgcctatatatggatgaagtaagttgtaagtaaagttcacttcaccctcaactaaaaaataaaagtgatgtttcatagaacttagtcttcccacttgatctggaccctcatcttgaaacctcatatgataaaatggagaacttcttttaaacataagaaggtagtaatcacctgtggtcccagttgtggggctggggcgagagaatctcttgagtccaggagttcgaggctgcaatgacctatgattgtgcctgggcaatagagtgaaaccccatctctttaa

SEQ ID NO: 332203 - DNA, 437 bp, Homo Sapiens
aaaatgtgtctgtacacataccatgcttatgaactaaaaatacttttaactagattgaaaaggttaaagaaatgtacatacacatatatacatacatatgcacacacaagaatgtgatcactgctggtgcagcatgtaaatacgaacacattcctgatggttgctatatatggatgagtagttgtagtaagttcacttcacctcaactaaaaaataaaagtgatgtttcatagaacttagtcttccacttgatctggaccctcatcttgaaacctcatatgataaaatggagaacttcttttaaacataagaaggtagtaatcacctgtggtcccagttgtggggctggggcgagagaatctcttgagtccaggagttcgaggctgcaatgacctatgattgtgcctgggcaatagagtgaaaccccatctctttaa

SEQ ID NO: 332204 - DNA, 352 bp, Homo Sapiens
ttttttgagatagagtcttgctgtgttgcccagggtagaaaataagaaattatttgacctgatgtatatggtaccaattaggaaattgatttcttccttctctccatgcactggggcctcggcggtgagagtctcttctttcgtcactgccacctgggggacagatcagagaacaagagcatgtgatctccttaccctcagactgaggccgaaggtttggctttttgtcacaggaggctggatctttgccttggccaatttgcctgaggcatgtactctgtcttcctggtgccctacaggtccccacttgccagctgaccaccatgtcccatgcccaggggcctcgtgccga

SEQ ID NO: 332205 - DNA, 545 bp, Homo Sapiens
  misc_feature (291)..(291): n is a, c, g, or t
  misc_feature (329)..(329): n is a, c, g, or t
  misc_feature (446)..(446): n is a, c, g, or t
  misc_feature (458)..(458): n is a, c, g, or t
  misc_feature (467)..(467): n is a, c, g, or t
ttctgactaggtaatttcgaatgacctatcttcaagttcagggattcttttgctggattctttcttttgttgaatctctctgttgtattttttaatttaattcactgaattcttcagttgcaggatttctggttggttcttttttttatgatttctatctctgttgaatttgtcattcacatcataaatccttttctgattgactgaactatctgtatttccttgtatatcattcaatttcttaaaaaatcataattttgaattccttttctggcaattagttgatttccntttcatgcaggtctgccactaggaaagtgatggttccnttgggtgggcaacctaattttcccatggctctctcaatatttctgggtggtccctggtggttggatgtctgtggcacccgggtgggaacaaatcatctcttccctttttttgaggangaaggtctccanctgtcaccngtgctgggagtacagtgggcatgatcctggggctcactggcaacctctgtctcccaaggttcaaggcgattctcttgg

SEQ ID NO: 332206 - DNA, 462 bp, Homo Sapiens
  misc_feature (14)..(14): n is a, c, g, or t
atagggaaattggncctcgaggccaaagaatgggcacgagctggaatctcaagttttcaagagaaactggcctgttcaggggtctacctgcttccttacagtttcagtttctctttccctgaaatcacaacacacatctgtcacccaagccctgtaaaatgtgcattctgctctgccatggctcccctttccctacagctgctttgcctcatccttgtgctatcatagtggctattaaacactcccctattgttttctgctaaacagaacacatatttcttaattagggcattcaatacttcccctgccatggggtcagacacttccacatccctgctataggccatgggttctcagggcctgtccggcacatttccaatttatttaaggggaatttaaaaaattttaaaaaaggccaatggcccggggtggacaattccaggaaatttaaatcaggatttt

SEQ ID NO: 332207 - DNA, 449 bp, Homo Sapiens
  misc_feature (312)..(312): n is a, c, g, or t
  misc_feature (316)..(316): n is a, c, g, or t
  misc_feature (330)..(330): n is a, c, g, or t
  misc_feature (384)..(384): n is a, c, g, or t
  misc_feature (388)..(388): n is a, c, g, or t
  misc_feature (405)..(405): n is a, c, g, or t
  misc_feature (412)..(412): n is a, c, g, or t
  misc_feature (421)..(421): n is a, c, g, or t
gctatatagtagtacattctctgaatagtccacagtttatttatccacctggagtctaacatgggtatcgtgtcacccaggtgattctgatacccagagcacttctttttctttctgtgtcattctggctcttgctgggggagaagtagggaggggtaatgggctggcaggataaggagctgttggggtgtcttactgagccctgctgtgactggctagtggcttccagaccaccagcagcacagacaccatactgggagcttcagatgtgcaactgtgagtctctcagctgtaccctgggagctggaacangacnaggcttccctccantccccagcagggactttttccagggcctccaagagatgactctgtggggtggtngggngccacataggacagttnggaggtncctctattntcaggctgggatttttctactaccccct

SEQ ID NO: 332208 - DNA, 473 bp, Homo Sapiens
  misc_feature (416)..(416): n is a, c, g, or t
tttattgacatgatgcaaatatctttattcgtacaaataacattcaagcatatcattcagtgttgcaataagttaagataagctcctttcagagatgctgggaaaggctggcttttgcctccaaaacattgctccctaattttggctccttctatacatttccactaaaagccttgcccggagcaagaaggaagcttaccctgcccacccctcattgcccctgggtcctgttcccctttccaatgctagcagtaggggcaagaggggaggtttattttcaacgtgaaactttaactatatttaattccttctaccaaagcctgcattaagggctaaatggcatttacaaaacattacatacccgcaaactgttgaggataggtgaggcattgtttttaggctatttcatctctttnggtcaaaaaaatatatatagggcctggaaaccttcacttaggtgggcggattttact

SEQ ID NO: 332209 - DNA, 465 bp, Homo Sapiens
  misc_feature (20)..(20): n is a, c, g, or t
  misc_feature (41)..(41): n is a, c, g, or t
  misc_feature (98)..(98): n is a, c, g, or t
aaaattttccctcaaaaaangtaacctaaaaaaattgtgtngggaccccctacttttggagaaaaatcctacgtttcccccaagttttaatggggaanctgggcctattcccttgtcccgggcacacccttcctcattcccttccctttcagagcctaaaacctcatttgataagcactcctagtctctggcctgtggatccagtgctattctgtcaccaacctaagaatcccaattgcaccttctgtttctgacagtcacaggtgacagctgtgattctataatacagactggtgtcttagaggtaggaataatacatgattatgaagcatcaccctgctaatacataataatgtctttttatattataagtgattgagtttagttcatttcaatacattgtacatgaaaaaatgaaaagtagaactttgtaatactttaatcaataaaattaattaccaaaaa

SEQ ID NO: 332210 - DNA, 557 bp, Homo Sapiens
  misc_feature (403)..(403): n is a, c, g, or t
  misc_feature (485)..(485): n is a, c, g, or t
tttttccccataatcaggaaaaggacaataagaaagaactgctctcccagaacttctctcaggctcctggacaatcttcccaatctaagaacaattttttcttttattttaatttcaaccaaagaatcacatggttagaaaaataataaccccctgccacatacctcgccatactgagtcctcctctccaggggcaaccattattactcattattacccacgtccgtttatgtttcttttgatgattatttccatatctctaggaaaacatgctggatactactactcgttggatttatcaggatctaggacattattttactaaattccttccatggataggacaggggaatttatctcacataacggatcccccactcctttcaccctccataattttgangggggggcaaattattaggttttaacctcctctactggtatcaggttctcatactttgggctggcatgggggaatcaccccnggccatcttggttaaaccggggttgctgggccggggcacgggtgggggcttcacacccggtaatcccacatt

SEQ ID NO: 332211 - DNA, 484 bp, Homo Sapiens
  misc_feature (438)..(438): n is a, c, g, or t
  misc_feature (469)..(469): n is a, c, g, or t
ttaaatggaacttgatttgggttcatctgatgttttctcataattagattgagattgtgcattttggcaagaatatatgatgataacaataatatgtcttactggtgatattaactttgatacttggttaagatggtgtctgctaattttctccattgtagagtcattcttctctttgtaattaataaacatcttgggggagatactttgagactatgcaagtatcctatttcttctcaaagattttttggttaaaaaaattttgttattgtgggtaaggatgtatataaaattggaacattttaacccatttgtagggtgtactgcgggcattacggtaccattcacatggggtgtggcaacttatcaggcacccatcccttttctagggaggtggaaacctccacccttctcccaactggaaactctggtatcccntccaaacaccatcttcctcttccgggggggnaatcctacccccatg

SEQ ID NO: 332212 - DNA, 660 bp, Homo Sapiens
tttgtttctgtgtttcaccctgttttcaagtgagacaggggatagcattatataagccagctctcactgctctggtttatagcaatttcttatcaactccataaaggagagtatatggatggtaccttatatcctaacgcatttctactggatttcagcgtaaactgagagagaaaagtgatttagaatttttttccccattaagaggttgtgcttgcatgtagcaatataaaatatgcatttgggcaaagagaaggtagagtatattattttgagcccagaaggcattccatcaggttgccccacagtcatgtgtgcacttcacgaacactctgaggacttatggtgatagaaatcattgcttagcttaggatttgactgaagagacgcatagccagtgtgatcccaggttggcctcatatctgtggcaacactgacaacgtctcccggatatatagcaatggcttagtacacagagcttgttaattaatagtcagctaaaattagctggaggcagtgagggctacaggagttcctccacatctctgcatctctagtgcagaagtggtaaatgcctggcacttatagattcattcctgatgaccatgacagacatcactaataaatgacactctttcctcctaagcttggatgtggctt

SEQ ID NO: 332213 - DNA, 525 bp, Homo Sapiens
  misc_feature (38)..(38): n is a, c, g, or t
  misc_feature (349)..(372): n is a, c, g, or t
  misc_feature (415)..(415): n is a, c, g, or t
  misc_feature (459)..(459): n is a, c, g, or t
  misc_feature (466)..(466): n is a, c, g, or t
  misc_feature (496)..(496): n is a, c, g, or t
  misc_feature (502)..(502): n is a, c, g, or t
caaaaaattaaaggcaccgaagcccttttgtgtgtaanggataattaagttactttaaggtattcggcatacacttttacatttccatattttaattggactttactggtcactgtggggcatagatacaactgaactgttcaatcctaatcaaataaaactattagtacattcttatacatctttttgggacaaagtacctcctacttacagagtatccaatgtaaattttttatggacaaagtaaatgtttataaatattttggcattttataacttttcctagcatagcttgagggctgataaggaaactcagcaggaaacaggctgtgggttgggcatgaaggannnnnnnnnnnnnnnnnnnnnnnngctctaggggggattttactcactttgggggaccaaaaggcantataggtaggccatcctttttcacctgacccaaggggtaacccnggaggtntttgatccaggatccacacctggatacccnacaagngggggcccaaaatttaaatgaca

SEQ ID NO: 332214 - DNA, 353 bp, Homo Sapiens
  misc_feature (63)..(63): n is a, c, g, or t
  misc_feature (76)..(76): n is a, c, g, or t
  misc_feature (84)..(84): n is a, c, g, or t
  misc_feature (107)..(107): n is a, c, g, or t
ctgttgacagtcgctacatttaatgaagtatcccaacgcttcgttggtctcgggaatacagcnccacacgcaaaanagtaaaangtgcagcaaaacaacacaaacgntcaacctcaaaggaaacaacaaaattaattttatcaaaatgcaatgtgtacattaagactaaagttatggatcgttcctgtttggcatagaaatgtgatgactattaacagaaaggggaaaaagatttgccccctatccatcatcagacagacagacttctcttactaaaccccttatgtggagtgggatgagtgactatttcctgcagaaagatcatgcaacttaaagcaaaaaaaccaaccaac

SEQ ID NO: 332215 - DNA, 539 bp, Homo Sapiens
  misc_feature (373)..(373): n is a, c, g, or t
  misc_feature (406)..(406): n is a, c, g, or t
  misc_feature (414)..(414): n is a, c, g, or t
  misc_feature (417)..(417): n is a, c, g, or t
  misc_feature (423)..(423): n is a, c, g, or t
  misc_feature (436)..(436): n is a, c, g, or t
  misc_feature (455)..(455): n is a, c, g, or t
tttgctccagacacccggatgtaggaaatgtcacattcctatttctgtaacttcacttaaatctgctctgagtctctggatgcctggcaggtggagaattcaatcttgtcgttaccagtattcctttcccttctccatgggcttatgtaagaattctgggcttacacactgttgggaaagccaggtgggaactacctcccccgaactctccattcttccagctgctcatgatccatcaaccttctttgggccacctgctatagcaagaccctcctcacagcatcattccactgacccacaggctcagccccagggaccctcactaggaacaggtctccactatgcatagggaactcacaaaaaccttctcttncatcttgggttctggctggatattccaggccantcccccanttnttcatntttaaaacacagntgggcaggttcctttcccntcgtttccaaaacagggggggtttgttccagccaatttttctggcaggacaccaaagttttcacccgttccttttcaggggagg

SEQ ID NO: 332216 - DNA, 432 bp, Homo Sapiens
actttacattttcctaaacatttggcttttccgttattttaacaatgaggacattttttccttctgtgattagaaaacaaaaataaaagcaaaggtctttctatcctcctcaccccttacaaatcccaagttctgtaaacgtgcaatgatttctaccctttttgcagggcttataaaagcactgtggtgaaggggctataaaagccaggggcatctgccctgggtttcccacagcaggcacccttttcggtgcccaggacaagaaaagccacgcatactgcatgatctcaattacagggagaatctaagacagtcaaattcatagaagcagagagtcaaagggtggttaccagggactggggaggagggaaatggggagacgctgatcaaagggtacgacgcacgatgagtaagttccggagctctcatgta

SEQ ID NO: 332217 - DNA, 420 bp, Homo Sapiens
  misc_feature (47)..(47): n is a, c, g, or t
aaacccccaggcttgtgccatcaagaacccagttaacaaaaacctgncagggtgccaatgtttaaatgaaaaatgtggggcccccttgttttaaagaatttccaagatagtggaagccagaaatggtaaaccagctgcaaaaagccttctgggccttatactactgtacacctgtgaagccaaccctcttgtgcaattttccctagcttcttaggacccctcacctacttgctcagcctgcaggatcctaaggacattcagctgtgtctgagggttggccatctctagaaatctcaaggagaccccctccatgctatcgttcccaaggcaatcaggaacgtaagattactcttattctgtgtaagtttttctttcccagctccattcagatgggaaagagactcactgcccctctttaac

SEQ ID NO: 332218 - DNA, 417 bp, Homo Sapiens
tcaacacaaatattagaagataaagctatagtcattttctggtccccaattcccaaccccagaactttgaggttgttccctgtgtgtaaatgggggatcacaaaacagaagcataaagagagggagagggcaagggaagagaacagaagagaagcatccttcccaagagagtctggcccctaacacatccatggtaggtaaagaatacctaaatacagtccttgggagaactgatattagttactcacacaattttccttagagcttaactgtctcacagccctggttgagaaaggctaaggaagcggctgaaaattgaggctttgaggtataacaggtaggccacaggatctggaggcctaattcagtagctcccaaccttttcaacagctagaaacccttttatactgtaattaa

SEQ ID NO: 332219 - DNA, 383 bp, Homo Sapiens
  misc_feature (25)..(25): n is a, c, g, or t
  misc_feature (348)..(348): n is a, c, g, or t
ctaaacctttaaatggttaaacccnatacctgccctggatttaaattaacctgtgccccatccaattttggtaagccgggtaattggttaaccggggtattttggataagtcctcctttttttccttttgtttggctcttgaacaatatcatatgtatctttgtgtatatagctttttgttgttggatactttcatctggatacattcttggaaataggatcattggggttttttgtgccagggtggtatatacactttttttgcctttgatatggccagattgctttttaaaggagtttataatgctaccagcactatataagtgtctactagacaccattgaccantatgcacgccatcattttatgaattgccaaaaaag

SEQ ID NO: 332220 - DNA, 527 bp, Homo Sapiens
  misc_feature (503)..(503): n is a, c, g, or t
  misc_feature (509)..(509): n is a, c, g, or t
tttaaattcatatcttaacactttatttgggggttcaatcccagggaaatgggcataagggggacaggggctgtaaggcagggaatgagagaaagcaaacacaggtgatcaggcgatgtgtgtgccgagctgaccgtagctccatcagcggtacagctggttgctgaatcacaagacctgtccctggggagttacagcttctctgaatagttctatcctagggaagaaggagaagccatttatctgctggctccttcctgtctcccatcttccattattcaacatttaccccacagacaatcatttccatgttttgttactcagcctttcccggaagccctggggaagtcagagctctctgggtgcagtcagccagtctgagagctggggctgctgtggctgtcaccgtggtgcatgcaacgaaggccacccaacccaaagcccagctctggtcctgggcccaggggcagggggaagaccagtggtagttttaaggagaggangttgtngcagttgccagaagtttt

SEQ ID NO: 332221 - DNA, 540 bp, Homo Sapiens
  misc_feature (478)..(478): n is a, c, g, or t
  misc_feature (514)..(514): n is a, c, g, or t
ttaactttttatagtgtttattaaatcaaggaccggttagatagatgatgggctaggcaggtgggggaagacagagctcactgccctgtggggtctctgttgggccagcccctgatgcccatgtggccactgatgcccagcttcccccaacaccccaacacaggcccaggacaatattacaaaagtgaacaaatgcaacctttttctgcttttacaaatgacatgtctccatccccggccagcaggggtaggggaggccggttgaaagtgacactccgttaaaaaggcaacaacttttataaaatgaagactaaggaaacagcccagggttcggaagctgagatgctaccctgggggtaggagcatagacatggggtcggggcagactttgtctcctttcacggcattcctggggagggtaagaagggctgtcgtgcttcagggccagttggggacttgaatccagggaggccctttnggagattcccagccagattgaggcttccagaacttncagcaacttctttgggggcagctttt

SEQ ID NO: 332222 - DNA, 546 bp, Homo Sapiens
  misc_feature (406)..(406): n is a, c, g, or t
  misc_feature (417)..(417): n is a, c, g, or t
  misc_feature (455)..(455): n is a, c, g, or t
  misc_feature (521)..(521): n is a, c, g, or t
ttccatccctatttttgatgcctatccttgctcagaaatacttcactgtaatgatcccctctagctctgtaaagcactctattgtgtcaccaatccacactactccccaatatactcagtcacctaagagctatgccttccttttctgaaaattcttatcaggactttacggagaaacctccaaatgtctacaaagaactagtatccagtaattcaaatgaagtataaatggtaacaccaaagctattctgttttgtttggtttctgaatgcttttaatgtttttgttttaccacatgatgtctacagagctgtaagggaaaacacttgggggcatgggggccattattttggaaatattgggagtctacttaaatctggtggcactacaggaccaagggaaaggnttaaaatgggncactaaagggggggtaggtgtgggccttgagctggccncttttaaatattagggaagtggaaaagacagaggatgcgggccggggcgcgggtgggctcacgggntgctttctggaggggccaaagtccc

SEQ ID NO: 332223 - DNA, 617 bp, Homo Sapiens
aatattttcaatcagaaattggttgaatctgtggatacagaacctgcacatacagaggaccaactgtatattgctccattcctatcaatgacattatatctttgtcaagattgtttctcaggagtggttgtgataaaaacaaatatcccaggaaaatcaatgtggaacaagggtaaacacggtaatgtccaatcttattacaaggctaggtcattaaaaagaaaatacaactttctcttggctcactttctcttgagacacccgccctggggaacccagccaccatgcagggataaagcccagcccacaaagaaagccacatgtaggtgtttctgctaataaggtcctccagctgacagcccagcagcaactgcccagacttatgagtgagcaaacttcagacaattccagcctcagacttctaagtcttccaactgaggccccagacatcacagagcacagattggccttcccccactgtgttctagtcaaatcgctaacccacagaatctgtgagcataatgaatgaatgttttatgccactaagtttgggaggtagtgtagccatggtaaccatatcaatgaaggttcaatatttaatacaaacaaagaaaagc

SEQ ID NO: 332224 - DNA, 204 bp, Homo Sapiens
gggccctgtaatccacattgcctttccttgggttgaaagagaacctagttttatttgtatagtagaagatagttgtattttcctcatttttttcctacatgagactaaatgactatagtttcattaaaccttctttgcttttgaattcaatgtatgagtagaatattttgttctttttaaatttaaaaactgttagatttttgt

SEQ ID NO: 332225 - DNA, 521 bp, Homo Sapiens
  misc_feature (406)..(406): n is a, c, g, or t
  misc_feature (430)..(430): n is a, c, g, or t
  misc_feature (448)..(448): n is a, c, g, or t
ttttttaaaacagcaaacatttattacatagttgtgtagcatcagggatccaggagggacttcgctttgtggttctgtctcagggtctctcatgaggttgacgtcaagctacagtcatctgaagggtagaactggatcttccaaactcgttcatgcagctattggcaggaggcttcagatccttgacaaacaggcttcttcatagagcagttcatgacatagcaactggcttcctccagagcaagtgatagaagaaagagagatagcaatcaaattagaagcaacagtgccttttataagcccatcttatatgtaacatgctatcacttctgctgtactcttttgggtagtgggagaccaatcctactaggtgtgggggaagggaacttacacaaatgggaaggantatcagggagggtgggagcccttnggggtgccatccgggggnggaagacttacccacaccatgtctggtcctccacttttggaaacatataatctgtttgaatttatttcccttt

SEQ ID NO: 332226 - DNA, 483 bp, Homo Sapiens
ttgttaaaaatgtttttattttttagtaagcaaaattttacgaaaagtcagattcacccgtggagccagaaccttctttctcacgggaagactgtggtaccagtgcgtgttggtcgggtggttcatcattagtaagctcccgtgggccagcgggagcctgaccaccgccaccctcctggaggggcttttcccacgggaatccttatgccggaagacaaagtctctgcaggcaccgaaggagacagaggcaatggggctcccaggggccagttctctttcatcatctcggtgctccccgatgtggtcacagccatctttatacctgttgatgagcacaaagttgaaggtctgtccagtcaccccagagacgtgatcccggatgcgctctagaactgggatccagggctttggagacagcgtgaggcctgaaaatgtgtaggtcagcccagcgtcgccatacgttgcctgcttcctgggcacact

SEQ ID NO: 332227 - DNA, 700 bp, Homo Sapiens
ggaccttccttctaaactgaaacattatttagggaaggcctaaagcagcttgggaggcctgggaatctggccaggctaaggttgtgcaaaacgacaggagctaacattaactgtgccacttcccactgcctggtcctgtaaggctgggcagctaagctttagcaggcagttaatgcaaaaaggaatgagaactcagactctagaactggggatttttgattaagagagggttctgaataaaggaaagctaaggaatcgtgtttcgcttggcaaagagtaagaatgtaggactccagaggcttaaaggcttgtttataaatatttaaaggtgatgagaaaaatatttaggatattactatttttcttgttgccatttaccatttttagcacactggtgcctgttattgttaagtaatatctagtctaatctttgtgattgcacctttgtaagaacggtaaatgttatgtgcttatccctgggaagtagaaaaagggcatcattcatctagggattggtgcagaggactgctcctggcaacctttgatagcagaaggaaaagaaaatgggaggggttgatttctggaacctttgcaagtaaaggaaaaaagtataactctgtgatggccaaattacaaaggataagttgtccgagaagtatatttgatgagaaggtcacaaatcctcaaaggttagaaacaa

SEQ ID NO: 332228 - DNA, 459 bp, Homo Sapiens
  misc_feature (56)..(56): n is a, c, g, or t
  misc_feature (377)..(377): n is a, c, g, or t
  misc_feature (433)..(433): n is a, c, g, or t
tgttttctcaactttattgtggacaggagaagggtaagtagacttgaaggtttttnattttttaatgaagaaacaatttatcctgtgtttgataccagatgagactgtaagggtcacatactccttaagcctacacatcaattccaggtgaagtgcttcaggcttggctcattctgacacctaagaagggccctctaggcacggttgggaagactgtttttgccttagcgccgtgcaggtttgggcattatataaacttttacaggcttgctgaagggaatggtgccctcgatgctggtttccacctgtggtgaccatctcaccaccctccatccggggggcattttgggaatgcggagcactgggagttttagggnccaggcaggcagcctcactttccactgggggcatgcctcttgttccaagcggtttnggggagagataaaacctgaggtgatg

SEQ ID NO: 332229 - DNA, 461 bp, Homo Sapiens
  misc_feature (53)..(65): n is a, c, g, or t
ggtgttttctcaactttattgtggacaggagaagggtaagtagacttgaaggnnnnnnnnnnnnnaatgaagaaacaatttatcctgtgtttgataccagatgagactgtaagggtcacatactccttaagcctacacatcaattccaggtgaagtgcttcaggcttggctcattctgacacctaagaagggccctctaggccccggttgggaagactgtttttgccttagcgccgtgcaggtttgggcattatataaacttttacaggcttgctgaagggaatggtgccctcgatgctggtttccacctgtggtgacatctcaccaccctccatccaggggcattttggaatgcgagcactggagttgtaggccagcagcagcctcacttccacctggcatgcctctgtccaagcggtgtgggagagataaacctgagtgatgagccggtgccgccctgg

SEQ ID NO: 332230 - DNA, 372 bp, Homo Sapiens
  misc_feature (300)..(300): n is a, c, g, or t
  misc_feature (305)..(305): n is a, c, g, or t
ttttttttgaagaaaaaaatttttattctaagaaatacatattcgttatagaaaatttggaaaatacagagaatagagaaaatgtgaatttcccagaatccaacaacacacagataaccttacagttttactattttctatatacatgtgtatttttaaacaatttgctcttttcttcttccccaccctacctcccaaaaaagtggggaaggcagctcctggggggccacacctgagcctgcctctccaccattccatcctcaccaccggcctcccttccgctgagctgtggcccatttnctcgnttacggtcccagacttttctataaacacacaatccaccccatgggcatgccaagggctggcttctgg

SEQ ID NO: 332231 - DNA, 439 bp, Homo Sapiens
  misc_feature (356)..(356): n is a, c, g, or t
  misc_feature (404)..(404): n is a, c, g, or t
gagtggcagaaagcaaaaagttcctttgctgctttaatttttaaattttcttacaaaaatttaggtgtttaccaataagtcttattttggcttatttttaatgctttttctcagtgtttttcttctgtttctgagtcacgaacagcaggcactgaaagcagtcccccagccactgccgaagtcagtcccggaggtgctgcccaggctccaggcagatgcggcagcccggccccagccagcatgggctggatgaaaggctctctactgcacaggggcctcactgtgactgcagggctctggggaggtggggcacctgtagcctgacccccaccttgctgcttccaaagctttccttngcccagggctgaggctttgttggggcaccccccacactggtggttctngcctgcctgcagggttgcccaggggagaccctccg

SEQ ID NO: 332232 - DNA, 373 bp, Homo Sapiens
  misc_feature (251)..(251): n is a, c, g, or t
  misc_feature (263)..(263): n is a, c, g, or t
  misc_feature (276)..(276): n is a, c, g, or t
  misc_feature (281)..(281): n is a, c, g, or t
  misc_feature (286)..(286): n is a, c, g, or t
  misc_feature (301)..(301): n is a, c, g, or t
  misc_feature (315)..(315): n is a, c, g, or t
  misc_feature (329)..(329): n is a, c, g, or t
  misc_feature (334)..(334): n is a, c, g, or t
  misc_feature (340)..(340): n is a, c, g, or t
  misc_feature (357)..(357): n is a, c, g, or t
agaaaatttctccatgtagttgtatatcatttttttctctatgtattttgagtctattttataagttatatccagggtttaaagttgcagtgaataattatcctgggtcgttttaaattgcagtgaattcaaaggcatttaggcattacattaatgactattcctgggtgatgctttttcctcttggatattgtttttgtcttaatatttaatattccctttgcccttttttcctttttgccttaggttantgttaagggccntataggtttttcnttttnctttnacaccttttcccgtnaggttttttgttantaggttaagtcccnggatnccgggncccgggggtagggggtnccaccagtacccgggg

SEQ ID NO: 332233 - DNA, 460 bp, Homo Sapiens
  misc_feature (336)..(336): n is a, c, g, or t
  misc_feature (391)..(391): n is a, c, g, or t
  misc_feature (393)..(393): n is a, c, g, or t
  misc_feature (407)..(407): n is a, c, g, or t
  misc_feature (439)..(439): n is a, c, g, or t
ttcggcacagcaacctgttcttatttaacactttctagggaaagaggccctaggatttgccatagcaaaccattactgcatctaatatcaagcaccctggaagtaagaaaataattatgatcaagctggctattttatttcccagaccacagagtctggaagaaactatttgcatacatattaatggatcagaagtaaattttacttttgggaaaaagaactctgttctttatctctctcccattaagcttgggcctggggctatggtgtatggaaatccaatctccaataccagggaaatgattatttatttgaacgctcccctaaaacccattnaagtggctctgggagtgttagtttggggatgacagatttcgtagctgggctacgnancaccggggagagcntgggtttgttgtgtttcatatggaggccttcnctgtggcatgaccagctctgt

SEQ ID NO: 332234 - DNA, 380 bp, Homo Sapiens
  misc_feature (137)..(137): n is a, c, g, or t
  misc_feature (145)..(145): n is a, c, g, or t
  misc_feature (246)..(246): n is a, c, g, or t
  misc_feature (278)..(278): n is a, c, g, or t
  misc_feature (315)..(315): n is a, c, g, or t
  misc_feature (339)..(339): n is a, c, g, or t
cacatatagatttttctgcaggaagcaaagggctttcaggcttacttgatgagtagatttctgcatcacctccgtggtaaagggttagctgcttttaagaggcaaaaatgcccagactgaaataaagaagggaaaanaataatantacattccagaccaccttgtaaaaaataggtaggcgttctcaatcttggcctttcactccagtcccacttgaggtcactctctttccagaggctctatggnacaacaagggtggtgagaacgctgaattaggnggcaaaagcccatgctagtgttctgtcccctaatgtnacccacggtttagtggggattccngtttcaggaacctttcaacctggctttttcccctgtcttct

SEQ ID NO: 332235 - DNA, 392 bp, Homo Sapiens
ggaatccagaatcttttttcaggggtcacatgcccatttccccacttgcatgaatgtcgacactgcagccacagttttggccgtaaatgtgaatttggcaagtaaccactgttcccagggaaatgtcccaatcagaagaagattatctgggacactgatactgacagggagatgggacattctgagggacccggaggcagggtgccacctcctcaacttccctgagggctgcctaggaatctgtttcctcttcattctggaattatttcttcctctttatgggctggaccaaaaacatgggaaccttcacaaaggtccactgttaacagcttttatattttgtggaagttgaaggaacatggaaggacagtttttaaggccaaagtttattt

SEQ ID NO: 332236 - DNA, 400 bp, Homo Sapiens
  misc_feature (329)..(329): n is a, c, g, or t
  misc_feature (346)..(346): n is a, c, g, or t
  misc_feature (363)..(363): n is a, c, g, or t
  misc_feature (381)..(381): n is a, c, g, or t
ggataaactagagaagtgtgttctcatctcttccccatgcctcgtaggaagctctaggttgggtagcataagtgcctcttactttgcctggatccctgattttttatttgaaagttgctttagaggaagctaagtggcatgttattgcctataatgttgaacatatgatattttgatagtgttactcctagagtaaatttagagggattctcagaaataaaatgtcctgagtttcatttcccgttttgcctcctgggatgaaattcttcttatttacaatagtttgtatgtcatctggtgcctaggagggaaggcaggccaacaaattncaactctggattatttncaagattctttaatgtnaatgtccttaaaaacgtnaatcttccctttttgtttt

SEQ ID NO: 332237 - DNA, 448 bp, Homo Sapiens
  misc_feature (22)..(22): n is a, c, g, or t
  misc_feature (29)..(29): n is a, c, g, or t
  misc_feature (50)..(50): n is a, c, g, or t
  misc_feature (60)..(60): n is a, c, g, or t
  misc_feature (74)..(74): n is a, c, g, or t
  misc_feature (113)..(113): n is a, c, g, or t
  misc_feature (205)..(205): n is a, c, g, or t
ccgaaaggcaacgtccctgggncaacaanaaatttgttaaaaaccgaagncgttgtcttnaacgtcaaaagaangccttcctcgtcccacaatctttaggggccaccccatantgggcgtgccccaggtgcccacagcctcccacctcccgcccaagtcgaatgacacccttgcactctgtgttccacacggtggtccgtaagtnagcgcagctggtgcttggtcttgtccagcacgaaccagcgggccttcccaaggcttcatgaaggcccccttcttgtacagagtgccctcgtaggacctgttctcactctctgctgtctggaactggctgtacagggtgctggtgctgcggcgggcagctgacgggagccggatgtggttgagccactactctggtcgctgggtgtgtacctgcaggaggggccattagagagggtaggtaagc

SEQ ID NO: 332238 - DNA, 412 bp, Homo Sapiens
  misc_feature (355)..(355): n is a, c, g, or t
  misc_feature (397)..(397): n is a, c, g, or t
cttcacactgttgtttgtgaattaacttgagctccttgagttcctacttctaagagattatttaaactttactttttaccttcttagtatacagagcttggtaggagctggaaacccgactcacagatttaggaaacagtgggttcttgtccctgtggacatcagaacttgggggacggagagatagagaaccagaaggcagaacaaggaaaaactcaaagaaaggaatggggaggaatgggaaacgtaacaggacatgttgcctcagtgagttcaccaagggctttgggagttcttaggcccaaaatgtggttctgtgggaggcttgagggacaaactttcagggacagagccntgcctttaattcgatgttgcttaagccactggcttccggggncattcctttaaggca

SEQ ID NO: 332239 - DNA, 495 bp, Homo Sapiens
  misc_feature (22)..(22): n is a, c, g, or t
  misc_feature (42)..(42): n is a, c, g, or t
  misc_feature (184)..(184): n is a, c, g, or t
  misc_feature (212)..(212): n is a, c, g, or t
  misc_feature (438)..(438): n is a, c, g, or t
aaaacctgccgggcccccctgnacctgaaccctagaaagccnaccatacacggtcttctttacactcctcttgtattttcccaaataattctacaaagtaaacactacttaaaagcaaatccatagcccacagaggaaaaatggatccaaacaggttggaaggggctgaaaaagacaaaaagcnacgctaagccctcctcctctcctccccnaagctgcaccacccggcgcaccccaggctcccagggaggttagctctgcccatgcacccagaaagggtacatggccagcagcgagggcctgtcctctcaatggatttctctgcagcaagtagaaggaatgacacttttccataaagaacattcaaatgttttgggtacccacctgctgctccctgcacaggatacccctgagatatatgaatcttgtagagggtcntttcggaactggatcccaaaccccaggagctgctcctgcactggtcagaatgccaca

SEQ ID NO: 332240 - DNA, 683 bp, Homo Sapiens
  misc_feature (643)..(643): n is a, c, g, or t
  misc_feature (650)..(650): n is a, c, g, or t
  misc_feature (659)..(659): n is a, c, g, or t
  misc_feature (665)..(665): n is a, c, g, or t
aataagcaggtggtgattatacatcacatgaggctgcaggcaaagctttgcaacttatagtaacagcacgaactacacgaggacttgaccccttatttgggatgtgtgaaaaatttttacaggaagtagacttttttcagaggtatttcatcgctgatttgccccacttgcaggacagctttgtggacaaactccttgaccttatgccccgactcatgacatccaaacctgcagaagtggtcaaaattctacagaccatgctgcgacagagtgcctttctgcatctcccgcttccagagcagatccacaaagcctcagccaccatcatcgagccagcgggcaggttcagacaaccctttgcggtttacctctgggttggtggttgccctgggatgttgatgcaaccctgggagcatgtgcaggatcctcagaacactgttaaggtccagggtcttatatccagatgggccagggttcagatgattcaccccaagccttgcagactttccggaatcctgggcccaggggcgggcaccggcttcattcattcaggttttattcttcttccccacaccgctttgggacaggagggcttgccagggtgggaagttgagggttgttgttgggccttacaattccagtngttcgcnttcccaaantgcccnggggttggagggttggtt

SEQ ID NO: 332241 - DNA, 340 bp, Homo Sapiens
  misc_feature (244)..(244): n is a, c, g, or t
  misc_feature (268)..(268): n is a, c, g, or t
  misc_feature (301)..(301): n is a, c, g, or t
tgggggcttcgatgacagcacgctgccactggtggacaagagccttgagggcatgaaaactggcagccgggatgtgatccccatggatgcgctgggcccagacggatactccacggtggaccagagggagcggaggccacggggcgccactcttgcaggagaggcctctgagaaggaacccttgaaaggcccaggcccagcctcttgttcttagggcttggatcgtggaagaagggccaccctngagcagatcgtgccgtggagcttnggagccccctggcgacaggggtttgcagcgctncgccccagccaagcctgactttttgggacaccctcctgc

SEQ ID NO: 332242 - DNA, 521 bp, Homo Sapiens
  misc_feature (17)..(17): n is a, c, g, or t
  misc_feature (32)..(32): n is a, c, g, or t
  misc_feature (49)..(49): n is a, c, g, or t
  misc_feature (56)..(56): n is a, c, g, or t
  misc_feature (64)..(64): n is a, c, g, or t
  misc_feature (118)..(118): n is a, c, g, or t
  misc_feature (143)..(143): n is a, c, g, or t
  misc_feature (441)..(479): n is a, c, g, or t
accccaaaacccagagnctgggagcctgagcnggtattggagccggagncacgatncctccagnatcaaaagggataacatggagataaacattcctgtaggccactgcccaagaagncacaaaattggtaatggttaataantccttgaatgaacccttgggagattaattcccagtcccccagtttttaaccttccttttgggctgatgggcctctttgataatcagatggaagctttagacccactttcctagaaagatgcaaattcttcatgtgtatgcagaatttcatgcatataattttagtctgattagtccagtctcttcactttagtcctgcataaagacataaacaattggccaggcacggtgctcatgcctataatcctactgaaatcctaaagctctgggagcctgagttgggaagattgcttaaggcnnnnnnnnnnnnnnnnnnnnnnnnnnnnnnnnnnnnnnnctaaaatctggcctgggtgacagagctagctctgtctcttaa

SEQ ID NO: 332243 - DNA, 687 bp, Homo Sapiens
  misc_feature (47)..(47): n is a, c, g, or t
  misc_feature (63)..(63): n is a, c, g, or t
  misc_feature (96)..(96): n is a, c, g, or t
  misc_feature (103)..(103): n is a, c, g, or t
  misc_feature (123)..(123): n is a, c, g, or t
ctattgacgtttttttctggcataaggacccggagctttgaggagcncagcagccaagaagcncttaaggagagaactgttttggtgagattggtnccaccangctacatgccttgaactggnacagaaatgggctgggaaaggcccgaaatttgacttctgcaccctggatttgggctaaaaagtctcacagctcagcctccttgataagggttcttctatctcccttctatacttcctctgcagcagaaaagagtatcttggccgtgcagggaacgctcttctctcactctcgccactggggttaagggcagcttacattactatagctccaagtcttggttgcccccagagagaggcagagatgtagcctgcccacatctggacacttgaagactctccaaacacctagaggagctgtggattcaagtgaagcaaccatctgatgccaccacggtccctccttccctttgccttcccttcttcccacaaaagagaagcccaaatccgccaccagaccagcccatctgcccgtggaaaccaagggaaccaaatgcatcgtactgggttgcaggccttaatctactctcgctgaattattcagggatggcattaacttataaatgagtgtgtttgactgattttgtggttgatgtacagataaagtctaatgaaagacaaaaaaaa

SEQ ID NO: 332244 - DNA, 455 bp, Homo Sapiens
gtggctgttgttttatcttcctggtttccacagactaccgtaccagtccttttgctttggctatgaaatctgtttgagctgaatgaggcaacactggttattaaggcttatttctatgatggagtattatccttaaatctgatgccatttccagagaacggtgagagaaatcacagctatcttgaatcttcaggctctgttttgatgactttcttttctaaggtaaaagctgaatgagggtagtcttttaaaatcccaaggctctctgatgagtgggactttgcctcactggggtaaagtctgctcagctccccatccaccacaaaatgatggggttgtctgttctgtaaattaggcattcggagattcaaaggtctttctccttgtccatctgagttatcggaagtcaagccgttaggactgtgctcttctgagctctggctgtaaagccctgc

SEQ ID NO: 332245 - DNA, 423 bp, Homo Sapiens
  misc_feature (316)..(316): n is a, c, g, or t
  misc_feature (386)..(386): n is a, c, g, or t
ttttggagaatgaatgcaagatttattgagtggtggaagtagctctcagcagatggctggggagcagaaagggggatagcatgggaaggtagtcttcctctggagtctggctgctcagcggagtattctcctactgtccttggccgaatttcccttggcgtccgaatcgttccaccatcaatggcctgccagcgtctttcgatgtgttcttctgccagtgtgttcctcttgacgtccagccgcttgtgtgtgtgcccgctgggggtctcaggggtttttatagggcacagaatggggtgggcatgggcaggccaanagtgggtcttgggaaaaatgcaacatttgggggcaagaagacaaggagtcccttgtttctcaattagggnccatggggcacaaggcctgaggggtgggagccctttg

SEQ ID NO: 332246 - DNA, 446 bp, Homo Sapiens
  misc_feature (356)..(356): n is a, c, g, or t
  misc_feature (413)..(413): n is a, c, g, or t
  misc_feature (428)..(428): n is a, c, g, or t
ttttaagacaactacaaactttcaatattggaggtagctgcagagatcatggtaactgactttttcacagatgaggaatttaaggcccagaggaaggtaatatcagaattagtgacctccgcacccagcacacacacaggacaggggaaagggtgggagagatgcatgcactgggaccctgggatagattcaagatacccttgctgggggagggtggggctggcccgttagttctaactcagtcttctcagtgccacctccagcccctgtgggtctttatgggggcccaactctttatccatctttccttggggtgatgggagggcatgttcgccagcattaaggatcttcccagncacaggatggcacggccccgggccttctttgatattattaggtgggcttctgggggntttcttccctgccgnccttccacaactcagggc

SEQ ID NO: 332247 - DNA, 470 bp, Homo Sapiens
ttgtgggaagttgatatgcagtttattgaacaaacagagtgtacagtaactaaacgaactgtgtatttccaaaggaattaagaccgcatatctggattcacacctaaaagcacatagaaaattaaaccaaagaagggcaagttttgtactaaaatcacttgggcccaggttattctataagaagattctcactggcatttgatagtaacttatcaccttctgtgcgagcttgggaaccagctgactcagtgaactgcttcctgtcttcagtgcgtgatgacacagatgtgtcaagcttaatagatcttatatgtaaatttaagaataagaagttttatacccaccctggttttattccaaagttactgctctgcaattttgggctccatccttaggaagatactggaaaagcaagagaacctttctcagctgcctgtgtgaagtgacgttgttctagaacggtgccctgg

SEQ ID NO: 332248 - DNA, 465 bp, Homo Sapiens
  misc_feature (209)..(209): n is a, c, g, or t
ttccaggctccccagagacaaggaacagtaagaggaccttgtgcatgaataattttccacactacagagtgggtaataagcagattagtaaaaacaattctgcttcacttcaataacagcctcctccaactcattttttctcaacaaacttatttttccagcagaagaatcccccagacttccttagagaaccccagtgactttttgcncccttaaatttgtgaaatccctcatgcttttcttctgccgtatcccatcgttcaaacaaagatgaggcaaagctagatgcattcctgaaggaacccaagaaattcctctctttctttctctggaatgaaatgaattctctagaccaccagttctaaccttcaaaaaccaaacctgtttgtgagatctccttcaaatactactgtagaccccagtgtttattcattaaattttttaaatatttgttttatttggaaa

SEQ ID NO: 332249 - DNA, 403 bp, Homo Sapiens
cccccacagaagaaataattttattccatttgagaaaagtaaaggatacattctttgtctgacaaaagtgattttgtcatggaactccaaggcctgccctggtgaagtgacagtgacagatgttagaggaacctgtggccctcagtgacacagagagcacagacatttggctgggaaagcacttgcatgatcgaaacatttcctattgcagagattcagaagttctttttatcctgaagatcattctggtctctaatttaagattgaagatgatttaatttgctaatggaacccaggccagctgttttttcacacaactgaaaggagagaaatcggaaatcactcttacatggtgagacctttgatacttttctccaggcctcatgagtcaaaggccatcact

SEQ ID NO: 332250 - DNA, 321 bp, Homo Sapiens
  misc_feature (33)..(33): n is a, c, g, or t
  misc_feature (230)..(230): n is a, c, g, or t
ttttggtaagtaaactggttttttatttacacntggtgttacaaatgttgtttttaaataaacgagggaaaatcctgagttgacttgaaggaaacaaataataggaagatggtgagtacatatggtacagattgagaattacgaagtacttgaaatctggaaaatactggtgcaatgaatatagatatctactagatagtgggtatcagggtagatacaaagccctgggntataggtagacatagatatggagacatattgtgtatagagagagtcatgtttagtcctgacagctatagtgtgactttgagcaactccaca

SEQ ID NO: 332251 - DNA, 523 bp, Homo Sapiens
  misc_feature (486)..(486): n is a, c, g, or t
  misc_feature (494)..(494): n is a, c, g, or t
  misc_feature (512)..(512): n is a, c, g, or t
ttttttagaaatgattttttatttactttgatgattagggaaagataccaacatagctttcatcaaagctaacaaataactttactggcagttaactaattttattagactaaagacatgtctgtttaaactgaaacaactggccctttgctttggctgggaccttgggaatcacggccaaggtgctgatcagaaaagagtcaccattacatcaacctcctccccagcacacagcacagagatgccacgaaggccccatagggtccctaggaagagcagctgggggctccacctaccgagtcccagtgggcttattttggaaaaggatttgctttccacagggtaagggtgtcgcccgaggtacatttcttgaggacttgccattgggttcatcctggcattatgagggtaggttctcttttggcattttgcaggatgctcttcactttgcccggggggtgggatgtcacggattccggaaacctntgggtttnacattcctacttggggantgcccccccag

SEQ ID NO: 332252 - DNA, 440 bp, Homo Sapiens
ccacaggcatgagccaccgcatccctgattcccacattctaaatggatcatgatgccacacaagctaccttggtgcttgtgccttcatcaccaccagactcctggccatgacacagtctagagccatcagccctcagagagagagcctgaggggaatcaaaatggccaatgggattctcgtcgttaacaccagttaccaagtcagccccctttacaaagacaacctccagggcccgctttcatactcacagcatcagcttgtgctttttccctaggaaactctcccacctgcgacaactggattctaaggcggtgacccagcgctgtttgtccgggaagctggggagctagcaagtagagggttttcccggggccagcaggtggtgtgtgggtgagattccatcttcagtatgtatggggacatttgtttgggtgtattt

SEQ ID NO: 332253 - DNA, 889 bp, Homo Sapiens
  misc_feature (800)..(833): n is a, c, g, or t
aagctaaggaccgtgaattgtctgctcgttggagctattgcccattccacattgtgtccttaagtgccagcgtgggatcgaagggacagtaccttatgtcacaacggattacaattttaaacttcctggagcatcagagaaaattggagcaagagaacctgaggaggcacataaagagaaaccataccgaagacctaagttctgtcgaaaaatgaagtgatgctcgcgtttttaataagggaagaaactttcctaccagaaagctttgtctcaagcctgaccacaagagacatgatggagtttcatggccatgaatggtgcccttattagcaacagtgttttttgtgtaattcgtgaatgtcatatagtagtcttaagtttctcttttaaagctgcatgagctaggaatttgttctagtcttctgtgtgatactcatacttgctgtccagagggagtaaaacagcagagaacagtttgtgttccctttaaaacagaggttccctcagaaagttcttcagggaccctggttattagaatcaggataaaaataaggaaactggggccattacaatgtaccgagaaggaaggaagaaggccgacctgcaggatctcaagcataatggatacaagggctcccacggccttgcctgagccatgtgcagagctggggtccagcggtctgcttccttggagccagtgtggatggttacagcccatcgatttggtgcagttgtacttggtctgttatattcaatcaaggtttaatagatagggctgggcatggtggctcatgcacacnnnnnnnnnnnnnnnnnnnnnnnnnnnnnnnnnnaggattgcttgagcctcggagttccagctggagtaccccaactactccagcctgag

SEQ ID NO: 332254 - DNA, 297 bp, Homo Sapiens
atgagcacagcgcccaggctgtagctctcttaaggaggaacatatctcatctgagacaaacctgaaatgccaaaccaaactgagttagcccctctctgtctgttgtatatattgggagtaataacctatttgtcttgataaagggattgcatgcttgaattgcaaaaacctttatttcttttggggttgcccaatgtgcaagactaagggttattttgataaatttctcaccagggtgactgtctctctgtgggggtcgggggagttttcagggtctcacgtattctcgtgccgatt

SEQ ID NO: 332255 - DNA, 417 bp, Homo Sapiens
ttaacatggaagaaaagcaattttaattgttacaagggtgtgcagaaggacacctctcaggcttagaaaatcccacgtcacccgagatctatcctcaaggcttcctctgctggccacacagggaagtttggtcttcagagaggttctgatgctaacaagccacagggttgacgaatacaaatgtcaaaggtgtaaatcaacagaagattaaagagaaaagaggaggaaaagggtgataactcattggctgatgccattaaaaacaaatggggtcagagacttctggagtcatgtggcagggcagatgtactcctgtagcactgatccgcagagtcctcaaacatgccacgccaacttttcacctgaatctcttccagaacaagcactattctataaagaatatgttatcccttattt

SEQ ID NO: 332256 - DNA, 562 bp, Homo Sapiens
  misc_feature (503)..(503): n is a, c, g, or t
  misc_feature (531)..(531): n is a, c, g, or t
  misc_feature (549)..(549): n is a, c, g, or t
ggtaaagactttggcatttatatcttttatttaaatattcatttcactattttgaaagtttcccttccaaatcacagctgtaactaaaatccaaccattccaggaaatagaaatatcaacttgggggcttcctgagaatgtcagattgtggattgcaagagtcaaaaagagattttccagtccaacctacccactggacagatgaggaaactgtggctgaagcgagggtgggtgtctgggagtaggaagggggtgtgggccctggcggatggtgctggagccaccttgcagccaccacctgggcaccccctggccctgccctgggtcctccctatcatggctgctgttggtactggctctctgtggccgtgtagaagtcatccagcacactctggatgtattcgaaggtcggccgctcctccggacggtttttccagcagcgcatcatgatgttgtagagctcctctgggcagttctttgggcgaggcatccggtatccacgntccagagctcggatcacttcagggtttnacatcctggggtaagggntcccgccctaggt

SEQ ID NO: 332257 - DNA, 575 bp, Homo Sapiens
tttttacggttgagggtggatttatttagatgtgcaaatggcattccagaagcccctttcatcgaggtgtgtggatgtgctgggtgcttgcaacctcaaggctgggcagaaatacatgtccctgaattcacagttcacagctgtacagtgagcccattatcaagggagtgacccaggtactggctgcagagaatggaaactattgttccaaaggcagttacactgaacttgaacttgctattaaacgcatacgtgcacacacacacccaagcccatcatcaaagcctatcagctcacacaaataccaaccagaagcatgcgtccctgggcacttcctctaagtgacgacaaggtctgaggcttgggtccagggagctgccccaatgcctttgttttccttccccatgtcaaccccaggggatcctgagactagcttgttttcctgcgttgctgggcaagtattcacttaggaaacaatacagggttttttcaggagggtttttaaacatggttctgtttttcatgggcttattggcaatggagtattcatctttgggacttaaatggtgcatttc

SEQ ID NO: 332258 - DNA, 519 bp, Homo Sapiens
  misc_feature (445)..(445): n is a, c, g, or t
  misc_feature (501)..(501): n is a, c, g, or t
ctaatcaagggaaaccacaatatcaagagtacaattataagcttaggcagaaaggaaaaggctctcagccttgctactacacagctgagaggctttgtagttctatttcaagaaaaataaaaacgcatacctgcatcccaggtgaggagcacctcccagctttccagggctcttggctttctcttgtgcccaccttactctcggctcactggctcagagctctacttccatctgccatggcttcaatgcctctatactagcatttccaccctacttgcttttgtacattttttaattgcccctataacagactccaacccactggatctcccttcctgcgctttccagtggaattatcaattattgactttgttaggcaccttaggttataaaggttggcagggttttccttttctggctccaaatctatttttggcccataggncgtgttatttttaggtgtggcaattttacataaggcaaggtattttaggcatgggnatatatggcattataggc

SEQ ID NO: 332259 - DNA, 549 bp, Homo Sapiens
  misc_feature (62)..(62): n is a, c, g, or t
gagtttaaattttattttacaaaaagagaaataaagaaaactgataggcagttatactgacnttacaattgttctgtttgcttttttttaaaaaagtgacatgaaacacaagtaaaaataaatacgtcatagaaacagccagttgcccagtctctggggcaggagcgcctgcctggctgagaggagggaagcccatgatcacaccagcagctggatcacccagccacagatgctcctcgaagccagggcacaggtcccagggcctcaggggcgtcctgaggaaagaagacggaaaaccaaagccaggtgccaggaccctggggccacctcattatcccccaactcctcctggcagcagtctggtcttagtggttatccatagcgaccccccttaacccacctggaccctcttcccctgacctctctgaagatggtacaagggaaaaacctgtcttgggcaggctgggggggattcttctggtgagtccccagcccaccctgagtaacacaaccagataacagtcattttacaccccaggtgcacatgag

SEQ ID NO: 332260 - DNA, 515 bp, Homo Sapiens
ctgttccatgtaagttacttttatttatgatttctgcaaaccaaagccactgaaaatgtgaaccaaagagctcatttttgttgttttcaggagacaagccagaaattaaaaccacaagacgaggctcggaaacaaattcagcagtgcccaaataagactaaacatttacattgcaaagttctgcctatatctgttatcacccctaacttaaaacaagctagccctgaaatagctgcgagtgacggatgcgttcatgcagcttcctttgacgaaaggtaaccccggaggatgagagcatttcaagcaacacctccaagtgggcaaaaggacaagggaaacgtttaaggcaaaagtttctgctgcttttgctgaatgaaaggtaaagaaattcaatatttttggaaatggggcacattaaaaggaacaacttgtccaagtttaacaaaggactacttttcccaaatagccaggacttccagttgccaagttcgaggttattgacttcattctaattc

SEQ ID NO: 332261 - DNA, 435 bp, Homo Sapiens
  misc_feature (50)..(50): n is a, c, g, or t
  misc_feature (229)..(229): n is a, c, g, or t
  misc_feature (378)..(378): n is a, c, g, or t
  misc_feature (382)..(382): n is a, c, g, or t
  misc_feature (403)..(403): n is a, c, g, or t
  misc_feature (406)..(406): n is a, c, g, or t
  misc_feature (408)..(408): n is a, c, g, or t
tgaaaacatcagggggactaatgaacaggggcactaactgctgaaacccntacagtgtctttaagatgcaagaattagggttgaaaaccacactgaagtaggtgacactctcttcttccttatccgggattgagttggttgttggtgatcatcagtctgatccactccaagagagatcgtagcagggtccagtctgtgctctcctgcgatcattcgccatgactaggangttaaaactacacaaacgcggcgatccaaaacccggggacccgcacgcccagatgaccgggacgaggccatacttcacatcttctctcacagactcacaattacgcaacggtcacctcaaacgactttatgcggacactcccggacctntccntgtccgcccctcctcgtcccnttncnccgccggggtgagcctcatccacccag

SEQ ID NO: 332262 - DNA, 525 bp, Homo Sapiens
  misc_feature (28)..(28): n is a, c, g, or t
aaatggccctcccccaaagaagaaaacntccagggtcttgtggctgcaacccatcaacgcccaatgactgagaaaggttttaaagaaagactggcatcagctgtttcctcaatggcatcagtcacttgttccgcagatcaaacagaagacatgtgattgccatgaatcggcaggatttaccttccctgttaacagagtgagatcctttctgtaatctcctaacactgcatctggtccatactactttaaccttttaataagacccctcttatccctggaagtggcttcttaaaacagtcttgtttgttcatcagggacccacggacaatgtcagtgtgttcttcctccctgttttgccgttttcctggaaggccagatcccatgatagagataactaaaatgactttttctggatctttttccgtttcccaaaaatctgtggtcctgctgcatccattttactattttctcatcaattctgcgtttttcttctaggaaccttactttcctaaggtgtgaaatcaa

SEQ ID NO: 332263 - DNA, 361 bp, Homo Sapiens
ctaaagcccaagtataaaaggtcttattaaagcatcgacttttaggattctgggagctctagaaatgtaccatataattgcagggcagcatgacattatactacaaggactggcggatctgtgacactggccttcagggaaagagacgcaagagtcatagttactgacctgctactactaaccggctgtgtacttggagcaagattctgttttctgtaacttacgatgggactgcaccatctgtcagctcactctgtaagccttaggtactttaattatcacaagatagttgcaaatacagtatgcaattgaaagctaatctctcagcagtgccctctggtctcacccccctgctcctaga

SEQ ID NO: 332264 - DNA, 505 bp, Homo Sapiens
  misc_feature (363)..(363): n is a, c, g, or t
  misc_feature (483)..(483): n is a, c, g, or t
ttgtagttaataattgccttgtattttattttgttagttttcaatgcttctatgataattttcctcacattcccaaatagctctcaagtcaaaaaatgtaatataatgaaatctatcaaataaacaatcacctctctcaaattactgtctgtcattttgctccagcatgcattggatttctgcagagctgacatcctctgactttgagttgttgctatcctgggaaagctgttgctcctctctgctgtattaggatctctcgtttcttggggatgcacagcatcttcctttcttgggtttttatctgttataggtggggaattcatcatccaggtaggtttcccggaaaggaatgccattganggggttaatttgggagggggaggaactttaccatggtccatggccctccataattttggattggactggtttggggctgggggatataaaggttaatatggttggccaaatggatttttncctataccaattttggaggggg

SEQ ID NO: 332265 - DNA, 384 bp, Homo Sapiens
tttttaacttataaagaagtttaattgactcacagttccacacggctggggaggcttcaggaaacttacaaccatggaggtaggggaaagcagacaccttctccacaggatagttacgaggatgtaagcacgagaaagaggaactgccacgctttaaaaccatcagatctcgtgagaactcactcactgtcacgagcacagcatgggggaaactgcccccaggatgcaagtacctccacctggtccatccctcaacccgtggggattgtaattcgagatgagatctgggtggggacacaaagcctaaccatatgggttgggacggatggcagttatttccagtggtgggctgtagctcttcctccaacctacatctcctgtttc

SEQ ID NO: 332266 - DNA, 428 bp, Homo Sapiens
ttacaataaggaattatatttaaattccacactgaagatctggagtatgggggggatataggaatttcagcatatgtattatctgaactaaatttacaaaagtggaacagttggaaggtacttataggtagacctgagggtctgttaccttattttcagttcagtgaaaatgaaatgagagcagattccagattttaccagcggatggaagactccatcttcccatcatgctctcagcatgcacctctgataagcagcttaaagggaatttcctgggggtcagacataaatagagattctcaggttctcttaatccagacacacatcgcttgcgagttttgggccttcattaaatcttcaaaaacagtcaggcaacatattgaaagggcatgtttgtttagaaggctccaaatacatttaaattggga

SEQ ID NO: 332267 - DNA, 430 bp, Homo Sapiens
  misc_feature (400)..(400): n is a, c, g, or t
  misc_feature (405)..(405): n is a, c, g, or t
  misc_feature (411)..(411): n is a, c, g, or t
ttcattgtatttcttttttcattctctgagactctactcagaacgcagagtctgacgcagtatcttttgagctaaagctaaactcaagaacttcggcagccatttaatcttcaggaagccctgaacacaggcaagtctcagtacctttataccactagggccctgcagagtcagacactgggaacatagacagttacagacaacagtaaggatactgtgcctgatgaatacaaaagtgcagggtggtggaaagtgccctgctgggaagtgcctgggattctaatttccactatgtgctagttggctgggtgacctacaacaagctacttttcattcttggggtgtttccttcttacgtgcaaatggggccagatgggatgcctactggtttaaataaaangccancaactngattggatcccttacttgg

SEQ ID NO: 332268 - DNA, 450 bp, Homo Sapiens
  misc_feature (434)..(434): n is a, c, g, or t
tttttattctttgcactttgtgttttctaagtattccatagtctgaatgaattagcttcataattaggaccaacagtcataagcaatttctcagaccacctgcctcataaaacccaaaaaaagaagtcagagaggggtgaatattttggtacagatgaattcaggttgtgtaagtggagaggagggaggtggccaaggagcctgaagtgggggaggggggctgatgtgaaatagggaatgggtggcgagaaaatgattgcaaaattggctgggagccagcctgggtcaggtcaactttgcaggtgtgtgaagtgtcaaatgggttaatcagttgccctctattttgagctactttaatgccacaaggggcctggggtttgaacaggttttgaccctccattttactttttttcctttaaagctgttttaggccncttttccctaaaaact

SEQ ID NO: 332269 - DNA, 448 bp, Homo Sapiens
aacattgccggaacacccaaataaaattccatttttaaaacaatatttactggatcccagcacctagaagctaagccctccctgatttcctaacacagtatttatttttacttgcccctttccccccaaaataatattggctccttttctctctatacttccctaccctccccatgggatggagagatggaatgtgggaggcaaaggccagtgtgagcactggctctgaggtttaggcctcgatattcaggagagtggtgtaggaggaagatgaaccactgggttttagacacatggaggcttagttcagggctttgggcctcccggttagtttgtttagtcttgttgatctaggaggagatcacaccagatgaaaggatacagttgactttggaggagggtgaagcagagctgggaaaagaatcagataaagtcattagacaacata

SEQ ID NO: 332270 - DNA, 383 bp, Homo Sapiens
aaaactgaatgtgtgatttattatgtttaagattggtttataaggcttaaatatatctgtcatagttaacagttaacagcaaataaaggcaactttacaaaatcagtgtttccatacagtacaggactaaatgtggcaactgtgcattggaaaattaatatttcctcaatgcaaatatcaaatctgcagcaccatttagaagcttccactaaaaactcaagctgcagtatttattacaagctctactcaggaacacaagggctaccctaaatcaaggcattaggaggaaaaacagtggggggtcattcaggggcattaatatggtcaggatttggggtccaggggttttaaaatacttaaccattttttaatgtcccgggggg

SEQ ID NO: 332271 - DNA, 480 bp, Homo Sapiens
  misc_feature (225)..(283): n is a, c, g, or t
  misc_feature (398)..(398): n is a, c, g, or t
  misc_feature (409)..(409): n is a, c, g, or t
  misc_feature (415)..(415): n is a, c, g, or t
  misc_feature (439)..(439): n is a, c, g, or t
  misc_feature (462)..(462): n is a, c, g, or t
gtagctatgttttaatagtggctccatgtcagtagcacagatatagaacattctgtcatctcaggaagtaacattagacagtgctgctttagaaggtttgtgtactatttactgttgttatactttatccaataaagtcagttgctaaattgtatgtataggaagtaaaaccaaagaatcatttactttacaaaataatttctgtatatgttatagattattgtnnnnnnnnnnnnnnnnnnnnnnnnnnnnnnnnnnnnnnnnnnnnnnnnnnnnnnnnnnnagcagaaacagtcctgctccagctgtaacagcagcatctgtgaccaacatacaggctactggaagtttcctgtgccacaaggtaaattcccggtggaaagcttcaggggggggtncatcgaggtgnaaaggnttccctcaaaacttgcccacacancccaggccattttttccacccanccaaaggccttcggggct

SEQ ID NO: 332272 - DNA, 423 bp, Homo Sapiens
  misc_feature (45)..(45): n is a, c, g, or t
  misc_feature (266)..(266): n is a, c, g, or t
  misc_feature (356)..(356): n is a, c, g, or t
aatttacaaattagaaagtagactggatatggtctcctgacctangaagataaagtaaaattccttaacatggattataaggataataatcacatagctatctccaatgtcatctgccaatcttcattttatactttgtactctatcacagaattgcttatacttccatgtaaatatcacacctatctgcttttgtttatatacccttcccaattttttcttgctaactgtgtaagacttgggttcaggggacatcccttctaagngggccttctttggaaccctcaacttgggtagggtgctcttccttggatttccataactggcaagggcatacctcttattaatacattttnactatactatattggagggtttggtttttaaatccctcaccactgggtttttagggtcccggagggg

SEQ ID NO: 332273 - DNA, 455 bp, Homo Sapiens
gcagatttgtgtaggggatggagaagaacgtattatcatcaagtaaacaaaggcatggagctgtgaaggtgagggtttctctagacacctcacaatgagtccagagttcaagcaggaaaatggtaccgtggtaaggcagttaggtaaagaaaaataagttgaatccccaaaataaagggccatgaggagtaggcaaagggttttggactttgcatcctgcctcctcctcctagactggtgacttacttcctgactagaatatgagatttctgaggacatgcccagcatcatgttctgcacgtaatctgcaaacaacattccatttattggtgactaaacactccggccctggggtgaaactgcctgggttcaaatcctgccccattccttcctgactgtatggccttggataacggtagttaacttctgcacacctctgtttccttatctgttta

SEQ ID NO: 332274 - DNA, 410 bp, Homo Sapiens
ttttttagcatcttcaaacaacgttttattatctctcatggtgctgggctttgaatggcatcagtgaggcagttcttactttgttctcagacggtggctgggctggagtcatcttgaagccttcctctctcatgtctgacatttgatactgctgtcagctgaacatgtacacgtggcctctctgtgtggcctgggctgcttcacagcatggtggttgggtcccaagagctagagtcccaagagataataagtggaagctgctagtgcttcagtctgggactgggagactggcagagcaccaccaccatcatatgctattgatcggtcacagagtttagataaaggcgaggataggatagagatgccacctttacttggggccatgcttttaaacctcgtgccgaattctt

SEQ ID NO: 332275 - DNA, 438 bp, Homo Sapiens
  misc_feature (42)..(42): n is a, c, g, or t
  misc_feature (395)..(395): n is a, c, g, or t
  misc_feature (405)..(405): n is a, c, g, or t
tttaacaaatcattttatttagaaatgaagagaatttgtaangtgaccgcatggcttcagaggcactgaggaggagggaaagccagccatgggccggtctttcctcccctcagcagaaaggcctcccggagaacgcgggtcatgggggccaacactctccatctccacagccacccagtgtgataggcaggctaggaatcctgttgacattctgtggtgggacactgacggccaatgaaatgcccaaggcccccagtggctcctgctagactgaggggcacaggctccgatgtgaggggagcccagccagggttggcttcttgccaaggaaggcagtttcctgggggtcttgcaatttccactttttggggcttacagaagggtgcttttgcagnagagagcttnagccccgtgttgggttccaggggtttgggtttt

SEQ ID NO: 332276 - DNA, 415 bp, Homo Sapiens
  misc_feature (305)..(305): n is a, c, g, or t
tagggttcaagcaacgctctctcagagtagctgggactataggcacacaacaccatgccagctaatttttgtatttctttatagaggcggggttccattatgttggctaggcagatctcgaactcctggggctcaagtgatctgcccgcctccacctcccaaagttttggggattatagggtgagagccactgcgcctgggccgggccgggataatttgcctattaaacacactctgttatcttgggcttcctaggtgactttccatacggacttcttacttcacagagtattttttctttgctngcttcatctttactatttttcatggggataaattgggagctatcagttttctctataggttctaactcttgacctttttccttactgggttcagatgggctaaggcaagc

SEQ ID NO: 332277 - DNA, 440 bp, Homo Sapiens
  misc_feature (47)..(47): n is a, c, g, or t
  misc_feature (49)..(49): n is a, c, g, or t
  misc_feature (148)..(148): n is a, c, g, or t
  misc_feature (190)..(190): n is a, c, g, or t
  misc_feature (265)..(265): n is a, c, g, or t
  misc_feature (363)..(363): n is a, c, g, or t
  misc_feature (394)..(394): n is a, c, g, or t
  misc_feature (414)..(414): n is a, c, g, or t
ttttaaatgagaaaaacagactttttattcagagcttgcgttacaangngaatcagccacgatctcttgtgtttagcagactcagaggcagataggtttatagtggggggaaaggggcaaggttcaggaatgctctgcttggagggtnttggcatgaggaagctggaggctgatcagctcactgcaggtntcttacaggattgctttggggaacctatttggctttctctgattgggtcccatgttgggaagaggaaggaaaatnttggggatgatggccagtaactgagtaagtctttgacccattctgaatgggatcactggggggagattgtgggttttggcttccaggggagttggttnctgcagagggtctggggtgagagttctattntcacagaagctcgtccattntccgtgtgtatgcctagtcccagagt

SEQ ID NO: 332278 - DNA, 578 bp, Homo Sapiens
  misc_feature (15)..(15): n is a, c, g, or t
  misc_feature (25)..(25): n is a, c, g, or t
  misc_feature (78)..(78): n is a, c, g, or t
  misc_feature (162)..(271): n is a, c, g, or t
cctttccagggttgncctccattgnctcccagcttcaaccctaagccctcatggatccctcagagccctatttcttanggtgagtagaggagtgtttgtaatcaatcactgtgacttgtttttgtgctaaaatacccctttttatttttgaagatggggggnnnnnnnnnnnnnnnnnnnnnnnnnnnnnnnnnnnnnnnnnnnnnnnnnnnnnnnnnnnnnnnnnnnnnnnnnnnnnnnnnnnnnnnnnnnnnnnnnnnnnnnnnnnnnnttagaagatgcactttttaaagaggtgaaggggagcagagtggaatagtggtattgtgacagttacctggaaaacttctaactcctcttcctaaatttacctcttacagagtgtcctgtattaggtagcctcagtttccttcccatgtaatgcatacatagttatttgttattattgcccttagcaggtaaggctgtattaagcaatttatgtgagagaagaaagggagatgacatgattggtggggagccagtttagttaagtttctttggacaaataggacttttgagaaatctgaaaagaataa

SEQ ID NO: 332279 - DNA, 416 bp, Homo Sapiens
  misc_feature (194)..(194): n is a, c, g, or t
  misc_feature (208)..(208): n is a, c, g, or t
  misc_feature (258)..(258): n is a, c, g, or t
  misc_feature (331)..(331): n is a, c, g, or t
  misc_feature (371)..(371): n is a, c, g, or t
  misc_feature (396)..(396): n is a, c, g, or t
ttgagaggaagttcccctttattcagatcctttccaggtgaccccgggtggccatacgtttcaacttttccctgcaagcccccacttcctgtggtgatgggaagccttcgccttggccacccagagcccggggagtctgttgaggtctctatatattcagcagggacccccatcccttcctgtccccaggcctntgtctcctcaggantcagagctggttctctggctcaggctccatgtccttccccatccccaggnctgggggctttcagggacgttccatcaacccacaggagcagctcccagaggaacctaaggaagccacatctgntttgtgggtcgatccagcagtaaatgtttgtgtcagagtntagcaattcctagggagatgggagnttttcagaggggtccatggg

SEQ ID NO: 332280 - DNA, 432 bp, Homo Sapiens
  misc_feature (408)..(408): n is a, c, g, or t
  misc_feature (416)..(416): n is a, c, g, or t
gatgtacgaaactgagatttttactgacatgcagatgtgctttagagttaatgtttctacaaaaagtttctataaacaatagaaaatttctagcatgaagtcacaggatgttaaaaatattacaatgcaataaatacaactacatcctccacagccccaaccagacaggattaggcagctatcaggtttggagggaaacactcttgagatcgccttcacgatccacagaaacccagagcaccacacaggaagagggagcaacacaagactcccaacttctgcttccccagctttgcttcttctcaatctgaccctgcctgtgggccggcaccagcttaaaaactgtaggcttcaggtccactttcggctctcgggggaaaccctcttgtcagtgggactgggatgggncaacaggnctgtttttgtggcagg

SEQ ID NO: 332281 - DNA, 166 bp, Homo Sapiens
tttgtccttgataataaaacaaatttctctaagtggttacaacaaaccaaaacaattcttgggagataagtcttctccataagccgtgtggatttgactgaaaatagtaatgtccctttggcataccaagagagcaaaaatgagagaaagatacatagaaaagagt

SEQ ID NO: 332282 - DNA, 476 bp, Homo Sapiens
  misc_feature (13)..(13): n is a, c, g, or t
  misc_feature (61)..(93): n is a, c, g, or t
  misc_feature (236)..(253): n is a, c, g, or t
ccctgtttgaatnccccactagacatttaaagttcctacaataaaccccctcgaagatgcnnnnnnnnnnnnnnnnnnnnnnnnnnnnnnnnnccccacaatcaagcatccatcgactccccccaagtaaacaaaatgggtaatatccaaaaaaacagataaagctgtcatcccacccaaaaaagcggagctgcccgaccctggggtcccactaaagaagctgacacagttagctnnnnnnnnnnnnnnnnnncaagggtaatacaaactctagaaaatatactggttacagctttgataattgtatcaacggtggtaagtctcctcatgtctgcagaaacagctgcagctaattatacttactgggcctatgtgcctttcctgtccttaatttgggcagtcacatggataaataatcctattaaagaatatgttaataatagtgcgtgggtaccaggccccacagatgatcgttg

SEQ ID NO: 332283 - DNA, 378 bp, Homo Sapiens
  misc_feature (348)..(348): n is a, c, g, or t
  misc_feature (359)..(359): n is a, c, g, or t
tgacgactgcacccggccttaccaggctaatttttaaaaacatgcgtttttaattaccaggatttacctgataaaactactctttgtcaaggttgtaggacttctgaaaagacagaactagctttgttgcgtttcacgaaggacagatcagttcgtctgtataggctataagcaggtaagtagtgcactctattgggtgaaggatttctgttgttttgggaaagccaactatagctgggctgcatgggaggggaaatcccaaaatccaggatgacgtgggtgttgagtcaatggggatgagggaaacactgggtatttttccttttacaattttcatttttacaaggngcacatttaancttaaatttttatgggatt

SEQ ID NO: 332284 - DNA, 202 bp, Homo Sapiens
gtaggatttttattggtggcacctggggctagtgtgtaataaattgtcacaaaattggtggcttcaaacaacagaaagttgttttcacacagcttgagaggtcagaagaatgaaatcggtattattgggccaaaatcaaggggtcagcagggctgcgttgcctctgggagaatctgttccttgcctcttccagcttctcctt

SEQ ID NO: 332285 - DNA, 435 bp, Homo Sapiens
  misc_feature (16)..(16): n is a, c, g, or t
  misc_feature (25)..(25): n is a, c, g, or t
  misc_feature (62)..(62): n is a, c, g, or t
  misc_feature (67)..(67): n is a, c, g, or t
aaacctggtataaccnccataaaanattccaggtgacctcaccccttgtaaaaagggatttncaagncctcctggccccctagtgaaagcaaggatccatgtgaacacctaatccttgacccagcgaaatgtaaaatgaaacctaatgtgtattaagttcctagctgaagttttttatgctcctctgttccctctgcccaagatgacccaacagtgttcccagaaaaaaaactgcccattgattttagctgagaccctcagaggcctgtgtagtgtgaggagaaataaatctttgttgttgtaagccactgatttcggggatcattgttactgtagcataacccagcccatactaactgatattatgtggattctgtcaccatctgtgcagagtaggccattgagatacatcaggcaatgatggattagaatgaa

SEQ ID NO: 332286 - DNA, 343 bp, Homo Sapiens
  misc_feature (254)..(254): n is a, c, g, or t
cccaacccctggggactcaggaaaatgtttgtaacaaatgttgggtgggggtggggacagtttctctgtggatggagtttattataagcagccgtgaaaatggatcctgtaatctctcagtaaacggaagccaattaacatcctatctgccagccgataaaggctgttttcttttctagttaataagcattaactctgcctaagggatccgggcacatcttacataatgctgctgcccgttaaccccaacttcngcaggctgcctcacaaatggggagtttcttcctgctgcatttgctcctgtgtgcctttcagacaatctttggttaaggcaacccttgtt

SEQ ID NO: 332287 - DNA, 361 bp, Homo Sapiens
  misc_feature (50)..(50): n is a, c, g, or t
  misc_feature (324)..(324): n is a, c, g, or t
  misc_feature (326)..(326): n is a, c, g, or t
agcctgggtcgtggagacccctaacccagtggctctagaggaattaagancaaagacacagaaataatagtgccagagtgggaatcggggctcacagccttccagagctgagcttgaacagagtttgacccacatatttattgacagtaagcctgtgataaacattattcctatagattgtagatcagctataagtattccttatgagaaagaaagggacaggctctggcttgttatctgcaacaggaatatgtccttaaggcacaaatcactcatgctattgtttgtggtttaggaatgccttgagcagtcttccagttttcntncctgggtgggccaggtgttgcttgccctcattctg

SEQ ID NO: 332288 - DNA, 400 bp, Homo Sapiens
  misc_feature (61)..(61): n is a, c, g, or t
  misc_feature (110)..(128): n is a, c, g, or t
ttaaacacagggaaacaactttttaaacaagaggctggaaaaaaggcaaaccctgggggantgcctggtgaaatcttcctatccagtgatgaagctggagagaaaaaggnnnnnnnnnnnnnnnnnnnaagtcctgagggtgttgcaccaacagtgcagttggcttccctggtcttatagctattgcgcccttggaactttggccccatcatggttctttacgcctcttactatcttgcaagctttaggcttctactcctattgccagttctttggaacttccatatttctcattcagattcccaacataagtccctgttgggctggctgcctttgctccaggtgcccatcactggtccagtcagatgggggcagggtattgaagctcatggtgctagct

SEQ ID NO: 332289 - DNA, 358 bp, Homo Sapiens
gagcttatgttcagtggaattttataggaattatttgaggtctggatagaagaatattccaccaaagagaatataattttaatccttctaagtgatttatctctgttgactaataaccgctttaaataattggcttgaggtttttttggatatcagaggaagtaagtctttttattctacctagcatctagtttttgatagacaagtttccttattatacccctcttctggttggtttgggcttctcattgttgctattgttgttcacttttcactgaagatataagggctttctgggtttatgtgtagggtctcctctcaggcctctggcatgttgggggcagtctcttttgtcctc

SEQ ID NO: 332290 - DNA, 356 bp, Homo Sapiens
gtttgtcttttaggaaaaggcaggcagcattaaagaggtgctctgagacaaacattttttaaatccagaacatctaaaatacagggatagactcttatcaaagccatgtggctccatcctgagattgctgttgcagtccatccattggtcttgttctgtttgctataatagcatcacttctcccccagggctggtacccgagctggacaaagtgagtgggataacagcatcaagcagtgtattgcatagcatccttgttctgaaaacttttaaggacttttaatgtcattttaacttttaaaaggtttttgtccaagtaattcatttttcataggaaacatgtttcagaggtttta

SEQ ID NO: 332291 - DNA, 365 bp, Homo Sapiens
taagagtcagttgaggaccattaatttagccccagaaaggttgctctgcagatagtatggataataaagcaggcccatgttccacagctattctgagctgcccgtgtttcactgcttctccatttctgactgaatatgctggagaaatatgtggtcctgctaactctttctttttacctctaaattttaaggcctccggattttgggctcccaccatatggcatttgttttcattgggtagggcctttaggcagtttctgtttcacctgaggtcttggcaggcgtctgctcctttggcttaggtaaatcgtgtcttttcaaactgtaggctcccttaacaatagtgttggacacgtggggattta

SEQ ID NO: 332292 - DNA, 614 bp, Homo Sapiens
tctttgcaatgtgattctgtcatgaactaactcctgtctagctctacaagcaaccctgagaacagcgcctttatccactggctggtgtggtaggtaagtataagtgctacacaacttctccttcttgtgtctctcagtctcaccggattcttctgtctcacaggattctttcctggaagactgtgctaatgacagagtggacttacacatcctaccccacccaggtgcattgcccgaggtcacagcaggggctaggagcagtagagcagaggtctgaccctgcatctggggctgcagagctggggccctttgcagctagaatcttctggcctcacattcctcaggtctagctacttatcagttgatgacatggttgtcacatttccacaaatggcggccactcaaattcaccaccacacacataacaccccagcccccaccagcccaaaacagctgctggaaactagcagaaagcagactattgctttccataatcctttcctctcccagttccaattacacccacacaaggagagccaagcactgaaaagcctaggaggagggattttatcaagtcagagagagcttcacagccctctgctagccccagtgag

SEQ ID NO: 332293 - DNA, 553 bp, Homo Sapiens
  misc_feature (532)..(532): n is a, c, g, or t
tcttcaccatttttggagagacctgggcctcccctgctcgcagcaggtttcaaaaccactccaggaaagggcaaacttgaaatctcccctgcatggtctttattttctgagtcttcccttgctggttttaaagggccgcttttggacctgactcccaggggagctggggacccttttgatgaagacacattcttcatggggctttcgtcttcatgggagttctcggtacttaggggcggcttctggccaaaggcgggtttggggaagaggggcttgggttcaagatcttgtgatgctgacataaatttccctttaaccccagtcaatttgggaaacgcttgcttctgttcattttctgaggttggaggagtaggcccagatttcgggcctagtggctttaagtcatggtcttggtttacactgtgaagagatggcttgtttccaggaggccagggaaatgtaggtttggaatcttctttgggcaagttgatgggcttggggcctacaggtttcagaaatccaattttcgccncgctcgtgccgaattcttggg

SEQ ID NO: 332294 - DNA, 353 bp, Homo Sapiens
  misc_feature (124)..(124): n is a, c, g, or t
  misc_feature (296)..(296): n is a, c, g, or t
  misc_feature (330)..(330): n is a, c, g, or t
agggggagatgtttttgtaaaaaatgcaatgtctttatataatttccccatggctgggaatgatgaagagcaaaccaacgggctgtgcacgcggtgactctgtgtgcctgggcctcttcctggngtcacccgcataacctcctggcacagacactcagctgccacctgacagcattgcttcaccttcttccctcttcccctccagggcccccagaaccaacaggggaagttggttgctaatggcaacagtcttggggagcaaggtgagaccctaccagccccacccactgacgggntgaagggggaaattttcaacaagcctcttggggncccttttctgtcaatcaagcggg

SEQ ID NO: 332295 - DNA, 330 bp, Homo Sapiens
  misc_feature (111)..(111): n is a, c, g, or t
  misc_feature (116)..(116): n is a, c, g, or t
  misc_feature (168)..(168): n is a, c, g, or t
  misc_feature (224)..(224): n is a, c, g, or t
  misc_feature (253)..(253): n is a, c, g, or t
  misc_feature (262)..(262): n is a, c, g, or t
  misc_feature (270)..(270): n is a, c, g, or t
  misc_feature (293)..(293): n is a, c, g, or t
tttttttcacaacatggttttggtttaacagcagcttaaaaaggaacaaaaaggaaacctctcatgcagacacatcaggtggcataaaacaataggcaattccacgcgganatcanttagccattctctctgtccgcacacaggactctggctgcacctcaggggcangagctgctttcaggtcaagtctctcaccctctcaccccaggcaaaagcccttcctntccggcctcaggctgacccctcctagctntcaagagantgaccaantgcgagtgcccttagtgcagcanttgctaccatcttcaatcccttcccaaccagctgggg

SEQ ID NO: 332296 - DNA, 513 bp, Homo Sapiens
  misc_feature (487)..(487): n is a, c, g, or t
ttaagtattttaggtaggtatcaccatttaggttgggtagaagtaattcttaaatcttaagaagcaatcatagatatgtgaaagccaatagtcattactagggatcatgattcggaaaaacagcctctcttcaatgatcctgaatgagccctttgaattcctctcctgcaactgatcaccccatgggtagtggtgagggatgggtgacaggaagggaccctaacccaaagtagttcagagcgggtgagttttagggagcatttcggtacccaaacacagcttcacggattgaggaatcatcagtcatccccagctttctatttcatttgcttaacctctctaggaacaactggatgttgtaaatgtttctcatctggccttaaaatccatgaaagctggaaaatcacaaggcatctgtacacatactggtggattttaatgagagtcctgtgtttggagcacagaaataaaacagtttcagaagcanagtaagaaaaggcccttgattatgac

SEQ ID NO: 332297 - DNA, 245 bp, Homo Sapiens
  misc_feature (97)..(178): n is a, c, g, or t
tgaggcactataccaggcagggatacggtttttcaaactgcttctaagagaggtggacccagaaagcctctgacctgcaccggagcatcttggcagnnnnnnnnnnnnnnnnnnnnnnnnnnnnnnnnnnnnnnnnnnnnnnnnnnnnnnnnnnnnnnnnnnnnnnnnnnnnnnnnnngcctcttaacagccaagccttctggggtgattcttgacacatatcggaatctggggaatcacttagg

SEQ ID NO: 332298 - DNA, 317 bp, Homo Sapiens
ccccaacccaggctcccaggctcctgcaggctccccagccgcccaggcaggaaggtgtggttctgtgccccaaggaagccagcgggcaatgggggtttgggaggctaggggcccggaggaggagagggaagacataaaaggggagaaggctcaggaagacttggggacagagaaccagagcagtgactctgactctgttctagctactctgagcttaagaggaaaagaagagagaacgggagcaagcttgtagggcagcaggcatgcactattaattggagtggaggggcggtcaggaatgagagagaacattcttc

SEQ ID NO: 332299 - DNA, 436 bp, Homo Sapiens
tttatataagcatttttaccatcagaagaagtttttaaaaaagtattatttcctgacatttttcagtactttgtagagaagtctctgataatctcatctctcccaggctaaaagcaatgattgtagtttaaatctgcagctactctgaactaggcctggagcagcctggtcagagctttactaaactctcagactttgctgctgtgaaattcttcctccttcctccctcttacaggtagcaatgaagtgatgaggatactgatctctaggaagcctgcttcagggagtaggaacccacacttgttctgggcctgggtgtttcagtgcgactgcagttcagtgtttgagtgggtgccatgtggggccgctctatttccaaagggattcatgggtttggacccaagggctgagctcctttagggggcagggacccgca

SEQ ID NO: 332300 - DNA, 410 bp, Homo Sapiens
  misc_feature (19)..(19): n is a, c, g, or t
ccccccttaaacccccacnactcctagtaaaatttaataataagatatattgtaattaattaatacatgaggtgaacccaaggctgtcccctgcacccgggtcacaaacatggagttttggggtaataaacagaaaatattagttcccccacaaggaaaaacatatggatgggtagtgcaaatcaggcactgatcagtgtgattatgaataaaggttgtagtatagttgtgactggaattatgatatgtccaatgcccaggtgtcaaaggaggtgctaagatgtcccaggcaccacaaagtgtcttggggtggcatggactttacttggggtctggaatatcctatccccccataggcccaaatcataggggaatgggacgtggctatgaaactgtgattggtgccatga

SEQ ID NO: 332301 - DNA, 429 bp, Homo Sapiens
  misc_feature (337)..(337): n is a, c, g, or t
ctttagcagagaaaacagcatcattttagaggcatagagaacaagtagcagttgcttcaccaggaatgaggcagcacacataggtaaatgtcatccctttccattcttaagagtccattatgttcgtaagagcaaaagagtagtgcagaaggccaaaattctaagtactaaagtttcaaaaccacagagatataaaaatatacataatccttggtctttgtatgtcactgcatgatctacttcatcacaaggattgtttcagcctcatagtatcagccctgctgcccaaagctaccttaccttgagctcatctgtccctggcaacacttgaattccntttcacaaacacacacctccccagaaagctaactctgaaactggtttgtaacacgaagagcagaaagccttcacttggattcattccttcct

SEQ ID NO: 332302 - DNA, 390 bp, Homo Sapiens
ttaaatccctaatgttcacaagtcatcatgtggaactaaaatcacacacaaaggcaaatcatgaggaaacgttaaatatttcaaaatgcccacgaggcgtgccaggaaacagtgctgtatctatagcacagaatcgttggaggccaaagctaaagcagtaggggctactgcaacttctagctctttactgctgcttttttgtttgtttgatagagggggattcaggtgagggggttcggtctctcaggaagttaggccataatttctgcaggttcagtgattaacttgggatccatcccatgctgtcttgaactgttcaggaatggggaaattctctataatcaccatcctgagggataagtatgttcatttcagatgacttggcgctca

SEQ ID NO: 332303 - DNA, 253 bp, Homo Sapiens
  misc_feature (55)..(55): n is a, c, g, or t
tttcttggaacttctgaaaggcagcaagcctgtatagccgggctaactttcaccncatcctcctgcctcgtctcacctctcccttcccttttccttgcctgtggatgctgacctctgcatgggtgcctgcttctctaaagctacgatgtaatctgtagctgtccttcctcgtttgagacccacatgtgaacaccccatatgtgtgcactttttctgcgaatggtgatcatctgattttcaaggggttctttag

SEQ ID NO: 332304 - DNA, 375 bp, Homo Sapiens
  misc_feature (165)..(165): n is a, c, g, or t
  misc_feature (177)..(177): n is a, c, g, or t
  misc_feature (329)..(329): n is a, c, g, or t
  misc_feature (335)..(335): n is a, c, g, or t
  misc_feature (357)..(357): n is a, c, g, or t
cccttgctttatttgtctgacttgttcacagttcagccccctgctcatgaaaaccaacgggccagctaaggagaggaggaggcaccttgagacttccggagtcgaggctctccagggttccccagcccatcaatcattttctgccccccctgcctgggaggagcntccctggggggntgggaatgggtgactagaggggatttcagtgtgggacccagggtctgttcttcacagtaggaggtggaagggatgactaagttctttatcacagacctacaaaaaatgaggataattaggatattactctcactagtttgggcttctttttncttttncttttttacaaaacagcagctnggaagagaatttagggtg

SEQ ID NO: 332305 - DNA, 320 bp, Homo Sapiens
  misc_feature (298)..(298): n is a, c, g, or t
tttcagggagcatggtagcacatgttcttttatttcatgctggtcaggtagtttggcaaagatgacattctttgttgataaagaatagtcttatttagacttataagttcattttatatagcactattttataaagcacacaaacattaaaagaatgcagaaccaaatggcatttaaagagctttgcaatcctagaattctatgattttctaatatgtgaatgacacttgtcaaataagtatcagtataaacaagtacagcgttccctgtagattcatgtctgaagagggagaggaanttcccaggatgtgttgagggca

SEQ ID NO: 332306 - DNA, 436 bp, Homo Sapiens
  misc_feature (11)..(11): n is a, c, g, or t
  misc_feature (24)..(24): n is a, c, g, or t
  misc_feature (45)..(45): n is a, c, g, or t
  misc_feature (64)..(64): n is a, c, g, or t
  misc_feature (82)..(82): n is a, c, g, or t
aaaggttccangtgccccctaagnaaggaacactaaaacccaacnccaccctgtgcctccaatnggaaacaaagaaaccccngggcacagccacacctgttgaaacccttggtttacctgaaatattttaaagcctcattgcctgagacatgcctgctcagaaagaaagatttctttcaaaatattactgcctcatttgacaatgcacctagttacccaagagctctgatgaagatgttcaagatcaatgttttcatgtctgctaatacaacatccattctgtactccacggatcaaggagtaattttgacttgcaactcttattacttaagaaatacattttataaggctataactgccatagacagtgattcctctgatagatctgggcaaagtacattgaaaaccttctggaaaggattcacaactctagaag

SEQ ID NO: 332307 - DNA, 356 bp, Homo Sapiens
  misc_feature (257)..(257): n is a, c, g, or t
gatgtcccaaagaacatggtgtcctcagaaacccaagagccagagaacatgtcaagttgaaggtagggttcaacgattgtgaaggcccgctgaacagcttgggtaaagataagacgatgtttatgacttctcctgacagcacagaggttgttagtggcccttgttgggagcaatgtgttagagctgtgggaggaatatctggacatgaagaggagaggaagggagaagttaagtgcagaccactcatttgtcaaagncctggctgggaaggggggcagagctaggaggctgcatggagcgggaggagctgggatgtggtgttttgggctctgatcatgggccactccataatgtcc

SEQ ID NO: 332308 - DNA, 397 bp, Homo Sapiens
  misc_feature (27)..(27): n is a, c, g, or t
  misc_feature (36)..(36): n is a, c, g, or t
  misc_feature (44)..(44): n is a, c, g, or t
  misc_feature (90)..(90): n is a, c, g, or t
  misc_feature (112)..(112): n is a, c, g, or t
ctgcctgattatttgggtttgtaactnccattatcnaagtttanagttaaagtcgtctgactttccccgtatgtcacatttgttgaaacnggaccttctccccctgtccctnaccccaaaacacccggaatccatccccctttcgctctctccagatggattctcttggggtttcattgtgctgtggataaggagtgtaagaaatgcaaattatgtgaatggctcggagactccctaatgacctaagatttgcattagtttttctcctgcacccttaaaagtgattttgttgccgctgcatagattctgtgtaactttttactcttccttgttttttccctagacatcttcatgcccggttaggttcatcgtttgcctagcatgtccctgtggcgac

SEQ ID NO: 332309 - DNA, 478 bp, Homo Sapiens
  misc_feature (42)..(42): n is a, c, g, or t
  misc_feature (47)..(47): n is a, c, g, or t
  misc_feature (66)..(66): n is a, c, g, or t
  misc_feature (84)..(84): n is a, c, g, or t
  misc_feature (97)..(97): n is a, c, g, or t
  misc_feature (169)..(169): n is a, c, g, or t
gaatcctatgccagcggccaacaaaaatccccttttaaaggntgccnggaagaaaaacctaatgcnaaaccttggggtccattnagggagtcctccnaagcccattccaccataaatttgccatttccttaacactcccttatcccacagccacaatgaaaaccccccnaagagaatccccctcctggagagagccgaaaaggggatggattcccgggtgttttgggggtgagggacagggggagaaggtcccagtttcaacaaatgtgacatacggggaaagtcagacgactgaactgtaaactagataatggaagttacaaacaaaataatcagacagatacaaacaacgagaggataaagcatgaacttcaggtctagggttcaacggtgaaaaaaagcccattcctagaacaattcctctagagactacttcagaaggttctagctagacagagaactgctctttaggtaccca

SEQ ID NO: 332310 - DNA, 443 bp, Homo Sapiens
ccattccgggttcgagcatcacaagcttttgagcgcatggaactccataaactaacaaattacataaactaaagggggattttctttcttcttttgtttggtagaaaattatccttttctaaaaactgaacaatggcacaattgtttgctatgtgcacccgtccaggacagaaccgtgcataggcaaaaggagtggagcacagcgtccggcccagtgtgtttccggttctgagtcagggtgatctgtggacgggaccccagcaccaagtctacgggtgccagatcagtagggcctgtgatttcctgtcagtgtcctcagctaatgtgaacagtgttggtctgctggttagaaactagaatattgatattttcaggaaagaaatcagctcagctctccactcattgccaaatgtcactaaagggtttagttttaaggagaaaga

SEQ ID NO: 332311 - DNA, 497 bp, Homo Sapiens
gtggtttttttccttttgtctccttaatacagcttcccactgaggcgctgaatcaaccatatcattctcctgccgtattctgtttctctttttccggtgttctctattagaattttctgattcactaccactgctggtgttacagcgtgaacgtgacctcctcctttgcttaagatctgaatcttcaccactgttatgggctttcctcctcctcacaggctgtacagaatcattgtcacttccacaggaggggtttcggcgacgcgtgtaagggaactttggcgacttaggtgcgatcactggggagaattgtagagtccactctggggggccattttcttcccacgggtgcatgaggatttgcttctttggggtatcaggggctattttcattctttgctttcttaaagcttttctcgtgttccgccttatcttgggttcatccctccagatgagaatgactttcaaatgctatttcctgacctagtatcatcttt

SEQ ID NO: 332312 - DNA, 425 bp, Homo Sapiens
  misc_feature (89)..(89): n is a, c, g, or t
  misc_feature (344)..(344): n is a, c, g, or t
aattaagaaaattttccggaaatccaactaaccaactgcctgggtggttaaacaaccgtgaaaacgtgaacctccctccctttggcctntaaagatctgaaatcttcaacccactgttaatgggctttccctccctccctccacaggctgtaacagaaatcattgtcaacttcccacaggaggggtttcggcgacgccgtgtaagggaactttggcgacttagtgcgatcactgggagaattgtagagtccactctgggggccattttcttcccacggtgcatgagatttgcttctttgggtatcagggctattttcattctttgctttcttaaagcttttccnctgttccgccttatcttggcttcatccctccagatgagaatgactttcaaatgctatttcctgaccctagtatcatctttc

SEQ ID NO: 332313 - DNA, 319 bp, Homo Sapiens
  misc_feature (289)..(289): n is a, c, g, or t
gaagagcttggagataacagaacttcctgagcatcaaaaaactcagaaagggagtcaagtgatggaagagtcctactttcattagaaagctgatgaactagagctcggttttcatctctggagttttcctctgccagattgtcacccgacttggcgacagcgggggagtcgaggagcagagactcggcatggattctgcgtaagcgttctttaagatctgtgttttgtgctagggcggatgacagggcgttcttcagaccaatgacctgagcagacggggaggaggagnatcctgctccatcagctgcttcagtttctc

SEQ ID NO: 332314 - DNA, 485 bp, Homo Sapiens
  misc_feature (342)..(342): n is a, c, g, or t
  misc_feature (386)..(386): n is a, c, g, or t
  misc_feature (402)..(402): n is a, c, g, or t
  misc_feature (415)..(415): n is a, c, g, or t
gccagcacctcagcatagagcctgagacccttccatgtgcctcgctccttccagtttcatccctgcagccctttgctccagccaagtcacctggtccctctgccacgtgtgccttctctgctcctagcttgtcccttctcacccttttggcatctggtgactcctcattttggggacctgggcctatccagatgtcagcaggaggctccatagtcatgtgcagctaagggctctgctggcgcttttgctttagggtctgtggacaggctccaggacacttgagggtcattgtgtatttgtggccttttctccactggggcacttttgcttgggggagggagncatgtggattacagggcaggcctttcatttggactttagggttnggggaaacaatttccntttttattctggncctttggaattttggacccccaggcagttttggggcctaacagggggtttcatttttcttttgggggcca

SEQ ID NO: 332315 - DNA, 495 bp, Homo Sapiens
  misc_feature (36)..(36): n is a, c, g, or t
  misc_feature (44)..(44): n is a, c, g, or t
  misc_feature (51)..(51): n is a, c, g, or t
  misc_feature (176)..(176): n is a, c, g, or t
  misc_feature (397)..(397): n is a, c, g, or t
  misc_feature (416)..(416): n is a, c, g, or t
  misc_feature (439)..(439): n is a, c, g, or t
  misc_feature (449)..(449): n is a, c, g, or t
  misc_feature (456)..(456): n is a, c, g, or t
  misc_feature (469)..(469): n is a, c, g, or t
ttttttaaaattttaataaaagtaaataagtaaatnacctcctncaccccnaattaaggagtcctgagttgatatggaggcatgattaccacccctagagaagcctgtagctgatagactgtgccattcagaaacttcccaagctaatgaaaagtgggcaggcccttcccagatgnaacaaaccacaggagcgctcaaaaacatgctttaaaaaatgcaggtgattatccccgtgtaagatgaaagggcttgcagggggagtggccactgagatactccagggaagcatcctagagttggtgagtctgaagcaagacagggcaagacctaggaagtgagctgagggtcttgctttcttcaagttgaggtctggggtgcaggctgaggaaacagattngttttaggcagggagcaantatggctttcttgccccaaaggnagcttttgtnttattgnattaggaacctcngggatggttaggaacccaggaagggc

SEQ ID NO: 332316 - DNA, 287 bp, Homo Sapiens
acccatgatttaagggaagaaagtacacaaggtcacatggagggtacacagggaaagtacatggataaacatggacgtgtgcaaataggaaagacatgactcagcatgctagacaaattgcacatgcctacccaaacacgctcaagggcagacccatgaccatgagaggggcacacgtagctgtgaatgcagggcacccgagagcacatgtgactgaacatgaagaaagcatacgggaaaagcgtgtgtacacatgagcatgttcagtgggcacacgcaggagaggg

SEQ ID NO: 332317 - DNA, 797 bp, Homo Sapiens
  misc_feature (253)..(266): n is a, c, g, or t
  misc_feature (484)..(484): n is a, c, g, or t
aacttggtgtgggtggaatagcaagtttctgatctaaaacaagtaatgcattgcttctataaaggtgacaacatgtaaggcagttcaaagaatgctgactaaccaaacgaaatgcagttattggattatcttgctattcatatcagcttaacttgttattacgcattgctcttaaatctgtacagcactccatttacacagagtaaccccactcttgattaatctgttctaaagtgccagtattatttacacnnnnnnnnnnnnnnagccaaaagtctggccagttgtggcatcaggtgaagatgtcatcccagctctattatcatttacattcaccaagggaaattctgaaaaattcagcacttgtccctggtccccgaaggttcacctgtccattggcagtgctaaattgagtagctattccagctcttgatccatgatagggagcacggaagggctgttcaaaaggagcctcaatttggtnaagcttggtggaacaggctgggcctcagctttccttctgagaagtcacttgatccagaaagtcctgtgttgatgtggcagaagcatggtttgtctcatcacctgaaaagggaaatgagtgctgtgaatcaccaactattagtccaaagtgggacttatctggagttgttcttagtggagaattcattcctgatcgaaagctattgatgggcatggtggcatagacctgcttgtctatggaagagaatgctggctgatttgggagggtctggttatcagtcacaaagttaaggctcgggctattcaaaataggc

SEQ ID NO: 332318 - DNA, 501 bp, Homo Sapiens
  misc_feature (453)..(453): n is a, c, g, or t
  misc_feature (460)..(460): n is a, c, g, or t
  misc_feature (481)..(481): n is a, c, g, or t
gagaattgttttaccttttgttttccagtgatgcttcccatctttcccaactaaccccaaacttgtgtgggttcacccctcacatgcacaaatcacaatttagccaaaaattccaaggaacccttctgtcaatttccagaactttttccctgtacagttttctttctagtattctgtcctgcaaattttagccatctaggcctccctgaactccagtttcagtctccagaactcagtgacactactaggctttgtttgggctcccactgcctgcactgcaacccaggaaactacctctagggcaggtaagcagggggggtaattatagagctggaactcatttgtttcccttttctctggttcaactggcatggttgttcaatgtcttgaggttgtttcacctatggtcctaggttttaaacagtggaaatgggctatttctataggcagttnaatcctncagggggaggaatcaggaggnccactaaataccaaacattt

SEQ ID NO: 332319 - DNA, 477 bp, Homo Sapiens
  misc_feature (325)..(325): n is a, c, g, or t
ctctgtttgcttggtttccaggcagtgggaagcaggacaaactcataatagtttgcaagagttgactatgtgcaaagctcctgactccctgttcagtgacgtcatgttggtagcctgaaatggaccacggtgggagttatttacaccatggaaactggaaaactctacaaatcaatgcgtttatttctttattttcagagggcaggtttatcagcacacgctgtatctcctctcctttgctggtatctctgaatccacctttaaagctggtccctttctcatctctggggctgctgggaatttgggagggccctggggactcagntcctcccaactttttctatctgcctgctcccttgggtggacctcactcaggtctcatgtctttaggcaccatcttcacactggatgacttccaaatggggttatcttcagccccaatttctcccctggactccggggtcataaatccaactg

SEQ ID NO: 332320 - DNA, 407 bp, Homo Sapiens
  misc_feature (357)..(357): n is a, c, g, or t
agtagaagcaggaacagttgtcaatactaccttctgttggtcccctgttagacaacatacctttctttgaaatgtaaaatgtcaaatatataatgacacaactttagaaaaaacaaactttgacaacaccaacaacaaaaaatcccaaaataaaccagagatttcatgccatataaataaagtcagagcaaatctcgtgcccaggggctggtggccccagttccagggggcgggtgatgtccagagctgggtgtgggctctcgggggatcctctgggtaacagggcgtgatgggaggccccgtctctcctttcccgacagaggccaaggtcttttcccaaggtcccccaaggcaggnttaggtacaggggttagggggtgaacccggggaggcttaaggttgaggga

SEQ ID NO: 332321 - DNA, 233 bp, Homo Sapiens
  misc_feature (207)..(207): n is a, c, g, or t
aggtgtatattttggctattacaccattccaactcattatcactaccaatttcctcaaacacctttagaacgtgaaatgcactatcagtttctacaccacatcttttaatcccaatcagtaggctgacttcatgaatcagataaggaaagtattagagatccaaaggctgaggtttgcaaaaaggaattaaggtaaaatgaaaaaanaaattctatttcaacggtggcaaact

SEQ ID NO: 332322 - DNA, 484 bp, Homo Sapiens
  misc_feature (64)..(64): n is a, c, g, or t
  misc_feature (137)..(137): n is a, c, g, or t
  misc_feature (178)..(178): n is a, c, g, or t
  misc_feature (222)..(222): n is a, c, g, or t
tctgtgctcccaatgccccttaagcccaatcttctttcttccccaacctccctccccaaaaggnaactccaagctcccaagagggaccccaagcaagcctccaaagtccattggatcccaccttttcaatgttcttnaactgcctctcatggcctctttctctgctcttcctgattcnagaagtctgtggtcacttgcaagtcatttccttaacccccatcnccacttcgctttgtcaaaaccagacttaaatccaactttctgcttcatttacgctggcacatgtacagcaaattgcagcagggaaagccactttgccaactggtcttgcttagcctcgcagacgcactaaggtcttaaagcagcccatcaaagtatactctcttgcaccactccagataactattttacgtttccttctctcaaaactcccaggcttcttccgtcttcactgttagtcgacaaattgctccttttttgagaa

SEQ ID NO: 332323 - DNA, 394 bp, Homo Sapiens
  misc_feature (18)..(18): n is a, c, g, or t
  misc_feature (29)..(29): n is a, c, g, or t
  misc_feature (109)..(252): n is a, c, g, or t
gggtcctcaaaacttggncctcgggcggntccacccggccatgggccccctcaaaagtgctgggggattaacagggcatggagctaaacacactcagccctcttttccnnnnnnnnnnnnnnnnnnnnnnnnnnnnnnnnnnnnnnnnnnnnnnnnnnnnnnnnnnnnnnnnnnnnnnnnnnnnnnnnnnnnnnnnnnnnnnnnnnnnnnnnnnnnnnnnnnnnnnnnnnnnnnnnnnnnnnnnnnnnnnnngagcatcagatttcaatcattgccttaatgctccacagaaagagattcgaagcataatgtgctgtggaaggaaaacaacttcctgtcatctatgctcacccctgtcatacagatctttcagaccaaccattcagctctctct

SEQ ID NO: 332324 - DNA, 355 bp, Homo Sapiens
  misc_feature (20)..(20): n is a, c, g, or t
aaagggctcccacactcaancccagactacaatgtgtaatccagtggaaggctgatcaaaagaaggccaccttttgtctcctatctatgtctaacgtggaaaccccccactttgaagttgttgctgcccttactggactaaaccaatgtacatcttacacatattgattgatgtctcatgtctccctgaaatacataaaagcaaactgtacccccaaccaccgtggggcacatgtctcaggacttcctgaggctgtgtcatgggtgcatctttaactttggtaaaataaactttcctaaattgactgagacctgtctcagatattttgtgttcacattagcatactaagcagtct

SEQ ID NO: 332325 - DNA, 456 bp, Homo Sapiens
aaattgagcagtagggacctcactggggccataatgggcaggaaataaagtaacatgtgagcttcagggggatgttgctcaacttcctccttattgttcttgctgtaggtggcaggtctccccaggtctctttcttctacctcctgagatgccaagcaggaggctttctcctgctgtgactagccatgggtggctgcttccagtttcagcaagtcctggccctcctggtttgtgctggtagttgctggcagtgactcaaagcaaagacccatctggtagatcaagcccttactgggtaatgctgcactccctctctgcacttgactcctcggctagcagagtgcagactatttctatcttcttgcccaaaaagggactctgggagagatgagtagaggaacatcaggttttcttccaggccgtcttcagccttgggatgttcaaagcaacctctca

SEQ ID NO: 332326 - DNA, 432 bp, Homo Sapiens
  misc_feature (53)..(53): n is a, c, g, or t
caaaaatgccacccctcaactggggtggggtcaagaactgccatgaaggcaantgtggcctgtgtgggagggaaaaggtcccgggaacctgtgggcaaaactgcctgctcccttccccaggaggcctacccaaaagccaaggctccttaaacatattgaaggttccctcagctgccccccagtgccctatatctcctaacaacagtaaacagtgaaatacctgcaggcaaccatgtcctaaataaagagataaatatttgaatcttcaagaagtggccaacttccgaaaggcatctcttggcaccctagaggagactgggatgaaagttgtaccggagactggagaagagcccgatgtgtttcacgaggttcggctccactacataggccctctctcccttggccctcaacagcgagtacagtgccatgtcc

SEQ ID NO: 332327 - DNA, 504 bp, Homo Sapiens
  misc_feature (13)..(13): n is a, c, g, or t
  misc_feature (450)..(450): n is a, c, g, or t
  misc_feature (452)..(452): n is a, c, g, or t
aaaaaataaaagncactggggccaacctgaaggaaccctcaaatatgttaaagaacccttggcctttggtaacccccccggcaggagcaagcagtttggcccacaggtcccggaccctctcccctcccacacagcccacacctgccctcatgcagtcctgacccccaccccagtgagggtgcatttgaacactgattatattctcccatttgtttttaagctctgctttgtgttaagagcttgtgactgcccaaaaattttgtgccacagtgatatgactgttttaggatcttaagggtagaattttgtgaaaggtgagatcctttggaattgagttctttctcattgggtatgaaaatggatgtatgtttagaatatatgcccaacgaggcaggaccatgtggatagattccatttgtttccttgacctgatgtaataaaaactgatananaccgtgcagtgcccggcatcttggaggcaggtgatctggcttttctgttaaa

SEQ ID NO: 332328 - DNA, 387 bp, Homo Sapiens
  misc_feature (295)..(295): n is a, c, g, or t
  misc_feature (356)..(356): n is a, c, g, or t
  misc_feature (371)..(371): n is a, c, g, or t
atgaaggatatataatacatagtaagaacttttaatgtacatataattggagtctcagaaagataggagagacagttaggcaggggcaatatttgacaagataaagatcaagaaattttgaaaactattgaaagatctcagctcaaagattaaagaaatttaatgaaacccaagcagaataactacaaaggaggctacacacatggcatgttgatatagtttgggatatttgtcctctggaaatcttcatgttgaaaatgcgatcccccaatgttgggagggtgtgaccctagtngggaggtgttttggggtcatggggagtgggatcccctgcatggatgggctttgggtgcccntccccctttcatggnttaggttgagtttttt

SEQ ID NO: 332329 - DNA, 449 bp, Homo Sapiens
  misc_feature (27)..(27): n is a, c, g, or t
  misc_feature (65)..(65): n is a, c, g, or t
  misc_feature (70)..(70): n is a, c, g, or t
  misc_feature (84)..(84): n is a, c, g, or t
  misc_feature (107)..(107): n is a, c, g, or t
  misc_feature (195)..(226): n is a, c, g, or t
gattatggatggaagcccagaattccngttggaattaccttcctttaaataaatgggcctgttanggganaataattggttccnccctagaattccctattcccccngaaaaacctatcccttcaaatgtaaagggaaaaagacattccccagacaaacaaaaactgaaagaaatcagcagcagacatgcacccnnnnnnnnnnnnnnnnnnnnnnnnnnnnnnnngctagatacagaagaaaattattctagcaaaagaaaaacacttccccacaaaagaaaataattcaagagataaacatggaaatgtagaaaggaatgaagatgaatggggaaatatgtgaataaatatagaatactttttaggatttaaaaaacataaatataaagcaaatactaggctagttatgaaaataatacaactatcgtaatgttagttgtgagctaa

SEQ ID NO: 332330 - DNA, 374 bp, Homo Sapiens
  misc_feature (11)..(11): n is a, c, g, or t
  misc_feature (122)..(122): n is a, c, g, or t
  misc_feature (131)..(131): n is a, c, g, or t
gccaatgaaanaacatgaaaaaggtggatccaatggaactggaggcctgcctggggtcccctctggaacctggagttcccattgggagggaggtgggaaagaaagaagatgggctaggggcnatgggagcnacagaagacaaggtcaggaaggctcactgagcttatgtgcctaagtgccccaaactggtggggagggtggaggcaggagaagcattcaagcacctgaggggccagggagctggaaaatcatttctgatcattaaaggtgaagagagggttccactatcactaaaaagtgccagacatcatgtccttccaaaaggcatacagatacacctgcaaaatctaacttgactctgcgcctctagatct

SEQ ID NO: 332331 - DNA, 422 bp, Homo Sapiens
  misc_feature (296)..(296): n is a, c, g, or t
  misc_feature (306)..(306): n is a, c, g, or t
  misc_feature (339)..(339): n is a, c, g, or t
  misc_feature (344)..(344): n is a, c, g, or t
  misc_feature (359)..(359): n is a, c, g, or t
  misc_feature (375)..(375): n is a, c, g, or t
  misc_feature (384)..(384): n is a, c, g, or t
ataatacaattttcattttattttaaacatattttgcatgatataaaaatattgatcacagtgagttttaccaattgttgttgctataaaaatgaatgcagaaacaatatttttagtggaaataaattatatagtcattcttttaaagaaatcacaagaggaaaatcttggctgtttggtcattggctgaaaacctgtctttacaagaggccttttgcagatgagctccagtccatttctgtaaagttatccacatgggttcaggaaagacagacttttgtctttgttagcatggncccacaaggncctcctctgttcacagacagttctactgtgggnaacanagtttttcccattantaggaaaattcgatgnaacctgggnaaacaggtaccaatcttttggcctccattttgtggggc

SEQ ID NO: 332332 - DNA, 392 bp, Homo Sapiens
taacaaggaaattttatctttccaaactcatctcttatgtattaaatgtcagcaccagcaaggaattccccacaattctcacctcgcaaatgtacactcttttctagacaccaaaaatcacaaagatttatgaaacattaggagctccaatgacaagcttatctttcctttttacagatttgccaggaacataaagacaaacatggtctactctacaagtttattcaaaatcagaaaccaaaacattttacattcacaaaatacaacacactatacagtaggttgtcaggaagcagatttaacagcccagggtcttgtctcttggacaaggtgctctattttacagatcaagttcagcacaggaaaataggatgttgtatcagtctgttttc

SEQ ID NO: 332333 - DNA, 531 bp, Homo Sapiens
gcatttctcttaatcaaatcctttgtaaattccaatgttgatttctgttgatacataatcatttagttaggccacatgatttcagagatgagggtgatctcagagacatctagtttggtgcttttacttcccgaccctggtgcagatgcagagatgttccgttcattcgtgcaaagtcaaggagcagccaggagcagaggcagatgagaacccaggtgctccaacttcccgctgagcacctcctgtgcatggcacctgcacagatgcctcaacgtgcacacaggctgtaagacgagactcttaacagtgtctcaagcaagtacttttctttgacagaggcagtgattgccaagatttagtgtggattaaaagcctaagacagtttgtattagaaaatgccagctctgtgagactatggcagacagcagtggaagggcacatgaccgtctcctacttctgcactgggcagccacgcccatcgcccgctgtgatctacagatttcggagaacgaaggtcacacttctgcactg

SEQ ID NO: 332334 - DNA, 404 bp, Homo Sapiens
  misc_feature (35)..(35): n is a, c, g, or t
  misc_feature (42)..(42): n is a, c, g, or t
  misc_feature (61)..(61): n is a, c, g, or t
  misc_feature (84)..(84): n is a, c, g, or t
  misc_feature (138)..(138): n is a, c, g, or t
cccccctttgaaagtaattaattgaccaaagccgncatttgnacaaagaatttaaagaccncatataaggagagccacagatgnattttgggtagcctggtcctgtgcacactgataaagaatcatcccgaagacatntcagagactaatgacaagctttttcccactgagaaataaagaggcaggacgttacccaatgtctgcattgctcagtaggcagtttttcacacacaaatgcagcactggaagaggtgtccagatgcgtgaatgatatgcataactttactaacgaaatactgacttgggatctggttccccaagtgaaacaacagaccgataaatcttctgactgcatcacaaaaactacaggacttgacatgagtgaatataattcagaaattcca

SEQ ID NO: 332335 - DNA, 380 bp, Homo Sapiens
  misc_feature (22)..(22): n is a, c, g, or t
  misc_feature (28)..(28): n is a, c, g, or t
  misc_feature (49)..(49): n is a, c, g, or t
  misc_feature (56)..(56): n is a, c, g, or t
  misc_feature (84)..(84): n is a, c, g, or t
  misc_feature (93)..(93): n is a, c, g, or t
  misc_feature (290)..(290): n is a, c, g, or t
  misc_feature (295)..(295): n is a, c, g, or t
ccaaccacaatccaaggtaaanggaacntccacccaaaaacagaacgcntgtggantttggggttgttgttgccaggaacggangggaggaanagggggttgattaaaggaagacatcccctgaaggaaatttgtgtcccatggaaatggatagaagaacagtatgaggaggactcagagagctttttttgaggctcatcaggggtgtccatgggagtaatgtagccctcctcagcctctgagtggttcgactcgcaggatgacacgctgacagagtccatgctttcacncagantcccgctggcagtggacttgggctgctctttggtgggagtgggactggtgatcatgtcagaccctagaaacagtaggctgagtct

SEQ ID NO: 332336 - DNA, 374 bp, Homo Sapiens
  misc_feature (188)..(188): n is a, c, g, or t
attttaacctcctaacaatgaactcctttcccctgaatgaagaatgcccatcttcctcaaggtgggttgtgtaagaatgaaggaagggaggccttgtgaagcgcaagatccatgccagtgggcctgtggacagggccgtcttttggcggtaggcctgtgtgctgttgcagagtagcgtgttaccctcntcgccatgctctgtgagccaacctcatggttctgcctctccaggtcttctgcagtgtgcagaggctcagccaggccttcatcgacctgcactctgctgggaatatgctgttcaggacgtggattcccatggcctactgctcccccaagcagagtgtgtccctccaaatggactttggcttggacct

SEQ ID NO: 332337 - DNA, 366 bp, Homo Sapiens
  misc_feature (83)..(83): n is a, c, g, or t
ggtggaagggtggggaaaaagtaccaatccattaacaatccccctatacccctccctaaagtaaacagcccaacagctccctnaacaagaaactccaagttccagggtaagcctgccaactgtggttccttatccttctgtgtgggtttgttaacaaaggagagggttggagtaactttttgccctttcctatatacgagttttaaaagtgttcccaaacacaagcaaggtaacttaggaagagaaaaagatactgaaggaaacgagcatttcttaaaaagtccctgccatgtacaatcccagcagtaagtgctatcatttaatatttgcaatatggtacaaaggcaatggctgaatcttgctact

SEQ ID NO: 332338 - DNA, 658 bp, Homo Sapiens
  misc_feature (24)..(24): n is a, c, g, or t
  misc_feature (42)..(42): n is a, c, g, or t
  misc_feature (70)..(70): n is a, c, g, or t
  misc_feature (95)..(95): n is a, c, g, or t
  misc_feature (110)..(110): n is a, c, g, or t
  misc_feature (127)..(127): n is a, c, g, or t
  misc_feature (368)..(368): n is a, c, g, or t
  misc_feature (480)..(480): n is a, c, g, or t
  misc_feature (500)..(500): n is a, c, g, or t
tagggaaactcctccatactgganaaaactaaacccaagaanagaggggtgggctggggcaaaggcttanccccgggcaggagagaacaacacgnagcacgtatttgggnagcccaagtgccccttnccctagaattccccgacatgtgtcagccatgccctctgtggggagtctgcctccccagactggctactgtatgtaatgtatttatgtatgtatttgtaaatgtgatagaagtctgggggggagttgggggatggcggcagatgttagccaggtctgccctccccattcaagccccttctccactgtagcaaaataagcacccccaccccatctgccttcaggtcttcttcacagccttgcnaacgcccagtgggccactaggggcagtctctggaagggctggttcaaggctgtttgggtataggggtcaggtaccaatgaagaatcacgacttgtctcactcctttggaaantgttttctttcctgtgtaantacttcatacctctgtttttgagaaactgttccgtttgtcatctgtcatggtctccttccaccaaatcttcatctgggaatagcagcggtatccctccacccaagtatggccacctgtttgtcttcatatagaacagggcttctggtctggtcatgcc

SEQ ID NO: 332339 - DNA, 470 bp, Homo Sapiens
  misc_feature (26)..(26): n is a, c, g, or t
  misc_feature (38)..(38): n is a, c, g, or t
  misc_feature (57)..(57): n is a, c, g, or t
  misc_feature (108)..(108): n is a, c, g, or t
  misc_feature (263)..(263): n is a, c, g, or t
  misc_feature (338)..(338): n is a, c, g, or t
  misc_feature (386)..(387): n is a, c, g, or t
  misc_feature (406)..(406): n is a, c, g, or t
  misc_feature (412)..(412): n is a, c, g, or t
  misc_feature (444)..(444): n is a, c, g, or t
  misc_feature (454)..(454): n is a, c, g, or t
ttcaaatcccaaattgtcccaaatangatcattagcanctctgaaaccctgggttcncctccctaactccctgtgaacatcctatcagagtgattaaatagcagatgnctcagtaaatatttgttggtggcaaatacatacttggcaacctcccagtgactttaccctggacagtaaaataattgcttgaatgcataacccaactttgaggtgagcctgcaggagctgctgaggcacacctgtgtgttgggctctcaaggcangccagaggtgagtcggcagctgagatcaggctccagggattcctgcgtcctttaataagattctggggtgggcanagttctggggtggacactggcgcacgcccataatcccagaactttggnnggctgaaggtgggaggaangcttgngcttaaggaagttcaaaaccagtctgtacaanacaagtgaanacgttgcacaaccaaa

SEQ ID NO: 332340 - DNA, 541 bp, Homo Sapiens
atttgatatgtttttctttcccttaagaatcaaaagcagaaaacaaaaacaacagtcctactccgatgttatctttctgattcaatgtgaatccatctttccttgcaatattttggatggagaatttgaagttaaatgcattagaaaactacctgatgaactaccacaaagttttaagtgactagaaatatatacagtaaaatcccactttcatgcatctctgggaaatgataggagtattgcaaataagttgagtttgtagagggtaacaaagtaaagtaaaacaaacctatcttggttaacatgaaaataacaattgagaatatattatattcactgaataattataggcttttcctcacattagacaaccaacataatcttcttaaaggtctaattaatatatttttctaagggtcagttgggacattaacctaagaaacatatctattaagcacttgttaacaccttattttaggaccctttccgttggggatgggggcaagggtgggaggtttttagaagagtatatatctcttta

SEQ ID NO: 332341 - DNA, 408 bp, Homo Sapiens
  misc_feature (42)..(42): n is a, c, g, or t
  misc_feature (99)..(99): n is a, c, g, or t
acccctgtggaaaagaaaagaccccaattcccacccaccccntccagcaaatccatcccttcccttccaaagagaaaagaagaaaatgccagttgcccngggttccccagcccctctgtggcccagtaaaacacacgcagaggttgcacgtagccttcgaagataaaatctgggaatccctgaactggaaaaggagcaacagggctgagattcaaggagactgagggttatttccagcttctcattacctcattgtgtgactatagcaagacccctaatttttctgtccctttcaaataagccaacttgttgataatggggtgggctgtcttgtaaagaaatcctattattaaaagtgttcagaggctagatgaccacttttcagaaatatttcagagaagattcctc

SEQ ID NO: 332342 - DNA, 371 bp, Homo Sapiens
  misc_feature (361)..(361): n is a, c, g, or t
ttgttgacatgtagttagaaaataggtagcaagttccacgcagcctcactctttggaacctagtttctcctatggcctccctttctactgttgttaataacattctattaatgatccatgcctctcttcacaggaggaatattagaatctatggagcagttagtattctttgtcacctaaatttgtctacttctgtacatttccaataagggcaccaccaggggcaaggggaaggattccccacatgtatatccccagctgtttctgtcataaaacttgcatgtgtattaaaccactattggactttttgcacccaagggaggatattcaagggacagacatccaagtccccagccctttnattggccctt

SEQ ID NO: 332343 - DNA, 659 bp, Homo Sapiens
  misc_feature (485)..(485): n is a, c, g, or t
  misc_feature (505)..(505): n is a, c, g, or t
  misc_feature (617)..(618): n is a, c, g, or t
cttcagttgctcgttttctgagagggcagcctttaatctcgcctctaaccctagcatatattctttcttcttcttgcgagactgacaagcggattctcgattttttatcatacgttgctgtctccttagcacagcaatatctgaaccgacatttctcatggtactttgtaggacaggtttagtcacggaaagttttccattcactgggctattcgctgaaggggctggtacccaccattcaccacgtgattagggagctgtgtgactcccccagcaacagcaaggactggctgagcagagggcaagaactccaaggtgcttgaagttgtaccacagtaaggctgagacagcaaaaccgtctggcctttagtgggtgcaggttgtaaactgataattggttgctgcttttccaatggcataaagcgttggtactgtctgaataatgatggtttttgctggaacactggagttttgtttgagtcttngggtgctgctggaagcaatnaaaggcttgggctgaattgaaggttttgaattcacctgaatttttttctttggagtcagtccattttcagtcttgttcctaggaccagtgacaggcttatcttccttcagtnnccgctgaagagagactattagagttttcaccatataaggaa

SEQ ID NO: 332344 - DNA, 455 bp, Homo Sapiens
  misc_feature (29)..(29): n is a, c, g, or t
  misc_feature (44)..(44): n is a, c, g, or t
  misc_feature (135)..(135): n is a, c, g, or t
atcttccccaggaaaagggggccaagccngctccccttgccctnactgggcttctcaaacaacacgaacaactccctggttccccacatctaaattttgaaagaggaatgagtctgaatcaccttaagacagcangagcatgaaacacccctctcgggaaagaaccggagccggggtcctctgtggaactggcttccggccccatgctgacagggcccggaccccgctgtgctcaggctcagagaaccatcgccaacagcacaggctgacgggaactggcaaggggaagggactcggactccacttgctcttaggggtttcctgaggcctgcagagaccccaccatccctcagtctgtactacctggagaagcaaagctccagaattcagagaacaggggacccccagggccatcttcttcccccgagtcccactctcaccaaaccccagctggg

SEQ ID NO: 332345 - DNA, 412 bp, Homo Sapiens
  misc_feature (387)..(387): n is a, c, g, or t
gcaaatttaaaaactttattatgtacatatatttttgcttataaaaaatatggaatgcttcatgaatttgcttgtcatccttatgtaggggccatgcaatctctgtattgttccaattttagtatatgtactgctgaagtaagcattgatttgcaagtattttctcccactctatggactgcctttttactcttttggtagtgtttcttgatatactctcaacaattttgtccacatgatttgttgaaatcaagggaaaggcgtggggctggaaaaatccaaacaagtagggtgttagggctggcacttaaggcccaggctttttaacatatggccccggacaccgtgggagctggggttttttgggggggaggaggagtttgtttntgaggggcccaagggcagggtaggt

SEQ ID NO: 332346 - DNA, 407 bp, Homo Sapiens
  misc_feature (81)..(98): n is a, c, g, or t
  misc_feature (223)..(223): n is a, c, g, or t
  misc_feature (225)..(297): n is a, c, g, or t
  misc_feature (310)..(310): n is a, c, g, or t
  misc_feature (347)..(347): n is a, c, g, or t
  misc_feature (350)..(350): n is a, c, g, or t
  misc_feature (381)..(381): n is a, c, g, or t
atggccggtcataagcaatcccacccaggttagcctcccgagtagctgggactataggtgcagccaccatgccctgctaannnnnnnnnnnnnnnnnngtagagacaaggttttgccatgttgctcagttggtctgaaaatccagggccaagcaatctgcacgctactcccggccttaaaagcttttgtgcctgggcgtggtggctcatgcctgtaaacaatnannnnnnnnnnnnnnnnnnnnnnnnnnnnnnnnnnnnnnnnnnnnnnnnnnnnnnnnnnnnnnnnnnnnnnnnnaatttaggccggntgttagtgggcgcgtgcttgttaattccccagtttantcnggggaggaggagggcagggaggatttgcttngaacccgtgaggtgggaggttgtttt

SEQ ID NO: 332347 - DNA, 389 bp, Homo Sapiens
acagctttgctggttaataatacattcttccaaatttgtaccaacataatggtatgtattattataacaaagtaagagaatatgctactttgaaggtacataactttgcttctaaaaagcatggtctacataaagaccatgatttaaaaataaaagctgcactaaatatgattttctccttttacagatagcaagacaaaatgacctgtccaggtcatagtttaagtgcaggccagaaatctgtcacctaatctctggggatctctctaccaactgaatagaatgttacaggtctagccaaaccccacagcttcagaaccaggagatctcatagtgttatttatctgtggttctggagtattcaaaccaacaggtcttattagaaagct

SEQ ID NO: 332348 - DNA, 600 bp, Homo Sapiens
  misc_feature (439)..(439): n is a, c, g, or t
  misc_feature (579)..(579): n is a, c, g, or t
ttttttgttgacacaaaatctttttattccccatttgccatcttttccacaaacctctcaggtacagatcggaagaaagtgcatataaaccctgccttatttaaccaggcccaccgcctccgggacagcccctgggggagccccatcccgctaggtagaagggaaggccacaccaagtgctgagtgagccacccagacagcaggtgctctgggagggaggggcgacaaggggtaggggaaggcttcctggaggagggagaggcctggccctgagagacagggggcggtccctgaaaagggagagagaaggcacacttttccgggaaccaggccccagcacctgagcattggacccaggcgggcaggaagaacacaggccaaggcgggggcctgaagcagatggaactgttgggagcttcagggaagcagcccttctgcnttcaggcttggagtctcagaggacccttctaggccttctgctcgctggctcagaggatgcagagggcaggccatgcctccttagggtccaccgtgggactgcagagtttgcttgcattcgcaagcggtgggggcctccancaatgtcaagaagtgggcgct

SEQ ID NO: 332349 - DNA, 408 bp, Homo Sapiens
  misc_feature (12)..(12): n is a, c, g, or t
  misc_feature (35)..(35): n is a, c, g, or t
  misc_feature (64)..(64): n is a, c, g, or t
  misc_feature (91)..(91): n is a, c, g, or t
  misc_feature (98)..(98): n is a, c, g, or t
  misc_feature (108)..(108): n is a, c, g, or t
caatttaatggnaattaaccctgctccctgaatgnctgggtaaataatgaaattaaggcagaantcaagacattctttgaaactattgagnacaaagntataacatanccagaatatctgggacacacctaaagcagtgataagagggaagtttacagccctaaatgcccacatcaaaaagttagaaagatctcaaataaacaacctgacatcccaactagaggaactagagaaacaagagaagaccaaccccaaagctagcagaagatagaaataaccaaaatcagagctgaactgaagggaaattgagatgcaaaaaaagccatacaaaaggatcagcaaatctaaggaattggttttttgaagggaattaagtaacgatacggtagactgctagctagactaata

SEQ ID NO: 332350 - DNA, 270 bp, Homo Sapiens
  misc_feature (169)..(169): n is a, c, g, or t
  misc_feature (207)..(207): n is a, c, g, or t
ttgttttttaaatggagtttattcttagcacatggctttctatgtagccacatcacaatttgtacagttccacataagtctaaatgcactcccctctccccaaagaccgtgccccagaaggggacaacagtatctctgtaacagtgtcttaaataaatgcaagtatggnaaaactaacatggtcacacctaccatcaaggtctacanatcttaagaattaaataatcttgtgaggtccacaatgtctactcatttattcagttaaataca

SEQ ID NO: 332351 - DNA, 505 bp, Homo Sapiens
  misc_feature (27)..(27): n is a, c, g, or t
  misc_feature (36)..(36): n is a, c, g, or t
  misc_feature (107)..(107): n is a, c, g, or t
  misc_feature (218)..(218): n is a, c, g, or t
aacttcttgttgggcccttcccagggnaaagcccanggcgccccatctctgaagagggaaagccgcagcttgttgggcgtttcccaagtgacttcatccaaggaaancgctgagcctcttcccttgcaagccaaaatcccccactctctctggttctccaaaaccttcaacccctcagctcacttcagagagctcagatacagaggacagtgctgganggcgggccagagacccagggaagctctggctgagagcgaccgtgcagctgagggtctgggggctggagttgaggaggaaggagatgatgggaaggaaccccaaagttggggcagcccccaacccctgagccatcccagcccagtgtggatgaactactcctacagcagcctgtgtttgagcagcgaggagtcagaaagcagtggggaagatgaggagttctgggctgaagctgcagagtcttcggcagaagcacttgtcagaggtggaaacactacagacactacaa

SEQ ID NO: 332352 - DNA, 435 bp, Homo Sapiens
  misc_feature (20)..(20): n is a, c, g, or t
  misc_feature (49)..(49): n is a, c, g, or t
  misc_feature (160)..(160): n is a, c, g, or t
tgttaaagagccaagccttntttgttcaagcccattcctggaaggaagntaaagtgaatcttgtggcccaacatgcctttccctgtcctgcaaggccagtccaaggcccttcccaaagttcccaggtccccaagcgggcccccccactgctttcttcctnacaggggtctgagcaagtgggatttttataaatcaaaaatggttgtgcttgcactgtgcgggaggtgcgtgatcaaggtggccctctctcttcaccttgtggcagcgctcctggtgcaagctgcctcttatgtcacctggagacctgtcctcacctgtgctctgtgaggatacaggatattaacacaaagttaatatgatcatacaaattatttcacagagagttgagtctagtctctcttccacactgcaataccctcttgcaatggtccctat

SEQ ID NO: 332353 - DNA, 343 bp, Homo Sapiens
  misc_feature (14)..(14): n is a, c, g, or t
  misc_feature (265)..(265): n is a, c, g, or t
ttttgacttagaantttaactttatttacaaatgttctcctactgaatagtcaggggatctccccaaactataccaagcccctcaccttgccagtggaagaaaggaggcttggtgtggggctttcatttattactccatttcagtctctttctcagtgttttgtctctgcctcgtctgtctcttctgcctctctctttgccttctcactgctgctctttttgttcctctgtctctatcactgtctctacatctctctgtcttttngtcaaaccttctcatctgcaaacttcaaacactccccaccctgactatgcccctgcttcccctttcccccaaacccct

SEQ ID NO: 332354 - DNA, 354 bp, Homo Sapiens
aaatgttacactttatcctattgtgagcctgtctcattagggaaaaatgtggtcagatggaaatatttagaagagggatgagatgtaccatacaaaggtagacagagaggaaggtaggagaatgggaaacgttttttttataaaggaaaaactggaaggcaggtgggtcgggaagcagatgggaggagcaggggttgcttgtgggtcagtgaagaggacgatgagagatttacagtccacattccagcaggcacttggctcagaacacacagaagctctgaattcactcccataatgctgttacatgctggagaaaggaatcttccccctacccctgcccccaccatttggctc

SEQ ID NO: 332355 - DNA, 420 bp, Homo Sapiens
ttttgattttggttaatataaaaaagcaaatcaagtaacctattgcattaatattcctgccagtgacctcaaacagcgacaccttaattcaagcccaacccaaggtttacctgaactgctccgtggtgcccgggaacccgtgctgggataggatacagggacccaacccagtcctgatcattagcttagccagagaggtaaactgactgacaatcaatctgcccagggatcaattactatggaagctcatagtgtgggcccctaacccagactgtgggtctgaggaggtctcctggaggtagtgctatcctaacagagacctgaagggtacttggaatccagccacagaatactatttaccatctcattttactctcatgagaattctccccactgtaggcaggatgggtgttgatttaa

SEQ ID NO: 332356 - DNA, 416 bp, Homo Sapiens
  misc_feature (367)..(367): n is a, c, g, or t
  misc_feature (395)..(395): n is a, c, g, or t
acgaccaccatttacagttcatgtgaaataggagtgaaccggaaccacaagctgacttggccaagaaccagctttagcattaggatgtcagagagctcagctgccacctgtgagactgaggggaggcagtggagggttctgatggtgagacccaggtatgtgtgtcctcagtggaacctccagaaagctcaaggaattcatggcactcggagacatgtagttgggtggtttgcccattgtttagttattgtgcatgtaaatccttttcttgcagaggtggaaatcagcttctaaggagatggagtcaaagtcaagcaacagaggccagaggggaggaaaatcttgcagacggtttgggaacaggggntcttgcttgaaattttttggggcaaacntgattaactggcagcaagcaa

SEQ ID NO: 332357 - DNA, 265 bp, Homo Sapiens
tttttttcccagttgaagtcagttcatttatttgctttaagagttacataccatgagacacacagttctggtgttgttgaacttttggatgtttgtacgcagtgctcacggggagcaagtgggcaggggacggtccagatcgatggccacccactgagccgctgctacgtggccccctggggtcccttccggtgcaccccttcctgcagctgttcttctttttgttcctgacatttcagctcttcttctaaatgtctgtcttctt

SEQ ID NO: 332358 - DNA, 441 bp, Homo Sapiens
  misc_feature (32)..(32): n is a, c, g, or t
  misc_feature (37)..(37): n is a, c, g, or t
  misc_feature (44)..(44): n is a, c, g, or t
  misc_feature (71)..(71): n is a, c, g, or t
  misc_feature (76)..(76): n is a, c, g, or t
  misc_feature (96)..(96): n is a, c, g, or t
  misc_feature (176)..(177): n is a, c, g, or t
  misc_feature (396)..(396): n is a, c, g, or t
ggttttcccttgaacctgaaaagggggtcctnaacangtgttgncaataatacaataatacgtaacaacangtcanctcttccctttctcccacancaataacacgtaaggtgttcccacggcccacaggtgaacagcctttacttggagttgcttatctacaaagtattccaacnnccgaggccgatccaagctggtggtgtccctcgtggcccagctgtccatatttacctaaagtgaaatcagcccctttgccatcgtctccactgggtcttgctgctgctttccctccaggaaggggcccagactatcaaatgaagtgctgggattatgccccactgctctgtgaatccaagagacccagagccaggcaaccttggggatccccaagaggcntagtggcgaccagccactccaggcaagacgctcctccagacttcc

SEQ ID NO: 332359 - DNA, 406 bp, Homo Sapiens
  misc_feature (16)..(16): n is a, c, g, or t
  misc_feature (39)..(39): n is a, c, g, or t
gaaaaaagcctgaacnttttcctgggggcaaatgcctgnaggccaaaattaaagataataaatttgaacgaaaaaggccctgagtccccttggcctccacctcccctgctgggaaccccaaaccccttttttacccagaaaaggtagaatggtcctgggggtagaaaagttcctgggacccagaacataaaaccatacagtttaacagaattatgaaatctgagatgtttacacagactttatgtaaggtagttgtgactccttttacctaaatgtcttatgaaaatgggtactgtatgtgactgggggatgttttccctatctagtactataaaactgaaggcaggtaaatctgccctttgacaaatattaactgaacttactaaatgggaactagaaagattgc

SEQ ID NO: 332360 - DNA, 444 bp, Homo Sapiens
  misc_feature (359)..(359): n is a, c, g, or t
  misc_feature (370)..(370): n is a, c, g, or t
  misc_feature (390)..(390): n is a, c, g, or t
  misc_feature (399)..(399): n is a, c, g, or t
  misc_feature (412)..(412): n is a, c, g, or t
  misc_feature (423)..(423): n is a, c, g, or t
gagtattggaatcacgaggagcttttaaaaaaacatatattcctggattcctaaagttttgattcagtggtgtaaagccaggtatctgaaattttaagttctacaggaaattcagacataacacagttgaaaattattggtcttgtcaaggcttactggctttggcaatctttattaagtagtaaactcatttaaaaatacaagttctttggttgttataaggcaaatgatgtaggaattctatttagttccattttatttaatattattaacaaagggccatttatccggcattgtggtttaggacaatacaaattccaatgtttgggtatttagtggggcttctggatttctacccntggaggggttnaactggctattggggaattnggccttttncactgttttaaanccggggggccngggggtaaaaccacttccggg

SEQ ID NO: 332361 - DNA, 378 bp, Homo Sapiens
  misc_feature (103)..(129): n is a, c, g, or t
  misc_feature (315)..(315): n is a, c, g, or t
  misc_feature (352)..(352): n is a, c, g, or t
  misc_feature (358)..(358): n is a, c, g, or t
gttatggaagcctgagttagtgaaacctggcctgccacaacgtgttgaagaaagcaaaagaaaataactgggaaagaggtataaaacctagccccataaaacnnnnnnnnnnnnnnnnnnnnnnnnnnnccaaacagaatctttcagaatcctgttgttctggcaggtattttttaatatttccttcttacaaatttcctttttacaggatgatatggcattattattgacattaacaatcaatcttaggacacaagtggattgtttttataaataggggtctccctcaatattagtggtcccatttttagggangggtaggtacatgtggaaccatggggtaaccaaaagnatttgnaaaggcattatttagtgggg

SEQ ID NO: 332362 - DNA, 382 bp, Homo Sapiens
  misc_feature (17)..(17): n is a, c, g, or t
  misc_feature (57)..(57): n is a, c, g, or t
  misc_feature (84)..(84): n is a, c, g, or t
  misc_feature (333)..(333): n is a, c, g, or t
cccaaaatttctccccntgaattcccaggctcaataaaatcccaactgccgaatccnagcaattgtcaaggttaaaattttgantgcctgctttcccgagggacgcgcgtagccacttccctgagtaccgcggcaccgatcgcggccgggcgggaaacttccgctcggtcctggcgttcaacagcccagcggccagctgctggtcctgcctcccgcgctgggtcccagggttcgcgctcgagcggggcagctttgccggacacgggggattatccctggggacgcggtgtctttcagagggtcttgctagtctccggagacgccaaataggcntcgagtccgcggcgatctcattttacgagttgatgaagccgtgccgaaa

SEQ ID NO: 332363 - DNA, 845 bp, Homo Sapiens
  misc_feature (623)..(623): n is a, c, g, or t
  misc_feature (629)..(629): n is a, c, g, or t
cctgtgtttgaaattttcacttttatttgctagcaattaatttttcagttcacaagtgcattagatgcattttcatcatttaggaaatactgctatccttagcaccaacctctcaggtggctcagaatgttatgtgggatattataatacatcaaaggacttaatacagtggcaaaaagtcagcttgagataaagttggtctataattatttgtgtttatgactgttatgatttattttcttaatgaaccagtcttagatttcttcccgcaaaaagtgtcaattatctgagaaaggtccattttgaacctgacagggcatacttaaggttctgtacctgattatggtgggaattacttcatttccatgggcaaaagcaagggtattggtcagagccgacgctcctaagcccagtgttgccaaaacctcacgcagcgtctgcatttctggagaaaggaagaacacaaggcctcaggaaatctgagctgaaggaatcagcatccccaaggtagaagtgaaaaggactgtattgggaggtgtttgccaagggttaaaatgtactgtagggaaactgccataagaggcaaagaatgtgcagtggctgatagctgagaaacatgattntgtctntcgccttgtggcttaaataatgcataaaaaggatctgagctattacttcacttctcactatatatcagagatatgccatagcaagagagaggcgtgtaagttgagctgaatgttttttcatttattccgtccagggactcctctgcctacctggtagaacataggactgtcatgtgggcaatacttgggagtataagacccatccatgttctcctg

SEQ ID NO: 332364 - DNA, 360 bp, Homo Sapiens
  misc_feature (349)..(349): n is a, c, g, or t
ggaatttggaataaaggaactgtatcatttattctctccttcccacttttttattgctttgaaaaagcagacacttttccttgtcttactgatgtacaaaccttgcttcgttgcaaaatattctgaaaagtcctttcagatctccaaaatcttattacctatttaatgctttaatttgaagtgagatatatatgatgggttttttcatagtgtgaacattagttttatttcgaataactatattttcttgtctataggctatgcataacttgtggattcaaaaaacatcactttaataactttactattttaaaatgtctggtatttaaatcattggcccgggggaatngggtgccccta

SEQ ID NO: 332365 - DNA, 343 bp, Homo Sapiens
  misc_feature (233)..(233): n is a, c, g, or t
gtggtcaacggggagatgagctgtccacctcctggaagtgcttcacataaactgagtccacgtacatgtagtggcccagttcactcttgaaggtgtgatcctgtgggagaatggagtggacattccgaatacttcctcctccaacaaaccagttcacattgggattccagcggttcacaaagccacagagatgattttcttcaaagtcacattcaattcagtagccggttgtnatcttgatttcaaatagtgcgatgctggctgtgtttccctgtcctaggtacaccttctatttaaaatcttgaatttcttgggaactgtttttgcaaatccaagctgggct

SEQ ID NO: 332366 - DNA, 629 bp, Homo Sapiens
  misc_feature (377)..(377): n is a, c, g, or t
  misc_feature (464)..(464): n is a, c, g, or t
  misc_feature (538)..(538): n is a, c, g, or t
  misc_feature (561)..(561): n is a, c, g, or t
actctgacccctccctgtcttaggtctgaataattgggtcacccataggaatgcagaacccagggtgggcagagcagagcagcacttgctggcgataggcctcgagcctgtgtttctgagtccttgaggaccacgagctaacaggagctggtctgtaggttgctctccgtaagcagtgatgcaatggacgagggatcgtagacactgtcgaattcctcatctgagctcagcccttcgtttttgagagctgactcagcagctgaggggaactttggccaggagtccttctccagagacttgatccgggcctggagctgttcattgacctcatgctgctcctccacctcacgctgggccttcttccctcaggccgtccnagtcgctcaatttcctcttctgcttcatcccacctgacgcttcaaagccttcaccctcaggcttagctggtctttctggtcattgancatgctgccgctcgtcttcaatctggatggatagttctttaactttccgctccagttttcgattggtagactgnagaactgtcttctccctctcttnagcctgtagccgctcctgcaacaactgattctgggactcaagctgagagaggctggcactaggcttct

SEQ ID NO: 332367 - DNA, 611 bp, Homo Sapiens
  misc_feature (34)..(34): n is a, c, g, or t
  misc_feature (59)..(59): n is a, c, g, or t
  misc_feature (64)..(64): n is a, c, g, or t
  misc_feature (122)..(122): n is a, c, g, or t
  misc_feature (131)..(131): n is a, c, g, or t
  misc_feature (461)..(461): n is a, c, g, or t
ttacctacctgaacaatccccaatgccccccaangtcccctccttgtgaacaaatccanccaangttggcctgtaaatgtcctggcctggtggtggttggaaatgtccattgtgccagggcnaggaaaaanaagctcccctgtggtgcccaagcaggtctggtgtaagaaaatggtgcagaaagagactgcggcccagttgcctgagaagatataacgcagtagccgcttggtggcctgttactcagcattaaaaaaacggccttgttggattgaagatacatgtgcagaaaaagtgctggtgtcaacatgcactccagtcacaggggggagaaagcccagcttcaccccgttaagcttgctcaggatcaacatgcaagcccaggctggctttgctgctggagagaagtctggccagtgggacagctctcagacctgccacgaccattgatctgagggccnagcaggtcacccctgcctgccaccctccttgaggcaaccacatccactttggagacacgcatatggtatgatacttatttctcctcttttgttttccaaagttacaagagaaaagtggcctacaactatctgaagaggtaggggcgggtc

SEQ ID NO: 332368 - DNA, 289 bp, Homo Sapiens
  misc_feature (80)..(80): n is a, c, g, or t
  misc_feature (107)..(107): n is a, c, g, or t
  misc_feature (197)..(197): n is a, c, g, or t
  misc_feature (221)..(221): n is a, c, g, or t
  misc_feature (223)..(223): n is a, c, g, or t
  misc_feature (278)..(278): n is a, c, g, or t
ttgttttgaggaaataaaggcttttatatacacagaagcatgacgcagcacgggcaggggggcttggcagttgcaacaantgggcttggcaggtaaggcagggcaangtgctcctttcaatgggagaagatcccccggaaccggcttttttcctcttcgtccttctgccggatccttgcctccagggcccgcagctntcggctcaccacaggcgccagggntngggtccagctccagcattttggcaaattcagcctgggtctcctggcattccacanggccgcttggg

SEQ ID NO: 332369 - DNA, 365 bp, Homo Sapiens
  misc_feature (355)..(355): n is a, c, g, or t
tggaaactcttcatatcaactagttaaataaattcaggcaccttcacacaaggtaatactaggcatattaaaaaaagaacatggtaaagcaaatctgtacctaaagtagatctgtgtattagtctgtttttgcaatgctgataaagacatacccaagactgggtaatttagaaaggaaagaggtttcattgacttacagttccacgtgggctgcagaggcctcacaatcatggcagaaggcaaggaggagcaaagtcacctcttacatggatggtgacagtcaaaagaggagagattatggcagggaaactccccttttttaaaacccttcaaatctcatggggacgtatttcantatcctggag

SEQ ID NO: 332370 - DNA, 392 bp, Homo Sapiens
  misc_feature (45)..(45): n is a, c, g, or t
  misc_feature (277)..(277): n is a, c, g, or t
  misc_feature (292)..(292): n is a, c, g, or t
  misc_feature (295)..(295): n is a, c, g, or t
  misc_feature (304)..(304): n is a, c, g, or t
  misc_feature (309)..(309): n is a, c, g, or t
  misc_feature (381)..(381): n is a, c, g, or t
agggcgtctccggggcttcacagggaacacaggggcttcggcaanccacaagtacgcagttgcacatgccctacttttgcccattctttgcaaatcccctaaggaacgaacgcgcctcgtggcggggcctttctaatcttcgcttgtcccttcacttccacagctgggaggtcgaattcaccacgtcacgtagagaaaaggggcggtgtctcgggtctccccgtgttggcatcaagggcgggctccctataggagctggtgtggacgtccgggcgtngggttagggcggatnggnggatcgggnggcgngtgttgacattgtgctctcaccagggcggattcgcctcgaacccttcactcctgggcgttttgagttttctnggcgtaccatt

SEQ ID NO: 332371 - DNA, 477 bp, Homo Sapiens
  misc_feature (25)..(25): n is a, c, g, or t
  misc_feature (92)..(103): n is a, c, g, or t
  misc_feature (121)..(121): n is a, c, g, or t
aaccaaatttcaacaacgaacaacnaccctgccttttaaaaaaacttgctctcccaatatgttaacttccctttcccatcaagtttgggggnnnnnnnnnnnntggttgggggaatggttnaattaaaacaacaccagtggtttccatcagaagggaaactcaactactcaggaggtgacggtgacgtggtgccggtccctgaagtacgcgcacaagctccggaggttgcgggagcattcatcgcccctggaccccgcagtccccctcggactcagggccagagccttctgcgaagcaacctagccccagggaaacggtagcggccgcagaagccccgctctctgtaacggccgcggaggagcagcaagcctccctgtgagtcggtgggagacaagacggagcggcggtaagggcggtagggaagtgaagcgcctctctccaccttgttagaagcggctgaaagcggcctgcctacc

SEQ ID NO: 332372 - DNA, 305 bp, Homo Sapiens
  misc_feature (142)..(142): n is a, c, g, or t
ggcctgaaggatttttttatgtcctgaagtgtgtggatgtaggtgggagaagggccctaagacccagaagggagagcgaagctggcgcatttatgaaaagcgtgcctagtaagggcgagtgggatgccgtgaagccagaagnagccaggaggccaagtcagagaggacatcagagggaaggactgggatctttgtaaatgcaagggggattacgcaggggagtgaagagcctagatttgcattttaggaccagtcgactctagctcctctatggaaaatgggtgggaggatacaacaatagatat

SEQ ID NO: 332373 - DNA, 347 bp, Homo Sapiens
tttttgccgaggtaaagtcctgttccatttaaatgaccaaatggagagaggcctctcctaaaaggaagtgatcctgtatttggggaatagggcattgcaatgggaatgccctgtgcctatagtcaacctatgtacatattcagaggagtaaaggaaaacaagtttttaaggacaaatgatgaggattacaaaattactttgaggtaattattcttggctaccaagatcaataacaaggatgacaccagtccaaggttgacaggcagttgctaggcagattttctcacgagagaagttttttggtgcaaggttgcagtggcctttgtgtaaggttgtagtttttgttc

SEQ ID NO: 332374 - DNA, 349 bp, Homo Sapiens
  misc_feature (22)..(22): n is a, c, g, or t
  misc_feature (32)..(32): n is a, c, g, or t
cagaagccccagcccaagcccnacccccttanttgttaactgtcctgtccaggtgtttcccagcctcatcttttcctgatttgtgattattatgttttggtggttcctggatttgccctgcatgtgctgcccatagaggtactcatatgtctcagaacagacacattcagacacacaggacacatcaagctggaactggccagcaattggggtaacccaggggctgttctccactttgcataccttcttctgaccagttaaatataagtttcctagttctgggagcagaagggtccagcagttgccctgaatgttgagttccttaagctgggtaaactccccagtttcc

SEQ ID NO: 332375 - DNA, 460 bp, Homo Sapiens
  misc_feature (255)..(255): n is a, c, g, or t
  misc_feature (310)..(345): n is a, c, g, or t
  misc_feature (358)..(358): n is a, c, g, or t
  misc_feature (367)..(367): n is a, c, g, or t
  misc_feature (388)..(388): n is a, c, g, or t
  misc_feature (413)..(413): n is a, c, g, or t
  misc_feature (420)..(420): n is a, c, g, or t
  misc_feature (435)..(435): n is a, c, g, or t
ggatttctgaaatcatctgacatgggccttttcttcagtccattccagattgggggagaatagtagggacccatattccaacatcgccagttcctgaagtcaagtctgagatagggctgtccactgggcactggccgggtttcacctcctccattcctacctcatgtctttgctgttgataaagaaccttagacgccctccatttgccctccatttgaggaatgaagtgaggggaacagggatacgggtttcatnctggcccattgtgttgtatttccacttttccgccgggggcatttatgggctgcannnnnnnnnnnnnnnnnnnnnnnnnnnnnnnnnnnncctctactaggangtaaatccntgaggaaggaggatatttttngttcaattttaatttcactgttttncattccnagggcacttattaanggggggttacagtggcccagtaggg

SEQ ID NO: 332376 - DNA, 622 bp, Homo Sapiens
  misc_feature (29)..(29): n is a, c, g, or t
  misc_feature (128)..(128): n is a, c, g, or t
  misc_feature (180)..(180): n is a, c, g, or t
  misc_feature (369)..(369): n is a, c, g, or t
ccagggggacatacaagtttgggacagcntgccctggcttaccccacctgccatggcgctcaactttttagaacccaaaacaacacacagaaaacaaaataaccacacagagccccaagactcctcanacaggcaaagctcaagaggagctttgtgctcagtccctggaggcaggtgggntgaccccgagaggaaggagatcacaagggaaaggcagaggggaattccaggggtaggtggcaagaaccctgaattccagatttgtgtctattctatgcagcaatcctgggaaagccacttagcctctctgggcctcagtttctccatttgtgaaatgggaataaagaagcccagccctcacagaaattntccatcatgcatgcatgcattcatttattgaagcattcattcaccccatcaaatagtgatctgagtttcctctatggacctagtaatgaagaaaagacctcacattgagctcagaatataagctgaggggatgggaagacagagagactacataaataaataaatatcagatggagataagtgatatgagtaaaatgaagttgactcttatgacagacagaaagttgggggttgaggcaattttagatgggtc

SEQ ID NO: 332377 - DNA, 332 bp, Homo Sapiens
cccttccctccctgtgtgtattttggcaacagggaagccctggtgctcgtgccctcttccctgtaactccctacctgcaagccaactcccattttatctcaaacttactgggcatcctagcctaacgggttctgcctgagtggggagaggtgatggggtgggaacacccagaagcagtctaaggcatagctgtgcccaccaaggagctcatgagggactacgtgggggacagaaaagacccctggcgaacttccaccaggctctttatctcctgagtgtcaacacctacatcaccaagacccaggtgtccaccttaccagtatggagaaggc

SEQ ID NO: 332378 - DNA, 466 bp, Homo Sapiens
  misc_feature (450)..(450): n is a, c, g, or t
tgggcagttcattttctttattattttttcacaagctttgaattcagaaataagagccacaacaagttggttgttaagtaaaaatgggagtgattacaaaggaaaactttgtacaaaactttaaaaatctgactgccccgtcaactgcctcagagggaccaggactcaggccacgcaggggaggccatcagcccccccatcgtcagccccgaatgggatggggggagacctctttctgagtgtgaacctgggctcggcctgaagcctagagctggcttgaaggaacacacacaggaccagaaggacagcacgggtgagtttacaagtgccacgggagaccaggggtttcttgacacagggatgttgggagggatgctttcttcttgccaccctaggttgcaagggctttccccttgccatttccgaggattttacggatcttcacaggtnggaggttgggggcgat

SEQ ID NO: 332379 - DNA, 439 bp, Homo Sapiens
aactgttccatctttattagaaaagcaaccaaaaaaagggtgaggggtgagcctggccctaaaggacccctccactgtgacacaggcagacgtcttcatcccggcgtcgaggggtggatatggccagctgggtgtgggcagatttacaaagtcaacacttcatagaaaaggatgccgcctggcgtgcagatggcgaccaatccaccttcacatggctaaggcgggcccctcctcctctgggctcccatgtggtgtggacagcctgacctgggtacagggaggatgccatgaggaggtgggctgggcaggcctgggggctgtgtggggagtggcatccatgtgggcctctggtcctgcccagggtcctgcccagggggcattccaggcctggctggtcccctggggcgtggcggtggggctgcagtggcccctcaaatgt

SEQ ID NO: 332380 - DNA, 463 bp, Homo Sapiens
  misc_feature (23)..(23): n is a, c, g, or t
  misc_feature (40)..(40): n is a, c, g, or t
gactcaaaatttctttgaatccncaggggaaaaaccaaanaactttgttccccttcccccacagaggcaatgaaacttgtcccaaggtcctcaaaacatgttcagcagcagctgtccacttgtgttttctctggagccatccttcccttgtggcctgtaacagcagctctccccacacttggggcttagttgccctcctctgagaccaaacaagaaacaaattcttgaggactcccgcccttctcccttgagagtttctgagctccataaaccttgggaacatttcattgccctagggagggtacgttctgcctgggaggcgttaatgaatgcaaaggcatttgatttgcaaagtttgccctggctaatccatttgcaggcaagttgggtagtatcatctcttccttttcaaatggaagaaggcttggtgaggaagagaaatgacttgcccacgccgacccta

SEQ ID NO: 332381 - DNA, 449 bp, Homo Sapiens
ttccatcatatatagcagtattttctataacattaatttatgcactgtatattaactgctctcttttgagtataattttgaacttaacattattcccattattaaaaattactattctttttcatgcttggctttttacaacttcttctgtggataacttttaagcttctcccctgtacctccaacattatattttcctgctataaaaccacccttccttttggccacaaaagaatgctctagacccaccttagatatattttttctgctgaagacagaatcaatcatgtcctcagagcatctgggttcttttagtagagaaatatggaccaagcatggtggctcatgcatgtaatctgtgcactttgggaggctgaggtgggagggttgcttgaggctaggagttcaggtccgagcctgggcaacagggtgagacctcgtttctacaa

SEQ ID NO: 332382 - DNA, 398 bp, Homo Sapiens
  misc_feature (18)..(18): n is a, c, g, or t
  misc_feature (82)..(82): n is a, c, g, or t
ccttggaggtcctttatnacccctttcttcccaggaatccctttctctccaaagaaagaaccaggcaaatcctttgtctccnatcttcaccatccagaccatccaagtccaatttctcctacttcgcccttctctccctgggaatccccgagagccctttactcctctctggcccgggcagccctggaaaccttgagtgccgttcacaccaggcggaccacgctcacgggtccaccctcatcaccaggatagcctcggtagccgtcttctccaggaataccctttggcccgatgctgccgatgggcccgcggtctcccctctgcccagagcacttgcagggaaccccacagcaagctttctcggcaatgttgtcaaagcctgccgctagttcataatc

SEQ ID NO: 332383 - DNA, 418 bp, Homo Sapiens
gtttattgtgcgtgtctgctctttgagtctataaagggattaacagctgaatatagactttaaatcactgttgggatttaaatttttactctgaaagactaggtcatttgacagtaatcaagggtattttcattctcaagactgttttgcaggcccagcagaaaacccctctatttaacccatgaggggagtcatcctcagggctgaggcatatgaaatctggggtacttcacacagaaaaataataaaaatgtagggggatttgccttgtgggttgaatccggggaagttcttaaattgggcaataaggcagatagggggaacaattttgttcaggatactgtgggatttaatgggtatttttaaaagggcacccttgtttatttatttttttggatggcaccaattaatttttacc

SEQ ID NO: 332384 - DNA, 420 bp, Homo Sapiens
  misc_feature (39)..(39): n is a, c, g, or t
aacacattacacaggggacttaacagggacccttcgcantcacctgtgggccacattctcccctgtcttccccaggtgaagtccacacaggccagcctgaggaagtcctttcctcaggaaaaacagcctaggtgaactctcatggatgaagcacccaggagggagagggcaaggctgtgctcttaggagaaaggatcactgagagaaggcaaagtcagaatgctcactgctgaccctcgcacagggactggagggaggagaaagcatcactgagagaaggcaaagtcagaatgctcactgctgaccctcgcacagggactggagggagagccaggcagaccaagtcccagggaagaacattaagcaagagaagccaactgactttagaaagccatgtttccagatacttgtcacatcagg

SEQ ID NO: 332385 - DNA, 386 bp, Homo Sapiens
  misc_feature (371)..(371): n is a, c, g, or t
gtgaattgctcctctcccaaaatgcatttgtatcatgtctttgcagcaagaagtgactatatctctgtgaatgctacatacattaccatattgtaatttaacaccaaaggcattagctgcaccaactttttatttattgtgatcttgaaaaacacatgggtcttcacattttttgatgagggtcattaaaaaatatttatgggaatatggcatgtcaatcccaggatatattggaaatgagtaaaccttcatattatggctgttgggctacataacaggggcaatagctggggaacttactttgccttgggactcttaaaacagggaaaggttttatatacttccattggtcccaaagggtttatctaggntacccaggtggatgg

SEQ ID NO: 332386 - DNA, 140 bp, Homo Sapiens
aaaaggatttgttcagacatggaatatatttgtgtatattacttgtgtgctgtacacacagaggaaatgtatgtttgtcatgtatgaagaatggcttcagtttctctgtaattaatttgtaattataataataaaactta

SEQ ID NO: 332387 - DNA, 489 bp, Homo Sapiens
  misc_feature (19)..(19): n is a, c, g, or t
  misc_feature (31)..(31): n is a, c, g, or t
  misc_feature (37)..(37): n is a, c, g, or t
  misc_feature (53)..(53): n is a, c, g, or t
  misc_feature (60)..(60): n is a, c, g, or t
  misc_feature (63)..(63): n is a, c, g, or t
  misc_feature (68)..(68): n is a, c, g, or t
  misc_feature (275)..(275): n is a, c, g, or t
  misc_feature (454)..(454): n is a, c, g, or t
ttttccttttaaaacaacngtcatactaaangtttantttttctttacacaanttattanganttcanggcagacaaggggacatatattggagttttccatttttaatatttggttaaacaaaatacatcttttgtaaacaaacgcagcacaaggccaacaacaaaaaggaataaaagcaagaaaaacaaaaagcctagggttgcccgttattgggcatcagggtcaggcctgttcacttccttaaaggaagtggggctttttgccttgggatncagcatgggtccctgttcctaagcaccagaattggatatgaacagagaaaccagccctgaaatgtttaagcgtctttgcatatcccattggctcatggactccaagttgcatggggactctttcaagtgccattttgcacaggcccaagtggatttgtggagaggagtttcctcctctnacccaagaaatggcttactatctgacagtgccagt

SEQ ID NO: 332388 - DNA, 432 bp, Homo Sapiens
  misc_feature (16)..(16): n is a, c, g, or t
  misc_feature (25)..(25): n is a, c, g, or t
aagatgtggtccaagnaagagttangccagtccattaagaacttttgtttgaaaaagaagaacacccttccctgaaaggccatgttttggaaaaaggtccctatattttccatggacagaaaatgatgcccttgaaatggctaacagctttccagccttggtgaagcccccagccttatttgatcccatattttaattactctgtgattcaaatctgcatccgtagggaatcagtacagcgacataagagcttcaaccagcataaagaacattttcaggagctttgtaccccttaagttccctgaggaaagacaacacaccagaacaggtgtcactatttccacagagaaacctgctcatgctggaaaatgtcttgctaagtggcctcagaaccatcttctgaggctggaacagtgctccacccacatgcag

SEQ ID NO: 332389 - DNA, 434 bp, Homo Sapiens
  misc_feature (353)..(353): n is a, c, g, or t
  misc_feature (369)..(369): n is a, c, g, or t
tatcataagtagaagaaaataatttttgttttctaaaaatgcattttgagatagtttaatgtaaatctgacaggagcattctgaagccccattaggaaaaaatttaaatggttcctcttcatcgccttaatgtctaaagatcagaaatcgctgagcaaacccgcttttgtttccttcccagaaacaatgcaaaacaacaggtgggagatagtctggtctttgccctgctgtgtgtgcctctgtaggctcctcctgacaaacgtctggggaaaacagcctcaccccacttctcctcttctcttccccatttccttgtaggcttttatttccttggcatctttgggggtctactngggcagtgggggtgcnggagggttgacaggggggagggaaccagtttgtttctcgttaggcctaggggaactggccctcag

SEQ ID NO: 332390 - DNA, 460 bp, Homo Sapiens
  misc_feature (29)..(29): n is a, c, g, or t
  misc_feature (36)..(36): n is a, c, g, or t
  misc_feature (63)..(63): n is a, c, g, or t
  misc_feature (396)..(396): n is a, c, g, or t
  misc_feature (417)..(417): n is a, c, g, or t
  misc_feature (437)..(437): n is a, c, g, or t
ggaaatcaatcgcaaaaaaactgcccatnaaccccngacccagctcgtaaagcaatgccagangtgttgggaaacaggcccgtaacttgtgggaatgatgaactcgaatgccctgtgccccatggatcaagccccccactgtgaggtcatcaagctcaggcaacacggggagagtccagcccaatggaggtcaagcagggcagtcaccctggcccatggtcacccaagggctccacacggacaatctgtttcttggtgtccacttccagaatgtccatcaggttgatcatgatgtttttgtgtgtcttcttgtacttcccgacacgtagtgagacagtgagccagccagggcgccccgtgcacatgaaggtcttgctaccctgctccttccattcncgcacctgcttctggatgtcnccgcaacgctgctcgctgcnaacggacgctgctgagcttgaac

SEQ ID NO: 332391 - DNA, 402 bp, Homo Sapiens
  misc_feature (338)..(338): n is a, c, g, or t
  misc_feature (362)..(362): n is a, c, g, or t
  misc_feature (370)..(370): n is a, c, g, or t
gaagtaccacgaacccaaatccaagcttggctgtctcatccccaaggacgtactctttatgccgttccttatgacttttcatgcagcaggcgcaaggcagcaagaatttggctcttctgacatttatcaggcacctggtatgtgccaggcctactgtaaaccccaagatgacatggtccatgtctatccattcagcatcagagagactgttattcaggacttgaggcctgagacacagccctgaatcagatgcaggcctctggtgttttgcaaaggatgcgtggagtatgtgtatgtgtatgcgtgcattgtgtgtaggggtgtgtgtatgttggggnttgggggcagaaaatgctccctgnaactgttngtattaagggcagatctttgatgggaggggcc

SEQ ID NO: 332392 - DNA, 433 bp, Homo Sapiens
  misc_feature (207)..(207): n is a, c, g, or t
  misc_feature (356)..(356): n is a, c, g, or t
  misc_feature (382)..(382): n is a, c, g, or t
aatggtgtttgaaacctgtgacaattctagtcacgtaaaagtctaaagctcttctcatgatttttactaattcacaagaattacaccctccagcacctagagttcaagccacctttcatgctctttgcattgtatatactggaaggaccagacaaaaatatggcagggcaccatatgccatatcaggagctgggcagtttctgcctncaaggaactcaagattaggcaaggaatgtgaaacaaaaaatgccaactatgtgccagggcagtatgctagatcctaggggatactgcagtgaggcaaggtaaatatggttccttgggccttcaggaactattagtcccttacagtgtgnggattaaccctttaattattcagtgnttcagaagtgggggttcctattagggggagttttccccaaccttttttggg

SEQ ID NO: 332393 - DNA, 392 bp, Homo Sapiens
  misc_feature (362)..(362): n is a, c, g, or t
attccagccccacggaatttttcagtaactgtctcaagagagaggtctgtgccacgtggtccctccaaccccaggaaatcagtgtccagtccaacttcttccaacactcccactcctacgaaacacctgaggaccccttccacaaagcccaagcaagagaatgaaggtggagaaaaggctgcgcttgagtcccaagttcgggaacttttgggcagaagccaaaggcaaaagatagtgaaattaacaggctttcgaagtgaactaaagaaattacaaagaggaaaaggacttttgaacgcttgaggggatttatgctttggggcccaaatgttcgatgggaacttcagttttccccggggtgnacacgggaacctctttgattaaggaggctt

SEQ ID NO: 332394 - DNA, 478 bp, Homo Sapiens
  misc_feature (262)..(262): n is a, c, g, or t
  misc_feature (372)..(372): n is a, c, g, or t
  misc_feature (383)..(383): n is a, c, g, or t
  misc_feature (388)..(388): n is a, c, g, or t
  misc_feature (421)..(421): n is a, c, g, or t
  misc_feature (445)..(445): n is a, c, g, or t
  misc_feature (450)..(450): n is a, c, g, or t
gtagttttaaaaattatttattacgaaaagaatccggttcattaaaaattcaagcagtgcagaagagtgaagtaaaaaataaaaatcttcttactctcccaaggcccttaatcccagtgctcagaaataacttaacagcttttaatgtatcaatctagagattttctctgaataaattatacatttttacaaatgtaaaaaattttcacacaaggaaatcaggaccatacatatatattaatacttggcttcttcccacttnggtacttcttggggcttctttagaaggcaaatacctggcaggtaggcctgcattcttcaatgggttgcaggagtgtttcactggggaaagccaaactttaacccgggggnacggagggggnggggncgacacttaggtttgggccttgttaaggtgggnctcttattctccaaaggcccgggngtttnaccaaagtgggggtttgtggttccccgt

SEQ ID NO: 332395 - DNA, 472 bp, Homo Sapiens
  misc_feature (341)..(341): n is a, c, g, or t
  misc_feature (354)..(354): n is a, c, g, or t
  misc_feature (426)..(426): n is a, c, g, or t
  misc_feature (444)..(444): n is a, c, g, or t
  misc_feature (452)..(452): n is a, c, g, or t
gttaggcttttgttaaacccaagtcagttaagctgtagtagaagttttctttgaaggcaggctgttagggagaacagagagctctgggcatatttcagaatggttaccttctcatgcttctgctggaaacataaaggtatttttctccagtcttcacagtgagaatctggtggaattcctgggaggtaaaactcaacaaaagtgtaagtgtgagggttcccccctgccctgaacccttggagttttgaacactgaagctagtctacacttgagcctccagcagtttttcagttaagtcttcctacctgtatttggctccatctttgatcttcttgctcttngggcttctgcttncttgttaaggctgtggacttctgtttccacccgtctgttctcttccagtttgcaaagtaggcagtttgtccngtggacctagttcttctngaaagatnctaaggaaaagttgttgatt

SEQ ID NO: 332396 - DNA, 312 bp, Homo Sapiens
cggagaggaggctttttggaaattggctcccatgtgaaggggaggctctctgggaggaggtggctccctctgagcaggctccttctgaaccaacccccatgggaggagacaactacatctgaacaggctccttctggaccacctctatgggaggagacagctctatcttaacaggttccttctggaccacctccatgggaggagacagctctatctgaacaggctccttctggaccacctccatgggaggagacagctccatctgaacaggctccttctggaccacctgcatgggagcagattctactatgg

SEQ ID NO: 332397 - DNA, 164 bp, Homo Sapiens
ttcggcacggcacataattattaactatgtaatatatgtttactattaaatgtataataataaataatagcaattctacctcgctccaaattgaggtcatcaggaaggacttcccaaaaagaggagacttgagtgagaaaaggggttaaggtctgtctttcttg

SEQ ID NO: 332398 - DNA, 365 bp, Homo Sapiens
  misc_feature (12)..(12): n is a, c, g, or t
  misc_feature (49)..(49): n is a, c, g, or t
  misc_feature (99)..(161): n is a, c, g, or t
  misc_feature (296)..(296): n is a, c, g, or t
  misc_feature (316)..(316): n is a, c, g, or t
gtgccccacccngccccggcaatttgaagtaagagaacaggaatttggnccatgttgggcccagaactggttttaaagctcccttaccctcaaagtgannnnnnnnnnnnnnnnnnnnnnnnnnnnnnnnnnnnnnnnnnnnnnnnnnnnnnnnnnnnnnncaacaataatcattttgctgttgactttcttaaactttgagttaggaaggaaatatttgagaccagcagttaaattcaagttttaggactttatgggattgtagttatatttccctttagctggggagaattttngattctttacatccatctcntctgggccctacaggcacagtttctttacgatcatttaatattttttct

SEQ ID NO: 332399 - DNA, 396 bp, Homo Sapiens
aaacaaacaaacaacaacaaaccccctggaaaacatctcccatccttggtttgtccccctgccctccttgtactctggcttttatacctcggggttgtgggggccgcaaggccacccaggaggtgataggatgctggggtgagctcgacactaaaccctcggggggcaagaggtagacaaggcccaggggggcgcaggagtggctccacggagcgccccagccctctcctctcactggtccagcgccaagggtgaggcggagaccacggtgaagtgacctcagagactcagtcgtcgagtgctagggactagtcgaggctggaggcacagggagtagggtgtaggaaggcctgcctctgcctatggtggggtcttggaagccaggctgtgccgaaa

SEQ ID NO: 332400 - DNA, 293 bp, Homo Sapiens
tttgcggattgagaagcctttattgtgggaggatcggggtgagctcgacactaacccctcggggggcaagaggtagacaaggcccaggggggcgcaggagtggctcagcggagcgccccagccctctcctctcactggtccagcgccaagggtgaggcggagaccacggtgaagtgacctcagagactcagtcgtcgagtgctagggactagtcgaggctggaggcacagggagtagggtttaggaaggccttcctcttcctatggtggggtcctgggagccaggaggaggcc

SEQ ID NO: 332401 - DNA, 227 bp, Homo Sapiens
gtttcattctaacaatacagtgggggaaaggaagcctactgttacccatgaatacttaaaaactgattttgaaattaaaaataactacttccactttgaaacacattatttaatcccatgaacctcagtttccatatctgtaaatgggatgatatttacctatatagattgttcattaattcaaaaacatttgaacctggtcctacttggtagggacttatctcata

SEQ ID NO: 332402 - DNA, 395 bp, Homo Sapiens
ccagccaaacaaacagatgtgcaacataccccaggtgctcccacagtgccccctgcagactcctccctactggagaacactctggaactcagagcccagggttgccccaagacagagagctgcagagaccagcagtaggacaggcaggtcacctgtcccactggcacagaggcccaggtggtgtttaggccccgactctaccaagaggacaacaatctacaaagctcagtgctaaactcatctccagtttattttacatttggcaagacgaagctgttcagtatatatgtcactttgaaatgctttcataaattagacatcgaaaagcaaacaacacggccaagaagagctgagcgacagctcctttcccatttttatcactgtggtattatttc

SEQ ID NO: 332403 - DNA, 439 bp, Homo Sapiens
  misc_feature (25)..(25): n is a, c, g, or t
  misc_feature (36)..(36): n is a, c, g, or t
ggccggaaacacttaaaatcccacnggcccccaaancccccaaaccctaatttttcccaaaataacggggaaataaaattttttaaaaaggggtatgggaaccaaagttaattattttatcctttggttaacaattgtgaaatggggattttcccccattaagtatttttcctaattggattaatagctcctaatatagaaagactcttcagttttgtatattagtcttatattcagccattttactgggctattcatttaatagtttaaattctcacagaatcttctaggcatagaagaaattatgagcagcagataactttccttcttccgataggagaaaaataatattggtcatcacatacaatcttgttcttgatttccaggaaaaagtttcacattgtagtgcccttatgtgcagggaacaccttccgtgagc

SEQ ID NO: 332404 - DNA, 460 bp, Homo Sapiens
  misc_feature (18)..(18): n is a, c, g, or t
  misc_feature (54)..(54): n is a, c, g, or t
  misc_feature (68)..(68): n is a, c, g, or t
  misc_feature (76)..(76): n is a, c, g, or t
  misc_feature (369)..(369): n is a, c, g, or t
gattaatcctccattttnaaaaaacaatttgccagggaaaacgggaaaagggcnataacaacaatggnggaacggnaaactgagccccttcccataaattcaattcaagtcaaataaagccatgaaggcctactacatgcccaaccccttaattagagaaaagaaataaaaaaggtccagctgaattcatggatggatggagcctgctgaataaactacctttaccctacaaccgtatgagaaaaaatgaaaccctcttatttcccataacggcatccttcctagaaacaccaggaagactgtcagggctgacacggcgcttaagacaataccattttaagttctttacacaaaacaacgctggattanaacctaagcggcctacaaccgctgattaccgcactccatcctccacccagtgtccgtctcccacctgccgttacagactgagcagcaaccc

SEQ ID NO: 332405 - DNA, 390 bp, Homo Sapiens
  misc_feature (63)..(63): n is a, c, g, or t
  misc_feature (90)..(90): n is a, c, g, or t
  misc_feature (124)..(124): n is a, c, g, or t
  misc_feature (131)..(131): n is a, c, g, or t
ccggagtacctccagggctttcaaatataggagccctccagagtactaggtttagcccacaangggtgtcagcactaaaaaacctatganctatgatatatttaaatttaatatagttttggtntccttanccaataaaacaggagtaggaattctgacccattacacttgcaagtctggtaatggtttactaatttaagaccctagagaactgttaaatcattagtgtatatgaaacaaatagcaactttcaaaggtcaaatcatgaatgagtgatgaacacttttttaaaggaaagatttttgtgtggcttaaaaatttttagttggaattctcctattcctaagcatctctttaatttatatctcctattaatgagtaagtattttt

SEQ ID NO: 332406 - DNA, 641 bp, Homo Sapiens
agtcttgttcttccccccgggccaaaggcttcttccttccccttacagccttggaggaccagggacattatggcagcggaatacttgaggggcgccctgcgggaagcaagggagtgatgggtgacggagaggggacaagtcggcgggaacacagtgagggacagaaaagagtcttcgtggacttcccttccttaccaggaagcgtgcctccccaggagcagcttgggaacggaatggacctctgctggcgagggaggtcccttaggccgcagacccagcggtgggtgctccgaggtgcttgcagatccgcctgggtgctcccccagccccaccagacctccacagagtattgctcataagtgcgcagctgcccctggtcccagcttccccactctgcaggtctggctcagcgtgtggtgggatgtcccagctttcacaaacgttcagtctggctgtggtggccacggctacctggtgttctggaggtcctctcgtagccaagtgggaagtgtctggcccatcttatacagcagcttggagagctcgatgttgtggtcccggtaatagtccttcaggaaggctcgggaatccaagtccatctcgggatatttccggcccttgcttttgcccagacacttggt

SEQ ID NO: 332407 - DNA, 506 bp, Homo Sapiens
  misc_feature (121)..(121): n is a, c, g, or t
tgggcaagcatgtaatttcaaatagataggggcattgtatagaaacaccttctctgggtaaatctattacactctgaacttgcacacgaaatgaacacatagcatatacaccatacaacangatcatatggaaaataatattcctaatatgtccatttatataggctatcagagatacagccataggactgggtattaaggtgactaaagaaaaagacaaaggctgtaacgcccaagatataatatttcagttgggctagagtatcagattatacacttttagaacctaacttacaatagaaacaaaacccttctgcttaaacttctgcaaatacacagtacctcaaaaacatcagaggaaaactgaaatatgtaaactgacttccctacttagtaagccctggattcagctgtaagtttccaccttggtcctgaggtgacattatcctttgctcatagagccacaccctgccctgtgtgccattgattagttttctcccacttgc

SEQ ID NO: 332408 - DNA, 551 bp, Homo Sapiens
ggtagtgtttggcatacatttattaatattggaattaaaaatatatatggcactttatatcctagaaaataggtaatactgtaaatgtgttctagaaatgggagctgctgttgctcttattagagaattcaaacaaagaagggaggctcgctggggacagcttctgggggaggatgggtaccgctttgagacaacagggagaactcaggcacagaggtgacgatcatcgttctctgtggggcacatagtgatgccacccgaaaaaggtatgagtcagttgagtggggacaggtaatagagagctagaactggcctgccttatggcctcccaaggcattggggagccactgtacattcttgagcaggcaatgacttcacaaaaggatttctcaaaggttagtcctgcaacagaagacagcgtggattggactggaagagtgggagggcaggtggagaaggcattgtgctgcaagtggggagacagcctggggcccagccagtcccctgtgccctgacaagtggtatggcatggatggatggctcctcgtgcc

SEQ ID NO: 332409 - DNA, 965 bp, Homo Sapiens
ttatgtggcttaaggttttgaatgtgttcatttgtaacctgtcgccaatttctatttcattcttttcctaattattctgtgaaattctttagtgagaacccacatcttacatctagagtttatgattcttttggaaaaattaagtctactaagtaagaaatatatctaatgcaaaaagacaccaaagaaattgacttgatgttttccagtttaataatccaagtcttaatgcaccttccgatggtaacaggatggttcttttagcaaatttcttgccaatgtcctttgatggcaaattcagtgaagtctcaaacatgtgtgaaatggaaaaaacacttgaaactaaagagctgagcctgatgggtttgttggcctccctcatgtaaattctcagagtatgtttgaagggggcctctgatcattaacggaaattacaatggtagaggaacccaagccaggtgagatatacagaacttaggcaagccgtgctcgtgtgtgtatgcatgtgtgtcttcttgcacctgtctacccacagccagatggagccttctgtgaacagactttcttcagccacagaaaagtactggggatctctctggagtttgccctagcactggttccccatttttgaacacttttgaaatattagggtatttttgtcctgaaaaacacctgctacaattgcatacatgagtagttttgggccctttattgaagggtggatgcagaaagtgaatttgcttaattctggagcatagcattcaatgccatttttgttttctttggctttaggaaggcctgaggagagaagacacatagtcatgctgactaaaccagatcacctagaattaccaaatggaaagataagaaaaatcacccacaaatttgtaataatatttactcacttttcaaaggtttctccaactttttgagtcaggactaatcatctttaaattaatttcttt

SEQ ID NO: 332410 - DNA, 508 bp, Homo Sapiens
  misc_feature (90)..(115): n is a, c, g, or t
  misc_feature (443)..(443): n is a, c, g, or t
  misc_feature (472)..(472): n is a, c, g, or t
gtaaacgagtgtctgcatttagattccacaaaaccaaaatccatgttgaacaaagttaagtccgtacacagtgactttttgggtgagccnnnnnnnnnnnnnnnnnnnnnnnnnncctcaagccctgttttcctgtgaagatactttgagtggcagccattctctccacgtgaaccacacgtctggagcacagacaggcctctcaaggtcattgatcttacgcatttactgtttaccgaacaaatgtctgactgtgtactcgggtgtactccgcagcattgtcgactgcagtcccctgtgtttgccagagatactgtgctcgaagtagaggttttactctacttcatcactgcggatttgcacattgctccgtgggacactcgggagggcctgcgtttctgtttccctattaaatgggaaggcgttgctcttgaggcctgttnttgccttccctcgggttgcttgttgggtnccttcagtaaccagcggcccgggggggtgttcccaa

SEQ ID NO: 332411 - DNA, 444 bp, Homo Sapiens
  misc_feature (409)..(409): n is a, c, g, or t
ggcctgcagaaaggtgccagctatcctctactttttgcctgctgtcttcaggcaataaggagattagggaggtgttcccctggcaggcctaatctggtctatacttcttctagtccagcctttgcctggacaggtaaatcaagttcaggtttgctctgtgaacctggccaccttcaggtctggaagaagaacataggaagccctgctgacgtcaggcttaagctgtattctccagcacatttaccagaagcctctggggttgtgtgtgaccatgcctcgaataaagcccatgttctgatccccatctgtctgtcagatgttatttgtgggatgttatttgtgggttatgccccagttgggttaggaacctaggaaagtgataaaagtgagccatgcagccgggcacggntgctcatgcctgtaatcccagcactttgggaggct

SEQ ID NO: 332412 - DNA, 459 bp, Homo Sapiens
ggaagtgggcaattcctcaggtggcggggacaaaggagattcttcaaatggtggggacaggggcgatgcttcaggtggtggggatagaggcgtctcaagtgcaggagatgggggtgactcttccggtggagacaagggcgactccctccagtggaagaaaaaggtgatgattcaggtgggggagacagaggagactcctcaggcggcggagagaggggcgattcctccagcggccgggacaggtgcaatgcctcaggaagtggggatgtgggcaattcctcaggtggtgggtgacaggcgtgatgcctcaggtggtggggacgtgggtgattcctcaggtggtggggacaggggtgactcctcaggtgggggcagcagtggcatctcctcgtttaggggggcctccaactggggctcaagttggacccctgctttccctagtggtttggcttcacaatt

SEQ ID NO: 332413 - DNA, 437 bp, Homo Sapiens
  misc_feature (25)..(25): n is a, c, g, or t
  misc_feature (54)..(54): n is a, c, g, or t
  misc_feature (84)..(84): n is a, c, g, or t
  misc_feature (89)..(89): n is a, c, g, or t
  misc_feature (109)..(109): n is a, c, g, or t
  misc_feature (384)..(384): n is a, c, g, or t
  misc_feature (401)..(401): n is a, c, g, or t
aaagtggggccaaaacttgcccctnccctattaagtaccacagagctatcgggnactgggtatgtccctgaattccttttggtnccccnggagcttttaaaatgtattncccctactacctcaagaagacacttgggtatccctcctctgggccccaagcttcccctgaagcccccaggtgatacttattttgagttgggcaggttatgccatcctcagcagaataacaggctgcagaaaacatagggatggaaaagaaagcgtgtgctgactcaaccctccatcctgtgtgaggcaattcaaaccccccacccaccccctcagagcttaggggtgaggagagaggaaagtacagttgaggttgttaaaaaggggaaggaagtngaagggaggtttttccngggggccaattgttatttttaaaaggcctttaaggg

SEQ ID NO: 332414 - DNA, 422 bp, Homo Sapiens
  misc_feature (27)..(27): n is a, c, g, or t
  misc_feature (62)..(62): n is a, c, g, or t
  misc_feature (82)..(82): n is a, c, g, or t
  misc_feature (137)..(137): n is a, c, g, or t
cccaaggttcctgcccactgtgggccnatcaaccttgaaaggcaagccaatgaagtttcccnaatggacgtgaccatagccnagttttgttgaacggctaaaaaggacccctctgacagcctccctggagcagccgncctgaagtgttgctggaataccagcacctgagtttctagctggatcaaataaggtgacactcccccttcttgtttcagctttcttattgcaaacatgtgtcctttacatggtctatttagtgccacaatttttacaattttctgcttcctgttgatgattttgctgtttaaaatggcccccaaacatacagctgaagtgctgtgtagtgtttctatgtgcaagaaggctgggatgtacctggttggtttctgccatttgagtagagagaggcatcagagtgacag

SEQ ID NO: 332415 - DNA, 488 bp, Homo Sapiens
  misc_feature (17)..(17): n is a, c, g, or t
  misc_feature (30)..(30): n is a, c, g, or t
  misc_feature (42)..(42): n is a, c, g, or t
  misc_feature (92)..(92): n is a, c, g, or t
ccccggggtaagcctanggaacctaaacgnggcagcggcccnaccaaaatccaagccaacaattttggtaaatttttaagtaaaaaaaaggncaatttggccccatgttggcccccaggctgggtccttaaaactcctggggactccaacagatcccactccaccttggccctccccaacgtgcctgcagaggtgtaagcccacccacaccccgggcccaattttcaaatctaacttttactttacctaccaatttgtggtctggagggaaaaaagccaaacacttcctcctccatttcaattatattttgaaactagttacattgcttctagttttctgtgatcagccttcaaacacgtggtgactgaagtagcataatctaatcattaactgggtattttcagaaaatctggccattcaagaatcaaggtataaaatgagtaaaagcacctgacttgaaatttgtatatggtttctttagtttaac

SEQ ID NO: 332416 - DNA, 364 bp, Homo Sapiens
tttatttgtacttatgcccctggttccaggtttacatccatgagtatttagcaccaatctttccatctttaaactgtagttggctgggattcctgatacttcagtcagaagaagcagaattagtatgactatttacctagaaaaagcatcgagtgggtctcaaactttaaatacgtcaaaataaacctggtttgcaggcctcaactcattaccctgggcacttttaccacagtgggagcatctggctcttcaactttaacaggtacagaaaccaagctttgtggaacacttaggaaaacagggttcactccaggttggaatttcatacttactctaggctcatggaaggcttgatggaaaggaa

SEQ ID NO: 332417 - DNA, 484 bp, Homo Sapiens
  misc_feature (341)..(341): n is a, c, g, or t
  misc_feature (401)..(401): n is a, c, g, or t
  misc_feature (409)..(423): n is a, c, g, or t
  misc_feature (432)..(432): n is a, c, g, or t
  misc_feature (437)..(437): n is a, c, g, or t
  misc_feature (446)..(446): n is a, c, g, or t
  misc_feature (459)..(459): n is a, c, g, or t
  misc_feature (468)..(468): n is a, c, g, or t
cgtattcccactattcctttctttcatgattcatgtcattgtcccatcaacatttctaagatttccattccgttaagagcaaaagagaatgttggaaggtgggggaaaacatttctttgttttctacagggccagcttcttggatgtgtgtgatctgttcagttgcaaagggtcacatgctcagaaggaccgcatgctaaatttaatgctttgcagttaccctcttgaaatcctttattttttaagaaggaattcgacatttccatttttcaatgagccccacaaattacggcagctagtcctgggggcttctctaactctggaaattggggcagggatcntcttcttggatctaggattttactaagggcataataggggggcaaggaaaatctttatgnaaataatnnnnnnnnnnnnnnnaaggaggtnggggnttggagccntgaggttcccgtnttcgtttanttctccttacttgagg

SEQ ID NO: 332418 - DNA, 556 bp, Homo Sapiens
  misc_feature (234)..(234): n is a, c, g, or t
  misc_feature (247)..(262): n is a, c, g, or t
tgggaaaatttgttccctaggtctgtcaactccagccgcatcgtgtctccctgcagatcttcacaagcatctagcgcagggtccatgaggaaggggacgtcccctttctgggagtacagaagtcgggtcactggagcattaagaacatcaacatcatctttctaacccaatccttttgaagtgatttacaacacacaaaacaaatagactatttgtaaatgaacatccattagnaggtcatgctcannnnnnnnnnnnnnnnactgatagagctagaaagccacaaacgcaggaggccagtgtacctatcaatataacaacccatggaaccaaccctcccaagaacgcacaatacagctggaatcgtggctacctgtatttaccattactgtgaccaagtgaggcaatcttagaccacgagaccaaattcagccccacgaggtcctatttgtctttaccaggggctcagcacatagtgtttaatttcccagggatgaaaccatctctccaagatcagacagccttgcagacagacatgatgtgatcttgagaattt

SEQ ID NO: 332419 - DNA, 465 bp, Homo Sapiens
  misc_feature (44)..(44): n is a, c, g, or t
aaagcaaattattttaactgcccccgggtaaaagtccactgganggttgccccaagtatgtaatttggcccacccaaccaaaatattttactgaagccatcctgcctatttgaatccactcctgcataagatgtccacaggagcctaggagggaaccccaggtcctcagagtgcctaatgatctatttggacaaattggatttgaatatcaataatgactaataatattagttcatttttagaacacaccctcagcagagtgggggactcatggcagaccctaattgtctagggcagaaagtgtggaattcccaccagcatagaagtcccattgcgatagaagggtcaggggttaccaaaacagccaaagtaaaggctatgcttcctaaagacatccaatagtcaacctcctacacctccaaatcggcagaagtttccatatttccaaccacaaaatcctgccat

SEQ ID NO: 332420 - DNA, 319 bp, Homo Sapiens
  misc_feature (41)..(41): n is a, c, g, or t
attttgtgttccatggattgaaagaccttaaatactgttanaaaaggcaaatacttcctcaaattgatcctacggattcaacacaattgcctatcaaatccctatctggtttatttatagaaactgaaaggatgatcttaaaaatcacagggaaatgcaacagatcccaaacagccaatacaatcttgaaacccaacaaagttggaaggcttgcacttcccaatttcaagacttattacaaagctacagttattcagacagtgtggtcctggcataaagacaggtggtatggttttttctgtgtccccacccaaatctc

SEQ ID NO: 332421 - DNA, 346 bp, Homo Sapiens
  misc_feature (238)..(238): n is a, c, g, or t
tcagctgaacaaagctattactatggtgctttaactgcctttagaccctttgcagaaatcaagccacccctgtgggttcagggctcaggtggagggttgcgggtttgggcgatccagagggaagacaaacaccctgaatcttgtggctaataatatctccccttgagacctctcagacagacagacaggaaagacagacagtcccagtgggcacctgatgctgctgtcccttgagctngggggcacagctagggaggcactagagttccagcctaggggtttgaaatgataagccgaggcacttccccagagggaacaggtaaggcacctgcccttcagtttaccc

SEQ ID NO: 332422 - DNA, 417 bp, Homo Sapiens
  misc_feature (15)..(15): n is a, c, g, or t
  misc_feature (39)..(39): n is a, c, g, or t
  misc_feature (50)..(50): n is a, c, g, or t
  misc_feature (66)..(66): n is a, c, g, or t
  misc_feature (81)..(81): n is a, c, g, or t
  misc_feature (87)..(87): n is a, c, g, or t
  misc_feature (149)..(149): n is a, c, g, or t
  misc_feature (186)..(186): n is a, c, g, or t
  misc_feature (358)..(358): n is a, c, g, or t
ttctttcccaaaaanccattgggccctttttcccaaaancccaaaaattnaacccaacttaaattnaactttaaagttagntttttnaattaaatccttcccaaaaaccttaatttccccttatcttataaaatgaggaaaacaggaanttcccttagggcaaagcctaagcctcctgccagcccnacccctcacagaaccaagagggcaacgcagggtgaaggcggggcagtttcactcccccagtgctgtggcccccttggttgagtgaaagcacctccagagccctaaccctagccctgggagccaggcaagagacccccacaacgaccatcagaggtcgtgaggggtggcaggngaactggcagggagccaggcaggggccagggtctaggctcagagcagtgaaggatagat

SEQ ID NO: 332423 - DNA, 405 bp, Homo Sapiens
  misc_feature (196)..(196): n is a, c, g, or t
  misc_feature (199)..(199): n is a, c, g, or t
  misc_feature (342)..(342): n is a, c, g, or t
  misc_feature (368)..(368): n is a, c, g, or t
  misc_feature (379)..(379): n is a, c, g, or t
  misc_feature (386)..(386): n is a, c, g, or t
ggcacgagggtaggaaaagtcaactggtcttattttgagcaacaccgtcctggtcactagggttgtatgagagtttcagggtcgtctatagcctggaacagctatgaaaggggtctgtaatcagccatccgtgctgttcaccatctgtatggtcctatgaaggcaaacaattcacctgcttccatatgaagcgtanctncacgggactttgtagagataggaagccttgggacctgggaagtcggtcttattgggtatccatttcaaagctgtattccagcaggatgctgaacccactgttcactccagggaccacacaggcctccaccctctggaaggggntttcctttaaagctgtcttctcagcnggggtattatngactccntaccccttaattccccagt

SEQ ID NO: 332424 - DNA, 598 bp, Homo Sapiens
  misc_feature (19)..(19): n is a, c, g, or t
  misc_feature (65)..(65): n is a, c, g, or t
  misc_feature (79)..(79): n is a, c, g, or t
  misc_feature (104)..(104): n is a, c, g, or t
  misc_feature (167)..(167): n is a, c, g, or t
tggcccccgtcgatttggnatgaaaactccacacccccccacccctccaacaggatgtgaagaanggtttgcccctaantcgatttaggaaaaaggaaaactgnaggtggccgaagagtggcctacccacccctaattaggaacttaggaactgggagtgggggaantgtgtaaacagtgtgtaaaatgaaagaagccttattaaggctgatcagcccacaaaatgggaagtccacaattcctcttagtgtggaactgggtgctcccgagccaaagtgtggggtccaacctaatactagtggtgcatctgcgtatggctaataggagctgcccctacagcctcagagttgtagcaggaataaggaactctccaaagccaagtagcttctgaaaactcccgtaataggagatggtatagttggccgaaactagaggaagagtgagtgtgctgggccgtaaaggaaggaatagaaggaaagtccatcaaaacttactccattgaagtgcatgttacaaaactttaagaaaggttttgcaggggattataaagttaagctaaccccccaaaggttgagaactctctttgaattagaatgac

SEQ ID NO: 332425 - DNA, 450 bp, Homo Sapiens
  misc_feature (65)..(65): n is a, c, g, or t
  misc_feature (87)..(87): n is a, c, g, or t
acttggagccatgaattttcgaacccccaatccccttttttaaaatgttttcaaaaggccttccnagaagcttttctcccaagaggnaaccctatgggtgacgaggggttttgacattccacagacttgggaacgcaaagcatcgaaaatccgccactggcccacgtgttgcaagtatcgaaacacgcccttgatatcccacctcctggatggctgcatgcagtaggggtacggtggtcatctcagagcccagccccacaagcacgagggtcccaccagagcgagtggcctgtaaaggaggtaaaaacaagaaagctcagaagataagaaatactgacttcccacttacaataacatattgtcatcacacaagtatcttctggttgcatcagctgagcatccaaaaattcctgagaatgtgatttgtataaactgctgaactgctcaacc

SEQ ID NO: 332426 - DNA, 401 bp, Homo Sapiens
caaaacaaaataggttatgaaagtacctttaataattccacccctaaaaagtaaaagtgtaaacctaaaaccgaacagcattaaaggaaagttgccgttattttagtccttttgggatattgccccccctttaagtttgtactaaagatgatgttcagcaaatgttgtggtgcatatactatgcaaagcagcatttttgcccattttgtgataggtacattagctattcagagtggctttccattagctaagaagtggattgctacagctcctggcataggaaatgttttctcaagaaagttccatggtaaataacattagaaaggaagatcatgaatctagccagaagtcatagcaaaattgtagacttgcttggaataaccacagggtattgaagtcaa

SEQ ID NO: 332427 - DNA, 478 bp, Homo Sapiens
  misc_feature (26)..(26): n is a, c, g, or t
  misc_feature (393)..(393): n is a, c, g, or t
  misc_feature (404)..(404): n is a, c, g, or t
  misc_feature (423)..(423): n is a, c, g, or t
gtggggacgtgctcttggctgtgaantgtggggtgtgtgcagagagcctgggcctggggttcccagaggagcatcttggggaggcctgcacagtaggatcctgcccatgtgccctgagctgatgtgccagccgtgtgaaagtgctctgacaccgtgggccgtacggagggcctccagaggggatgttgaaggcaggagacagctgtgccgggagcctctgcaggccgtggagggcccgtcctgtgacgtgtcttgccctccctgcttccacctctggtgtttgcttgcttcttgcgttcagggaccctttgcttgcagcgccatgttcttgcatctttcttttgctttttgtaagcttttgggatctttcagttttgatgggattgggacaancatttatcctncttgttgggcacgggtttnaacctaaaaggaaagaaggacagagatttttttcccacaagaagggttaaagttt

SEQ ID NO: 332428 - DNA, 402 bp, Homo Sapiens
  misc_feature (58)..(58): n is a, c, g, or t
  misc_feature (87)..(87): n is a, c, g, or t
tttccttggcccaaggcccaacccacacggtggggcccacttggatccccctcctttnatgggacaaagtcctcctataataccctncgtcccccacagaaacacactcccttccccccaaacccagtccacagggaagtccagggcagaacgcattcgatccagctctctgagcacccatgcctactttcaagtaatatgaaatcatgacatgatggggagccctggaaagccagggtgttttagctctagagaattaggaatcattctgaaatgaagacaaatcagaaatgaagagaaagatggaagctctgaagagagccttcaaaggaaaatgctcacgtattgaaatggaaacatacaaagaggttcaggagctgtgtagaagagcatccgtatcac

SEQ ID NO: 332429 - DNA, 356 bp, Homo Sapiens
  misc_feature (291)..(291): n is a, c, g, or t
tacaagcctcagattgttttactctgaatcaattgaaagtgccctcagctagccatttacaattcccatggaagcctatgtagctacatacatacaattgcaatttgctcgggatagctctttaataaattcatttgataatgatttttgcttaggaagaacagaagtcttgtgttctcacttccctgagggatgctcaggagggagcacaaacccattaaaactgagggaatcctcttctttaaatgggatcttaaatttcacatttaaggtgctggaggtttttaactnttccaaaatgggactggacatggggcctttctggcttttctcctcttacataggcctcgggggac

SEQ ID NO: 332430 - DNA, 440 bp, Homo Sapiens
ctgcatgacgtcatagcagaagaaaaaaacacgaagaaaactatttcaaaataaatgtttaatataatttttagaccaaagaaaaactcaatcatacattgtctccagtggaccatatgtgccagaacaggaccaactcagtccagctttgaaggccctgattcagtcctactggtataatctcccttgatttattgatttgtgtatgcttcttatgcaatacaaggtgcattttactcttgaagtccctatcacctccaccatcgccatttaactgcaaaagcatgcttcctaatggggggggttttcttcccccttccctgcagaggttctgaaccttcaaggagtttgacaatcttatgaatctcttgaaccttctccccagaaaaatgtacatacaagtctacaaataatttcatggggttcatggaccccaaggc

SEQ ID NO: 332431 - DNA, 420 bp, Homo Sapiens
  misc_feature (33)..(33): n is a, c, g, or t
  misc_feature (53)..(53): n is a, c, g, or t
  misc_feature (84)..(84): n is a, c, g, or t
  misc_feature (110)..(110): n is a, c, g, or t
  misc_feature (155)..(155): n is a, c, g, or t
  misc_feature (170)..(170): n is a, c, g, or t
ccccggggccgtaactgggccctggaaggaaanaaaaaaaactccaaggtgcnagaaacaacctcgcctgtcccacaccctccnacccagaacccaaaaaagcctcggangaaaccatgcaacctgcccaacttttccatccccactggaaagtnctggccgtgatggtncaagtccaccttcagggtggagcgtgtgaataggctgcaggtgcactgacaactcccaacttgggaaacagatggacatatttgtggatggtcttccccatctttggcatgcggataagctccccaatctcattatgattcaggtcgtacagacgctcaaaggggaaattcttcttctcaatcttcttcactacttcctcagggagtttccggaactggcgcagaggacacatggactgccacatggtgc

SEQ ID NO: 332432 - DNA, 502 bp, Homo Sapiens
  misc_feature (405)..(405): n is a, c, g, or t
  misc_feature (433)..(433): n is a, c, g, or t
  misc_feature (467)..(467): n is a, c, g, or t
ccttttatttcatttttatttcagaagaataacagaattaactggaactaagtctagcttttgttttcttcttctctttagcaagttccttagttccttcagtccttctgctaagtgagcagagtgtttataaagagagacgatttaaagatgactgaagacagatgttaaatttgaacggtttcttacttccctagtttcacaagttagggtcttagaagttgccaagcagtactaggatactcctctaggaccgaggtgagttaatgcacagccttgtacttgctaagggggaggggagacagacttggggaatctgcatgtggggtgtgtcatggcgcacacaggtgcaggagagggagcggggcccagtgctgcccagcttttcctgaaccttcaccaccnttgggttgataagagccactttgcactnttgtccaggggaaacacaaaagtatatatccttnagcttgcaaattgaggttcaattttcaagtgaggg

SEQ ID NO: 332433 - DNA, 377 bp, Homo Sapiens
tgagccaccgcacccggccacttgtttcttaatgagtgtctgcaactgctggggaggtgcgggtctgccggccagagctgcaggtaagtgagggtcaagctggttcacagagtgcagcaactcagctcagagtcctgaacacacagcccagccctctgaaaccatcccctccagcacaaggaaggcagcattctgcaaacgcatccatggggagcctcagggaaaataagtttttaggacaagtcacgtgtttcctaccttccaggggaagcaaagtcagtgcttacaagaagcaaagttaaggggttcgcaggtcttttggtttggaagggaggccaccaagatttcctgggtttagtattcggtgcttttaaatt

SEQ ID NO: 332434 - DNA, 445 bp, Homo Sapiens
  misc_feature (53)..(75): n is a, c, g, or t
cagggaatatttcacggcatcaaagacatggccagaaagcaaaaagatgtatnnnnnnnnnnnnnnnnnnnnnnngtccttctgtatctcacaaccctgatacccacatatggcctttccgaagggagtattgtatgttgtttagtcttggaacttcttttaaagataggatgtcatttacaatcctcaggccatatgtttactcagacttaagaaacatgggctaatctttttctattttgaggagtaataaattgaaaagataattacataatatggtgcataatgtaactctggcttgagccatatgtgtttaattttagaaaaacatgcgtgatgacaggttatgaaaggatgaaactattttagtctttttaaggattagaagcatgatttttaaaatgtgtgttcccgccaccccccactccgagccctatgcagtctc

SEQ ID NO: 332435 - DNA, 356 bp, Homo Sapiens
tggccacaccctggtcattctgactggctgtacaaatagctctcctggctccccaggggacatgttcatcaagatttaggccacaaagtagggccgtttgttccccctcttgcccctctccccagtcagctgacgacagctccagtgttgcagcccagcaccccaggatggatgacacacctccctggtgctccattgtcagggctctctgatttgcagaaacaggtaatagtttctgtctatggtttggaatcatgaagtagggcaagacaagtttctttggagttaaatttagggcttagaatccagggggtggctgagtaaagctgtattttaacttcctacttccacccttc

SEQ ID NO: 332436 - DNA, 549 bp, Homo Sapiens
  misc_feature (480)..(480): n is a, c, g, or t
tttttttaaatccatttttttcttttccaggagttggttatttagaaatacaatcttactcctgctgacatcatcacaccaagacctttgtggctaagggtcataaaaagaaaatgttaatccaatatccccatttatagctgagtctccatcctgggacatggccaagagaagtactcacttatctcttggaaactcccattttgggtcctctggaagttcatactcggagacccctgccagcatgggggtgtctgccgttgaagagaggcgtgttgttatcctcaccagcggggtgttggagttcatggaggagctggactcagccgaaacctggatacaaaatgcaaagacacagatgtaatcctggctccatctgagaaggctggaagtcagccagagcccagccagagtatcgaatcttagaaaggaatgggttgggggctggcagaagtcagaaaccaaattagaaaaccactnggaatctaacttcctctggcctccaagtccatgcagtaccagatttcatccaaatttctctgtgccgaa

SEQ ID NO: 332437 - DNA, 557 bp, Homo Sapiens
  misc_feature (338)..(338): n is a, c, g, or t
  misc_feature (410)..(410): n is a, c, g, or t
  misc_feature (418)..(418): n is a, c, g, or t
  misc_feature (439)..(439): n is a, c, g, or t
  misc_feature (455)..(455): n is a, c, g, or t
  misc_feature (461)..(461): n is a, c, g, or t
  misc_feature (473)..(473): n is a, c, g, or t
  misc_feature (499)..(499): n is a, c, g, or t
  misc_feature (524)..(524): n is a, c, g, or t
  misc_feature (546)..(546): n is a, c, g, or t
atttataacgaggattcccagtatctaataatggcactgtccacggatgaacgggacagtcttgctattactatctattggggtaaaattgaagggacaaggcaaaatataactgaaaactataaagttttgtctttctcataaccatatctttgacacatgctgaggaataacatttctctggaaaacaaaaacactttcaggtctcgaagtcatagtggttttatatttaaggctttgccttgatcaaggaaatatctggatgtgtgggataaagacaggcaaaaagggttgtaggtcagcagaccccggggttccgagtcccccaattttaaatnttaaatttggctttgcccttgtggggtgtttggaattgtggcctgtttttgatccccttctggaggcaccantttatttntcccattaaatttgggggtantgtggaggttccagcntgaccnttagggggagcnttaggttggggggcccttgtgggggnaatttttttacccgtgttaaagttnaattggggtttgggggggtgtnggcctttgttt

SEQ ID NO: 332438 - DNA, 498 bp, Homo Sapiens
  misc_feature (17)..(17): n is a, c, g, or t
  misc_feature (22)..(22): n is a, c, g, or t
  misc_feature (82)..(82): n is a, c, g, or t
  misc_feature (87)..(87): n is a, c, g, or t
  misc_feature (105)..(105): n is a, c, g, or t
  misc_feature (114)..(114): n is a, c, g, or t
  misc_feature (123)..(123): n is a, c, g, or t
  misc_feature (181)..(181): n is a, c, g, or t
  misc_feature (291)..(291): n is a, c, g, or t
taaccagggacccaggnagccnggggccagctgaattaccacaacctcaaaaggatcgcctggaaggcagatatctgaccangagancacagaccaagcacattncatgagaanttaaatgcntaggacaatactacctctcccaatagggcttttgaaccctggttttaaataacaggcnagatctgttttcccttaccactcattttgcaaaactcaactggcctaaacatttcgctcaatcttgagttctgcaggttggtccctgagagctaggttggccttgggaantttctgctcaattttaagttctcaagaatctgagggcagccgatttagactgaattagagtcatcctataggtcagaaagaaagaatgctagacaggtcaagagggccagaggttggttctgataatgccatatgacctcaggcacatctttttgagttttagtttccccatctctaaaaacggatgattggaccaacagcaagctt

SEQ ID NO: 332439 - DNA, 255 bp, Homo Sapiens
  misc_feature (63)..(63): n is a, c, g, or t
  misc_feature (66)..(126): n is a, c, g, or t
tagggaattttggccctcgaggcccaagaattcgggcacgagcgggtaggagaatcacttganccnnnnnnnnnnnnnnnnnnnnnnnnnnnnnnnnnnnnnnnnnnnnnnnnnnnnnnnnnnnnnagagcgaaactcacactccgccacccacatgccaactgacttgatgcttaataaaactgctgctgcctgtttgattctatttaatgtataatttgaatattaaaccttttaacagaactgtaacccccc

SEQ ID NO: 332440 - DNA, 420 bp, Homo Sapiens
  misc_feature (205)..(205): n is a, c, g, or t
  misc_feature (227)..(227): n is a, c, g, or t
  misc_feature (326)..(326): n is a, c, g, or t
  misc_feature (369)..(369): n is a, c, g, or t
  misc_feature (400)..(400): n is a, c, g, or t
tgctgttagactctgtgtaaattgctcccctttgagttgtgtgctctttgcatacgtacggttatgatgtggccctcacaggtttttattataatcatgtgtggatcttacatgtcttaaaatttttgcatagttgccatcagtaaaggacagaaatttgcaatattgttcctgtttaaatggaagataaaattgattgactganttttacttttacaacttttttngagacatggcctcgctctgtcatgcatggctggagtgcagtgggtgcaatcatagctcattgtaacctgacactcctgaactcaagcagtcctcctgtnctcagcctcctgaggtagctagggtgctactatgcctggggtnaatttttataaatatttttgggaggcggggnctagctgttgttgcccgggg

SEQ ID NO: 332441 - DNA, 462 bp, Homo Sapiens
  misc_feature (12)..(12): n is a, c, g, or t
tttttgctgganaaaacttttactgtcagaggctctgttgggccacaggtcttcagaacaccgggctcgcccacttccttctaaggcattcaataatattagtaattaaatagcaacgctcatcccccaaccggaatgtacaacagaggtcccattgtgccatgtggtcccaaggggtctggtcccatgaggtctggtactcaagaggcagagggggctccctgatgcagaagggttaaggccacaaaggaaaaggagaagggatggggtctgggggacagctgagctggtccatcacatccagggaatctggctcagccctcggggttgacttgagtgcagggcatgccatgtccccagctcttcggggtcccggaggggcggcgggggccccgaggcgtggggatacgtgagggtttacggtctggctgtgtgtccatccgaccccgtgcccaggtcctc

SEQ ID NO: 332442 - DNA, 425 bp, Homo Sapiens
  misc_feature (143)..(143): n is a, c, g, or t
ggctctctcaatctactaggagtggtcttgctcttctacctgctttcatataccctgccttccttcggctgcttctccctggagctttttactttgtgggcattatgcccattttttaaattccttcactgtcatttttattnggtattctggaaggggaagagataacatgttttcaatttgccttatttaaccagcagtctcaaacccatttactgtgcaatgttataattataaaaagcttacttactggttgcctaatctgggctttgatacttatcacgtgcttaaccttgggttagttacagaccctttcttaacctcagaatcctcccggctcctaatgtatctaatccatataacaccatcattgacctgggaggggattataagttgacaagcaaggcatgttactggaaaaaaaa

SEQ ID NO: 332443 - DNA, 382 bp, Homo Sapiens
  misc_feature (263)..(263): n is a, c, g, or t
  misc_feature (320)..(320): n is a, c, g, or t
  misc_feature (340)..(340): n is a, c, g, or t
  misc_feature (350)..(350): n is a, c, g, or t
  misc_feature (361)..(361): n is a, c, g, or t
tttaaaggcaaaaatcttttatttcaacattttagggaagccagcagcctcttctccacatctcagaagcacaaggagacacccctgatcaagaaggcaccggcagaagcggcatggcaccattaattgctttctcttccggtggaaggctgccttgctctcatgagagttgatctgcagcgggatataagcgtctagatgatacagctgctgggggccccccatcaccaggcggttctccccgatctccagcgacagccccnaggggtcccatccagtttggggaggtcaacttcggccaagaggaggtcgggggcttncagccacaggtttcaggttnaggctttttnaggcccttganttaggtttttcccggggggcg

SEQ ID NO: 332444 - DNA, 243 bp, Homo Sapiens
  misc_feature (68)..(68): n is a, c, g, or t
cccggggaaggcgaaagcttgccagtgaagcccgaagaactggagcccactaacactccccgccatgnacagaagtgagactcccatcctccaaaatacaaacaaacaaagaaaaaaacactgtgatgtctgagatttaccaaagcttgatgtgaagtggggtggggaagtgagtgaggatgtgcgtgaaattcaaaaaaccatgggttgataattattaagtctcagtgatggggatgcttg

SEQ ID NO: 332445 - DNA, 416 bp, Homo Sapiens
aaatcccctttgtttggttgtggtgaaaccgggccctccccgggtaagaaccggccttggggaaagaccctttccctatgccttggatgaataatgaaaggtgaaacgtcctcttggtgaactggggagcttcctttgtttgggaggtggagaatgggagacccgccgctttggtggtggagatggtgatgctcttcgtttaggagggggaggaggtgaagccgttcttctctttggaggtggagaaggagagtatctcctctgtattggaggagagtatcttctaggagaaggtgagcgccgacgtgggggaggagaaggagtccttcgtcgtggtggtggtgtgggagtcctgcgccgtcgaggaggaggggcgggagaaggagaccgtcgccttctggtgggtggtggggatg

SEQ ID NO: 332446 - DNA, 507 bp, Homo Sapiens
tacgcatgaaaagccaatttatatacttcgcacatacatgagcacacaaatgaacgtctagtcactcattttctcagctgcacccagaacagggctgggctcatctagggcaaggagatctccgtggttccaactggccagcccagatatacccctcactgctgcacccccttacctggcctctaggaggttccctccaggaagccaggttcaatgcaggaagtgtactgcagttgacaaagtcccggggatatgagttggacatgaagatgttgttcttagacacggtggtgatgcctgtgttgtcgcagatgatccggggcaatgagatctgggccagggcctgtcgctgctgcatgctgaacacaccctcgttctcccaccaaaaccgatcaccatcccggagcttcctgaactgggtaccgatgatgcaggcgaggagtgggcccacgcggcttttgcgcttcagaggctcggacacgccgcccatccagatgtcgatgttgt

SEQ ID NO: 332447 - DNA, 603 bp, Homo Sapiens
  misc_feature (52)..(76): n is a, c, g, or t
aaccttttcttacattttattagcttacagattctgtcagtatgtctcatgnnnnnnnnnnnnnnnnnnnnnnnnncagtacaatgcctctctctaggggactcgcataggcttaagaatggagtcctggtgaattttccattctggcttagagtccttaaatggtggtcaggtgttttcccaactgtccagtggaccttaggccctttggccaaagtgcaagccttctgccctctgctgcatgggcagcgtggctcagctagggaaaccaaggcagaaagggtgacagtgaggctttggcattgtaggtaggcgatgtggtgtgcaggcagcaggccccaggagctctgctgaggtcagagggtgcctgcaaaagccagaccctaaaacacttacagaggggaggataaggactcccaggtttctggccggagcctcactgagcagaaagtaggttccccagggagaattccaacacagggaccctgcagaatagaacagggctgggcagagcagcaagactcaatccccagcccccaaaaaggcatcatgcaggtaagcaggtctgagataaggctggtcccagcggtactgtgccgaaat

SEQ ID NO: 332448 - DNA, 401 bp, Homo Sapiens
  misc_feature (22)..(22): n is a, c, g, or t
  misc_feature (51)..(51): n is a, c, g, or t
  misc_feature (58)..(58): n is a, c, g, or t
  misc_feature (78)..(78): n is a, c, g, or t
  misc_feature (149)..(149): n is a, c, g, or t
  misc_feature (388)..(388): n is a, c, g, or t
aaaaataagagactcaactggnaaatgccttcaattcacccacgtcaaaangcttccnatacctgttaacttgtccgnagtccccacagtgactgggcccagttcccaaaaaggaggaagaattaaaccctgctcggataatctgcccncaagttaacaaaaccatctggtgaagtggcccaagttgggcttggatctcccagcctgccagatgaaagcacttctgaccacacaccctctgagaaggggctgagtgccatcatcctgcctggtcctctcaatctctgcctagagggggtgctaagtcacacctgactccctctgcctttctcccagtctaccatcctcaccctaacaagacccttggcatatcatgcgacagcctcangtccaagggctct

SEQ ID NO: 332449 - DNA, 399 bp, Homo Sapiens
  misc_feature (24)..(24): n is a, c, g, or t
  misc_feature (291)..(291): n is a, c, g, or t
  misc_feature (297)..(297): n is a, c, g, or t
  misc_feature (324)..(324): n is a, c, g, or t
  misc_feature (349)..(349): n is a, c, g, or t
tgaactgcaggggcagagcaggtngaatcaccggacctccagcacctgcaggcagctttggaagtttcttccccgagtggagcttcgacccacccactccaggaacccagagccacattagaagttcctgagggctggagaacactgctgggcacactctccagctcaataaaccatcagtcccagaaggcaaaggtcacacagcccctggacctcccttcaccagtgggaggctgggtagtgctggccattcccaaaagggcttctgtcctgggggagtctgggtgtgtnttcctnacatggcaattttccacgggacccagnttttgttggaggggcattgactggntggggccagaaaggttagttgggtcctgggggggccctattggttttcga

SEQ ID NO: 332450 - DNA, 401 bp, Homo Sapiens
  misc_feature (346)..(346): n is a, c, g, or t
gatttgagagggcagcgttttgccagtacctatcttctttctacagaagatagctttttaagaaataagagttccacattgagtggctgtcagacacagatttcactgtgacgtaaaatacactgcagtgagaatatggtatcaccactattcatatttacatcattcccctcacacagaaaaaccaacccttttcccaaaaagtcaagaatactgctatacctttattattctcagcttcctccagcccttcttgtttttcctcacttgaaattgaaccttcattgtcagctaagtatatatacttttgtgttttcctgggacagagtgcaagtgggctcttatncagccaaggtggtgaaggttcagggaaagctggggcaggcactggggccctgctt

SEQ ID NO: 332451 - DNA, 308 bp, Homo Sapiens
ggcgtccagcctttgttaaatttcttaattccacagaagtacaaaataaagtttgttaaaaacatgtgatttcatgaatcgttaaagaaattacaattagattcagcaactctgattttaaacaatacaaacaaggacatgtgcaaagatgtgatttccagtaaggataatttaatagatattactatacataccacttccctacatccgtgatccagacggattgttcatataggagtactgggctgccaaatatacccatgagggtgtgtcaactgtataattcccgggggtcgtggggaatatcc

SEQ ID NO: 332452 - DNA, 625 bp, Homo Sapiens
  misc_feature (540)..(540): n is a, c, g, or t
ctaattaagataaaattcatatcacataaaattcaccactgtaagcattttaaaaatctacaattcagtggtttttactatattcacaatgttgtgcaactattaccactatctaactccaggacatgtccatcacccccaaaattggcccccaaaaggttctaagttttatttctgtaattagtatttaaaaaaacttgtagaagttgggaactttcaataaaaattcacatttctggcttctcagaaaaaaatctgaccttctggcaatactgagggaggagagtgggaaacacagggtcctctccaattagccccccggccattccagcacttggggtaatttcctgggctcccgtaggcatatgccctaagctaccccgcattggaaatggatcagggggctcaaaccattctggaatcactttgcagacagccttgagtataagatgcaaagggctacagccctctgttccctgcgctggcaaccaagctgagctagaaggcgtccactctgactcttcaacaggacccctgggnttctgccaacttcttactcacctttctctcaaatggtaccctctccatcccaggatctttgctggaatctctcttccctgaaagt

SEQ ID NO: 332453 - DNA, 404 bp, Homo Sapiens
  misc_feature (238)..(238): n is a, c, g, or t
  misc_feature (320)..(320): n is a, c, g, or t
  misc_feature (360)..(360): n is a, c, g, or t
  misc_feature (378)..(378): n is a, c, g, or t
  misc_feature (390)..(390): n is a, c, g, or t
atgccattaaagaaatattttattttgtctatatcacttgtagatgctagtacccttagattagtaaaacaaaactaccatatgatctttatttaaaaagccttgggttaagctctggagaattttcataggcaaattcttctgtatgagctggatcagtaaacacgccaataaaatctatctccagggaagaatggaccatccactttatcagccaaggtgaatcctatagaagagntcttatcaagcggacgtccatgcctgaacatcccgggattcttcctcgattaggggaaggaaaaatttgggaaaaaagggantcttgaccctccctgcccgtaggggtcccccgcggggtgnaaccatggaggtaacctnttaccatctggnttcgtccctctggg

SEQ ID NO: 332454 - DNA, 390 bp, Homo Sapiens
  misc_feature (316)..(316): n is a, c, g, or t
  misc_feature (369)..(369): n is a, c, g, or t
ccaatttagagaaccacatcctcatccatgctgcttactatcaatagtggcacaagtgtcaaattttaaggttacatttttggggacccctctttcttctgttctagctattacctttcttgtgtcacctagaaaaggaccagtccttaattgtattttaaaaactgtgatcatgggaggcttaaaatgggtcataacacgcatcaagttggttatttcctggggctacataccttgggatagaatagcattatacaaacaagtttcttttaggaggtcctggggacacttataataacccataaaataatagggnatgtagccaatcttttgtccctaccctcaggtgacttgatgtatatactgggnaacagttctcagtctgagggg

SEQ ID NO: 332455 - DNA, 532 bp, Homo Sapiens
gccatatagcctttttgctaattaagagaaccacatcctattcctaacttattactattaatgacaacacaggcatcaaacttcaaggtgacttgtttgggcacccctttttcttttgttttggctaacactttactcatatcgtttatgagcccccaccaggtttcagtccttaatcttaaaaactgtggtcatgggaggctcagatgggtcataacacacatcaggttggtcatttcctgggctacataccttgtatagaatagcattatacaaacaagttctttttagagtcctggtatacttataataaccataaaataataggactgtagcaacttttttcctacctcagtgacttgacgtatatactgggaatagtcttcagtctgaggaaggtcagttgaagtccctatggtataagtccaaattttaaggaaaatgagtcccgcaatgagttttctcatgctttggccatgcgtggaccagtcagcttccgggtgtgactgaagcaggtattgtcatcttcttc

SEQ ID NO: 332456 - DNA, 424 bp, Homo Sapiens
  misc_feature (360)..(360): n is a, c, g, or t
  misc_feature (388)..(388): n is a, c, g, or t
  misc_feature (400)..(400): n is a, c, g, or t
  misc_feature (409)..(409): n is a, c, g, or t
tataaaagtttattatacttttttaaaattactctttagtaatttattttacttctgtgtcctaagggtaatttctcaggattgttttcaaattgcttttttaggggaaataggtcatttgctatattacaagcaatccccaaattttatggtcttccagggaaaagttattaccgtttatgatactaacagttcctgaggacttaggctatgatcagtatgttcatgaggtgggagcagttcctgtgttgcagcttttaacaacagatgggcattcattaaatcacaaagtatgtttaaaggtcaccaaaaggcaaaataactgtctgagggctaagggcccacgtgggggacagtctnattacccctggggtactcaacctggccntggatgtccggngctttcccngtggcatgtggattt

SEQ ID NO: 332457 - DNA, 484 bp, Homo Sapiens
  misc_feature (19)..(19): n is a, c, g, or t
  misc_feature (138)..(138): n is a, c, g, or t
  misc_feature (433)..(433): n is a, c, g, or t
  misc_feature (448)..(448): n is a, c, g, or t
  misc_feature (466)..(466): n is a, c, g, or t
ttcagccctgttgagagtnggagtcggtgtcgatggtcacagctcagtaactcatcgtcaccagcgagtaccacagagcagacacaactgcacttctctgtagagcctccagtcgatactgagagccactggggcgtnctgacacccaagggtgcagacattcactccaagtccagagaccgcgccctttctaaggccctgtctcacagtcgccccgtgctcattgtgccggatgtttccacagccacagaggacggtgcgtgaaggtgaggtgcagcctagtgcatatggactgacagaaacgtgaagccacagtgggacgcctgggatgagacacagatcaccttccaaatctggagtgtgggccttggggaccaaccagggcagccaggggaggaagggcagagaccaggaggggaacccagggttgccnttcaattcccaggcntcctcttttccccaggcntcccaattccccaggctt

SEQ ID NO: 332458 - DNA, 412 bp, Homo Sapiens
  misc_feature (384)..(384): n is a, c, g, or t
  misc_feature (389)..(389): n is a, c, g, or t
tcaaaattagaacattcttattaacaaaaagcactctctatgttttattttcactcagttgtgaatttgttcttgctaactaaaaaataaaatgaggtacaatgggtcataagaagtaatataccctcccccttcccagtctagcaacacctaattattccattggaattgaagtgatagcttttgcattcaaggtgatgagaccacaaacacccaccagcataagctaacataaggcatcaatgtctctggaattacatggctatttgcaagggataattaagtattttaaccaagcacattgtcgttttccctgtgcaagtcattgctctggaatgcttttacaagcacctaattcttggggatctttgcagtagctcttanggggnccaaggttttcagcccccttttt

SEQ ID NO: 332459 - DNA, 377 bp, Homo Sapiens
  misc_feature (226)..(226): n is a, c, g, or t
gtgtgagccactgtgaccagcctgacttcaaatcctgtgttgaatagaagtagtgagatcgggcatccttctcttattcctgatcttggaggcaaagatttcagtctttcacctaaaatgactgaaagactttcagccatgggccttgcatgactggcctttattttgttgctgtacattccttcttttcctggttttgggagtgttttaccaggggaaaggggtnttcaaggctgggggcaccgtgggcctcaagccttgccaattgcccagccacttttggggagggccaagggtggggcgctccgtgcccaatttcttgggccctcgagggccaaaatttccccaataagtgaaggccgtattttaaaattccg

SEQ ID NO: 332460 - DNA, 206 bp, Homo Sapiens
ataagcaccacgcccggcccatgcatgatttttgtgatatccaccaccacagataagcaaaagagtccttgcattcaaagagttggacacctgtgcaccgtccaagtattctcttagtgcttgctgcttaacattattgtagctcttactgcttattgaactcttatttactcatgtatctgtagaccttagtagcccccaaacat

SEQ ID NO: 332461 - DNA, 391 bp, Homo Sapiens
  misc_feature (19)..(19): n is a, c, g, or t
aaagtgggccctttggttnccccagaagtcctaaatgggccgattcccccccggcaagaatcctagggcctatgagggccgtgaccttttccttaaagcagcagttgtgatcagtgaggctggccctaggtttacaagaacaggccctgaaaggtaacccattttctcctttgaaaagcttactagactgataagttaggggaaagtggtatttgaggaatcctctcatgagaacagagtagaaaagtacaagctgggccagcgccgctaagtagattagttgactctttggactgtgatatttataacatgccaattaaagtaggaaagggcttctgctgatgtgccacagggctgtttttctactgattttgccaataatttggatgaa

SEQ ID NO: 332462 - DNA, 318 bp, Homo Sapiens
ggatgggaaggcaggatggagttcccatgtatcccaggcttttctgctgctgtcctaagcaaggttgggcctggctgcttgtgatgttcttcagtggtactgtttggccccaatattctttaaagtctgaggaggttttgcctttaaaaatcaaactgccatggaaagtgatttacccaaaattttggttcacagccttcactggattacctattggggcaaacaaagtttagccatgtgaacatgttcataaaccagtgagtttgcattgctatctaatgggctaggaattccagggggctcgtgccgaaattcttg

SEQ ID NO: 332463 - DNA, 429 bp, Homo Sapiens
  misc_feature (246)..(246): n is a, c, g, or t
  misc_feature (328)..(328): n is a, c, g, or t
  misc_feature (342)..(342): n is a, c, g, or t
  misc_feature (348)..(348): n is a, c, g, or t
  misc_feature (401)..(401): n is a, c, g, or t
taacatctttatattacatgttttaaatcatatcaggaatgcaaactagaactgcacactacttcagtggaaaaaagttcaatattgtgcaattttctgcctcttaatagttaaaaagtggcagcaatccctgcatttgtgtttgaaacaaggatctgagaaactttatcaaaaaaggtaatgaaggcaaaaattggccagacatccagcatcttgtttctttttaaaacaatgtggatgataagnaatttcatgattaaaaatgaatcttttaaataaatacattgtatctgacatttgcactgactgatttgataaatctttaagnaaacaacggctttnctacantccctgttggcctcaaggccactggggttttaggattctggggggtcccctanttcacctgggggtttcattcccctgccc

SEQ ID NO: 332464 - DNA, 417 bp, Homo Sapiens
  misc_feature (13)..(13): n is a, c, g, or t
  misc_feature (25)..(25): n is a, c, g, or t
  misc_feature (34)..(34): n is a, c, g, or t
  misc_feature (45)..(45): n is a, c, g, or t
  misc_feature (51)..(51): n is a, c, g, or t
  misc_feature (57)..(57): n is a, c, g, or t
gggtggccgtaanaaaaccggggangtgctgggnacccaaggganggactncaaaancccccggggggcctggaagccggaacagcgaagagattccatcaacgcctactcaagaagggcaacacccattgaagacttaaaaatcctttatttcctgggaattttcccatttaaatatttttgaaactgcagttgaactgcaggtaacaaactgtggaaagcgaaaccatagatacgagcgggcctactgcgttcaaaaggctcttcaactgttgtggatcctctgatgttctcggagatggtttaggtggttacatgccttcccgcactccttacattcgtaggatttcgccccactgtgcgttttctgatgttgtgtaagctgatggccgtgactaaagctcttcccacattctg

SEQ ID NO: 332465 - DNA, 443 bp, Homo Sapiens
tttttcaactcagaaggctatttattgaaagaatacaatgatgttacaaggatgcatttcacgtagccctaaaaggctgggtatccataagtgcatggttcatggctgttgggactaagaaagccttctggtcaatgagccacacatatgtcctgggctccctccctgtcaatgaagatgtgatgagtttcagagtggtggctggatctaggccaagcaccaaacacaaaccagtactctcctttgggtcttctggaactaaggttttataaacttccgtaacagtgggggcagcactcagttggttacaattcatgccattcctgaaagtagtccactatgggggatccccaaacaaccagtagcataatgagttcctgacaggcatcctagccaatcagtaggggagggtcttgagtaaaattacccattgtcaactatgt

SEQ ID NO: 332466 - DNA, 523 bp, Homo Sapiens
  misc_feature (17)..(17): n is a, c, g, or t
  misc_feature (26)..(26): n is a, c, g, or t
  misc_feature (91)..(91): n is a, c, g, or t
  misc_feature (161)..(161): n is a, c, g, or t
cccttaacggtgctctnagccccaantcttaaatgagcaaaaagtacactggcaaactattcaaactcttgcttctggtggctctcttccnaaataaacatcacttgaatgcaaactgggaaccctggtaatttgcccaatgcgggaggagccccccaaanatcgtgactgcccctctgttccctgaaccctcaagaacctctctctgctcacccagcaaccctgttagcttggtcctctgccgccgcagcatctgcagggaactctgcacctgtagccagccttcacgccacctccacctctgctgagtccatccagaactctctcttcacagtggcctctgccagcggggctgcgtccaccaccaccaccgcctccaaggcacagtgagctgggcagagctgggctgccagaagcctttttcactctgcagtgtgattggactgccagccaggttaataaactgaaaaatgtgattggcttcctctcgccgtgttgtgagggcaaaggagagaagggagaa

SEQ ID NO: 332467 - DNA, 678 bp, Homo Sapiens
ggcacgagggtctttgctgaatgaataagcaggggatgtgtgatacaagaatttgtaccagaacctttggccaacatttccccaaggcccagcatccaatggtagagatcctgggtgactctctgtagatggtggtccttcacttctcatataggccattccaatctgaatgcagcttgttttgtgtgtgggaaggaattacgttttagggtattaaaatatcctttctgggccatttagttacttgtctcctctcaaaacactaaaagcaattacatggtaattaagataaattacttgaccaattttcatagcaaactgattggtttcacttatccccccactgaactgttaagacctggcgagatcctttttatagttctttaaacttccaggactttctgcttatcttcaggaaggacagtggaccttcaggggagaggagaaggaggaaatttgcatatttaaaatgtgtgatctgagccaaacgctcttcagctaacttgatctcgcatcattttcccagcttcctttgagaattcagaatcaaaattcaggcatcaccatctagtgaccacagggtcctgcaccccagcccaaacctggggaccccttagggataatgccctttctcatttgtctttgagtgccctgctctttccactgaagaccccacct

SEQ ID NO: 332468 - DNA, 422 bp, Homo Sapiens
  misc_feature (248)..(248): n is a, c, g, or t
attcatggtcacttctttatttttgatacaaatgtacatgacacgtcttgacagcccacccaccaccacacaggtagggcctggcccagggaagaagcgggatggggagagagctggtgggtcccaccgtctgcctctccagccttcccagggtgcagccaggttcccaggcctccagagggtgggaccacagcaggtgcaggtagtgatggtgggtgctggccttgcagaggttacggggaggggantcagctccacagccaccagctgagtcggggaccccggggagccagccccaggctcaggtgctcagtcctccaccctagccagcacacatttccccttccacgcagggagcagggagggagatgggaggggaagttgtttttttgattttaagtttcattaggagaagggggcga

SEQ ID NO: 332469 - DNA, 473 bp, Homo Sapiens
  misc_feature (368)..(368): n is a, c, g, or t
  misc_feature (373)..(373): n is a, c, g, or t
  misc_feature (411)..(411): n is a, c, g, or t
  misc_feature (429)..(429): n is a, c, g, or t
  misc_feature (444)..(444): n is a, c, g, or t
  misc_feature (457)..(457): n is a, c, g, or t
ttgggagaggcaggattgtagggcatataatttctcacaggctttatgtgttttgtgttttcttaccgggtttacagggcatttaatttcccacagatattaagcattttaagcaaaacacataaaataattatttgaatctaaatgtgtttacatgttcagtggggatcatttctgatctggtaagggggaagaaagagttttgtaccttagaggttgtccacaattcttattcatttaggaagtacaaagagtatttttctgggtagaaataaatgggtaaatagccactcattctccaccacaaagtgtcttttaaagtcaatattgatatcacatttgtttgggaaaacaccaaacttgttccnggggnaattaataaatggaatatgagcaggacctacaagggantatgagcaggaccgcaantttcacatttgcttncgcctgggctcanccgggggcacgtaggg

SEQ ID NO: 332470 - DNA, 416 bp, Homo Sapiens
  misc_feature (147)..(147): n is a, c, g, or t
  misc_feature (393)..(393): n is a, c, g, or t
ttgaaaaccaataaaatgatttattttatatactgcaaaatcaaaatcttctttgtacactttaatttttgcaaattcatacaaacataacaatactgctccatataaacttttgtataaacattaaaggaaatatacacatatttngttcttcttgtgcttccaaagcacagaatgtataagtccatctgaagactttctatcatcacatgcaagaacaaatgtcagaggttgggggcagcctcaagtgcactttgtaatgtctctagacaaaagagaagagagttggaggtaggattgtttgggtgactctccctgccccttcccacagaggaaataaggttaccccaaataggcagcttcttacttctttggattcaaactatcctggantattgcatgggttttaaaagggc

SEQ ID NO: 332471 - DNA, 525 bp, Homo Sapiens
  misc_feature (228)..(228): n is a, c, g, or t
tttgttcttgtgaaaatcaataaaatgatttattttatatatgcaaaatcaaaatctctttgtacactttaatttttgcaaattcatacaaacataacaatactgctccatataaacttttgtataaacattaaaggaaatatacacatattttgttcttcttgtgcttccaaagcacaggaatgtataagtccatctgaaggactttctatcatcacatgcaaggancaaatgtcagaggttgggggggcagcctcaagtgcactttgtaatgtctcttctcaaggtactgaattaggactcgtcttttaaaccttgcggcttccttgatggtaaattcaacaaactgtttcttcatctccagaggtccttgcacttcttcaagcaaaatgaaaattctttcatattttcgaccaaactttcgaacttccttcattaattgatgttttatatcagcattgattccttgtgccatagcaggagtgatttgtaatgtatttggcatagctcccaaagtagatgcta

SEQ ID NO: 332472 - DNA, 385 bp, Homo Sapiens
  misc_feature (274)..(274): n is a, c, g, or t
ttcaagtcttcacaaaattttatattccccaaggctgccccatcacaatgcctgtgaagcttgactggcagacactgaggcctgaagctgggggctacagggggtcactggctcacccggtccccccgtaatctgtaaaacatactgggtgagggaggctgctggaggacctgaatctctcccttctccaggcagtagtgaggcatatgctcgttcggcttgggccattaaagatcattccagccccagtgctgttctctgaattcttgggganaaagggatgggggctccaatcgcgcgccccagaaactctgagctctcacaaatttcaaaggacacttgcctccctcctctgcccacacctccaccattacagcatttgatc

SEQ ID NO: 332473 - DNA, 466 bp, Homo Sapiens
  misc_feature (68)..(68): n is a, c, g, or t
  misc_feature (176)..(176): n is a, c, g, or t
gaaggctgggctggccaaggccaaccaactgaccaataccaaatgggccctctgaatgtcctcccaantgaaggcatctctctggggatgcaagaactcccctcccatcccaccccctctggcaccccgggtgggtcctaacccctagttgctgtggcccttccccggttgtgaanagcctgtgatcccttagatgtgtctccctgtttcaagacccagcccccacccatgcaacttcctttgactttcctgtgtacccactgggatagaggaatcaagaggacaatctagctctccatactttgaacaaccaaatgtgcattgaatactctgaaaccgaagggactggatctgcaggtgggatgagggagacagaccacttttctatattgcagtgtgaatgctgggcccctgctcaaagtctaccctgatcacctcagggcataaagcatgtttcattctctga

SEQ ID NO: 332474 - DNA, 455 bp, Homo Sapiens
  misc_feature (23)..(23): n is a, c, g, or t
  misc_feature (34)..(34): n is a, c, g, or t
  misc_feature (44)..(44): n is a, c, g, or t
  misc_feature (104)..(104): n is a, c, g, or t
  misc_feature (223)..(223): n is a, c, g, or t
  misc_feature (388)..(388): n is a, c, g, or t
  misc_feature (391)..(391): n is a, c, g, or t
caacaaaccccaaattttttggnaacagccccgnaaaatttaangtttaagaaaaagccctgaagcaaagcaatcctgaaggatgtacaagattcttcctagantgaatgactcaagggggcaacgcctcatttgaacggtgtatcctaggtgttttgcagctttagaaaccggtccttttgttgcctctcacatggaactttagtattcctcttcagcttcnagtcacttttgctttccttatggattgccccgattaaaagctgtggcaggcaggaacccagtgattgtcatgaagccccacttacagccagggaatcctttctgagaccggtggcagcacatccaatacccctgccataggcaatgcctggcaatagggctttgnggncatcggcacagggacacatcccctttcacatactttttcttgcactgtttgcaaggatcctctc

SEQ ID NO: 332475 - DNA, 381 bp, Homo Sapiens
  misc_feature (17)..(17): n is a, c, g, or t
  misc_feature (31)..(31): n is a, c, g, or t
  misc_feature (129)..(129): n is a, c, g, or t
  misc_feature (138)..(156): n is a, c, g, or t
ttgctccgtcacccagnatggagtgcagggnacaatctcagttcacatgcaacctctgctcttgggctcaagtgatcctcccgcttcaggtcatcaaacagctgggactatcggtgcgcaccaccacanctgggtaannnnnnnnnnnnnnnnnnngtacagagagggtctcactatgttgcccaagctctaaacacgttctgtgacctggagatgactattcatggtgagggctcacagtcctgactcagctgctcagacaacccctcgcatggaagtgttaaagccaagagtaaaacagcacgtaggccccattcgcctcaaagtgactaaaatacaacttgcctttcatctcgaccacaatccacaggtacctgtttc

SEQ ID NO: 332476 - DNA, 343 bp, Homo Sapiens
  misc_feature (48)..(48): n is a, c, g, or t
  misc_feature (101)..(101): n is a, c, g, or t
  misc_feature (268)..(268): n is a, c, g, or t
  misc_feature (278)..(278): n is a, c, g, or t
ccatctgcccagaggaaggaagctgccagccttagccgaacaggaagncggcagagtggagaagccagctgggcccgggtttctggtttggtggtgagggnaagaggggctgggcttgctccgaatgggtggcagcaggggcagctggtgaggccaaagctgcagagggagtggccggggagtccagcatgactcccgtgggaggaggcagggctgtcacagggcttctcggggggcaggtactgaacacatggcttcttgctcttgnaggccagggnaccctctgcctcctaaacttgctgctgtgactgtgtctgggacagctgcttttctcgcccgaaat

SEQ ID NO: 332477 - DNA, 438 bp, Homo Sapiens
  misc_feature (179)..(179): n is a, c, g, or t
  misc_feature (276)..(276): n is a, c, g, or t
  misc_feature (325)..(325): n is a, c, g, or t
  misc_feature (374)..(374): n is a, c, g, or t
  misc_feature (385)..(385): n is a, c, g, or t
  misc_feature (390)..(390): n is a, c, g, or t
  misc_feature (400)..(400): n is a, c, g, or t
  misc_feature (415)..(415): n is a, c, g, or t
attactactcaatgagtcatgtgacagcctgcaggggtcggggggagcttagtgggcagacttggtgaccagggaaagaggctgggctgtagcaccgggagggcctggtgggcatggagcgtggcgtggaaggacgggggagaggccagcagagctgtgggcatggacccaaggggganggggccgggacaggaggggaggctggctgcccatctgcccagaggaggaggctgcagctttagcccgacatgaaggcgcaagagtggaagagccagnttgggcccgggtttctggttttggtggttagggagaggggctgggcttnctccgaatgggtggcagcagggtcaactggtgaggccaaagcttcaganggagttgcccngggantccaacattntccccttggaaggangcagggctttcacaaggcttttt

SEQ ID NO: 332478 - DNA, 442 bp, Homo Sapiens
  misc_feature (38)..(38): n is a, c, g, or t
  misc_feature (71)..(71): n is a, c, g, or t
  misc_feature (192)..(192): n is a, c, g, or t
caaacctccccagaaaacgtcctgcctggggaagggantccatccgtgaactgcccctcctaagcttttgnctggaatctggaatttgaaattcccactaatggaagcctcgcatggaagttcctgccctggcgcaggtgttgcaagaaggaatgtggggaaaacgattgccaggttggcccaagaactgantagactatttcctcaagacaaacagaagtctgctgaccttgagcatgaccagaccatgttagataaacttgtggatggacttgcctacctcttgggtgaactctagcaattacaaggtggttctgctgggcaatgacatcctgtccgccctggtgacccggctgcaggatcggttcaaggcgcagatcggcacaggtgagctgcggcacttgtggagcggacccggccccttcagacccccagccgagcc

SEQ ID NO: 332479 - DNA, 217 bp, Homo Sapiens
  misc_feature (25)..(25): n is a, c, g, or t
ttttttaaaggtttcctccctctgnttttgctttgcccattgtgccgaatttggaaaaaacccacttggaaagaagggaactttccctgcaaaaccttaaaagactggttaaattaacagggccctaggaagtccagtggagccccttgactgacaaagcttagaaaggaactgaaattgcttctttgaatatggattttaggcggggcgtggtgca

SEQ ID NO: 332480 - DNA, 656 bp, Homo Sapiens
ttcagaccatagcatttaataaaactcttccgttcttttgtgtttcacttctatggggctgggcttcttccatgttcataaatacaaatcccaatccttatggactgtgctcacaggaaaccttattttgaatcctttggctcacttgtgagggtagctgttacaactgacaagtggagtccatgaaaagtcaacaccaaaaggtggggctctttgaaaagcagctggaaaagaaagtggaagaggaatgggaggccaggctgcatttgaaaggaagggtgttaattaggaacccctcattttaaagaggggctagaccctttgctcaaggcttaataagaggcttcagaactcgtccttgctggctccccccagccttcaccccagctcccctctgtaatataagcagagagctagggaaagaaggagaaagagggcaagtgttagtcaatgtggtgttcacagaggggaggtgacttcctccccaaagctaggtggagacttggatgtgctctgagactgggggtgccctcggagtagagcagaacatggtgaccctgggaaagctcttgaagaacctggcttgtgtgctgggagtttggaggcacccatgctcgttgaggccaaaacctggagatttctgaaggcagaaggcc

SEQ ID NO: 332481 - DNA, 409 bp, Homo Sapiens
  misc_feature (42)..(42): n is a, c, g, or t
gtcctggagaaaaccatgtcaaaatcccaaggtccgtgaagnacttaaccccctgtgttttccttcctaaagagttttaaaaggccatcctggaagccttaatgtgcaactagatggattcctaaatatcatctcatccaaaacctgctatatatactaccttcctcatctcagttgaaggcaagtccattgtttcaattgcctgggcaaaaaatattctaaataattcataatttttcctcaactccacatctattggtaaatcctgtgggttctccttttaaaacatatccaaaatagaatcatttctcactatcattccactgcaggcaccaagtctcaatagtctcctagcagataatcatgtctacatttattctcaatgtagcagctagagagcttttttgaa

SEQ ID NO: 332482 - DNA, 439 bp, Homo Sapiens
  misc_feature (246)..(246): n is a, c, g, or t
  misc_feature (347)..(362): n is a, c, g, or t
  misc_feature (385)..(385): n is a, c, g, or t
  misc_feature (418)..(418): n is a, c, g, or t
gagaaggagtcaaatcagtactgtaagctggatgcctaatgatttcccatgggaactcttgcagaattgcccttgtctgatgagaggaatgagcgagaacattgtcatggtggaggaggactctctggtgaagctttcccaggcatttttctgctaaagctttgactttgtccaaacactcataataaggcaggatattatcatttgttgggctttccaggaactcaacaaggcaaaatgccttgnggcatcccccaaaaactattgccctggcctttactcttgaccagtctgcttttccttttcactgggaccacttgggccactttggacctctttagtacccnnnnnnnnnnnnnnnngaggacaatatctgggttttttncccggggtagagtggcaatggatgcgggttttngtctcactggcagggttcaac

SEQ ID NO: 332483 - DNA, 417 bp, Homo Sapiens
  misc_feature (15)..(15): n is a, c, g, or t
  misc_feature (26)..(26): n is a, c, g, or t
  misc_feature (88)..(88): n is a, c, g, or t
  misc_feature (129)..(129): n is a, c, g, or t
  misc_feature (145)..(145): n is a, c, g, or t
  misc_feature (147)..(147): n is a, c, g, or t
  misc_feature (172)..(228): n is a, c, g, or t
  misc_feature (246)..(255): n is a, c, g, or t
cccaggcaaggcagnattcacctgcnggttggggagttttagaatcagcccttacccaacatgggagaaaaccccgtctctactaaanatacaaaatttagcccaggcatggtggtgcatgcctgtaancccagctacttgggantnaggcaggagaatcacttgaacccannnnnnnnnnnnnnnnnnnnnnnnnnnnnnnnnnnnnnnnnnnnnnnnnnnnnnnnnagagagaaactccatttnnnnnnnnnnttatttgttacaaagactgcatcaaagaaatcttcaaagcacaaggtacatctaagtgagcaggaagttttggaaggcatacaggaaaagtctccaaggatctaaattgtagtcttctttttggtctagatgagagaggtggggaagagggacttaaatttc

SEQ ID NO: 332484 - DNA, 356 bp, Homo Sapiens
  misc_feature (320)..(320): n is a, c, g, or t
  misc_feature (345)..(345): n is a, c, g, or t
agaaacatggactacacataaggttctctatttaagttaaatacaaatgcaactttttagtgagcttttaggactactcttcaaaaaaagtgtattgctcagaatgatgacctgtaaatgtaagagtggcaggcctctgtctgtgaaagtcagaacacagggctcgagcctctggaactgaccctttgcaagtctttacaaaagaaaaaaggcagtgggggagagagagtgttttggttacatcaggaaataattgaggatggggaaaggaatagtggcagcttccataggagggaggacgggactgttaggacaatggngatttaaggctttcaattcactggntccttcaggca

SEQ ID NO: 332485 - DNA, 427 bp, Homo Sapiens
acctcccttcaaaacaagaactgaacaacagggaaagtgccctcctcaaaatggaaaaatcctattcctgtcccccagttcccacaggccttaaggtgtgtcctgtggaattcctggcccaatgggatggcccatatgtccaactttgaaagggtggggactgtgaggtaaccccagcatcatggtcatctcccatgcccaggacaacagtctcccccggttaaaatatagataagacacaggtacgtgcacatttatgggggttaactatcagaaagtgaatccactttgaggtttataaaatgagaaggggatgatggtggggctgtatgtgttggcactggtgcctattgcagtcagaattcacactgcttaattgacatcttgctggggaagagagggagatggggtggtgagagaggaagca

SEQ ID NO: 332486 - DNA, 323 bp, Homo Sapiens
  misc_feature (32)..(32): n is a, c, g, or t
  misc_feature (54)..(54): n is a, c, g, or t
  misc_feature (70)..(70): n is a, c, g, or t
  misc_feature (199)..(199): n is a, c, g, or t
  misc_feature (252)..(252): n is a, c, g, or t
ccttgttacctttgttgtgcaagcacggcccnaaaacagttgcccaaggagatncccaggcttgatctcnatgggcaccagtgaatctgcgagctctggcatgatctcgatcttctcgtaccgacgtttgaagggcagggcgagaacctcagcccgccgataggacatggcggggggctggcagtcgatcatgaggtcnatcctgtgggactgggctgggggcggctgagtgtactgctcaggacacacccnacgtgcaggggctgcacttctttaagcagctttgacaccctggatgaagttcagccgggtgtcgatgaggc

SEQ ID NO: 332487 - DNA, 492 bp, Homo Sapiens
  misc_feature (16)..(16): n is a, c, g, or t
  misc_feature (50)..(50): n is a, c, g, or t
  misc_feature (78)..(78): n is a, c, g, or t
  misc_feature (95)..(95): n is a, c, g, or t
aaatttaaaaaccatnccaaggccaatgggggaaaacccgtgggccattntaatggggaataacactgaaattaaaanattaaacagtgaaaaanggaaaatatttaacaattttaaaccctcctaaccccaaaaaacgtggtcctgcctttttaatcctgtttaaagttccttttttgtgcctcctttaagtttccattgtaatagttttaattgttggcagaacttatattttcttgttgcagttattcttaattattttatctttttgttggaattataatatggctttttctttcatcgtattttctaactacatgtagtctgacataataggcaattagaaaataatatgtatagacttaaccttatgtttcactaatttatttgttctcctttccttcttaaaaccactactttcttctcaattcattttttcttgttatagtacgttattcatatactcttgctaatagcccatccctatatgaa

SEQ ID NO: 332488 - DNA, 469 bp, Homo Sapiens
  misc_feature (403)..(403): n is a, c, g, or t
  misc_feature (439)..(439): n is a, c, g, or t
  misc_feature (454)..(454): n is a, c, g, or t
ttcggcacagagattgtgtggctcatcagaaacactgaccaatcgagaaattcatccagacatatctaccaacacttttgattgtaaagtgtcatcattcctataatgaaagggcatttgtcaggctcagctgggtccagggcctcaaaaatggcaagaagacctggtctttctccttccatctctgggctgtcccggccagctctgaggagtaagctggggctgaactgcactcagcgtcgtgtgagttacatgaccttcaccttctcctgttgtttccttcatcagctgtaaccagaacagccagtttgcattttctttttctttcaatcaggcccatctagggatgagggctgggacgaagcctttagggaactttcggtggctggctggaaaaggatcntaaggtgttcgcccaagtggggagttcttagggggncaaagccagggggtnggattttttcccact

SEQ ID NO: 332489 - DNA, 443 bp, Homo Sapiens
  misc_feature (58)..(58): n is a, c, g, or t
  misc_feature (403)..(403): n is a, c, g, or t
aacatctgggttttgctgccataaaatgtaaataatcctcctgacccagcccgggtanccctcctctgccatccgaaagtggccttccttgcccctcttttgctatgtgccttgaagaggttaggtgacgatgtagtcctaaactggtacagcagctggagggagacaactgtatcaagagtagtgagtccctctgagatagatgtgagaacatacatgagtacaggaggctctaagttgatgatgaagctcatatggtcctgagtgagacattccaggagtggataataagactggctcagtttccggtattgtagcaagtcactgtgggacactgacagcagcattttgacaaaagcctggagtacattgtcaaaatggttgtccccatacaacttgaagnacgccaaagctgacataatttccacacaaggcagacttga

SEQ ID NO: 332490 - DNA, 488 bp, Homo Sapiens
  misc_feature (408)..(408): n is a, c, g, or t
atagaaagcaccaggtagaaaccttgtttccttcagggaccagtacccggaaacaagggggaggacctaagcaggaaagccatagaatttggcatcagagacccccaattggaaacttccctgaagcctagagtcccctggttctgcgcttttccctctctctcatttctcatctgtgaaaagggagtaatcgctccccaaaagcttgttcatggtggttaatcagaatgtgtgagcagcctctggaggggtgcctcagctcgctgctgctgctgctgctaaaatgcaccagccccctcctcttcagttcttactttgaaggactgggcgagtgcctttctggccttcgagggcaaaccagggggtgttctgggaggtttcagttcattgcaaggggtttttgatatncattgggaagggtttaaagggaagtgggctttcagggaggcattttaatgttttgaggtcacccttaaggttcaggtttt

SEQ ID NO: 332491 - DNA, 383 bp, Homo Sapiens
  misc_feature (20)..(20): n is a, c, g, or t
  misc_feature (25)..(25): n is a, c, g, or t
  misc_feature (308)..(308): n is a, c, g, or t
gtgaagggtagccattccancaagncctaaaagctggcaacctgagtaagtaagtctggataacctgtaggtgtcatcctggatatgttttggttatataatccttggaattcccacataagccttttcctgaaatttctctatctgttccatgttttctaggcttggatgatctgaaacattaaagaaaacattggtaccctagttctgaatgttcatttaagacagagtggatatgaaaagagacagaaagaatagtcaaaatagaagccccatcataaaatgtgtgctcaggccgggcaatgcgngcacgcctgtaatcctagcactttgggaggctgaggagggtgaatcatctgaggtcaggagctctgtgccgaaat

SEQ ID NO: 332492 - DNA, 444 bp, Homo Sapiens
  misc_feature (12)..(12): n is a, c, g, or t
gaatttcctttntcctcctttgcctcaaactggtccctcagggcctgtcgttctttatccccttttccttcaaagccccccgtagaaaatttggccatattcatgattccatcttcaagatggttgtccagggcttaaggagtaccctcatgccattgggttgtgttcctaaaagtccctttaataagtcagctgacaggaatttggacatattttccttattcttgtagtgaaacaaactgtttttcggtttcccaggttagcccataaacatcaatttaatatttgatggagttgaaatgtagaacatctggggatgacttatgcaaaatgttctgacagtccacagataacttgaattttcgccttttaaaagatgttataagctcccctagatccaagatgagggagctattcccctggggcaacatcagttttacctaa

SEQ ID NO: 332493 - DNA, 397 bp, Homo Sapiens
  misc_feature (319)..(319): n is a, c, g, or t
  misc_feature (384)..(384): n is a, c, g, or t
cagcttttaagtaaggaaaacggttgactccattcactacaccaaggctaggagactaatgaaaattcaggtccatcccgcaagcatctgcacgtgcttgaggatctcttttcctattcttacctcaaagagtacttgaagtttctgaaaacaaatctgtaagactgacatgtttggggcagtaatatcttgatgttaaaccatgaacagaaccaggcaagatcagccagtacctggaaacccaatacagagtagtttcacaggcaaggaagttacaggttgatctgggtttccccttgcctggaaaccctgttcattntaggcagtttttacccagtgtttccggggggcctttttcttaggtttcttggagtgagtttaggncttttttgtgttt

SEQ ID NO: 332494 - DNA, 548 bp, Homo Sapiens
  misc_feature (207)..(207): n is a, c, g, or t
  misc_feature (244)..(244): n is a, c, g, or t
  misc_feature (456)..(456): n is a, c, g, or t
  misc_feature (531)..(531): n is a, c, g, or t
tgaattttcttaaacctaaatcaatattataggcctcaccttaggagaactttccaaaatattgttagtgttgaccaccttaggcattacatttgctaacgacagtcatccagggtttactgaaccaggggaaccaacttttcaggttaataaggacagttttcgtctatgtgccatccttatccttgtctgggacatatccatagnggcacgcatttttaaatctggaaagaatatatgtagntctcccctaccccagctttttttaagtagcaagggctattgaaaaaaatcagaaccctccgcttacgctccgcatacatgtagcttaaaatatatgttgcttattgaaagcattggtttaagttgaactcacgagatatactacatcatgtaatatgtctgcatttggtccatgcattcctttcggaacctgatcttacttatggtctgcanttaacagataggctaggttaagtatggttaaaacatgttggtactgagggtgggatcaccgtgtcacagcctggnttcctccctggataagg

SEQ ID NO: 332495 - DNA, 426 bp, Homo Sapiens
ccttaaaactccgaaaaaatgttttcctgctgtcccctgaaaatttccttccttttgccttcctcaaaatcaactgttgctggaaagaacatggcggttgtggaaaatgaaccccaaagcaaaacggttcctgctttcctggctggtagttcctgagtgtctcgttgctgcccaggctgttgaagagggttcagcaccccagggtcttgtgctgcttattgcccaggtgcactcagagagacattctgaagggaaccctgcaagttgcctgttgttgttcttcccaggggaggactgagcatacaaccactgcttcccaagggaggcttttcccacaaagggggcacagcagtctcctgtccattttttactggtggacccaccaatgctgttgcctcctcaggtagactgatgcctgataacccc

SEQ ID NO: 332496 - DNA, 401 bp, Homo Sapiens
  misc_feature (372)..(372): n is a, c, g, or t
caaaattaaattcattcgaaaaccaaaacggctgcctgctctgtgcgggaattgcctgaatttttaagtagtgggggtaaacagagaaaagaaaatgtggttaatcgcgttcccaagaagcaaagagagattcttcgtgtctcttccagcgctatctactcgaaactgtctgctctcaaccgtaaaccggctccgtgggatctcagcctcctaggacgtagaaagcttcctccaaatctccctgggggtcacgttggcacaaataccttcaaaccgtctcttgaggctcgccacatcctgaggccaggcagagcttctgagtcggggatcctaagaaccgcgcgctcttccgcctgcagtcctcctcctctncctcactgctagccttttccccctcgtag

SEQ ID NO: 332497 - DNA, 382 bp, Homo Sapiens
  misc_feature (33)..(33): n is a, c, g, or t
  misc_feature (172)..(172): n is a, c, g, or t
  misc_feature (177)..(177): n is a, c, g, or t
gtttaagaaaacactgctgccgaacatcccaanccatatgaatcagtggacttgtatttgggaaagccctttgtgtttttaatcctcatttttgtgactatattttacaaaagtattggtctgcaacagattagatacaaacaaagtctggtcctcccccacagtggaaagncaacngctcacgagcatgcatgggagtgtatctccaaaggtggaggacaaggtcactggaggagaggagtgaacagtgaactcaccatcatctctagtcttccaagatagcaggctgcctgactgcacagctccaggaagcaccattctcattgtatgttacatgaacaatacaactccaggtattgaagctcatggtgctagctctctc

SEQ ID NO: 332498 - DNA, 460 bp, Homo Sapiens
  misc_feature (59)..(120): n is a, c, g, or t
  misc_feature (370)..(370): n is a, c, g, or t
  misc_feature (382)..(382): n is a, c, g, or t
  misc_feature (391)..(391): n is a, c, g, or t
  misc_feature (422)..(422): n is a, c, g, or t
  misc_feature (436)..(436): n is a, c, g, or t
  misc_feature (448)..(448): n is a, c, g, or t
cttctagagatggggtgtccctatgttgcccaggctagtcttaaactcttgggctcaannnnnnnnnnnnnnnnnnnnnnnnnnnnnnnnnnnnnnnnnnnnnnnnnnnnnnnnnnnnnntctgtactggcttcttaaaacaaaacaaatcaaaataaagcaaacaggtatgagtaaagtgataaagctatttcctttgtgagacttgtataaccagtttttatttgcgtatatatttactgtgtatagcttttcattgtatagtttttattaaaataggattctgggcatgttaaaataaataggacatatactgaggaaacccccatacatctactggaaaacagtttccaaaaggcccctgggcttntgggctggcaantgttaccantctttatccttaaagggggaccttccctttngggtcccccttctncttagggggggnggggacttcttg

SEQ ID NO: 332499 - DNA, 267 bp, Homo Sapiens
  misc_feature (52)..(71): n is a, c, g, or t
  misc_feature (240)..(240): n is a, c, g, or t
tgaaccactgcacctggcccatttctttcttgatttactgtctcacattggnnnnnnnnnnnnnnnnnnnnacggtcatccagtagcttctagggaaagggacacctggggggatgtatgggtttttttagacattgcttatctgaagctatctttttattctatactgacactaattgaaggttttaccggatataggaattctagtttgggaaatagttttccttcgaaacttgatgntctgcttctttttcttctcatttccca

SEQ ID NO: 332500 - DNA, 545 bp, Homo Sapiens
  misc_feature (84)..(146): n is a, c, g, or t
gttggatgatgtctcactatgttgaccaggctggagtgcagcagctactaacaggcaaaatcaaccatagtatactatacaacnnnnnnnnnnnnnnnnnnnnnnnnnnnnnnnnnnnnnnnnnnnnnnnnnnnnnnnnnnnnnnnacctgccactgcaccctgtaaaagctattctcttatatatacttctagaagctttacattttttgcttttatttttaaatccatgatttatctcaaattagcttttatatagggtgtgaggtagggatctaggttcatctttcccatgtgagtaatctgttattcccagcacccatttgttgaaaagactttaatttctccatttcattccattgatgcctttgttggaaaacgaggcataagtctggggtctatttctgaactctgttctctttctctgtccttatgccaaaaccacattgtcttgtttacaacagctttaaaggtaatgttaaaatcagagcatgtaagtgctattttctgacttcaaaattgttttggctattctgagtctttgcc

SEQ ID NO: 332501 - DNA, 417 bp, Homo Sapiens
  misc_feature (150)..(150): n is a, c, g, or t
  misc_feature (155)..(155): n is a, c, g, or t
  misc_feature (330)..(330): n is a, c, g, or t
tggtagatcttcctccatccctttattttgagcctgtgtgtgtctctgcatatgagatgggtctccagtttttctaggatggacactttcttttataaagtgtctcttctgagaagaatttgcattcaattccttcaggtgcctacaggncaacncaacataagcccacctaaactgcatttttgtcttgattttgggggggatcacactaggtaggtataaatttagggctctaaccctgattagggtaggggggctttgagttaaaggaattatccaggggaaggacttttcatttgttttccactctaaactaaaggccaaaaccangatagggtactttaattaacagtctccctggagtgggtagggggcaactttttgtttccccctcttttggggcaacccaggagtgtt

SEQ ID NO: 332502 - DNA, 461 bp, Homo Sapiens
ctaaactcttatactacttttcatgtcacagagggtcgtctaattacatgaaaagaggccaactgtatccaacccaaacagttctctaaactagaagtctccaagctttgataaaggtgtaccatcagcataaaatttgagtgcacatctcttccatttctgttttaaaagtaggttacatattcccgtagtggactgaatgatgcaccctgtccctgtccccacctcccaaaatatgtccacccagaatctgtgaatgtgataattttgggaaaaaaagcttctgcagatgtaattaagttaaggatttccagatgagataatccgggataagactgagccaatgacaattgtccttagaggagacagaagagggaaagatagagactcacaggggagaaggccatgtggatgaagcagagactagaatgatatgtctatgagcaaaggaagtgccaagc

SEQ ID NO: 332503 - DNA, 544 bp, Homo Sapiens
  misc_feature (24)..(24): n is a, c, g, or t
  misc_feature (95)..(95): n is a, c, g, or t
  misc_feature (129)..(129): n is a, c, g, or t
  misc_feature (141)..(141): n is a, c, g, or t
  misc_feature (161)..(161): n is a, c, g, or t
  misc_feature (171)..(171): n is a, c, g, or t
  misc_feature (499)..(499): n is a, c, g, or t
ggagagggctgcagtgttattccnaacggaatgaaggacagctccagggactgggctagctcctgggccccagggaggcagcagcagacactatnttagggctgaaggcaatttgggggcctagctctnagcaagaggctnggagcagcacaccagccctntccccacatntggacagagggcccagccacttcaggggggaccccacttggcttcctccagcctagtcctggagggagatcttcacaaagaggaatggctgatggatgctggtccccgttcttagacatgaggtggacatggcggtatccttgcttgaggctgttcaaggggatggtactctggccaatgaagtcattcttggaggaggcatcataatcttccaccaagaagcggatgagggcaaggtcaggcacaactacctcaaacgcaaactccgtgtcccaccatgggttgaaaccattgttggtgatgacagcagtctggcggctggccacgntctccgcacgccatggatctccactgtcactttggggtccacaaa

SEQ ID NO: 332504 - DNA, 350 bp, Homo Sapiens
  misc_feature (25)..(25): n is a, c, g, or t
  misc_feature (148)..(148): n is a, c, g, or t
  misc_feature (155)..(155): n is a, c, g, or t
  misc_feature (330)..(330): n is a, c, g, or t
agcgccctgggcctctgaacctggngctaatggcctcttccaattcaaccacggggaccagctcaaccacggggaccagctcttccgggacccctccaccgcccgctttctctttctcttgcctctctttggctgcttcggctgcctnttgcgcnacttcctgcgccctcgacgcctctttcttccccaggctgtgggggatctgtccatgaagggggttcagggggctggggtgggtcatgggaggtggtcggttacacagtcactcgctccgaagggcatgagggtgcaggaggcattcggggtggcatccatctccctcgcacaccncacgcaatgctcccagcctg

SEQ ID NO: 332505 - DNA, 329 bp, Homo Sapiens
ggccagagatcctgaagatgtaactgacccacttaattccccccaactgaaagattttgaaaatccaatggtaaaacaggaccttagtaacaagagaatttgcctgtacagtaacttggcctagaatacagtattgtgtatccttaaagagtaagacaacttgggggaaggatgaggtgactaagagccttgaaaattgcaggcaatttgtctttactaccaggcttattaattagccaggtcgattttgaaagttgtacttagagctttatttccaaaacagacaattgtaaattcttatttttccttcagtttcttcagatgattct

SEQ ID NO: 332506 - DNA, 370 bp, Homo Sapiens
  misc_feature (50)..(50): n is a, c, g, or t
tggctctgtcttctctccctctctggctggtctttcccctgcctctgccnagcccacttatgctgctgttctcccctctccttccccttttaccccggagaataaaagttcctctgaggaggagacaacattagacggggggaaacaaacagaggagcgagcagcctctgaatcgactaaaaaggtgataagctcatgtttaggtcccacctccaaatttatcaagggctcctggtgggactcaagagacagagcccctgacccccctattcttcctcgaaagttatgggtggaagggcttctttctcctttcttagttcaggacatcctctcttgaagtggcctgttcttccacatctacactcgtgcc

SEQ ID NO: 332507 - DNA, 332 bp, Homo Sapiens
  misc_feature (208)..(208): n is a, c, g, or t
  misc_feature (212)..(212): n is a, c, g, or t
  misc_feature (317)..(317): n is a, c, g, or t
ataagtcacagtcctgttgtcaaaactctaatagacagcaaagagggtctgtaccgtagacttcacagttttcagtttttaatgattgccagtggaggggcttcttcagcacagagaccccccactgtgtccagggaccccctctgccaggtggaggtgtgtccaggggctggggaagccgagacgggcactccctctgccggccggnccgntggccctgagcatggcaagggggtctgtctctgccgatgctccttccgcgggcactggactctggcggccgtgttcacatggtttttggaattcacactggcagntggcttttccatttt

SEQ ID NO: 332508 - DNA, 389 bp, Homo Sapiens
  misc_feature (116)..(116): n is a, c, g, or t
  misc_feature (129)..(129): n is a, c, g, or t
ggagctgttaaaacaaagcactgcctactcagtaataatctcacagatacatgatggatgataagacttccagttaaatggctgatgaagttcctcaggagcattcatgccccacntgcagtgaccccnaaaaacaactagaaataggggtgcaaacacctgcaagggatgaaaaataggtttcaattctcttaccgacccgagttgattgacactgactgcctagatccctgtgttagggacttggaggctgttcctgggatcagtaagaatacggtgctgcaactgatgggtgatacctagcatagggaaggaagaggtggtaaagatatgtatgcagtcaggcttgtctgatggagtgcatcttgaatcaaccgctacaggaaaca

SEQ ID NO: 332509 - DNA, 439 bp, Homo Sapiens
  misc_feature (15)..(15): n is a, c, g, or t
aactggggaaccccncaacaagagcgcccttggcttcaacaacaagctcatccccctccctcatccccaaagcaagggtgtcctcaccccactgagaatgtggtcccctaataatttggggcctatggttgtcctctgtaagaaggcatcccaagaaccgggtaggaaccgcagcgccctcccatggtttcctctggagacacgtccaaacgcatcagctccctcatcacctgcttcagccatttttacagcccaggttccagccgagtgaccttgggcagataacttctcttaaatctcatttcttagaggtctgagaatacctcaggtaggcggttgtgagaattcaaggagataatgcatataatggtttctaggacaatgcccaacacttttaaaggcagtcaataacagtagtaaatgttatcagtgaatatga

SEQ ID NO: 332510 - DNA, 561 bp, Homo Sapiens
  misc_feature (64)..(64): n is a, c, g, or t
  misc_feature (244)..(244): n is a, c, g, or t
attcacctggagtaagacacgacttccatagatcactggatcaccagaatcaggctgtcctaangcttagttcccaagcacccagaggctgtgtgccacaggaagccctcataggatcgtgcagcaggtggatcatgcaggccctcggaaactgctgcccatggcttttaggagaggaaccatgactgctctagcagaagccaaaatggaatatttggttcctgggtctcagagctggctgggnaacatgaacacatgttacaggaggttccagggggcttcctgtgtaagaaacaggccatagatcatttcacacccgggcacatacttcagactcacagcatttggccctctcagaggaagtgaggggttttgtattgtctctggggttctgagtcaaccctccttcgagaagactcacacaagtctgtcaaggtgctccttccgtctcttcctgtgtcctcaggaggcttggggagcagctgtcctacctggaaacctcatggctagaacttcagaggcacaggaccctgcagatgaggcatcaggaagcctctccat

SEQ ID NO: 332511 - DNA, 551 bp, Homo Sapiens
  misc_feature (73)..(73): n is a, c, g, or t
  misc_feature (397)..(397): n is a, c, g, or t
  misc_feature (535)..(535): n is a, c, g, or t
actttgcagagtttatttggacaggttcaaaaatagtccttcgacaatacaatcagatcgaaccacgacaagnaaaatgcaattatgggttggttacatttttaaaaaatgtaaacaggtttgggaaaactaaaagcaaaactacatcgtcatctcctccattcccaacccctgcatttcttacaagcaggacttcaagacggcatctgcaatcttttgaaatggatgagaggatgacactcactaaaggagacagcctcaacagtgtgttcctgaggccatttcctcagaacaaaggcatacttctgcataaggcaaatgcagcctgataaagcttgcccctagtgggtacatggaatgccaaagtcattcacctaaatgagctcaaaatacatantgttctgggccaaattatacagtgtcaagctcagactgtatgtatttatgtatgttggcagagcaggccacttttggggcgccacagctttatcctagcatcctgtgcctgctgggttcccatcgctgtctccccaancccatgaatttccttg

SEQ ID NO: 332512 - DNA, 511 bp, Homo Sapiens
  misc_feature (18)..(18): n is a, c, g, or t
  misc_feature (33)..(33): n is a, c, g, or t
  misc_feature (99)..(99): n is a, c, g, or t
atgccccaaatgagaacnaccagtttagccctncccggaaagaaaggctctgtgctaaccacttttcccggatcacctccataaaaccctcaccacatncaagagatgctatgaatgtctatttttggcaactagggaaaaatgaaaagtaggcaaaacccagaggctcccaggaaagcagcggatcttgtctgtaagctcaccactgcataccagcacctagcacaatgcctagcacgaggtaaattgctcaataaatggaggttggtcgaataagatacaaggaagtcaagcaattgtcctagataagtaattgtccttacatagtacgtggtctgagtctaacacatatagctcagagtccagacttaaatttactccctttcctcacaattagtggtggtcccatgacccaaggtccgggtaccactcaaacaggaatcctgatatccacgtttcctcattctccacagtgctgattcctaggcaattcctcagctcccctcgtgcc

SEQ ID NO: 332513 - DNA, 408 bp, Homo Sapiens
  misc_feature (30)..(30): n is a, c, g, or t
  misc_feature (38)..(38): n is a, c, g, or t
  misc_feature (63)..(63): n is a, c, g, or t
  misc_feature (113)..(113): n is a, c, g, or t
  misc_feature (119)..(119): n is a, c, g, or t
  misc_feature (135)..(135): n is a, c, g, or t
  misc_feature (141)..(141): n is a, c, g, or t
  misc_feature (343)..(343): n is a, c, g, or t
  misc_feature (345)..(345): n is a, c, g, or t
aatttaaaaaacctgtgggttgcccctgtnaaaccctncccttcctgggcaaatttttaaaantggttcctgaatttttgggcaaaaaaatccttccccccctggtcaatcanggaccnatttccaacattcaancccccnatctttgaactgaagacagctcccctggaagatcagccttccccaggtcaggcacttgagtctcagctgcaccctgatcttcttctctctcctgacccaggtgcaggatcccgactttcagttggtggttcctcttgctgaggctcctcatcaccgggctccagcataggcccaatcagctcaggaggtggtacacttctcncntgcctaggcctatatgttgatcttcctcgccaaatcatatttcacacagctgcgtctcagtgg

SEQ ID NO: 332514 - DNA, 520 bp, Homo Sapiens
  misc_feature (453)..(453): n is a, c, g, or t
cttccacttgtatcctatctctgttcaacaccagtgcaagtctttacaattgcataactgccttgggccaggcactatctatgttctgcctaccaggaataacagtgtccttgccactgtgacaacatgtagtctgactccaaaatcctatcttagctagcatctgctttcatgcaccacttctggtatcaactcttccagtttaggctcctcaggaagccgatatctaggtgggaattagcatgcaggaggtttattagggagcattgttggggtgggtaggaaagaaatcaaaattgaggcagagggggaagttgggctgtgatatgtctaacaaaggccttagggaaaccaaccagggagattctaaacttgggaattgaaccttctggacttgcccaagttgggggttgaaggaactggggcctttattaggccccttacattcaaccngttcattgaatgtgggatttttcccggggaagggaaagggcctgacctttggtgaacatttttttcg

SEQ ID NO: 332515 - DNA, 435 bp, Homo Sapiens
  misc_feature (39)..(39): n is a, c, g, or t
acaagtagaccccattaacagagaagacgaacgcgcagnaaaaggaggaaagcagtgtgcctccatggaggcggaagattgggagtggatgtaaaccgcaagccgaggaatgccttaatagtcacccagaagctggaagagtcaaaggacacattctccctcaagccccagtgggagcacggcccagctggattttggacttctggcctccagaactgtaagagaaatgtccattgtcttaagccaaccagtttgtggtagtttgttacagcagccccaggaaactactatgcagtcaaaagtcttcagtaaaccaaaaatctctaattatcgttgttttatatcatgtgctatgacgatcagagactaaacagctctttcgttagaattctaattctgagaaatatcagaggaagtgttttaataccctccagt

SEQ ID NO: 332516 - DNA, 541 bp, Homo Sapiens
  misc_feature (399)..(399): n is a, c, g, or t
  misc_feature (405)..(405): n is a, c, g, or t
  misc_feature (428)..(428): n is a, c, g, or t
  misc_feature (460)..(460): n is a, c, g, or t
  misc_feature (473)..(473): n is a, c, g, or t
  misc_feature (498)..(498): n is a, c, g, or t
  misc_feature (530)..(530): n is a, c, g, or t
aggagatgagaagttgagctaatgacttccagccttttccagttaatattgtccaggtaacccctgccttttttggctggctgaaatttgattttgattgagggttacagtttcaagtcatttagcacaaataagtcaaggcttttgtctttaaggccttgttatccaccaaatgaacactgtttgagtacgtactgtatgcagaccagttgctgtgagataatctatactactgttcctgtctcagtaaaattagatgggcaagtgttccaacttattaaataagtcatataggtaattattgtccaacacatgtttaagtaaagtatatgataattgatcatgtgtatgtggaaaagctgtacctgtttttgtttatttgtttttaaggtgggagtnctcgcnctgttcacccaagctgggagtgncgtgggctcactgtaacctcggccttccgggnttcaggcgatttntcgtgtctcagccttctgagtagcnggggttaccgggcgcccactaccacgccgagnccttgcagtcc

SEQ ID NO: 332517 - DNA, 304 bp, Homo Sapiens
tttgcggattgagaagcctttattgtgggaggatcggggtgtccgagggccccgggagtcggaatgggcttggaaggctggggggaggggcctttgaggaagaggagtcctggaagcgggggtcatcacaggtcaaggggtggtccttgggccccgcaggtcagtggtgctgcggcggcaaagtgcacattgacagctgagagccacggcttaggagaccacggggttcacgccgcgcggcagccagggagccggatggactcgaagcgcacatcgcggtagttgcacaccacctgaggcaggg

SEQ ID NO: 332518 - DNA, 526 bp, Homo Sapiens
  misc_feature (19)..(19): n is a, c, g, or t
  misc_feature (24)..(24): n is a, c, g, or t
  misc_feature (34)..(34): n is a, c, g, or t
  misc_feature (65)..(65): n is a, c, g, or t
  misc_feature (79)..(79): n is a, c, g, or t
  misc_feature (84)..(84): n is a, c, g, or t
aaaccccccaatgccagcnagganattacttgcnttatcttttcgttgggcgccggaccagacanaaaactgaggtggngaggnaggtgagaatcacaataatttttgaaatgataaccacccatacttctaccaggaatgagccactttctcccttatggacaagtgatcgggccatgccagttcaccttcattttgacaggagttgactaagtgagaatatctttgtgagtgtaaaacatttttgggcaaagtgaaaaatagaaaaacttcaaaacttcattgataaaaaggagccttatgattaccccactttaaccttggtgagtgcagtatttaaatgtgtaatcatactcagatgtttacatagtgcatgtgtgtgaacgtatacggtgtgtacacacacgtgccccgaatggctcttgaataaattcattcctctagcagagtgtgggggtgcacttttcatagtatataatttctctctctctcatcatttcttggatgctaatacaaggtctcaggt

SEQ ID NO: 332519 - DNA, 494 bp, Homo Sapiens
  misc_feature (470)..(470): n is a, c, g, or t
tttattcaatcgaaatatatttgtctaatatctacaaagtgtgaacaactggtcttaagaaagcagacaaaaggcacaaaattagtattactacagagaagcattcatgctatttggatttgataaatattggagtggcacagtaaaaaataaattaagcattcagcaaaaaccagatatttcattttttccttgctttgtattttcgtcactcctttgacctcatgtgtaaaggctaaaaactgaaatttaactgaaaccatggaatatttatgcaggcgttatgtatgttttagtcacagtgctttcttgcagagtttgggttaaccagagaggtgcacttgaggaaaaaataatccacaggaaattctcttctctttccccaaactaaatacaagattgaggctgtggttgtgcatgttttcatgtgcatgcatgtatttaacttctaaagccctttttcatcacanaagaagtctccatatgattgactg

SEQ ID NO: 332520 - DNA, 549 bp, Homo Sapiens
aagcatggtactttacaatttttaatgcattcatacaacagtgcattggaaaagtactgagcctctacaaaatagctttacatttttaaacaaatgaatgtgattttttttcacttacacaagcataggctttttaatatttccacaagataaatatctcaattaaactataagctcactctacagtgtgccacagtgatgggcttaggagacagttatacacttagaagatcctaaccttagtgttatttacactgacatgtccagtatcaccaagtctgaaaggtgaacaaacaatactcagaatgtggctgaatttgtgttaactaataactgggaatgatatagctttaatcacttatgaaacacatactgtaacttagtctaaactggtaatttccttcgctcctctcttatggtgtgggaaaatttaaagatcaacatgaaaaaggagccattgctaaggcagatcttttaagataacaaaggaaaaattgacaagtgtatatgataaattatcagtaacagtgatgctaccaatttaactgg

SEQ ID NO: 332521 - DNA, 475 bp, Homo Sapiens
  misc_feature (18)..(18): n is a, c, g, or t
  misc_feature (35)..(35): n is a, c, g, or t
  misc_feature (42)..(42): n is a, c, g, or t
  misc_feature (71)..(225): n is a, c, g, or t
ttggtaaccctcaaaccnccccaggctcaggtgancctcccnacctcaggccaccccaagtagctgaaacnnnnnnnnnnnnnnnnnnnnnnnnnnnnnnnnnnnnnnnnnnnnnnnnnnnnnnnnnnnnnnnnnnnnnnnnnnnnnnnnnnnnnnnnnnnnnnnnnnnnnnnnnnnnnnnnnnnnnnnnnnnnnnnnnnnnnnnnnnnnnnnnnnnnnnnnnnntactcctatttctattattataggctatccccaaatactttttagaagtaggcagagtatattcacaagtaccttttttaattacctagaaaacaaatctacaaagaatgaagacatgggactcagtttgtgatttcctcatttttaatgtgtggtattatagaggccttactaatcctctgtgattagctgtggaaaattttgctttaatctttgcaacaggttagatcatgagacagcgattttttaa

SEQ ID NO: 332522 - DNA, 426 bp, Homo Sapiens
ttttagtttgtgtgtgggggtgggtaagggaggggatggtttatgttgaatgtttagtttttcttctgcatgatacgtcatgttgtgggatctttagaaaacttcatactgtatgaataagaaaataaaatatttgaaacttgcttgaatgtattcagtggtctttgatggtttccatagctatgagaattttttttcctctcaggcttttaaattcttaaaaacagtctggtaaagtgacatttaatctctataaaaacctacaaattcctgtagtactctcccatcacctcctgccatgacttcccttactgctacccctctctctactccagccatgttagcctccggtgggtaccctgggagtcttggggtttgtgtctcttagggcccttgcgctatccagtccctttttgccccttttcc

SEQ ID NO: 332523 - DNA, 538 bp, Homo Sapiens
  misc_feature (58)..(58): n is a, c, g, or t
  misc_feature (61)..(61): n is a, c, g, or t
  misc_feature (299)..(397): n is a, c, g, or t
tggaattctgtgagtgtttatattcaaacaagagtcccatatatttccttgccatggntanaatcatctttaagactttctttgctattactgtatctgctgtaacagcggcagagatgttcttcccaaagacacaggcttaagcaggcctttttcacatgaagctgttctgaaagacagcaccagtattagttactgcatcaactccccaaaagaagcatcccaagttcaaaactacaaaatcagtgtgaaacccacttcaaaagctcctacttatcaggccagacatggtgctcatnnnnnnnnnnnnnnnnnnnnnnnnnnnnnnnnnnnnnnnnnnnnnnnnnnnnnnnnnnnnnnnnnnnnnnnnnnnnnnnnnnnnnnnnnnnnnnnnnnnaattttaaaattagccaggcatggtggtacatgccggtagtactagctacttaggaggctgaagcaggaggattccctgaacccaggagttcaaggttatagtgagcaccaatgcactccagcctgagtgtctgagcaaga

SEQ ID NO: 332524 - DNA, 426 bp, Homo Sapiens
  misc_feature (12)..(12): n is a, c, g, or t
  misc_feature (39)..(39): n is a, c, g, or t
  misc_feature (64)..(64): n is a, c, g, or t
  misc_feature (123)..(123): n is a, c, g, or t
tttttgaaaaanggaaatcctaacctcctgtttgccccnaaaactgaaaaccgcaaatggttgnccatcctcggcctcaacttgccaaacctcctgccctccccgggtttaaagcgaattttncctgccctcggccctccccgaattagctgggaatgaacagcaggcagagcacacagagacacctctgtatgtgggtgcccagagggatgtgcctgagaacagcaaggcagctctacgcctgtggactggcaaccaccagagagtgggaaaggccaagtgtgggcagaggtgggtgtacagcaccctttactggatatactggtggaaacagactgggcaggcctctgtgcacaactaggcagtcattaaatcataaagcatgcaagtgccctacgatgacccagcagcttcattctgggctta

SEQ ID NO: 332525 - DNA, 388 bp, Homo Sapiens
  misc_feature (158)..(166): n is a, c, g, or t
gaaaattcccttgtcaggaaattttaaagagatgggccattggagccagtaatccaggagtaggttgtgataaaccagtttgggaccttaaatcctatatgtaattgggagcctacctgattatataagaccaggagaatggcatgatgaaatttagnnnnnnnnntcctggacacagcaaaggatggagttagacagggttaaattagaaaaacagtttggaagttaatttaaaaatacagacaagaaatgattatctgagttaaggcaatggcaactgtccaatgggagttgggatggagaaaaagaactctgaaataattcctctgagccttggttttttcatatgtaaaatgaggataatatcttcactggatccgtgccgaaa

SEQ ID NO: 332526 - DNA, 120 bp, Homo Sapiens
tttttactaaaatacaaagtgcggacaggaaagttaagcctttggacaactcttgttttttcttggcctggctgacagtgctagcggaaaggagaagggagaacaagggaagaatgcaga

SEQ ID NO: 332527 - DNA, 347 bp, Homo Sapiens
  misc_feature (55)..(55): n is a, c, g, or t
  misc_feature (81)..(81): n is a, c, g, or t
  misc_feature (236)..(236): n is a, c, g, or t
  misc_feature (316)..(316): n is a, c, g, or t
ttgtaatcttgaaagccccttttacaatgtaatgcattttcttgaaaatcttgangttctgcccccacagaagcaaaccangtgaagagttgaaaatggaatgttcctaacaccaggtgtggtttggaatggaaaacagtgacctcacccaccctctgagacaccagggtggtagactgggtgatgtcccagcggccccagtccaagtgaggggaagcaggcgaggggagatggcntggtgggaagaaaggagaggaagagcaggttgagagatgcaggaagacgtcagcagctgcagcagccagggagagctctnttttggaagaagctgcggcactcccctgcac

SEQ ID NO: 332528 - DNA, 289 bp, Homo Sapiens
  misc_feature (209)..(209): n is a, c, g, or t
  misc_feature (226)..(226): n is a, c, g, or t
tttttcctgtatgttctaatgttatttcagggatcccctttgcctcactctggccattccaaaacatatatatgtttcatttatataaatccaaatgaaaatattaaaattgcaagtgagatatttttggccttaatctttgaatttcaatgttttcttatctgtaggagctgggtgtgctaactcctgtaattctggggcaatgcatngtgggttcttgggctgnttcaaggcaatcttcagggtctgattttcacacaagctcaggagcactggggttagaaggggt

SEQ ID NO: 332529 - DNA, 366 bp, Homo Sapiens
tcataataaaattcattctttacttgagtgcatggtggcccaggtgctattccatgtatgtcataggtgtgaaccttaaatctttccaacagccactgccttatggagactgtatcatccttatcttcatcttacaggtgagaaatctgcagtgaagaaaggtacatcccaaggggacaccgacagtaagcagcggcgtggatttccagacacgtggctgggcctctgcaggaagaaatcaaacgtgtggaagggttggggagaggagatgcctagaagggattttcctgtattctcttagtggtgggggtaagaccgaggacccaagtcctcactcatcacgtcctccccagtgatgcaaggatg

SEQ ID NO: 332530 - DNA, 425 bp, Homo Sapiens
  misc_feature (262)..(262): n is a, c, g, or t
  misc_feature (267)..(267): n is a, c, g, or t
  misc_feature (296)..(296): n is a, c, g, or t
  misc_feature (335)..(335): n is a, c, g, or t
  misc_feature (340)..(340): n is a, c, g, or t
  misc_feature (384)..(384): n is a, c, g, or t
  misc_feature (409)..(409): n is a, c, g, or t
ggccttttaggtttgggcatgccagctttcttgagatgagtgaataaaagcgtattgtaatttcatgtctgcttcagatcatggggacagtgccacccaggaactgctgctgaggcctgggaagctcccttgccttcgggtttggagcagtggcatcatcccaccaacctgagccatgaaagggctgagcagaaagttaaatggtagtttcctgactggaagccacacgtaggtcactgtgagtagtcagggaagcacagtngggtntgggagccatcatctgtcttggggctggnttcctcccaatcttttgtccagtgggtataaatggactntcttncttgatggcccatacgcagcactggcttttaaagatgggggaanggggtacatcaaggattcccactcnataagccctgggttcc

SEQ ID NO: 332531 - DNA, 458 bp, Homo Sapiens
  misc_feature (320)..(320): n is a, c, g, or t
  misc_feature (340)..(340): n is a, c, g, or t
  misc_feature (360)..(360): n is a, c, g, or t
  misc_feature (405)..(405): n is a, c, g, or t
  misc_feature (411)..(411): n is a, c, g, or t
  misc_feature (419)..(419): n is a, c, g, or t
tttcatagttcaaagtttcctttaatagaatacccagaatacataggaaatcaacatgtgctagacatagaattagtatgttcactgaagcatggcaaggtcacataaaatgcatatagctagggtcccaagcaggggtgtgttactgttagatttttttgaagtttaattttgttcagcagaggaatatactctaggagcatttacagttcattttcagtcatcacatagcatacatcacttccaaaacgtaggcctcttgtgtggcagagaaattgccttcccacagcattcacaatggtaaagagaccttttggggnttaaagggggtcaggctctntctatggggaaccaaaaggnggggattgcaaggtgacagatggggactttatttatttggttgcngggaanaaccgggnctggaatggtatggcctaaggggatttggtcccgcccct

SEQ ID NO: 332532 - DNA, 422 bp, Homo Sapiens
  misc_feature (304)..(304): n is a, c, g, or t
caccagcaattctctttaatcctctttcttttccttctaaaagcttttgcaaagtccaatttatttttacagtaaatagattatcttttaagaaaacgcactagcaagattgtagcaaagtgtgtttatgcaaacaggtggtgcagagacagaggggcggaccttgtgggcagctggaggaccatcccagctcatgggccacgcacagatgggagcacctcagtgttttcagccaagagaacacaagtctcgggatccatgtggctccctcaggccctggacccaggcaggcaggacacccttngaccatggggcaggggacatcccagcatcttgtctgtacccccaccacctgcgtggcacctgggtcctcagacacctgcgtggcacctggccctcaggcacctgcgtggcagctccac

SEQ ID NO: 332533 - DNA, 454 bp, Homo Sapiens
  misc_feature (171)..(171): n is a, c, g, or t
  misc_feature (355)..(355): n is a, c, g, or t
  misc_feature (434)..(434): n is a, c, g, or t
gttcggcacagaggcatacaatgtaaggatttccatagcatatcacttctatcctttcccaactctcctccacctgaaaattccacttagcacggcgggagtggtgatgccagtggaaccccaggggctggtgtttggcgttctgctctctggctggccttcatgccaggnccctgccacctgcttcctgggcctgccacaccaccttgggaagaagccttctgtgcttctgactttctgcttcgtgtgggctactatgtgaaacctgggggtctccagggggcctgctcccacaggcttcagtgagcaggaggggagttttcccagccttgcccatggacttgcccccaccctnttccctggtttcttcatgggggtctttcccaggggttttggaagttcgcaagttgggttcctcatgttttttaggtttnttcccatttaatggttgtta

SEQ ID NO: 332534 - DNA, 430 bp, Homo Sapiens
cctccattttaaaattttattctagttaccacattgttcttgcaattgcttggatttttcagaatagtaataaataataacgggaatcctaggcattcgtgtttttctatgtttttaacaggattttctctaatgtttcgctattaaataccatgcaggaaattgggaaataatatcacaacccaaggtaaatggagctaacagcatagatgggacaagctaagacatgaggaccagcttgcgactccagacctgggaagaccccatgagaagcagggagagggtgggggcagtcatgggcaggctgggaaactccctctgctcactgagcctgtgggagcaggcccctggagaccccaggtttcacatagtagccacacgaagcagaaaagtcagaagcacagaaggcttcttcccaaggtggtgttgc

SEQ ID NO: 332535 - DNA, 446 bp, Homo Sapiens
  misc_feature (106)..(106): n is a, c, g, or t
  misc_feature (144)..(144): n is a, c, g, or t
  misc_feature (227)..(227): n is a, c, g, or t
  misc_feature (261)..(262): n is a, c, g, or t
  misc_feature (265)..(265): n is a, c, g, or t
  misc_feature (280)..(280): n is a, c, g, or t
  misc_feature (314)..(314): n is a, c, g, or t
  misc_feature (337)..(337): n is a, c, g, or t
  misc_feature (399)..(399): n is a, c, g, or t
ttcaagatagggaatactacagatagatagggtatgaacaataggaacgctgataggaatcatccaatagacaggaaacatctaaggttgaaggagggagagggantaattgcagagtgatgcccttgagtaaaagagaaggantgtgatctggcacacaaggaaaggggtggttgcagccagggacaaacaggtcatccacagaactgggaaggaaggctgccgtntggggtgcagacacagaggggtgggcagccatcnntgngggagcatgcagaanttcccttctgatttgttccattcccccagagaantaagaagcagggccaaaagcttnagagttttggagggagggaagagggagcttttcttgaaagagggagaccacattgatatttntttttggcacaggttttgggacagagtagttttttgggatctttttt

SEQ ID NO: 332536 - DNA, 450 bp, Homo Sapiens
  misc_feature (11)..(11): n is a, c, g, or t
  misc_feature (221)..(252): n is a, c, g, or t
ttcccaatagntgaagctcaaattttaccatagtagataaggatttctgatggtttgtgcactctgagtgtgttacaaatgataaatcatcatatggagaggggcacacacatttttaaaaaaggtcataatgtaataacatttgctatagaaatggttcttgagaaggaaagggtttgggcttatttagtaacccatcgtgtcttctctgaggacgtccnnnnnnnnnnnnnnnnnnnnnnnnnnnnnnnnaatgacccagtaaagaatccttggaaacatactaatcaggcctcctgaaggtatttactagcagaaaggtaatgagacccttttctgtggcatcctttttacggggtgtatctagtctgtctaggttgcttacagcaaatgaatgaggaactcctggggttgtgggatatggcccagtggaaaatgttaggtcaaaga

SEQ ID NO: 332537 - DNA, 230 bp, Homo Sapiens
accgcacccggcacatcactcctagtttacagctgaagaaattgactgtcagaaaggttgagtcatgtgccagggaagtaagagcctgagcttggatttgaacccagggtcaatcttgacccagatccacttgctctgaaccatctacttcatcaaacaaatacacacacagaggaaggacagcgtatctgcacttgatccacagggaagggcattttgcttggggtgcc

SEQ ID NO: 332538 - DNA, 422 bp, Homo Sapiens
  misc_feature (316)..(316): n is a, c, g, or t
  misc_feature (412)..(412): n is a, c, g, or t
ttagcttaaataataatgcttttattattgtaaaaaacaaagcaacgtgagacaagcagttcccaagttggtgacttagaggctggaaaaaaatccatggaggtgtcacatgaaaccagtatgtcttgaaaaagacagtccttcttggcaagctgccaacaacactcatattgggttctctggcacaaagctgggtcaagtccatgccctaacttgtcagagaggaagactcagactattcatgatttcttctaggcaaatgggggagaagcagaggtctgctttccttgaggcagggttcagggagggtaaatgnatacacactgtgtggggaccctcacagggtgggtaggacatggatacgggctttcttgcctcaggaaacttgtcagttgacataaacgggcaaggngccattaaat

SEQ ID NO: 332539 - DNA, 480 bp, Homo Sapiens
  misc_feature (122)..(122): n is a, c, g, or t
  misc_feature (124)..(124): n is a, c, g, or t
  misc_feature (126)..(126): n is a, c, g, or t
ttgtaaaatagtcttcccttttattttaaatcaacccttttccaagttagtgccacgagttgagatcagggggtcagagcccactgggatgtggcaggggcagcagggggactcatgtccancncncccagcttagtccctccaaggatgggaccggcaagcccgggatgaagggtgcgaggcgaggctgtctgccccctcccctgccagccctactcccctagtctgccccctcagctactcccaaggccaaggacagaaatggggagcacagtgggccaagagcagggaggcggtcctgtgcaggctgtccatggccaagagtgttagtggtcagagcccaggcaggctgggttagtggggtctctccggcagccagggaaggaacgaagagggagccaggctccagtccagccgggaggaggggctcagatagacgactgccactgcacaaagcgcttggattcctgagggttgaaa

SEQ ID NO: 332540 - DNA, 459 bp, Homo Sapiens
gtcaacgacatgattggtctttttacttcataagtcttattttgtttcaccaaaagcttcacagtgtaacaaaccaaactcagcacagaaaacatatgacaatatattttagattctctaagacaaggtctcataagtttagatgacaagtgacaacatcaatggactaagtatatcacctcccataacttaaaaggctaatactcataaacatgaaagttctggagtatgaaatttaaaacacaaattttggatataaattatctgagtacaaagctgtaggtaattcttatctttcacttcccctcataactccaaacataacgccattgtaggtgggttgctgctagactacatccaagattgttcagctgagggacttgcccactctcccagttacttgggaattttcaaccttcccatactctagcccacatggcatttgcactcagcttctcc

SEQ ID NO: 332541 - DNA, 338 bp, Homo Sapiens
  misc_feature (104)..(278): n is a, c, g, or t
  misc_feature (285)..(285): n is a, c, g, or t
tctttaaatcaagaaggcaagaatgcccaaaatcaccatttttattcaacttcttagtacagatcctagactgcacattaacatggaaaaagaagtagtatatnnnnnnnnnnnnnnnnnnnnnnnnnnnnnnnnnnnnnnnnnnnnnnnnnnnnnnnnnnnnnnnnnnnnnnnnnnnnnnnnnnnnnnnnnnnnnnnnnnnnnnnnnnnnnnnnnnnnnnnnnnnnnnnnnnnnnnnnnnnnnnnnnnnnnnnnnnnnnnnnnnnnnnnnnnnnnnncgggctngggcattgggggggtttcatggcctattaattcccggcacttttggggaaggt

SEQ ID NO: 332542 - DNA, 489 bp, Homo Sapiens
  misc_feature (362)..(362): n is a, c, g, or t
  misc_feature (449)..(449): n is a, c, g, or t
  misc_feature (467)..(467): n is a, c, g, or t
ttgtaaatttctaaaatttctacaataaatgtgcactatttttagaattagaaaagacagcaacctacttatgaaactggtaaaacttaacaagaacataaagcatggaactcagagtctcttccccaaggccacggatgctgtctgtgaggacacagccttcctcaggatttctccctggggtttccacactgctcgaccccactgtgggcacctgggcactgtgaacccttcctttctctccaagtgctcccctcctttgttttgagggagactagccccttgtggattttcctttcaacacctccagattttctttcactctccttttggttaaacccatcccttttaataggagggtntttgccggggggaaaacatctccaggtcccctttcttcactctggtaaacttgacttgagggtaattttcaatcaacatctggggtngaaggtcaatctctaggnccatcccttcctctatttttag

SEQ ID NO: 332543 - DNA, 403 bp, Homo Sapiens
  misc_feature (258)..(258): n is a, c, g, or t
ggcagttaagcttatttaatatgtaacaaccatcagtggatagataaataagtcttgatagggagaatttcttaatatcttttgaagaatacctccattttcatagtagggagtacccagaggataattttcggagccagtacagtggaattgaccagcaaaagttagttaaagcctagtttccttgaatattgataatatattcaacatggtacagtcctacatacaaagaggccgagatgggcagatcacttgagnctccaggagttctgagactagccctaggtaatgtggtgaaaccctgtctctctaaaacattaaaaaaaattagctgggtgtggtggcacatgcctgtggttccagctacttgacaggctgaagatgggaggatcacctgagccca

SEQ ID NO: 332544 - DNA, 364 bp, Homo Sapiens
ttagccaagaaaggtaagacattttattttacatacaaaaagggtgcaaactgagtcctttcctccccaaactggggaagaggtatacttaaagatcacatttgtgttttccatggtgccctaggaaatgggctactctgagatcacatatcagaacccattttccattttctccaaagaaggctacttcctctgcagagaagattttcctaatgggtgcacaaatatctctcctggggagggaaccatttcaaatacacttgaaattgacattcatgtttaaaaatacttacaaatttcatttttcacagctgaggctttgtgaccagtgccagggggtttatggaaacattattacatcctt

SEQ ID NO: 332545 - DNA, 350 bp, Homo Sapiens
gggccagccattttgtattgtaagaatgcccccctcagttgaattttttggttatcctcctccatgactgaataaagcatttttgttaaagaatattatggaagtgatgatgttgtgtgcttctcagagcatatcacccttctttgtttgtaaccatcataacttggtcttccttccaaatggatgtgaaacttgagccaatgttgaccctgagactatgtctggggcgccgtaggtgcttatgaatgcaaatgtgggaattgagattacatggctataataagattgacctccggatggcctaggatatgcctacattattatatattaattttaaaaatcatcataaa

SEQ ID NO: 332546 - DNA, 354 bp, Homo Sapiens
  misc_feature (144)..(290): n is a, c, g, or t
  misc_feature (314)..(314): n is a, c, g, or t
ttggaaagatttttagggcagagagtaaaaacctactgaaagaagtaatgaagactaaaatattgtaatgatctgtgggacagattcaggtgctcacttgagaagactgctaaatcaacttccccagagtagttctcaatacannnnnnnnnnnnnnnnnnnnnnnnnnnnnnnnnnnnnnnnnnnnnnnnnnnnnnnnnnnnnnnnnnnnnnnnnnnnnnnnnnnnnnnnnnnnnnnnnnnnnnnnnnnnnnnnnnnnnnnnnnnnnnnnnnnnnnnnnnnnnnnnnnnatgcaccacctcacctggggctantttttgtatttttagtaggagatgggggtttcagccatgt

SEQ ID NO: 332547 - DNA, 304 bp, Homo Sapiens
  misc_feature (47)..(47): n is a, c, g, or t
  misc_feature (281)..(281): n is a, c, g, or t
ggtgattggaacctgtctgattttacaggagtggcccttgtgggcgnagggatggaattccaaacccgtttcctttctgatgggttttggggttcccgtgggggccagggagtcccaatgctcccttgaaatgagtggatatccaagctagcagggcagagaaggggatgtgggcaaaacgaatccacacctgctgtagttgaattttgcttcagggcagctgaggacgcgtgggtcctgagtctccagttcacacccctttttgcacaagcagtttgggntttgcttttgaggggggtcattt

SEQ ID NO: 332548 - DNA, 392 bp, Homo Sapiens
  misc_feature (382)..(382): n is a, c, g, or t
ggcacgagaatacgccattgtatggatataccacattttgtgtatccattcattagttcatggattttgtgtctattatgaataatgctgccatgagcatctgtgttgtccacaagtttcagcatggacttctgttttcattccaatatcctttgatgacatgtcttggcagtgatgtctatgacactggggcaagtgtcttaaaatgttgtgcatcaggaaaaaagtcatcattgccaaggccagcagatcttcggaaaaggggggctggggatacgttgggtgattttttttcatggctcttactttacagtatggacttcgttaactgtttaatgggctggaggctcctccttagggtggaaggaaggggaaggggcantgggcgtttt

SEQ ID NO: 332549 - DNA, 406 bp, Homo Sapiens
  misc_feature (30)..(30): n is a, c, g, or t
  misc_feature (63)..(63): n is a, c, g, or t
ttttgaaaaatcaaaattggccaacaaaanccttgggaatctgggccccacaggttatggggnaacgtccatagctgtaagaaagggccatcatgtgaacaagaagatgtctgtgctggagtcccaagtctgcaaggaagacacaccacgtggtcaccaccagcaggcagcctctggacgcccaggggggcaaggatctgttcaggctaaaggcagccctgatagaccgcgaggctgtaactggacctagggctggagagagtgtgtaggccagggagaaagacatgaggggctcctcaggggacgggcacacagggcacgctgaagcccttgggacagcaggccctgtagaggccagaggtcaatatggccctcccctaaccagagggtgcgaccatttcttcca

SEQ ID NO: 332550 - DNA, 619 bp, Homo Sapiens
  misc_feature (426)..(426): n is a, c, g, or t
  misc_feature (537)..(537): n is a, c, g, or t
  misc_feature (550)..(550): n is a, c, g, or t
  misc_feature (557)..(557): n is a, c, g, or t
  misc_feature (588)..(588): n is a, c, g, or t
  misc_feature (604)..(604): n is a, c, g, or t
tgagttctctaaatgggccagtgatgagatgccatccaccagcaatggtgaaagcagcaagcaggaggccatgcagaagacctgcaagaacagcgacatcgagaaaatcaccgaagattcagctgtgaccacgtttgaggctctgaaggctcgggtcagagaacttgaacggcagctatctcgtggggaccgttacaaatgcctcatctgcatggactcgtactcgatgcccctaacgtccatccagtgttggcacgtgcactgcgaggagtgctggctgcggaccctgggtgccaagaagctctgccctcagtgcaacacgatcacagcgcccggagacctgcggaggatctacttgtgagctatctgccccaggcaggccttcgcctccaagcaagccccacctgcccccagcctctgtgacangtgaccgtcttccctttgtaacatatttggcacacaggtttccccatgttacattacatggcacattattcaaacatggcgttacaacaacaacacactttttacacaggnagggattttgggnggccagngttggagggttttgggcccgggggatttacntgttgggtttcccacntttgggttttggggg

SEQ ID NO: 332551 - DNA, 484 bp, Homo Sapiens
  misc_feature (25)..(25): n is a, c, g, or t
  misc_feature (69)..(69): n is a, c, g, or t
ccccaaaaaggccggggaattaacnggtggtaaagcccaatgtgtccggggcctccctcctttcctcangctaatagactcccccatatcccaacccttgccccaagaacaactcctgttgggagttgttcctacttggaaaaactacttaatcgaagcacctgcctgtgtatgtcttacagattcccctaccccactaactagcctcagcaactctgctgctcttgttcttgaattacaatctcaaggagtggaaccatcactgaccacaaactttatgtttatattttttagtggtgtgatttatcttagttacaattgaaaaatctccagctttagagaatataatattaagaggcaagccacattttgtagttcagtgtcttacaaggtcaggcaaggagagaaaaagaaaccagtttcagaaatgttctattgtactagatactgcagcataaactagcgctgtcatttctgaaatttt

SEQ ID NO: 332552 - DNA, 433 bp, Homo Sapiens
  misc_feature (336)..(336): n is a, c, g, or t
gaaaacaatttacaggtgttccaggctgcagaatggtccttgggcagggctactgggcaagtagctctgtatcactatagtccaggggctggctctcagctatggtaatctggaaatcagttatttttcagcacatgtgtaaagtgattgaactctggggagcagattcttgttaacctaaatcatgagagactcatgtaactaaagtgccaggtggttaatgctgagtaaagacaagagctggggagggggtctagacaggagttctgggagggcaagcctacatgggaaagacaaagggaggaaacttgacgtaggcgagttggttaggtcctnccttaaggggccatcccctggcagacctgttccaaggggggacttgttactttgagttcactgggatgtttttttccagatttttgttaccgggttt

SEQ ID NO: 332553 - DNA, 339 bp, Homo Sapiens
  misc_feature (227)..(227): n is a, c, g, or t
  misc_feature (273)..(273): n is a, c, g, or t
  misc_feature (313)..(313): n is a, c, g, or t
ggtgaattttttttagatttccataataaaaagttttaaaagtgtaatatttaagtctttaattgaaaaacatttttctttctccccaaaactatagctttaagtagtctgaaaaaatttagtataatacttttctaaattaaaactaattttagggccgggcatggtaggctcacatctgtaatcctgggcaccttggcctgctggggattacagggcgtgacacncggcatggcagccttatcctggcttttttaatatggaattgtaccntcggggtaacccaaataggatagttgggaaaggcatcctnttttttagggaggggctctggggcct

SEQ ID NO: 332554 - DNA, 409 bp, Homo Sapiens
  misc_feature (52)..(52): n is a, c, g, or t
cccggcggcttccccagtggaattaaccaaataattggactttggttagccncccttagttaataaagttgccagagtttccccttttcctggctcccaaacctatttttgccccataagcccgtgttatttttagtgtgcaattttacataaagcaaagtattttagcaatgcgtatatatgcattatagcccagaacacctgcaggttacacatctaaatattaatagaactcagtggcttacctttggaagcttgatagggggctctttggattcctcttcttcatcactatctgattctccactctgcacagagttcttagatgcggctgccaatgatatttcctttttctgccattccagaacgcaatggcgtacattacagtaaatattgaaagcagaaggat

SEQ ID NO: 332555 - DNA, 338 bp, Homo Sapiens
  misc_feature (150)..(150): n is a, c, g, or t
  misc_feature (254)..(254): n is a, c, g, or t
gccttcaagcttctaccacctgttgccttttctcattgcaattattacagattgcctgatttgctctccctcattccttgaagattttagcacctggatcgctgtctctttctgactctctatctgtcgtaattcatgatggtttttaanatccacacagagatcctttcaaaacccaggagtaccagcgacattaagtaacactctgtgctgttacaaaccaacctgggaaatctcagttgcttaacccaatnaaaagatgatttcttgcttgtgccaaatccaatacacctctatgggtactttacctgggctataccccatgcctgtttcaaaag

SEQ ID NO: 332556 - DNA, 405 bp, Homo Sapiens
  misc_feature (29)..(29): n is a, c, g, or t
  misc_feature (49)..(49): n is a, c, g, or t
  misc_feature (57)..(57): n is a, c, g, or t
  misc_feature (65)..(65): n is a, c, g, or t
  misc_feature (84)..(84): n is a, c, g, or t
cccctggaaatcttaaaggcccaaggggnccttttcccaaggccctggnaaacccangaacgttnggaaacccctggaaaccancaggaaagggtcccctgccctcatctcctgctctctgaaggttgcaatacgtctctccttcccagagcggatttctcttctcccctgtctacatgatggatggaagatgactgctctggacctccccaggcctgtgtcacttgagctccagcaagaatcccagacagaaacagcagctctcactcctagttctaagagaaagtacttcgcctacttggggacaggtgtcatcccagttccatcagctgtggttagaggtgggggtggggtcatgatgcaaaatggtggtcaagaacccccaactcctgttgtgagggatca

SEQ ID NO: 332557 - DNA, 436 bp, Homo Sapiens
  misc_feature (395)..(395): n is a, c, g, or t
  misc_feature (412)..(412): n is a, c, g, or t
  misc_feature (417)..(417): n is a, c, g, or t
caagaatccagaattgcagatactgtgtactgtgttgcctgctgtttagagagaagacctttggtgattaaattgtgtgtgagtttaatttcaggagattatctttgtctgctttcttcagaaagaaactaaaaaccacatgatgtgaagggctgtcccgttcctaagttctccaccatgtgactgcctgcttcttttccattggtatctaccactgccccctaggaaggtttcttctgatctcctctgactataaggaccttaagggcgaggacactcccttgtctggcacatggggaggaggccgctttgtcaggactttaatggaaattggctttttaataaggacatcaggtggaaattatgtctggggtttgttgttttgtttgaggagncgtaaaggggtttgttnatttnttccaggaaacaggattaa

SEQ ID NO: 332558 - DNA, 272 bp, Homo Sapiens
ttgcaaagaaaacaagtttaatttcactttgaatgacaacgatttttctggaaagcagatacttcactcctttaagtttccacccaagccacaataatttcaaacggtcttgcggatgacccagctggtcactcttgtttatgtggggactggaggtaatgagagccaaaaaaagtgctataaacctaatttggctagagcaagttcacacgacacgaccgtgctttaaaaacttgctctccattatgtacttccttccatcaggttggggg

SEQ ID NO: 332559 - DNA, 480 bp, Homo Sapiens
  misc_feature (31)..(31): n is a, c, g, or t
  misc_feature (37)..(37): n is a, c, g, or t
  misc_feature (302)..(302): n is a, c, g, or t
  misc_feature (352)..(352): n is a, c, g, or t
  misc_feature (385)..(385): n is a, c, g, or t
  misc_feature (396)..(396): n is a, c, g, or t
  misc_feature (432)..(432): n is a, c, g, or t
tttttttgcagtcttagtattgatatggttncaccangttgttcaggtctggtcttgaactcctgaccttaggtaatccgcctgccttggctcccaaagtgctgggattacagacatgagccaccacacctggccaactcttctacattctatcctcacaagtcagcaccagtccccttagaacctgaactcaacaggaagctcagagaggcaacaatgagggtgaggggaggaggccagggaaagagcaagagagcccagctggcactccgccgtccgcagcttgtagctgtgcctgattnttgaaagcagggggtttcatttgcttttccaagcctggggggagcaactntgggggcctcagttttgagaggggccttacctnttggggacagntttccacttgcgtggccttgagttagggggggtacncgattttttaattcttgtcaatttttggggggttaaaagtcattttta

SEQ ID NO: 332560 - DNA, 345 bp, Homo Sapiens
agaacaatatcttgtttggaattagaaatgtaatacatgcacaggttaaaaatttaaatagtgcaaaagagtacatagtgaaaaatagcctccttccctccctagttacctgatccctgtctcccagagacactctttctagcttatttggggtagccactgacaaatattctttcgcctatactattattcatatgtttatatttctctatgtctaacacattaacacacatatatacacatatgcatgagtgcacacatgggaagcctaatgtactctgaattttcttacctaatgggcttatcttgtagtttgttccacatttcggcacataggaaatctca

SEQ ID NO: 332561 - DNA, 428 bp, Homo Sapiens
ctatgtcattgtctccactcatttttgacccagtttggaatgtatctgcaattgtgtggctcaacactttaggaaacaatagattattttatattattatttctgatggtgacaagtttgtcttgaggtcacattttctccttgaaaagtgacatcctgtcacttctgctctcacactactgccatacatttgtgttttttgttgttattgtttgggtagagcagttacaagaaaccctaaaacccttggatataaaagaaatctgtttattgatttttaaatctttcctttccaaaagctgggatacacatgggagctgtttggggaattttccttggctggctaccgcgctggccaccaaatgggaattggaccaggcgggctgtttacactgtttctttggccactgtggcccatggctcaggtt

SEQ ID NO: 332562 - DNA, 440 bp, Homo Sapiens
  misc_feature (14)..(14): n is a, c, g, or t
  misc_feature (69)..(69): n is a, c, g, or t
  misc_feature (92)..(92): n is a, c, g, or t
  misc_feature (111)..(111): n is a, c, g, or t
cctaataaaaacantaacccatatccctgtgggtaacctaaccccttgaaaaatgcccctcaagaacanttccagccctcaagcccatcccnaatccccaggaagggaaantcaacttccttgaaatgaatgaacatgtcctgaacaaacattgccccagcccaaatggaaggatcagatgtcccctggcactatccagagggactctagcatccctggtatttcttggtcctgtttccacccttgagggatcccacagggagtgcacctgagggaaacgctgactccagattaagagttaggggggccttttggggtactgtggcagcctgaactgcaaaccacccacaggatgtgcactctaaaaagagaaaatggctgggaacactggaatttggatttcacaggcagaggccgtcatctggtccacctgtacctcc

SEQ ID NO: 332563 - DNA, 467 bp, Homo Sapiens
  misc_feature (31)..(31): n is a, c, g, or t
  misc_feature (57)..(57): n is a, c, g, or t
  misc_feature (79)..(79): n is a, c, g, or t
  misc_feature (105)..(105): n is a, c, g, or t
  misc_feature (413)..(413): n is a, c, g, or t
cgggaatcccgtttttttgccccaaggaatnctgaagatgccttcaatgcccccatnaagacccatggggtggcccttncatgggaagacctgccagggcccagngttgcccagacttggcccagaaagacttccccagggaagatgcttggctctctgctcccaaggtgggcccatggtaatagggccctcgaagggcttgtggctggggtgatcccagggggcattgctcaaagtgcacaggaggtggcagcagggtcaggcgagttcctgttccagggacatcaggagggagggtagaagcctagggagtgtgcgaggctgctgggatgagggagctcaggggctaccagctaaccagcctcagctcaatggtttctccatccttgggtctgtagtcagcaataccttgnaacagtggggtattggggtctcggagaagctgccagaactccctttcttccggc

SEQ ID NO: 332564 - DNA, 485 bp, Homo Sapiens
  misc_feature (430)..(430): n is a, c, g, or t
  misc_feature (435)..(435): n is a, c, g, or t
  misc_feature (442)..(442): n is a, c, g, or t
  misc_feature (447)..(447): n is a, c, g, or t
tacttttctcttggagaagttgggcatcatattgacttaagtggacagttggaactaaaatctgtaatactagaagctttctcatctcctagtgaagaagtcaaatcagctgcatcctatgcattaggcagcattagtgtgggcaaccttcctgaatatctgccgtttgtcctgcaagaaataactagtcaacccaaaaggcagtatcttttacttcattccttgaaggaaattattagctctgcatcagtgggtgggccttaaaccatatgttggaaaacatctggggccttattacttaaagcactgttgagtgtgcaggagggaggggaccaggaaattttgttgctggaatgtctagggaaaactcactctaattgatccaggaaactcttcctttccacggctttaagggggtactttgattcanggttnattcatnattgncccgaaggttcagtgggtttacgggctgttgaaatttt

SEQ ID NO: 332565 - DNA, 484 bp, Homo Sapiens
  misc_feature (32)..(32): n is a, c, g, or t
  misc_feature (43)..(43): n is a, c, g, or t
  misc_feature (70)..(70): n is a, c, g, or t
  misc_feature (92)..(92): n is a, c, g, or t
  misc_feature (118)..(118): n is a, c, g, or t
  misc_feature (244)..(244): n is a, c, g, or t
ctgtaatagtccattctgtcaaacctggcccncctaacacccngccctccatgccacagccagccattcncaaaaaaatacttgttgaaatnccaccaatgaataagaatgtgtgccnataatttccccccatggtccaccatgaaaattgccaaaagccacagaccatgttccttaaatccccaaacattccccaattacttgttggccaaaaggaataaaaaaggagtcctaggtaacaccngaatggcccatcctatgaccgtgaacagcaaggtcccactcctaccctagaaaaggagtggctaggcagacaggggcaggatagacagagctaactccctgaagagctaacttgctgtacaagaaagggttaactcagcaggactgagttgctcaaaccctgcatattccccaagaaagacttgtcttcaaaacctggccttggctggctcctggtagatgagctctgaacctttggaaa

SEQ ID NO: 332566 - DNA, 434 bp, Homo Sapiens
  misc_feature (19)..(19): n is a, c, g, or t
aaaagctggttttattgancgataactgcacatttttggttggaggtgccagctcttgacgaatttgcagccctctcactctcgatattggagcttcttcctcctgtgctgtcttctctgcctggggaaatttgtgtccctcagctaggccaccccggggaatcacatgatgatccctgaacattcccatccccatcaggctgtgcacaggactggctgcatctgagatcaaacgatgttcaaagaaagttcagactccagcactccagttaggcaagcctcttagaaggtgagcgtcttgatacctgaagccgagtcaatttagagagcctagcaaaatacaggggcagaggaagcaatgaggaaagacttgtgagctcgctgggtcccctagcaaaccatttctgcctggctcacgggatccttcagaaggg

SEQ ID NO: 332567 - DNA, 381 bp, Homo Sapiens
  misc_feature (19)..(19): n is a, c, g, or t
  misc_feature (34)..(34): n is a, c, g, or t
  misc_feature (51)..(51): n is a, c, g, or t
  misc_feature (127)..(127): n is a, c, g, or t
gtacccgaaatcctccccnttcccctccttaaanttccatttggaccatanttaaccccgagtgccaaacagggggcaatgcccttattaatacattccttgaaataatactctgagcaaatcagancctatgaatttgttttacacagaaaattatttacatttcccccaaaccccacaatgcagccttacactaaagaacagttttataacaaaacctttatactcaaatttatccattcgaactttagaataaacatgttttaacaagttggaggagggcaggaaatggccatgagttctgattttcctagttttgtagtattaaaatgtctccacgtctacctttggatgtttggtaggcataccctaacttacagc

SEQ ID NO: 332568 - DNA, 435 bp, Homo Sapiens
caggctcaagcatcctcccacctcagcctcccgagtagctgggacttttacctgatagagttgttaaggttccttggcgtgttgaaacagagaattgaaccaaatgccacgaagtaacaaaagaacgaaaacaagggaagacaaaacaacagaagaagagtagggaaaacagacttaattgaagacaattcacagagtgagagtgagctcgaacaaagcggctcaagagcctccttatttaggatttttttcaagcccaaggaacctgggcaacaccccacggtgccctaggagaggcctccaattggctacaccccatgaaggattggcctgcaacccagcagaggctgaagtgccttgttatgatgggagggaggatgtggcctatatgctgcacctgccgctctcctgcttataggagctggctgcacctgc

SEQ ID NO: 332569 - DNA, 186 bp, Homo Sapiens
  misc_feature (22)..(22): n is a, c, g, or t
  misc_feature (36)..(36): n is a, c, g, or t
  misc_feature (59)..(59): n is a, c, g, or t
ccattaaaataaccctcaattntccccagaaatggnaaaatccttcctcaaattccccnatttggggttgttcctgccccttgtctgggggtgaaggccaaggccagggtgtcccttcccagaagctgggaccccagagagagaagtgaggaaagagaagttccgccgggccgcagtggttcacac

SEQ ID NO: 332570 - DNA, 461 bp, Homo Sapiens
  misc_feature (42)..(42): n is a, c, g, or t
  misc_feature (129)..(129): n is a, c, g, or t
  misc_feature (178)..(178): n is a, c, g, or t
  misc_feature (266)..(266): n is a, c, g, or t
tcagcttccgggtgtgactggaaccagggcttgtcgtcttcntcccagagtcactttgcaggggttggtgaaagctgctccccatccatgttacagctcccagtctactgatgtttaaaggatggtctnggtggttaggccccacataggaataaactgagtccaatacctctacacnagttatgtttaactgggctctctgacaccgggaggaaggtggcggggtttaggtgttgcaaacttccaatggttatgcggggatgttncacagagcaagctttggtatctagctagtctagcattcattagctaatggtgtcctttggtatttattaaaatcaccacagcatagggggactttatgtttaggttttgtctaagagttagcttatctgcttcttgtgctaacagggctattgctaccagggactttggacatgggggccagcgtttggaaacct

SEQ ID NO: 332571 - DNA, 396 bp, Homo Sapiens
cataggactcggcgtggggggtcgctagaagagcttctcatagcatttcccacagtgaatggtgtcacggtgaatgaagatctgatccaggagatcgcccatcggtttactgcaaatcccacacttaaagcaatattcatggcagcagataccaagatgttctagggtaatctttggacagtctcggatctcacggttgcagtaagtacagatccctccagttgtcctctcagagtatggagtgctgccacatggaggcttcttctccatggcgaatgagtcctcaatgctgctgacgttgctatagcgtgcagatactggcttcccagaagacacttcactagcattcacgtactccttcacgaagagaatccctttggtggtagagctggagtc

SEQ ID NO: 332572 - DNA, 385 bp, Homo Sapiens
  misc_feature (277)..(338): n is a, c, g, or t
ttttttttccaatgtagaaactctttcctcaatcttttcattgttacagttggaaaagattgaggaaagagtttctacattgattgtagcatccaaggtgtgttctggggcaggttttgagtgttaaaaagttttatccaatgcttaagaaaagacattcaccttcagcacatgcatcctgggccattgtccctactgccattatcctgcaggatgctgtggggtattctctgggtggccacttaggaatttactgtatttgtctgggtgtgggtgnnnnnnnnnnnnnnnnnnnnnnnnnnnnnnnnnnnnnnnnnnnnnnnnnnnnnnnnnnnnnntcagggagttccaagacccaacctgggctaatgtgggccaaaacctt

SEQ ID NO: 332573 - DNA, 385 bp, Homo Sapiens
  misc_feature (133)..(133): n is a, c, g, or t
  misc_feature (217)..(217): n is a, c, g, or t
  misc_feature (231)..(231): n is a, c, g, or t
  misc_feature (350)..(350): n is a, c, g, or t
gggaggatatccatcagccatttcaacaacatatggtaccgagtactctctgagtagtgcagacctgtcatctctgtctgggtttaacaccgccagcgctcttcaccttggttcagtaactggctggcaacanaaacacctacataacatgccaccatctgccctcagtcagttggggaccgtaccaccaccccttcgagatacccacaacacacgnggccacgagggggnagatctcctgttgacagcttgagcagctgtagcagttcgtacgacgggagcgaccgagagattcaccgggaacgaatttccactcccccattgggactcaccaggacctttcggccggnacggaaaggggaaagttccttcagttcaaggcggc

SEQ ID NO: 332574 - DNA, 429 bp, Homo Sapiens
  misc_feature (22)..(22): n is a, c, g, or t
  misc_feature (34)..(34): n is a, c, g, or t
  misc_feature (41)..(41): n is a, c, g, or t
  misc_feature (49)..(49): n is a, c, g, or t
  misc_feature (54)..(54): n is a, c, g, or t
  misc_feature (159)..(159): n is a, c, g, or t
gtgcaacccacccaaaaaaggnccaaaatttggnaattttnaaagtaanaaaanaggttttggcccatgttgaacccaggcctcaaagtttggttttcctccttggatcccaaatgaaaggtaatttcccttttccagggggtgccagttgcccacctntctgtccgccactccctgtgcccgtgttccccgggagaaggtcagggcctcccactggctcttccttggctgggagaggtggaggatgagtacttttagcaacaggttgagtgttctttggcttgacaaatacaggtcctttacctacatggtgatggattggcctgcgtctatgaacgccagaaaccgtataacccattccaccaagacagatttccttaaaagcagctgtgcctagaaggggacatttctcacagtgtgggccccagc

SEQ ID NO: 332575 - DNA, 579 bp, Homo Sapiens
tcttataagtcacttgaaaatggctttgcttgaccagaaaagtttgcatatgtatatgcgtggtttgtataaatgtggagtttctggttgaacttgctctgaactcatgacttacttaaatagccttttactactccattgatctcacctatttgattcctctagtaccaactcagtaggaaaatctcaccagcaaatcttaaagggaggccctgatccttggcaactcaaacatcctcatttagctgacatgtgccccgggtctttccaaaagtttccggttcacagttaacccaaagtcaaaagaacctaaactttcccaaaaaagcaaattgcaattgtttccccaaaaagagtttccaaaaggggtttgaaatctctgaatggcccccttaaagtttagcgggttttttgcgcctctggaaaaattaagaccttttgagagggttttaggggtgtccagttaacccgcgggggtttcttgattggcacccccccgtgtctcggccagaggggggttcccaaagggggaacccaaagtgtttccaagggtggggaagggtgcccaattttgtgggt

SEQ ID NO: 332576 - DNA, 364 bp, Homo Sapiens
  misc_feature (65)..(65): n is a, c, g, or t
gccctgaagggaacaaaaacccacctcctgattgaaaaactccctggtcctgtgagtgaaagcancaagatccttcccaccgtgtggaaggaaccctatgtggattcaactaggttgcagctgcaaaggctctgaagcacagcaatgtgtaacagggaagagaggggccatgaagccccaggacagaaaatatcctcccaggaggcaagaaagcaggtactcccaaaaagctatacctcagatgctgttggccttggcagtgagaagagttgataaaagtcagtaagtccattcttccggaacttgccagggaagacctagtcttcaaccaagtttggctcaagagtgtgttcccagggctgtg

SEQ ID NO: 332577 - DNA, 359 bp, Homo Sapiens
  misc_feature (49)..(49): n is a, c, g, or t
  misc_feature (78)..(78): n is a, c, g, or t
  misc_feature (134)..(134): n is a, c, g, or t
aaataaaggcaacctcccagcccgcaaaactgtgaagggtgcccatcangccttgggtttaaatccctgcaagccaancccatggccagcaaagactggccatttgctggcaactgtgcagctcccttgaaagngcagcagctgcctgctgtttgcaaacctgatgctgtcaccatcacctggctggtcccaagaggggaggacaaaggagtggaggtggtctgtgttgtgctggtctcactggcactggatgcctcggaggtggaggctgaggcagaaggggagggactcagagagggggacgtgactgctgaggaagctggaggcgctgtggaaatcacggttgctgtgttgttgga

SEQ ID NO: 332578 - DNA, 546 bp, Homo Sapiens
  misc_feature (33)..(33): n is a, c, g, or t
  misc_feature (54)..(54): n is a, c, g, or t
  misc_feature (63)..(63): n is a, c, g, or t
  misc_feature (86)..(86): n is a, c, g, or t
  misc_feature (95)..(95): n is a, c, g, or t
  misc_feature (101)..(101): n is a, c, g, or t
  misc_feature (106)..(106): n is a, c, g, or t
  misc_feature (168)..(168): n is a, c, g, or t
  misc_feature (182)..(182): n is a, c, g, or t
  misc_feature (299)..(299): n is a, c, g, or t
ttacaaaggggtttttccgggggggtaagaaantaaatggggtaaaatgggccnatcattctncccacccaaaaaggtgtcttttnaaaaggtcnaatttnggatnttcaacatttggttgggggaaaaaacaacaaacttggtcccccgggaaaattaaaataatgnaatatggagcaagnaactacaagggaatatggagcagaaacgcaaatttccacaaattttgttaacgcatgggtctcatcccaggagcaacgcctaggtgaaaatgtggaaaaccacaccccagcatcggnaacacacagaacacgagtgagcagcctccgttcactgcaagtactgagtcacacttacccagtccctgggattagaactcaccctctgattccagctgactctccttccacagcttcaccttaattcatgagctgcaacccttcctatgcccacttctacaggcacacttcaggtcttttccaaggtaaagtgccatatttattaaccatttaacatgtgtcaaactgtgctgctcttattagattc

SEQ ID NO: 332579 - DNA, 341 bp, Homo Sapiens
ttttttttatcattttaggaggtttatttgccacagttaaggatgtatgcccgggagacaggtctatgcctttctctgaagatgattctgagggctccaaatttaaaggggaaagggcaggatattcagaagtacacaattttcatgtaagagcgggggtagggaaaaatagtcgttcatgcctttgtccggctcagtgactctgcatttttttatataaggtgatatagacaaatggggcagaggaaaaatgcagggtatctgtattttacataagataaccatagaccaaaatggggccaggagaccaatccagatatgccctttgtgtcctggtgggc

SEQ ID NO: 332580 - DNA, 480 bp, Homo Sapiens
  misc_feature (95)..(128): n is a, c, g, or t
ctgacattttttgactacgatgcaccttttggtgctttactggtgaactctttacatgatgattatttatgatgtgcaaaatgtgagattagagnnnnnnnnnnnnnnnnnnnnnnnnnnnnnnnnnnttaatttgatgctgagttacaattcctttgaaatttcaactgttaggggttcacagccatttctcccaaactgatttcttggaactgcacctaggagagcaggtggcttgtgtgtctttttcactcttgtatgcccagcacttggcatggtgtctggtacagagtgggctctccaactacttgcaggatgagtgagtggcatgcaggcctggctgtgggcctggcacagagataatatgttcatttccatattttgtaggtgtcacaatctgaaatctggttatttcagattgacccttccagaggcagagatttatctagaatccttgaaaccttacaatttcaaaaaaaa

SEQ ID NO: 332581 - DNA, 497 bp, Homo Sapiens
tttttttgaggctctgagggtttattgtctgccccagtgaggctcctgggcttcctgggaggaactgggggaggaactgggggctggtcacacaggtctataggtcccattgtagctaaaagggggaggcatcgagcagtccctgtcctcagggatccagcgctggacgtagttggggccgttgtcccgaggccacacgatcacagtgtctctggatgccagggaggggtcctctgggaagaagttgaatggccggagcaggaagcccacggagttcccaggtgtggctgtgttgggaatgtcctctgagtgggggatgtgcaggaagcccaccgtcacccaggccaccaggtcctcattttcaatgttctcgttgttgtgaagaaactgctcaaagaccacgggcgggttgcaagggtcgttctggtggtagatgctgctgctgcacagctccgactcccggtacttggtcactgccagggggtaccttgcccagg

SEQ ID NO: 332582 - DNA, 443 bp, Homo Sapiens
agaaacctgtttttgtgtttagaaaccgtatttttcatttctaaaatttccatttgattctatctcaaacctgtccattctttcatatggtagattcttattttaaaatttcttattttgtctttaatcattttaaacatgtgtctgtagtttcttttagctgactctattatctgaaattgctgaggactaatttcatgtctaactgcttactcttcatggtagattgttttgtcacatgttttataattgcgggctgtgagcttatcttcagtggtacttgatctgtgagaatcctatgtagtctaggttgaaggtatttcttgccagagaaatttgcctttgcttctgcctgctgccccaggagtatccctagctgaggaatacttttattttgatctcttggcttgtgaatttctggccacacaggtagtataaatttc

SEQ ID NO: 332583 - DNA, 422 bp, Homo Sapiens
  misc_feature (118)..(118): n is a, c, g, or t
  misc_feature (191)..(191): n is a, c, g, or t
  misc_feature (238)..(238): n is a, c, g, or t
  misc_feature (293)..(293): n is a, c, g, or t
  misc_feature (381)..(381): n is a, c, g, or t
ttgatagatttaaattttctggtttacactaacatccaccagatctccaagccggtggacagcacagccatgtttcgtcaccaccccaagttcaggatgtgctcccgtggcccgcggnttttgagctggaactcctgcttccctggggaagacaggcacatcagtgtgctcggggtgtttgcagagagctngtcccctagggaccccacatggaggagtgggctcggcccctggggtnggtgttgggggcaggggaatggatcacacattgggcctcaagcaaaatgtatgantggtaagacttgaataaccgtccagggtttatcacactcagacgtgggattttaggtacaattttccacagtcttagggggaatttanccattttttgttgaactcttctcaataattttacacttttt

SEQ ID NO: 332584 - DNA, 568 bp, Homo Sapiens
tttttttcctagggtaacatttataacaagggcaaaatcattatgtaatggaattctctggggtcttcaaattaaaaaccacaaaaggaagataagaggaagaacaagaatcctgaggctcaagctgtctcatggtctatcttgagttgtgctctatggagcaagaccagatgtcaaagttgtgcacggcctgttccatatcccaagaaccttctgaaggctggaatccccttgagactagaaagggtccaagttcagtggggttttggagaaccattcatctggctgccctgggtgacagtgtcggtgctgtacaagctgtccaagaagactgaggacaattctgcaaccatattcctgtcaacagttgtctgggccatgccatagatggcacccattcctgtggtcttcgctttaggattcttcatgatttgagtgacagattctcgaatgtcctttaggaattgtatagctactcgtttccgggcgtgtagtaatgtgatgcagaaatgaatactgggtgggaactgcaactggttcaagttccaccccttagcagtcatcaggt

SEQ ID NO: 332585 - DNA, 489 bp, Homo Sapiens
  misc_feature (99)..(99): n is a, c, g, or t
attggataagtacattttgatagtacgggaaggcgaatacggcatggtgacaagaaaagcgccggcttggttaagcaggacccaccctggcagggctgncaggctgtgcccacttacccaggcaggggaccttggggccagctgcttggcctcactcaccctgtttcctcagctgcaattgggatgaacagactgcctgcttcggggttgcctaaaactcacattggttaatgatgtgaaatcttagcgcagtgcctggcatagagagaattctcattagatgatacctcagctgggctttaggagctacagaagaagctgcatctccatgagctcagcgtgtttctagctttcctttttgttttctattcaacctttcacccaactcagcttctcaatccctaaatgacaaaggtttgggaaggaagacttggaccgaggcttgcatttgtttctgagaattaaacggttatgttttcttcaatctaa

SEQ ID NO: 332586 - DNA, 619 bp, Homo Sapiens
  misc_feature (592)..(592): n is a, c, g, or t
taaatagagatggatttcactatgttgcccatagtagcaaacttctggccttaagcaattcttccacctctgcctctcaaagtgctcggattataggcgtgcacccacacccagccatcaattttctttgttcattaaatttatattattattcatttaaacacccccacacacaaacatacacacactttaagaaaagacatatgaaaaaggtaagtaaaaagcctggggtttaatttttgtttctaaggttcctcaagcatagctgaactaacactcttacttttacctggaaaatcatgactacagaagagtttaatttcaaaggccccgttaagaaaatcaaactacaatggaacttctttacaacaacctttcctactagtgaaattaagtttagggctggtctttttctggatctgatccaaagagagttaattagtgaagtaccacgaggacctcatggtaacgggctgggctctcggtgcagcgtcataacatgcttccaacacagccgctgccttaacgcagctgcatggctcattcctgaggtgagacagtgcgcaaagaatcacttagtctaagaacatcnttttggatttagttagtaattttgttc

SEQ ID NO: 332587 - DNA, 480 bp, Homo Sapiens
  misc_feature (349)..(349): n is a, c, g, or t
  misc_feature (359)..(359): n is a, c, g, or t
  misc_feature (369)..(369): n is a, c, g, or t
  misc_feature (384)..(384): n is a, c, g, or t
  misc_feature (409)..(409): n is a, c, g, or t
  misc_feature (414)..(414): n is a, c, g, or t
  misc_feature (424)..(424): n is a, c, g, or t
  misc_feature (440)..(440): n is a, c, g, or t
  misc_feature (466)..(466): n is a, c, g, or t
ttttttccgggaaaaaaagtcaactatgcaattgtatacactcccgggtgcatgtgaagaaggggaataagtgtacttatgtgtccagagtattaactggggctgtttttctgtgtttggatttctcttttgaggtatgtactcataacccatcccttgggaacgtaatccccacatttgatctaaagcacttggggcgtgcatgcatgtgcgtgcgtagcatatgtgtgtgtgttttcctcctcggtagccagtcaagattagtccttgttgggaaatgctcacggttttttaaagggttattttctcctcaacaaacttcaggaagtcacctatttttcccaaatcnggattttaantaattttccnatggggccatttaanttcttaggggtttttctttggaaantaggnttgtgtttangggaggcgtgaggttncccagggaggggtgtgtttatgtctnggcggttcggaatt

SEQ ID NO: 332588 - DNA, 485 bp, Homo Sapiens
  misc_feature (27)..(27): n is a, c, g, or t
  misc_feature (34)..(34): n is a, c, g, or t
  misc_feature (56)..(56): n is a, c, g, or t
  misc_feature (62)..(62): n is a, c, g, or t
gtgctgttctaactctgaacccccaantggcggnccacctggggttgttaaaccgnctgggnaaagggcctcctttggccccctgggtccccctgttaagcgcgtaaccgcagctcctcccagaccttgcccataactccctgacgctcctgggccttctgctgctcccctggggaagagagggtgaaggcagctccctttccctggggccccccacagtcccagactccctcacagtccagactccctcactaccaccccaccggcaaagggaaggcatggaaccatttttgttctgtgactccataaaaaccctctactgagggaagagagcagaggacagacagatcccagcctgcagtcacagagaagatgacgggtggggcctgagtggttctggcttctgtaggaagctacagggagtcagaacaagtctgagctactcgaagaatgacgggaggatacaggggcagctgtgccgaaat

SEQ ID NO: 332589 - DNA, 542 bp, Homo Sapiens
  misc_feature (391)..(391): n is a, c, g, or t
aaagaggccaaacaatacatttattattttcatttaagttgcttatcagggcaaccttccccatctgggaacaatctagcagtcatgtaagaagcacatgcccccacaattagtttgaactccatcctggaattgcagctggttgtgattctaaggtacaggcatgccaggagcctggatttgaatagtcagtgggattttgtcacttagtggaatggataataagccaaccaatggtcatcagtctcacacataaggagtgcaggctcgtagggtatacacagtacttttcttcaaaagcattgcaaatgacttgatttctctatgttgaaatttgaaaacccaacatctatctctctaacaccaaaggattgagccttccttgcctggnttggtgagtaaggagtgagcctcttataccaaggatgttaccctttggctgtgtgaggttttcagaagtatcagaagctgtatacatttcctgtggttgctgtaacaagtgaccaccaatttgttggagccttaaaacaagaaagatttat

SEQ ID NO: 332590 - DNA, 397 bp, Homo Sapiens
  misc_feature (68)..(68): n is a, c, g, or t
  misc_feature (284)..(334): n is a, c, g, or t
  misc_feature (348)..(348): n is a, c, g, or t
aaataatccagccagcacgctggttgacacaagttttagacctcctactatggctggccttgagcaancagctgccctctcttggccccagctttaccacatacaaatttagaggggctgaatggggtgctctggtcttccagctgtctcagattctccagtgctgcttaggaaccaatgggttccaaggacaggggataagcttgtgactcagggacaacagggatcagaaggggaaggggacccaggggcctgccccccagcagggcttcaatgcaaaaaannnnnnnnnnnnnnnnnnnnnnnnnnnnnnnnnnnnnnnnnnnnnnnnnnntgccttctggaatncttcaagtgttttaatccctttttcttctgcaagtcctctttttttcct

SEQ ID NO: 332591 - DNA, 382 bp, Homo Sapiens
  misc_feature (244)..(244): n is a, c, g, or t
atgagcaccgggcccggccatatttttattcttaaagaaccagaactatatgcatctagtgttccccaagttttcttctttgtcttttaacattccggggaaaacagatattgagtgttttgctgggatcatggcataggttccatatccttttggaccctctgtttgctgtaggccagttttggattctttggggattcatgggtcaccctattaacatatttcactaatccaccaatggaangggttatggtaatgtataacaatcaactcagggggtttttctaatgacaaatctttatcaatggttctataaggcttgaaaattaaattttaataaatttataccattgtggcataaaatataataaaaactttaatt

SEQ ID NO: 332592 - DNA, 505 bp, Homo Sapiens
  misc_feature (455)..(455): n is a, c, g, or t
  misc_feature (457)..(457): n is a, c, g, or t
aaaaaacgctgcatggaccatgctggccctcgggtgaaattcgcctctttaaacatctgtaaggccccgggaggactttttccccctggaaaataatacacactgaagtagtcacctaagtgttgttaaattaggatagattgatacaaactggacactttttcagccgttgaatccccccacccagcagctcccagacctgttttgctctgcctgcctgagggcctcgctccgtaccccagcttctgccccgctgagattctgagtcgtgtgtggtcattagttatgtatgatctgggtctcatctcctctgggactgtgaacaacttgggcacgtttctaacccacccaaaaccctgcacataatgtggatgaaccgatttgcaggattcggtataaatcctgaaaggcctcatccctgagcatcttgttcggttttccttttaggtaaaccngnagcactgctcttctgaagagcttgtctgctgaacgtgaacgatgggaa

SEQ ID NO: 332593 - DNA, 219 bp, Homo Sapiens
  misc_feature (96)..(96): n is a, c, g, or t
  misc_feature (163)..(163): n is a, c, g, or t
  misc_feature (190)..(190): n is a, c, g, or t
tttatattgtatttgaaaacagccctgggagggatatcataatttcaaggccaaactaaacatcatcttccctacaatctgcatcccccaaagganttgcaagatgagggggaacagactgtttctgcataatatacatagtttcatttacgaacattgggantacagactttctatacacacattaccnatataataaaaatgtacatgggcatgggg

SEQ ID NO: 332594 - DNA, 406 bp, Homo Sapiens
  misc_feature (25)..(25): n is a, c, g, or t
  misc_feature (45)..(45): n is a, c, g, or t
  misc_feature (51)..(51): n is a, c, g, or t
  misc_feature (76)..(76): n is a, c, g, or t
  misc_feature (159)..(159): n is a, c, g, or t
  misc_feature (251)..(251): n is a, c, g, or t
acacccactcctttcaaggttttcnatcccctcaaaggcaaaaangaaacnatctgttccctcaacctacccatgnaggaaagttgtcccgggatgccatcactcccaccctgtgtgtatgcaaccagccggattaaatcttgattggtggctattccnaaatgggagggagacgagtttgtattccaaggcatatgggctcaaggcacattccaaatcattgggtggacagttcttgaggcagaaccctngaaacagggatcccgttggtagttgggtggacagggtgtatcgatgcactggtagcttcctctcatgttgaagcacatgcgattgggtccacagtgcacattctgctccagacattcatcgatatcttggcatgtctttccattgtgtgtgagtt

SEQ ID NO: 332595 - DNA, 115 bp, Homo Sapiens
ttctttttgcatgtttgtttatgcaatcagcgttgtcatcagtttaaaataatgggttataagacagtatttgcaagcctcacagtagcctcaaatcgaaaaacatacaatacac

SEQ ID NO: 332596 - DNA, 386 bp, Homo Sapiens
  misc_feature (57)..(57): n is a, c, g, or t
atgccaaccaaaaacaaggctcaagcctagataatggtaagggaaaagaaaaaagtnagaatccggatcaggaggtgggggatgttgcagaaattttttaaaatatatgggggagttcatttattccaaagatgcattaaacacctattttgtattttacaagcctaattttggtcatttgaccctaaggtaggttcccaaaatacctaacagggaactaatttcatattaacaaagagctcagtaatttcctgctgtgagagacgaaccagctgtgctccccaggtagctaacatctatttcacccacttcttattttcaactggtaggtcccatccatccccacgagaccatacagtttggatattctgaatctgtaacatgtt

SEQ ID NO: 332597 - DNA, 460 bp, Homo Sapiens
  misc_feature (84)..(84): n is a, c, g, or t
atttttataagaaaaccaaacaaaaatgttaagcatctaaggacaaggtaaggagggtcactggggccccaagagtctgggganccagctttggctcaggctgagctgaaagaggccaaacaggccctcctccctcccggctccaccccgcaagcaccattccctccggctaagcaggcgcaagggaggcccagcgcggacatcccctgctggccggacacccgactccagtccaagtctcgctacatttccgccacatccctctctgctggacgtccaggtggaggtggcatccccacgtggacaagaaagtcaatgtcaatgaacaagcattctctccatttcactggcttcccaaatgtgtgcccagcttataaacagaagtgactgatgttctctccggttttgaatgtggagtgtttgtgtgtgttccttttttaaattaagttattccctcaat

SEQ ID NO: 332598 - DNA, 410 bp, Homo Sapiens
  misc_feature (366)..(366): n is a, c, g, or t
  misc_feature (373)..(373): n is a, c, g, or t
agatcagtacttgatttcattttcattttccagtctactttggggttctcgcagtggataatttagccaaaatgtttttcttgtggagacattagctgacaattcccaccacagactggcttgtacgtcctcccagggagacctaaacctgggctcccctcccaccgcagttcttaatattgtggataagagatccatctttctcattctggatacctacttagtgctcatggaagaaggggtgccctgcccagccccagctgcttaagttcacacctcctgttcaaaaagtcccggggcatgtcacgacgagaggagcaagctggtgaatggagtatggcgtgttcgagttgctgggaacttctnggggatngggggcatcgtctgtttgttgcctcgggtttctgggc

SEQ ID NO: 332599 - DNA, 643 bp, Homo Sapiens
  misc_feature (15)..(15): n is a, c, g, or t
  misc_feature (168)..(168): n is a, c, g, or t
  misc_feature (376)..(376): n is a, c, g, or t
  misc_feature (517)..(571): n is a, c, g, or t
  misc_feature (603)..(603): n is a, c, g, or t
atcaatccactagtnagttctgcatccctaggtacaatcattcagcaagtccctaacccacttaattacctcagtctctaactgatattttcaaacctttcctaaagggtacaatgaaagacaatgtcaaatattttgttgaggtctggatttagtacctaccacatntctctggtgaaccaatctaataaccctatgaaagaataagtctttacctgtgtacaaccctttacagtttggacacatttttaaattcatttattttcatttggacaaatgaaaataatatgttgcacaatactcaagtccatccccctattttcagcctccctttcgaatgtagttggggcctccaaatcctaagcctttccagagnttccgtagcatgaatctgtttcttggctttttcactgccaggttgggtttctggtctgctgagccagtgccacccaaccctgttcttcccttaagagttacatctcctatgagctaggcacagtggcatatacctatagtnnnnnnnnnnnnnnnnnnnnnnnnnnnnnnnnnnnnnnnnnnnnnnnnnnnnnnntgcagtgcactgtgatcacacctgtgacgagncctgcactccagcctgggcagcatagcaagagctcatctc

SEQ ID NO: 332600 - DNA, 415 bp, Homo Sapiens
  misc_feature (350)..(350): n is a, c, g, or t
  misc_feature (372)..(372): n is a, c, g, or t
aatgaagacaagtgaagaagattccagagctcgagcttgtgccgtggagaggaaattcatcgtccgaaccaagaaacagggctcttccagggctggaaatctggaggaaccatcggaccaagaaccaaggttgctgcttgctgttagatcaccaacaggccaaaggtttgtacgccatttccggccaacagatgatttgcaaaccattgttgctgtggccgaacagaaaaacaaaacctcctaccgacactgcagcatttgaaacaatgggaggtgcccagggaggcgattttctggaccttcaccaaattttctggcaagagttgcagaatcccccacaagtctgtggntggggcttcttcattggggagntggggggaagggttggccctggagttccacagccaccccagtt

SEQ ID NO: 332601 - DNA, 449 bp, Homo Sapiens
  misc_feature (265)..(265): n is a, c, g, or t
  misc_feature (303)..(303): n is a, c, g, or t
  misc_feature (349)..(349): n is a, c, g, or t
  misc_feature (372)..(372): n is a, c, g, or t
  misc_feature (405)..(405): n is a, c, g, or t
tttttttgccagttagatagttcctacactgtggttatttaccagactagaatcctctctgggaagtgtttaatcctgcatcaaatacagacaggaaagcattggcttcgagagaatcacagttcactgtaaaggcaagccgttgttcgaaaaggaccattaattcagaaggacccaaaactctggaaaggagaagtcatgatcactgctgtttcaggaacaaccttggtaacttgccagttacgctgggtgggtgggagagaantgggaacagctgggaaggggagactttcttaggcgcgntcgggcatagggcacagactttcactgctttcagagggacacgcantcaggacggaggagtccccaagntttcccagctggcaccggggtccacatgggcantttggaaacagggctgccctaaggagggcccacaacgcccaagc

SEQ ID NO: 332602 - DNA, 497 bp, Homo Sapiens
  misc_feature (14)..(14): n is a, c, g, or t
  misc_feature (36)..(36): n is a, c, g, or t
  misc_feature (59)..(59): n is a, c, g, or t
  misc_feature (76)..(76): n is a, c, g, or t
  misc_feature (176)..(176): n is a, c, g, or t
ccccccaggggccntaaaatataattaaaaaccttnaatttaataaccggaaatcccangccaaccctttaccaanccctaccagccattccagaaggtaaatgggggacctccaggtttggtggggcagggggttaccaggaaggtatggttttaccctaaagtttgggagaaanggatcaggtataaaaatatgaaattatccccaatagcattattagaaataggttaaaagacaaagtttaagtattttcataatcatatcactttttaagtgactaaactactaaagaaacatttagttaactctaaaatattgttgtaaaatttctatgtgttttgaggaaaaatacttttattccatcataaaattttcaacttagagaaacaatttgtttacgttgaaaaattataatattttcaagtaaaaatggttatactgacaatttattaaaacaataaataaaagttcttcccacactttgacacatgattag

SEQ ID NO: 332603 - DNA, 621 bp, Homo Sapiens
  misc_feature (36)..(36): n is a, c, g, or t
  misc_feature (58)..(58): n is a, c, g, or t
  misc_feature (65)..(65): n is a, c, g, or t
  misc_feature (83)..(83): n is a, c, g, or t
  misc_feature (139)..(139): n is a, c, g, or t
tgagtataaaggaaccggggaagaccgttccaagcnggagaacccgtccagagccatnccgggantgagtgaggaccctctgntcagcctgccatgtggagtaagcagaggctggtgtggggagcagcaggacccaagntaaaagagcctaggttggatccacactgggagggtctggaatacccaggctaaggcatttggagttcatcctgaagacttgggaatctagttttgaggtgtgtctactatctcttaattgagacaccatggaccctgagccactatttgaattaacactgatcaagtgattggaaaacacataatataggatatttacgtttcttatagtgtgtgcagaaatttgatacctgtatctgttatgagaacctggggtagtgatgatggtaatgacgtaagggaaggtgacaaagaaagtatctatcattatgctaagtgaaataagccaggcatagaaagacaaacatcagatgttctcacttatttgtgggagctagaaattaaaacaattgaattcataaagatggagagtagaaggatggttaccagaggctgggaagagtagtggggggctgagtagaggtggaaatggttaatgggtac

SEQ ID NO: 332604 - DNA, 370 bp, Homo Sapiens
  misc_feature (33)..(33): n is a, c, g, or t
  misc_feature (52)..(52): n is a, c, g, or t
  misc_feature (349)..(349): n is a, c, g, or t
actttgaggcttttggctgatctgtcccctcanatgggggttgggggcacanctcccttctgatgctccccactttcactgggcagagggcaggcacgtaggcagtggggagaaagaggtgaaagttagagggaaaggcagactttactgaccgcactgaggtcagagccaagggtgaggccagagggtccctctccccctggagttgcaatgaaaaggcagaaagacaaaccgaaggacctcaacatcaagcctacggattctcccatcaaaggtgccctagacagcaaggcccctgtccctctggaccttggtctccatatctgcaaaatgggcctcttttctgtanagtttcttccagcttcaaaaa

SEQ ID NO: 332605 - DNA, 504 bp, Homo Sapiens
caagcatattattactaagtgtctgagcatccaggaaagctgcctaaaacgctgctgaactgggctaagatgccagggctcctgcctccatcaagaagctgtggaattcagaagccaccattacaactgccagctccagcattaggcctgcactctaccaccatccacacagcaaaatggatgcttggatgctccatgccctgcctctctccccacgaaactcagttccaaattctagtcttgtgcgtttgcattcaatggcaggatttccatgccatcagaaacactagctgcaagagagtctgggaaatgtggttaagtttcccagcctctgcagcacgggaagggatgccacatggaatcccttgagtccatggggatcttggggccatttagtggctgcccccgacaggctttgaaggggaaggacctcaccacaggctccagtccccggcccagtgcctctgaggagggatggggagggtggggtaggggagaatattt

SEQ ID NO: 332606 - DNA, 429 bp, Homo Sapiens
atgtctctgagtgagaactcgttttttgcctatgatcttctgtgcatagacccatgttttctcagccttaatgacccagcggaagaaagatggtgctgtgcgatgtcacccatcctttggtggagggaccgcggttccgcgctcaccggtccgtgctggcggcatgcagcagttacttccactcaagaatcgtaggccaggctgatggagagctgaacattactcttccagaagaggtgacagttaaaggatttgaacctttaattcagtttgcctacactgctaaactgattttaagtaaagagaatgtggatgaagtgtgcaaatgtgtggagtttttaagtgtacataatattgaggaatcctgctttcagtttctgaaatttaagtttttggactccactgcagaccagcaagaatgcccaagaa

SEQ ID NO: 332607 - DNA, 442 bp, Homo Sapiens
  misc_feature (312)..(312): n is a, c, g, or t
  misc_feature (373)..(373): n is a, c, g, or t
  misc_feature (377)..(377): n is a, c, g, or t
  misc_feature (418)..(418): n is a, c, g, or t
  misc_feature (423)..(423): n is a, c, g, or t
tttttttaaattcaacattttaattgtgatataacttatgtaaatactttccaaaaagtatctaagatattccactgtacaacacatcaaaactatctgagaagcgggagacaataaagtgtaaataaggcacacagtttacactcgtaattgcatcctaaactgttgaatagttgatatttacaaccccccaataacgtttttgcatcctgaattagtccttcacatcttgatatttggcataatgttcaaacacactttatacacactgaccgctccttaaaccactcacaggatttaataaatacccgnaaaatttaggggggtttggaggggcttggtccttcctattttccttccaagggtggccggnaggnggtggggggttcctggtgggtgggaattcttccagggtggnggggntttacccactggtgggggg

SEQ ID NO: 332608 - DNA, 470 bp, Homo Sapiens
  misc_feature (345)..(345): n is a, c, g, or t
  misc_feature (349)..(349): n is a, c, g, or t
gtcctgagtacaggggacccgggggtacaagtagggtgagagtggggcccaaagccacccctcaaagacttgggctttgtctcggcctcttgggcttggatagagaacagtgccccagtgtgactccccccaaatatctgacctcttcgtccctgctctgcctgaatggatgtgtgaccttgagcaaatcactgccccttcctgagactcagttttctcacctataaaatgagaacaataaaccccaccctgcccacctccccagtgctgctgccaggtcagaggtgaagaagggctttgcacctggtgaagtaactaacccaaggtctggctttcattctacanctgnttctactgcatctgcagccaaagtctggggactctgcaggtgggacttggtccagaggggactggcaaagatgctttcagagctcccctcccacccccacgccgagccctatgcagtctca

SEQ ID NO: 332609 - DNA, 755 bp, Homo Sapiens
  misc_feature (73)..(269): n is a, c, g, or t
tgagatggggtcttgttctttcacccaagcatgatcacaactcactgcagccttaacttcctgggctcagggnnnnnnnnnnnnnnnnnnnnnnnnnnnnnnnnnnnnnnnnnnnnnnnnnnnnnnnnnnnnnnnnnnnnnnnnnnnnnnnnnnnnnnnnnnnnnnnnnnnnnnnnnnnnnnnnnnnnnnnnnnnnnnnnnnnnnnnnnnnnnnnnnnnnnnnnnnnnnnnnnnnnnnnnnnnnnnnnnnnnnnnnnnnnnnnnnnnnnctgagccactgcacccagccataaaagttttcaaaagaaagtgtttttaagttaaaagcaagggatagccatagttttcaaaagcccattaacagagaaataaagggacaaaatgtttttaaaactttccaaattgtttaagaaacacattaagtttgaacccacttaaaatttacagaggccaaaatgacaatattaacaaatggagacagtgggccgtgtgttttaaaattttttgttaacctcagaggaggcccatcagtctctctcggcccacaagagccatgcccacattttactaagtaaaggatataaacacggaaagaatgactctccacaattgaggggaagaagtactacccagcctaactaaggttagtacaaatttggtgagtcacttcctcttaggaggaagagcaaacatttctcgtttcctgaaggattcagagattctgagggaacacctgagctctcagcctgaatcaa

SEQ ID NO: 332610 - DNA, 633 bp, Homo Sapiens
ttttgaagctgacacatggtttctgttttccagaaggagagagaagtcatctacataagcacagcacatagtggaaagtgctaagtgtcctacgagaggtcagatcatatccatagaaaaacagctctcttttacttgcacacttaagaaaggctttgagaggaacacagcgtatttactgaattttaaaaatacagccagggtgaggagaattccaacaatgtttcatctatacttgggatggcccatattctgaatttttcccctggactgcaaaatctgtcctactgaaggtggtttctttaaatagtacaaaacccaacagacgaaatacgaataaataaaaaagaaacccttctctagtaatccagggaaccatcgccatctgctacccattacagagatcgatcggggagcgggggaatgcctgtcctgattgagctgtagctctacttgtggatttgccttagggcccagtatgggctattcttccctaaggaatgtaagaggctcctggagccctgttgtagataaagcaggtgctcatatctcacaataatacttcatccatttggcccactctacttagactttgttctttctgtttaattagaaggttgtggccgtgccgaa

SEQ ID NO: 332611 - DNA, 444 bp, Homo Sapiens
  misc_feature (38)..(38): n is a, c, g, or t
  misc_feature (386)..(386): n is a, c, g, or t
  misc_feature (403)..(403): n is a, c, g, or t
  misc_feature (422)..(422): n is a, c, g, or t
  misc_feature (431)..(431): n is a, c, g, or t
cagccatacccactcatttatatattgcctatggtaantttgaggcagagtatacagactgtatggcccgcaaagcctaaaatatgtactatctggttctttacagaagaagtttgccacgcaccttctggcttagaccgttaacatttgatataattattgatgtggttggatttaggtgtaccattttatttcttctgtttgtccctgtgattttgtttttgtttcactactttttgtttctgggtttattagtattccaaatagagtaatttagtattttattgggctatctatcctatatttttgaaaaaattcttggctctaggggttaacaatatttcatacctaactttttcatggttggacccttgctgttcgagttnctagattgtgcctcctncccttaaaatttcactggncccttgttnctgggcaggcaag

SEQ ID NO: 332612 - DNA, 441 bp, Homo Sapiens
  misc_feature (111)..(111): n is a, c, g, or t
  misc_feature (200)..(200): n is a, c, g, or t
caaagtagaattttattaagtgacagaaagaaagccctcagcatcaagaaaagactcaaaaataggaagcccatctgtaaggctgagccccagggttttttatgggcttanaatggggaagtgcatgctgtttggtctatgggtgggcttgggaaaaagcacccatttgactggttaaaaggcatccattcagaaggaanccagtcgagagagaaagtggataagatggggatggaagttctcactctggtcatggattctatctgaaactggcagcttgattttcaggctttaaactattccttggcttgaaggcggagtttcaccagggatctgtccttgtctacctaggaatttgtctgtctcctgtcactgtgataaagagacgtggcacatatttatgctttaaagactgactggagtcttagaagttaatacgaa

SEQ ID NO: 332613 - DNA, 701 bp, Homo Sapiens
cctgtatataagtggttggtggattttaacacaccagttattcctcctgtgaatgcctcagagatggtggaaactgaggctgatgggggaacaactttagctagggaaggagggtattggttctcacatttgacccacactcctcctgcccggggttgttcctctctgcctcccttccctacactgctgctgtcctctttttgacatttctatttatttatttttctgccctctcagatcagcaggagagcacctaggtctcagccagctctctatggcaggcctctgcagcagcacttgtgaagtgctagtgattcacttccttctctattgctcacccttctctttcttggcaggcagtccagggagtggaggagggtggagtatagcagggaaagccaggcactgcctcacattttcactggaagcactgctccctcttattggcaggccaagttttttagtctgagccatcagactagattttgccgttcacttgcagtgatctccctcagcagccctcttgcccttccatccaatctggcccctgtgtggaataccaaaacagcagttaaatttgtgcatgtgggaaagttaacttaccaaattctttttctgccctttggcaaattaaaggatgtaactgggaatatcttacaaggcacaaacatgctaggatggctaggaaagttctggcttat

SEQ ID NO: 332614 - DNA, 387 bp, Homo Sapiens
  misc_feature (98)..(98): n is a, c, g, or t
  misc_feature (245)..(245): n is a, c, g, or t
  misc_feature (377)..(377): n is a, c, g, or t
acgggtggaatcagactgaccagagttgaaatctggcttctccgccttgtggaacttgcagcaagccacttacccccacaaacttcagttcccaaatnctgtaagatataaataacaacactttccttaaaatgttgtcaacagacacagtgaggtaggcatctaaagcacagtgccttgggacatagggggtgcttttctggaaaggccagtaggagggtcattttaatatagtgggatccagnagctgtgggctcttgcaacacaggacaggccttgggttcaaatcccacaacaccacgtgctacggggacctttggccaaaatacttcttgccccaggattctggaggcctccattttctttatctgtagganggggagttgt

SEQ ID NO: 332615 - DNA, 819 bp, Homo Sapiens
  misc_feature (529)..(529): n is a, c, g, or t
  misc_feature (561)..(561): n is a, c, g, or t
gccatcatgcatcttatcaaatttaataacatgcacgccagtcagagcacatttgtgggcaaacctgggctatcagctgtcactttgatgcccaaggtttacatgtaaattgggaagctctgtgggggagaggaggagggcaggttgggggagcactgaactcagtccagcccatggcccacttagtcatggactctcacagataggcaggatcttggggaggtgggtccatccttatctacattttacagatggggaaagccaaacttgtccaaggccaccatggctaagggcccctgggcatccctctcttcacatgcttctcactcaaatttctgtcctgggaaccaagaaaccttgaggatggaactgctcccatacttccttctgaaggagagggagagggcagggctctgtattgggtggcaagacacctaggtccaggccccctcctctcaggatgcctgtctgtccccaagagtgggccatcctgggtaaggaagcagcagacactgacctgagctggctncccaaaggcctcctcccagcggctttaagggnaggctgggcgctgacccagggtgctgaacctgtatggcaccttcctcttaacactcagcctagctgcgggaactgggagggggaaagaaggggtcccgcatatttttgtcactcagggacctccatgactgatttggacagtgcttactggaaacgccctggacttggagccaggatttgtggtctgtgtggccttgggaaagtcactcaacagctgtggacctgctttttcacctgtcaatagggaagactagctgc

SEQ ID NO: 332616 - DNA, 755 bp, Homo Sapiens
  misc_feature (154)..(278): n is a, c, g, or t
  misc_feature (444)..(444): n is a, c, g, or t
  misc_feature (635)..(635): n is a, c, g, or t
  misc_feature (731)..(731): n is a, c, g, or t
  misc_feature (733)..(733): n is a, c, g, or t
aaagacagcatctccctttgtcacccagaccgttgtacagtggcaccatcctggctcactgcagcctcaaccttctgggcataagcaatcctcccgcctcagactcctgagtatctaggactacaggctcttgcacccaccacaccgggctaannnnnnnnnnnnnnnnnnnnnnnnnnnnnnnnnnnnnnnnnnnnnnnnnnnnnnnnnnnnnnnnnnnnnnnnnnnnnnnnnnnnnnnnnnnnnnnnnnnnnnnnnnnnnnnnnnnnnnnnnnnnngcatgagacattccctaatgtttagttttaaagagggggtggtgctatttatctccaggctcaaagcagggcatttctttcccttaggaatctgcgatactcccagtcaaggctgtttcttttctggccttttgtaaaactcttgtctagaaattaatgggatgangggaagctagggactcttctcagattatttcttgtgaaaacctcaagagtctgaatttacagggaaatcttacaattagctcgatgtggattacagagcggcaaacaaccttaagtggtagagctggttctgcaagatttttccaaccctttgtggtctagttttcatttttccccttttaaagttgtttntcactaaagctgtgaggacagtatagagttttgccttgtaaaattggtagtgagtaattttagaatagatgcttatgaagtctgtaaataaatagntnaagcgcctcgcctagttccacg

SEQ ID NO: 332617 - DNA, 625 bp, Homo Sapiens
  misc_feature (261)..(261): n is a, c, g, or t
  misc_feature (340)..(340): n is a, c, g, or t
  misc_feature (353)..(353): n is a, c, g, or t
  misc_feature (420)..(490): n is a, c, g, or t
  misc_feature (494)..(502): n is a, c, g, or t
  misc_feature (518)..(570): n is a, c, g, or t
gaaactatcctaagcatgttatggacattgtatcatttagtccttacagaattgtattgagtacttcagactttaaaaccaaatcactttgactccaatttagccattgtactaaccatactgtgatcaggtaacttctgaggtatagaaattcatgtgttaaacatctgagggattcttaaattttgatggatgctggagatatagtggtgagcaaagggagacagaccctcagatctcatgccacttacaacattttgnaagtacatagacattaatacaataaataccatatttaacagactgaggtcagtactatggaaggttgagttctgaggtncctttaattaaangcaagtttctggtcccgggcacagtggctcatgcctgtaattctagcaattttggaggctaaggtgnnnnnnnnnnnnnnnnnnnnnnnnnnnnnnnnnnnnnnnnnnnnnnnnnnnnnnnnnnnnnnnnnnnnnnntttnnnnnnnnncccattagctgggaannnnnnnnnnnnnnnnnnnnnnnnnnnnnnnnnnnnnnnnnnnnnnnnnnnnngtttgggcccaggagtttaaggctacaagtgagctatgattgggccactgtactc

SEQ ID NO: 332618 - DNA, 695 bp, Homo Sapiens
gctctgtgcccaaggtggcagacacctgagatagctctcatagactcccataagctcctccgaagcatcatcctcctgctgatgggcagtgacattctctcaactcagaaagcagctgtggagacatcgtttttggactatggtgaaaatctggtacaaaaatggcaggttctttcagaggtgctgagctgctcagagaagctggtctgccacctgggccgcctgggtagtgtgagtgaagccaaggccttttgcttggaggccctaaaacttacaacaaagctgcagataccacgccagtgtgccctgttcctggtgctgaagggcgagctggagctggcccgcaatgacattgatctctgtcagtcggacctgcagcaggttctgttcttgcttgagtcttgcacagagtttggtggggtgactcagcacctggactctgtgaagaaggtccacctgcagaaggggaagcagcaggcccaggtcccctgtcctccacagctcccagaggaggagctcttcctaagaggccctgctctagagctggtggccactgtggccaaggagcctggccccatagcaccttctacaaactcctccccagtcttgaaaaccaagccccagcccatacccaacttcctgtcccattcacccacctgtgactgctcgctccacgccgagccctatgcagtctt

SEQ ID NO: 332619 - DNA, 605 bp, Homo Sapiens
  misc_feature (514)..(553): n is a, c, g, or t
ggaattttgtaagatttattgagaatagaacaggcttcctgtcccctaaccctgtggtggatcctgagaagagggaagcctaggtctgggtggtgtgggctggaggcctacccacctgcaaatggggactcccaggcccccgcgggtgcatacagtgaacaaagtaattgctctcccctatcacccctgatccttacctgcctggcccccaaggtctcctgggggaccagagatccctgcatagccagggagccagcctggcccacctcaaggggcaggaagcaagggtagcactgtggaacctgtttttgtcagggggtggcaggcatgccctggcccccgaggctgaaagcccacaggtctgccacttggtcctggtgtgcccctgtatcccaggggacatggctgagcaaagtcctatgtgttagcctgaggtgcaagctggctcacttcaccccctactcaggagccttgatttgaaatagacatcgagaagtggtgattacatgaatgnnnnnnnnnnnnnnnnnnnnnnnnnnnnnnnnnnnnnnnngtgcgtgtgcatacagagatacatagagaaaggggtattattttgcccttac

SEQ ID NO: 332620 - DNA, 456 bp, Homo Sapiens
  misc_feature (392)..(392): n is a, c, g, or t
  misc_feature (408)..(408): n is a, c, g, or t
gtagaaactatcatttattgaatacccattatttcatatactgtactaagtgctttacattcatttcctcattttaatcctcacaacaaccctatgaggtaggtattatcaccatttacaaatgagaaacaggctcagaaaaattaggtcactttgtccaaggtcacacagctagtcagtggtggaaagtgggattttgtctgcttgcttgaaagcccattgttcttttttattgtacccatctagggtgaagccttgaagcaaaagggtaatttcactgccccaactctgcaaagagcaccaggggagtcgagggttgcccagcccacactcacccgctgggtagggggatgcatgggaagcccgactttgatgttggggtttttattccncttgggcattttcccngggggtgaccccgcctgaggcccttttgtacccccctgaggcattggc

SEQ ID NO: 332621 - DNA, 370 bp, Homo Sapiens
  misc_feature (327)..(327): n is a, c, g, or t
gtgtgagccactgcacccaacccacgcccatttttaacaaatgaagaaactgaggcttgcagaggttagatcatttgcccaaaatcacatgctggatccagaactagagcccccagtcttgttattctcaacactttttcctccacactacagggacttgatcttaacaccacagacatggcaagctcagagccaaaaatcaatatatgccctatttacttaatccagagtttctcaacctggggcacttaattaacattttgaggctgggattattctttgtttggggggtggggaggggcgctgccccacggcatgggtagggangttgaggcagcatcctggggctttacccataggatgttcacta

SEQ ID NO: 332622 - DNA, 241 bp, Homo Sapiens
  misc_feature (158)..(158): n is a, c, g, or t
  misc_feature (163)..(163): n is a, c, g, or t
ttattaataaactctgtaggattgatccctttgtcaggggtatttgaagaagaaagaaggggcaacaccataagccagaggggacagtatacctgaaatcctgcaactctggggagaaagctctgctttctctattgtcatctcacccccactctcangcctnccccaaccacacctgggctctccctccttcaccttaacttggtgacatgtcacttggcccattctggatttggcttcc

SEQ ID NO: 332623 - DNA, 392 bp, Homo Sapiens
ttattttaaattcttttaccatcacccgaatgtgtccatgtaagattcttttgttgttttaggataaaaggttgttgaggataatttatatgctatgcgaatttaaaattaaaaatggttgttttagctttataagagttttgatgaatcttttactcttcaaaagtttacattaaacttctgctcaaaatagtttggtaaattcatactctgagcactttctctactccaaatatggaggaactataaataatatataaaaagaaagaaccaaaaagactttgctggggcttaaacacaaaataaaccttttctgaggaagagaagcagaatgagaaaacaaggtggtcagagtgaggtagaagccacaggattactgagctccagacctg

SEQ ID NO: 332624 - DNA, 159 bp, Homo Sapiens
  misc_feature (62)..(62): n is a, c, g, or t
agaatctcaccatgttgcccaagctagtcccgaactcctgggcctcaggcagttcctcccgnttgggcctccaaagtgctggggttacaggcttgagccactgtgtctgaccgagtgaggaaattttaaattgctggggtgggacttaaatctaatgcc

SEQ ID NO: 332625 - DNA, 485 bp, Homo Sapiens
  misc_feature (55)..(55): n is a, c, g, or t
tctttcagagttctaagggcagggaaatttccaactcctgtctctattctcactntgctaatcacagcaatgatgacaaataagcaccccccagcgttttcccctaaccttgaaatgaaattgaaatcctgtacacacggttaaaatcccagaccctagaagtgatgcctgtgattaaaagcatgggctctggatagagagagatctggattcaaacccctgcttatcctatttttatcctataaacttagggcaagtgacatagattctctaagccaagtgttctcatctgtaacaaatagatttcgtagggtttttgtgatgataaatgagataatgtgatacgtgctcaataaatgttaactatgattagtaagaagagctccaggggatgtcttcctttgagtcatgcagctttgagaatgctgggatagctctaggtcaggggaaattgcataggattttaatccatcttgggatttaaa

SEQ ID NO: 332626 - DNA, 370 bp, Homo Sapiens
  misc_feature (281)..(281): n is a, c, g, or t
  misc_feature (295)..(295): n is a, c, g, or t
  misc_feature (334)..(334): n is a, c, g, or t
  misc_feature (347)..(347): n is a, c, g, or t
  misc_feature (356)..(356): n is a, c, g, or t
agtgctcactagtctgagtagtgtgatgaaatctcatgctgtcccactccatcccacctaggatgtgattcatccctttgtccagcttatccatgctgtaactgtatacatacactacctaccagttagtcacttagtagccatcttgattatcagatcaactgttgggtaccacagtgcttatgttcaagtaacaatccttatttaacttaataatggacccaaaatgcaagagtagtcatgttagcaattttgatgtgccaaagaggaagtcatgaagngtgtcctttaaggngaaaagggtgaaaggttctccacttaaggaaaaaaaggngtatgctgagggntgctaaggntatacagtgaggaa

SEQ ID NO: 332627 - DNA, 445 bp, Homo Sapiens
  misc_feature (332)..(332): n is a, c, g, or t
  misc_feature (428)..(428): n is a, c, g, or t
aaaattggtgtttctgttgggcaagacagttctcttccaagaacccagcctccttccattttgtagctcctccagcttcaatgtacggtttccaaagttgctgacaaaggggtaagaagcatgaaggattgtgcctttttcaggcacattttcaagggccatggctgggaaaggcacattgcatttctgcccacattccattgtttgtaactcagtcacatgactttgcctaaccacaaaggaacctggggtaatgggagttaactatgtgcctagggagagggaaattgagtttgggtgagtaaggaaccagacttttgccacagtacttnaacctccacccggggccattttttcctccgattttcttgattcttttcccaaatgttttccttttttcttccataaattaacttttggacccggantaggataaaagtatctt

SEQ ID NO: 332628 - DNA, 473 bp, Homo Sapiens
  misc_feature (409)..(409): n is a, c, g, or t
  misc_feature (421)..(421): n is a, c, g, or t
  misc_feature (454)..(454): n is a, c, g, or t
ttttatagcaattttatagcaattttctcctcccacaacccccttccccatctctagctcctggtaacacagatatattctctatttctaaaattttgtcatttgatatatctttttgtaaacatataattatacacacatatttctctaccacttatactttttcaaagtgctttcacatccttatagcaattctgcaaggtagccagggaaggctttcctatttcaggtcagaaaacagatttagaaatattaaatgacttaatgaaggtcacatgtttagcagtagaactaggaactgggacccaagtctgatgttcagtcctagaccttttctacttgcccggtctggcctcttcacaaggggtagacttggggttttaggaatccagaggaccttaggaagggngcaattgggagnaggtgagggacatgatgggccttactaccggangcaaaaagtgaatgttccg

SEQ ID NO: 332629 - DNA, 436 bp, Homo Sapiens
  misc_feature (29)..(29): n is a, c, g, or t
  misc_feature (41)..(41): n is a, c, g, or t
  misc_feature (58)..(58): n is a, c, g, or t
  misc_feature (299)..(299): n is a, c, g, or t
  misc_feature (411)..(411): n is a, c, g, or t
accaactccccaacatctcggaaggtgangaatcccaacantcaaccaaatgcgtganttctgaatcccctgaaagccaaaggtctgtgtccatttggtcctgctggaaactaaggtcccccacaggctggaagtactgaagctagaaatttctgcactgccccagcatacggttggccatcacaggccttgaggactctggtcctgtagtcctcagtgaagataattccatgggcatccaagtcgaagcccagctggacgattctgatctccccctgctcttgaagctccttcagctncggtcggccacggtcctgtcaggcacaaggctgtacacctggctcctcagcacgatgggcggcagcgcgtcctcaaacaggctcgcgggaacagctgcatgagttctgagancagccgcgcgcgccgaccctgggca

SEQ ID NO: 332630 - DNA, 235 bp, Homo Sapiens
  misc_feature (100)..(100): n is a, c, g, or t
  misc_feature (113)..(113): n is a, c, g, or t
  misc_feature (168)..(168): n is a, c, g, or t
  misc_feature (186)..(186): n is a, c, g, or t
  misc_feature (192)..(192): n is a, c, g, or t
  misc_feature (206)..(206): n is a, c, g, or t
gcataagcaccgtgcccagtgccagtttcttttcttaagctgatttggaggaagaaaagggcctgttgtttgatgactctgtggccccaggccaggcccntgtgggaatcctnggagtatacggccggggtttgtggcacaggcgaggggagccacaggttgaaggtnttgcaggtgcgcaggttncggggnttccttttgggttnaagggcaccttgggttcaagggattgggt

SEQ ID NO: 332631 - DNA, 454 bp, Homo Sapiens
  misc_feature (239)..(253): n is a, c, g, or t
agcagtcaagccctggatgagacacatcatgtcccacatttgaccacacacacagtaggctagcttgaaattccagccttaaagctgcatggcttttaacagccctgtcacacaccctcccttcaacctactaacaacagagaaaatatgaaaaactttaatttccctctgtcttcatcccccagtgtctatttacaggcgctgatgaagaaaagaagtggcaggaagcatgagccagnnnnnnnnnnnnnnnggcctgaatcaagaagtatctggattcctcctgaaaaagtgagcataaaccatactgctagattttggaaatattcactaaagctaaaacatggctcgctattcttcaattattttaaccctcctcttcaagaaggaaatcattactataacttaagcttctagatttgtaccagtttttagctgctctgtaagtttgttt

SEQ ID NO: 332632 - DNA, 458 bp, Homo Sapiens
ttaatgttacaagatatttatttacgttttaacttttggaagagtcccctaggtcttttaatttttacctcagtacagtaagtagcacggttttaactttttggaatgcagctttgttttcatcaaggttctccccgaagaatgatgctcacccaggccagggcacacagtgacccgtgcacaggatgcactgagcacacacggcactgggtgaaccaggaacagagcgagcagcactgcctgggtctgcaaaatatactttgcaggaaaagcaggtaaaatggaaaggtcacaattcagcagcaaacgtttctacattcattggagaaatcatttctaacaaaagctgctggttaaagccatggttttctggtttgcctacacattgtaatcacctgcacgactttcaaccgtatttttttcagatccagctccaaggattctgatttagttgtgcg

SEQ ID NO: 332633 - DNA, 473 bp, Homo Sapiens
  misc_feature (372)..(372): n is a, c, g, or t
  misc_feature (435)..(435): n is a, c, g, or t
  misc_feature (457)..(457): n is a, c, g, or t
gttttccatttgcttgggcaatttttctccatccctttacttatagcctatgagtgtcattgcatgtgagatgagtcctgtagagaggatacagttcgatcttgcttctttatccaagctgtcattctgtgccttttaattagggctttcagcctggtttgcattcaaggttaatattggtatgtgcaggtctgatttcatcatcatgttgttagctggttatcacacagacttgattgtgttgctgctttatagcattactagtctacggttcttaaatgtgtttttgtgatgggttgggtaacacaggctttcctttctatatctagcactcccttcaagacatcttggtaaaggcaaggctgggggggnaaccaaaatactcttaggcatttgccttggtccttaaaagggatccttatttctcccctcccnttatggaaggcttaggttttgnccaaatatggaaattc

SEQ ID NO: 332634 - DNA, 457 bp, Homo Sapiens
  misc_feature (399)..(399): n is a, c, g, or t
  misc_feature (411)..(411): n is a, c, g, or t
  misc_feature (433)..(433): n is a, c, g, or t
tcttttcaacaatggcacatggaattacctgcacacagttttcagggaaagaaaccaaaaatggaaatggcaaaggaggcccaccaggatggccatatcaaaggaggatgattaaaaggggcaagagggacagctacacaaacttgctcctttatgtgactttccctccacctgtctattccttaaactgtaagacaaagccattttcaaaatacagttccaaaactgagccagaccaaatttatcctgctacaaataggaaaagaatatacataggaggcactttagtttaagggaacagacaaaaccatcattatattcccaatctttccctcatctccaagcctttttgaggccaagtcttctatctggcaccttttaacatgggtgtttattgcngactgggggttnactcggggattgggggggagtncaacctctgctttggtatttatgg

SEQ ID NO: 332635 - DNA, 502 bp, Homo Sapiens
  misc_feature (232)..(232): n is a, c, g, or t
  misc_feature (306)..(306): n is a, c, g, or t
  misc_feature (404)..(404): n is a, c, g, or t
  misc_feature (413)..(413): n is a, c, g, or t
  misc_feature (424)..(424): n is a, c, g, or t
  misc_feature (446)..(446): n is a, c, g, or t
  misc_feature (462)..(462): n is a, c, g, or t
gtatgttagacaggcaagctggttaatttttatgcctcagtttgttcaattatactaaaggtacttgaaacaatatctctaaggaccttcctagctctaaaatcccatgattctgtggtgttttaactttctcatttttttctactgtgctgacctcatccattgagtaaatatttacacacctaccatgtgtttataactgctatgcatgtgagagaatcaaaaagtagangcacaaagtttctgcctttgaattgtttatagtcgggtctgggaaacaagagggtatctgtatagttaacactngttatttccagtgtgttcttattctgtccagaacaggtccctattcttcaggggaataggcagctactttcagctggcaacctaattttctgggggtntgggggacngggttggcccnggaacacagtattattactccnttttttttatggttcntattattggtgggggatccccaccgtaggttctgtaggtt

SEQ ID NO: 332636 - DNA, 663 bp, Homo Sapiens
  misc_feature (589)..(590): n is a, c, g, or t
  misc_feature (631)..(631): n is a, c, g, or t
  misc_feature (642)..(642): n is a, c, g, or t
gctgattgtctgaatccacagattcatgaacctcttcatcacttgagatactctctgctctggtgttttctacaggtgtaagcacaggaggaccttcatccaaatctgatatcaactcaaggtctggatcttgttcactggcaaggaccatgcaaggtgttgttgattttcgcctgcttgccattctgatgttatgaggaaaagctcagtggtgattaaaaagcatcgaggcttaaaactgttcagtgttcttcatttgaaaacaatggcttttggttcttcaagtcccatttttgtgctcaacaagtctcattagcagctttctcatggtgcaatcaagtaaagagcttattgtttggcagataaaatactgctgaatttctgaaatttttgaagcacaactcccaatcacttgccacagcttccttagcattctgttctttgaaatggaagggtatcccttctagttagatgtttagctcaggccatcattaccaacaggtccaaagcagcagtctgtcttctcctttccgtgccggccgcggactctgcgctccagttcccacccgcagcccagagtctccggggnnctggtcgcggaagccgcgcgccactacctgcaggggccgcncgcctcttcangccacgccgccgccatcttgc

SEQ ID NO: 332637 - DNA, 452 bp, Homo Sapiens
  misc_feature (43)..(43): n is a, c, g, or t
atcacttttggtgctcctacagaaaagcccaaggggggtaggnagggacagagctttgaataactgctttctaacactaaatgtggccaacaggacagagcacatcacacgtatagggcaggtgtgagggacagtggctaagaattgcctgctccctctgcatgctctttcttgtttccaaagtccaatcaagtgatcctgggaaacaaatctgtctggattgcggagggtggttctgaaagaactgccaagacgttaaagaagggtgaagagtaggcagaatataagtagctaacctgagtcaagactctcaaaagctagcagcctgatgacaataggatttatttcagccaggatagtgtctgtctgtgagtgcatcattttaagacagtatgacttcatgttgttacaaactatgtatagtatgtatgttttgtgggttgtatatatac

SEQ ID NO: 332638 - DNA, 560 bp, Homo Sapiens
  misc_feature (512)..(512): n is a, c, g, or t
  misc_feature (523)..(523): n is a, c, g, or t
  misc_feature (529)..(529): n is a, c, g, or t
  misc_feature (550)..(550): n is a, c, g, or t
tctatctgaatgatggagaaacttatttatttctacataaaagtaggttcaactcaaatgagtttatttattaggaacttttgaaacactgaggttgaacagagaatgggaactagacagatcatttcagcatagatggttactttccctcttgccacagactctgcaggaaatgtcaattactgctttctttctccattatgttcaatcctttccaaggcagtcagagagctctctcccttcccattaagagaggatcttctccggtagcctttgaactgggaagtggctttagtatttgcaagtgtagatatacaaaagctcttccctcctcttaccagggttcatcgggaaggaacccagcagcagggccctggggtgttttctgggatcctgagacgggaggtgcccatctgcggtttttgtctgggaggacacagtttcttttatggggagacatactttcaaatccactgcttgtccaaccgtacatattgttcttctttttggcntttttggggantggganggaagtggaagttgaaatccntacaagaccc

SEQ ID NO: 332639 - DNA, 537 bp, Homo Sapiens
aggaaggcgacatttttcttctcgttgctcagtttagggcactactcttaaaaaaggaaagttaacaaactggaatagagtcagagataactttgagaaaaccgatgtcattaaactggtgtctctggacctgaggtttgcactcacatttccatctggcggccccataagcaatctgtcctacagataactcgtcctacacaaaacttagtctcttttcagctcagctctctcactctcaattatatctccttacttccatattgcactgttgtacactcatttactcagagccagaaacgtcagcgtcatcttggatttttcttatgctctttctctctctagtcatatgccagactttaaactctgcttgaaagctttctcataagctctttccttttccctttctactgctttgcatttgctacttaacccttttcttcaggctgtttgctttccagtccatcgtatcgtctgctgttactcttctgcgtagtttctgttacttgttgctgaactaaaaaaaacaaacaaaca

SEQ ID NO: 332640 - DNA, 635 bp, Homo Sapiens
tagcctcatgtagcatctcccacttctttggacctcatgcttaagcctgcatgaacttcatcccctctaatctgtcatgcccgagtacttacctggaactctcttctccacccacccaaggctggttaacacctctttatccttcagtatgcagctaagatggcccctcctccaggaagccttccctgacttccccatcacatccctgacagggtaaggtatctcccccatggggctccccatagtaccccacttttattctatcattagcatttttcatacatattgcctgttttctcagtctggggcaaagaacatgtactcctgtgcctgacacaggtcctgggcactttgtcagtgctcaataaatattgccatggggattgctcatcactcacagaaggcttctcagaggccgtaacattttggctggactttgtgagactggcgggcatttgccaggttagcagttttcaaccagggtcatatacgcatcgaaatcacccgcgcaactcttcccaaacatggatgtccagccccgcctgagcacgctgaatcagaatctccaagctgagcctgggcaggtatagttttcataggtttcacaggtgattgcaaatgacagcatgggctaa

SEQ ID NO: 332641 - DNA, 549 bp, Homo Sapiens
  misc_feature (49)..(49): n is a, c, g, or t
tatctttgcaactcacttttattgtttctttataaacttcctctcccantggaggaatatattgttatagtcattagcttatctctttttttaaaactctatgctaacagcaagtggagccaagaggaggaaaacataagctacgatagaaaggcacttagaacctgttaaaatactgacgtcctggaatgtgcaacaacacaccaatgacaaccacaaaaagtacaccggccctgcgattcctggtccgtcaccgagtcgcatgctgagctcgtcggccttccagtgccctgttcctccgctctgctcaagtcgcaaacccatgacccctccaggatcttaaggcctggggcctcacaggggtggggggtgctcagggcctgggtggggccgaagaaaggagaccagctccctcctaccttgctcatagccccttcgagggcgagtagcagtgtggctgggacctgtcaggcttggagtacaaagaccagtggcaaggtggggcgggtcagggtgaccctcttggacagaaggggcagtcgggagagg

SEQ ID NO: 332642 - DNA, 438 bp, Homo Sapiens
gctctgcacgaatacctggtgagattatcaagtcaatacctgtagccggcacctttttaatccaacagcaataagagaaagcaattgcctgcccattaccctcaaagcacaacgacatccagtcatgaaaataagtcaatgcattttttgtttgcatcatgctataatttttaacacacaaaaactctcagtacatgagaaactcatctcacattcgcctcctggctaagctggcttgaagaagcctgaatgaagttcagctcacggtgaatgctgagctgtctcatgtggttctctgacagcatggcagctgatgaagcttactatctgaacacgctacctgtactaagactgaatgtagcttttgtcatcaataacagcaatttaggtgggcttctctgaggcagctagatgatgtaagtgtgggacagaggacag

SEQ ID NO: 332643 - DNA, 384 bp, Homo Sapiens
ttaagcatttaaaaacctttataatttagtctttataacaattatgtatgctgatttcacatccattttataagttgagaaaatgaggtttaaggaagttgggtaccttgcttgaagtcacagagtttatgagttgttgggctgggattcaactccaatttttctgattttgaagtccatgcttttcctagtagcacatggatttttttcactgaattttacagcagtaatcttcctcatttcctccatgcatggtggccagagcctctgagtttgtctttcccccttccaatctcttactgcttcaatcaacccttctcaatgtatctcccctgccagggttaattttgcttaaacatgtatatcccaaaggtataggtcctc

SEQ ID NO: 332644 - DNA, 452 bp, Homo Sapiens
  misc_feature (339)..(339): n is a, c, g, or t
  misc_feature (349)..(349): n is a, c, g, or t
  misc_feature (401)..(401): n is a, c, g, or t
  misc_feature (425)..(425): n is a, c, g, or t
  misc_feature (432)..(432): n is a, c, g, or t
ttttagagcaatgaacacaataccattttatatatgatacacaagacaaacatatttgaaaggtacatccacaagtatgcaaacattcaaagttctggaaagacacacattaagccatgacaaccacagaagggctaaggaaaatttccatgttgaaacacttctggggccagggtgtgatagctcacgcttggctggggcagcttttctttaatacacaaactgagggaaatgaccctgcaaatttcagggcttaggaaagcctttcatacgggaatcacaggatggaaatgcttcttgggggaaattcaccatggacacagcgccacggtcataccntgctctgccngggggcctccctgggggggtgatgtacacacagcgcccctcccgagcttttncagccagcatttcgcagggatggncaaactntttcaccaaataggtctttc

SEQ ID NO: 332645 - DNA, 360 bp, Homo Sapiens
  misc_feature (123)..(255): n is a, c, g, or t
  misc_feature (294)..(294): n is a, c, g, or t
  misc_feature (302)..(302): n is a, c, g, or t
  misc_feature (347)..(347): n is a, c, g, or t
atgagccaccatgcctgggccatcagtttcttaaaaagtaaacacatatctgccctatgagttaggcaattccactacaaggtatttaatttacccaaaagaaatgaaaactttcataacaannnnnnnnnnnnnnnnnnnnnnnnnnnnnnnnnnnnnnnnnnnnnnnnnnnnnnnnnnnnnnnnnnnnnnnnnnnnnnnnnnnnnnnnnnnnnnnnnnnnnnnnnnnnnnnnnnnnnnnnnnnnnnnnnnnnnatttctggcaaaaataaaataaattaaaaatttagccanttacagtnggcacaggctgttagttcctactagaggggctaagttgggaaggntcttgagtccggg

SEQ ID NO: 332646 - DNA, 506 bp, Homo Sapiens
  misc_feature (199)..(200): n is a, c, g, or t
  misc_feature (402)..(402): n is a, c, g, or t
  misc_feature (426)..(426): n is a, c, g, or t
  misc_feature (456)..(456): n is a, c, g, or t
  misc_feature (469)..(469): n is a, c, g, or t
  misc_feature (491)..(491): n is a, c, g, or t
aagattaaatttgcatgcaatgaaatgcacagatctgaagtgtaccgctggtgagttttgacaaatgcacacacctatttaatgcaaattcttgtaaaaatacagaccattattaccaactcagaaatctccttcacaccttttcagctaatttcacacaccattttcttctattagaggcagtcattcttctgatttnntttttgttttgcagtaaagattactttgacttcttctatacttcataaaaatgggaatcatataggtatatacttttctgtgtctgggcttctttaatttagcattgtttctgagagttatctgtgttattgtgtgtgtcagcaggtttattcctttttctcattgttgaattgtcttctgttatatggtataaactgcagnttgcttgggatatctcgtgttgangcatacccggggctaggtttcaggtttttngttttcaggatgnacactgggcccctgggggttcnccggggattgggtcc

SEQ ID NO: 332647 - DNA, 790 bp, Homo Sapiens
ctaaaactaggattgagcaagcatgcccagatataagatcaacctctgttgatggaaacctacatttgactaaagatcctcatcagcagtatggaatagttattttagttatttgtcactcaaaattttgctgtcttttttaagaaaatatttattattagtagagaaggaagtcttctgataaaactagcatatcttttaggagatttaaggcattatgctcatatcactttgagttctgtgttttatggtgggtagaccacagtctgacggacttatgaaacattctgaatcgtgagggctccctgagacccagttaagtattcgcccagtgaggtttttggccttctcctgtgcctttgcctgccttagctctctctcattggttggtgagtcaagttgatccttgcaagagctgctgtttattgtgtgctcatgattcagccaggcactaagtacttctcatgaattacttctgttccttacacgaaagcatgtaggaaatgagaggctgatatgggagctgaatctggggctgtcttactctgaggtctgggtcactccatataccatgctacctctctggttcactctagtaaatctagcttctaaccaaggtgttttcagttgttgatgagaaaagcctctctgtgtattgactccagaaaagcattgatgctcgtccaaaggtagtgagttagctcagttgattgttcacagtcagttacggatcgaacagtctcgttctagtctttcctcccttactattgcacttgactagtctttaaaa

SEQ ID NO: 332648 - DNA, 205 bp, Homo Sapiens
ctcctctcttcctttcttctttttcttcctgtttctgcagacccttgcccttgtgtttaattctctcatcatgtatgtagtccctgctgtttgctcattgcataatcagcgctagaggaaagccaagaggtaaagtctcatcattccttaatgatgcaggtagcatccctgagctcctgtctgctttgtcactcatgttgtaaag

SEQ ID NO: 332649 - DNA, 395 bp, Homo Sapiens
taaggaacttgtgttataattttggtaaaagtataaacccactccctctggacaatacttagcgacagttgctaaagggggctcctttttaaatgtaaggactgaaatggatatacttctaataagtaaatttccaacacttatttgctccagcccctcacccatgcgccctccccctttatcatgttaaacagcctttttgcttttcttattcctcctctcctggagagctgtgattagaaaccacacccacccttgaatgaagtgcttgaactgggggagggaggctggctacctgtgaacaaacattggcccaaataagggaaaataagtgttcctggactttggactagtttatagccagatattccaagagcagcaagacgttgctctct

SEQ ID NO: 332650 - DNA, 636 bp, Homo Sapiens
ttttttgccatctaagaatttatttagataatcaaggcatgaggtaacaagttatttaggtaataacctaaatgcttatcatggcaataggaagttaaagggcaaatgtgggagacatttcaaaggggaattatgattatgttaacctaacaggagagccaggaggaggcacctgcttttttcttctcaatgtcttttgcctccacactagatcgtaacctctggtaaggctgggagatatttttcaatctttccacagtgggatttaacactatcaaggagatctcatgctggtatggcttcttagtaaataggaaacaaagaggtggctctggtattgaagtgaatggactcacacagacagtggtgctggaaaaagcagtgtggggtcaggtccacaaaccagggaatgggctgagagtaagcactaggaaagatgagttcaaatttcctaccttcttccctttaaagcctcattgcctgccctccttcctactcagtcccctcattcacccaacaaacactcacacaggcagaaccttcaatgctctgaatttttccttccagcagactcccatccatctgtgtgaaatctcacccactaagagcccccatctgatgaataagtctcactga

SEQ ID NO: 332651 - DNA, 538 bp, Homo Sapiens
  misc_feature (253)..(253): n is a, c, g, or t
  misc_feature (298)..(298): n is a, c, g, or t
gacagtacacgtcacactgtatttttgtgagcaccttaatgtggtttccccagctctccatggctgactgggacctctcaagagccaggcccaggtctgtccatctccatgcccacagggtctgggccagagaaggggctgaagaaatagtttttggtgagcttctgggtcctgtgagggatcttaactccatgcccagctgagctgaactctaattctccgcatggtttggggttggtggggctcctgggtngccccggacacaatggcaaatatgaaggctgcccagggcctgganggactcagcgacccctgcctctgccatttggctgtgagtttctgtaggagctcatgtggtcgccggcggaacttcttctgggtgaagtagaagaggatgggggtccagcacgctgttggcactggcaaaagggcgcgtgcctttgtaggccgctggaaaggcctccaatacagtgcagggggaccccgtgtcgagcgcacttgcaagtaagctgtcttggggaaggtgaaaaggaaggaa

SEQ ID NO: 332652 - DNA, 481 bp, Homo Sapiens
  misc_feature (74)..(74): n is a, c, g, or t
ccgtattgccttggggtctgtggccgtgtagctttcccaacattgtaagggctcccctaaaacctcgtgttcanggaatgtaaatgcgggggaagcatccaacctgcaataaatacctgtggatcaaagaaatgggcccttcaaaaactgttttggtgaaacaaatttaatcctgtgaggaaagagacagaagatggcgaaagaggttaaaagtttgcggttgcttaatcttgactgtcaagaccctactgaacgaaaacaaaaactccttgcacagccttcaaggcccttgatacctggtccaagcccactttccagcttcatttatggccgcccttaacgacagccacgtgccctagtccccagccatgtgaagaggcttgctcttgctccagtctactcagctccttctgtggtaggtactgttccctgcgcccagaatgcccttcgacccagtcactgttttatctctgacttgtct

SEQ ID NO: 332653 - DNA, 295 bp, Homo Sapiens
  misc_feature (232)..(232): n is a, c, g, or t
gctccagcattgcacggactgcaagcgaggcacttgctaactcttggataacaagacctctgccagaagaaccatggctttggaaggcggagttcaggctgaggagatgggtgcggtcctcagtgagcccctgcctccctgaacataggaaacccacctgggcagccatggaattgggacaatggcacaggcatccagcgtaaccgcactgtctgctatgacctcagcccgnctgccctggccacccactatatgccctatggcatggctctcactgtcatcggcttcctgctgc

SEQ ID NO: 332654 - DNA, 510 bp, Homo Sapiens
tctagtctggcattgctaccaatgttatgctacctttttaaaaaaatgaattggatcatttctcaccatttttcctgttctgtaatagtttatataggacaagaataatctgtctttttgaagacatagtagaacatgtcatttggtggtggcagaacttggcattaatttttcttttgtgttaatttatttgttcagattttctacttcttcttgggactattttgccaaaatatttttcagaaaaattatgtgcatattctgttttttccaatgtgttgggtaacataggtgtgctaggtcagcatagccataataatgctgtgtaggtaaaccaccccaaactaaggtataaaggcaacatttattccaggtttatacatctgtaagacatttgggctttggcggatcggatctatgctgggcttggctgggcttggctggccttggttccacatctgaaaatgtcagatctcttttggatcaattggctaccagagacacattctt

SEQ ID NO: 332655 - DNA, 330 bp, Homo Sapiens
gcagatgaaaccaatgcattctttattgcagactgaagcttaggggctcactcactgtgagctctgatttgggggcatctgtggctgcccacactttccaagacagacaagggcaaactctccaagcagaggagaaaacaacttccagaagctgccccttcaaaggcctgaggtgaggacctggggcagcaggcagcttggcatgcaggggttaaccagaaaggccgggtctggagggctgggcacacctaaccctcatctcctgggtgactgcaggtcacactcccttcttcaggagtgccatgcagactctggaacaatctaacaggc

SEQ ID NO: 332656 - DNA, 488 bp, Homo Sapiens
  misc_feature (279)..(279): n is a, c, g, or t
  misc_feature (329)..(329): n is a, c, g, or t
  misc_feature (470)..(470): n is a, c, g, or t
ttttgaaaagtatataacagatttctttattattatttacaatcaagttctgttggccaacataatgaaataaataaaagatgtgccctggcctgtgaatttcaactctccttgacttaagttctctgaagggcaaattggaaagcggtgatcaggcagggaagagagggcaggtggaggccaggaccatcggtgggaaggccgcctgactcctctctcaccagctctaacactcacatccccaaatgtccagagaacaagcatgggaaggaaaaaaantaaagtgcaaatttaaaagtgattaaaaagggttttttcgcacaccccanttgacttaaacttttatacgttgggtaaaataggttaaggttaaatgtttttccttgggccttcatcacaacccctggaaacgggaaagatgggcgctgctgtgctttctgaggcctagggtttctttgcccttaaaggcnccaaggggcattcggaca

SEQ ID NO: 332657 - DNA, 377 bp, Homo Sapiens
ggattccctttatattaacaatacctgccctcaaatataaacacaaatcaaatataaaacacccttgtaaagctgtgaattctccccaaccaaacattcctccttgtaccacacgtcaggtgctagtggcatttggatgcaaaggtttaactcgtgctaatctggacaagccaaggcggagactctgattgggagacttcacagacactaccaccagtgggctgctgctacttctgctacctccagatgccgctgaaaggaaacatatgatgtgatgctgatgatgtcagaaatctcttaacaaagattaatttataaaataagcagcaaaaaaaaggtagttaagcattattctgctttccagtgtctatcaagca

SEQ ID NO: 332658 - DNA, 405 bp, Homo Sapiens
  misc_feature (285)..(285): n is a, c, g, or t
  misc_feature (318)..(318): n is a, c, g, or t
  misc_feature (369)..(369): n is a, c, g, or t
aaacaaactataggactggatttctttttgagaaggataacattgccaggaaacttgaatgttacccttcaaatttgggatataggagggcagacaataggaggcaaaatgttggataaatatatctatggagcacagggagtcctcttggtatatgatattacaaattatcaaagctttgagaatttaggaagattgggtatactgtgggtgaaggaaagtgaggcgagggagtcaggaaactcagccactggttgccttgggtagggcaattaaaaaggggtnggtgaagggcagatatttgttaaactacaaccnggggaccctatgttcaagggactttttaacccctccctaggaagcttcttntgttgttgccagtttccagttgagccgcattttttc

SEQ ID NO: 332659 - DNA, 464 bp, Homo Sapiens
  misc_feature (328)..(328): n is a, c, g, or t
  misc_feature (401)..(401): n is a, c, g, or t
  misc_feature (414)..(414): n is a, c, g, or t
tcattctccctctttcagtgtggtcctcccttagtgttcctatctcaggaaatgacaccctgttgtgttattcttgactcctttcataccccgcatctcatatacgtatcaggcaatgctctaccttcaaaatatatccacatctgactactgttcttcacatccaccattattattaccttggggtttaactaccagtttttccttggggttattgtaggcttcctaagtgggtcctaagtgatctttcctggcttccattcttcttctgctccgtataacattgaacacttcatagtacacagaagctatatgtagaatgtatganccttgtaaaacataaattatgttaatttgtctgtagagtcttctaacgacttccttttacacttacatacatngcagttttttccngttgcttgcaatttcctaatagatccattctgtttatttctcttttctgc

SEQ ID NO: 332660 - DNA, 772 bp, Homo Sapiens
  misc_feature (29)..(29): n is a, c, g, or t
  misc_feature (44)..(44): n is a, c, g, or t
  misc_feature (51)..(51): n is a, c, g, or t
  misc_feature (116)..(116): n is a, c, g, or t
  misc_feature (176)..(176): n is a, c, g, or t
  misc_feature (607)..(607): n is a, c, g, or t
  misc_feature (672)..(672): n is a, c, g, or t
  misc_feature (707)..(707): n is a, c, g, or t
gtcttagtgggggtttccctgcaatttcnttgggtttacccccnacaaaanttcctaacttcccagaaaattccaaaaggttcttatggtgaagatgcaagaaaaaattccctccnttttctggtaggagtagagggaaggtaaaatttggaaatacgtagcagagtgttcacaanaaaaggcctgccctgtaaggaaaactaattcaacaggcccttatgtgacctgggggaaaggcaaatagaggattctagcccttccttagccttcttgtctcatttctgaaagtcacagcccagggattcagacccactaaaaaaaactgagatttaatcataaagattaaaaaacaattcccctcccccttcccaacaccttaccaccatataaacagggctccagggataaaataacagtggattacaactgagagagctgcaagacacaagctgtttaaaggagctcttaggaaacccaaaaacaacagaagaaaaagtaaataaaaacaaggaaactagaggaaactgaagcctccagtacctacaattatgggcaaacattaaatacagcccagctcctagccagattaggctggaaaccttcacantaaaagtcttatttactttcagtttttgatatatccattctgttccggttttccggcaaaaaaantacagggcttgtttaaagggccagggaaaaacccncggtctttgaggggggcccaaaacagggctttccggggggcgttccttccgggttttgggccaca

SEQ ID NO: 332661 - DNA, 419 bp, Homo Sapiens
  misc_feature (30)..(30): n is a, c, g, or t
  misc_feature (155)..(155): n is a, c, g, or t
aggtccctctgttccccaggttccccaaantgccctgtgtgccccctcacccaaggaaactcaactgcctctgtccctgcaaatttccctaaacaggctgtgcaactctctgaggcaggaacaatgctgtttgttttttccccattcccagaggngcccagcacttggtaactatttggtgaaataaacaggtgaatgaatcaatgaatgaaatgggaggaccctggctgcacagacactccagtgcatgagaaaggaatgatgaatgtctactatgctatattctcacacctccggcttttgcacacaccatcccctttgcccagaatgttgttggatccgcctcctctggacggacaattaatggttttcaacttcttactgccgtgctcacttgccctctgctccctgtgccgaat

SEQ ID NO: 332662 - DNA, 192 bp, Homo Sapiens
  misc_feature (42)..(42): n is a, c, g, or t
  misc_feature (48)..(48): n is a, c, g, or t
gcaccgcgcctggcccctcctcatagtctctttctcagaggntttggnttcatgtgggaatggtctctgggcaggactttgaacctcatccctgccgtattgtcccaataagggggactgacctcaaatgcctagcagtcagaatggaagcctagaacgaatctcagagctgggagagatattaaaggtctc

SEQ ID NO: 332663 - DNA, 136 bp, Homo Sapiens
atgagcactgcacctgggtcccttgaactctttttaatctatactcatttccgtgatctcatccagtctcctgactttcagtaccatctaagatatataatatcatcatatatgatgacaactcttaaatttatat

SEQ ID NO: 332664 - DNA, 250 bp, Homo Sapiens
ataaattacttttctctcaaaaataaaatgactttgaggataaactatttaaatctaacacaggaaagctatttttttccccaagacaaatacctattttttaaaaaagacacacccagatcttggtttctcaatactactccccaagaaagggaaccaaagctccttaaaggaatgcctgattctaggactgggacaaagaatctacaagatgaagctggagaatgtgatggtgccagaaaggaggtgc

SEQ ID NO: 332665 - DNA, 548 bp, Homo Sapiens
  misc_feature (19)..(19): n is a, c, g, or t
  misc_feature (92)..(92): n is a, c, g, or t
  misc_feature (206)..(206): n is a, c, g, or t
  misc_feature (232)..(232): n is a, c, g, or t
  misc_feature (295)..(295): n is a, c, g, or t
  misc_feature (379)..(379): n is a, c, g, or t
  misc_feature (387)..(387): n is a, c, g, or t
cagcagcagccctgcgganccactcagcaaccatcctcagagacagctgcccggctcgagccctgacctcatctccacagccatggctgcangactgctggagaagttctgagcctgacaagggccaagctggtccctggggctgttgccaggctgacgcttatgacccctgccttcagtgcaggccagaacagtatgggtccttnagacataccctctcgctgagccagtnggggaggagccctagacctttccaagtcaccagcacataatcctctcttggaaaaccgcccangagttctgagaaaaccggaagaaaatgaattcagcggctgtaggtctgagtcatccctcggcacctcttcatctcgggcacccntccagcgntacctcgaaaaacaaggccttttgcagaagagtgggagatgattcctcagaagagggaaggaagggggaagttaggttagtgaagtttgaattttccacggaggacaggaggccccttcggttgtattcagcaggttgccagttcatatttcaactttttt

SEQ ID NO: 332666 - DNA, 441 bp, Homo Sapiens
  misc_feature (19)..(19): n is a, c, g, or t
  misc_feature (24)..(24): n is a, c, g, or t
  misc_feature (53)..(53): n is a, c, g, or t
  misc_feature (58)..(58): n is a, c, g, or t
  misc_feature (261)..(379): n is a, c, g, or t
agggtaggccaaaggtttncctanggtcacaccaaagcattaaagccatttanaaaanccctgataaattagatgttccatcaaaagttaaacccttttcctaagaaagacagttaagaaaaatgaaaaggtaagcccatagacttggagaaaatacttgtaatacatatatgacagaggatttgtagctaaattatagagaacccctacaacttagtaagacaatttaaagatctgtgaggctaggcacagtggctcagnnnnnnnnnnnnnnnnnnnnnnnnnnnnnnnnnnnnnnnnnnnnnnnnnnnnnnnnnnnnnnnnnnnnnnnnnnnnnnnnnnnnnnnnnnnnnnnnnnnnnnnnnnnnnnnnnnnnnnntatggtgacgaatgcctatagttttagctattcgggagctaaagcaggaggatcacttgagc

SEQ ID NO: 332667 - DNA, 423 bp, Homo Sapiens
ccgaatcactgatggaattgcgcagtgcattggagatggctcagcaggatgagggtaaatgcaggggcaagtccaggccatactgagagacaatgagtggcgctgatgatgacaaagataaaatcaaaagtttgtgcttcatcttcaaaaactcaagctgataacaaacttggcctgatgagaaataataagtatttttctatttacatgagaatttaatctcaaaacagaaatcagaaaaatatgaagtccaggggcataaaacctaaaactattggcttcatatttattctttctaaatagagcaaagtgtacaatcttctccataaggacatacattgtggttattaaaaaggccaaaagtcttagtgaggatccttgggtattccctaggagggtggatttaaacacagccaggggagg

SEQ ID NO: 332668 - DNA, 619 bp, Homo Sapiens
acaaacgtcttgtgtttatgtcacttaaaggggtgcatggataagacattttccacaacaggaaatatgtattgggctctaacaccatgtccgtcactcgtctttctaggacccgaggccttacacatagaccgtgccctcaaaacttggggtctgtcttgtggaataaaaggggtgacttcaagaacaccagtctttatcagccacttggtgtttgaaggtatagtcttcgcctggagaaagccacagcaccagcctcccctgcatccccagtatcttactctgtaaaatcagaatatgaaaactttgctacccgcctactacctctggggggttgtggaggagattgctaagttaatatttgaagaggttcctttaatgaaaggacaaaaggctatttttatgcctatctccatgtgtggctgcagatataattagcggtcataaagttatccagccctgaatggaaatcaactggagcattttcctggcggatgcgtttgtagttgaaatgccacacacagaggcggggctgcttctggaaggagcacctttcgttgactgttttcagttttctcagtgggaaggggggagtttattcagggaaggaaacagatgg

SEQ ID NO: 332669 - DNA, 418 bp, Homo Sapiens
  misc_feature (396)..(396): n is a, c, g, or t
ggaccttatggaggtttgtactttcagttatgcatatttgactgcccagatgaggagattgtattcacatacatagctgctcttggcagagtcatggttaaaggtttgaacatactgtaccttgttggctattcccatagtcctaagggaggcattttgcttctccataggacagtaatcggcttgtcagagtgggagtgggctttttgtttttcctttatctagtagaatggagtgggctaagcttttctgggaagcaatttcttcctccaccgcatgaacagaaggtcatgggatactgtctctgaaacaaaggggaggtagtgatagaaaaatccagtgttctgggggcataattgggattgaagctctgttcaagggagacaccagtttccngcttgggaaggctgggactttc

SEQ ID NO: 332670 - DNA, 427 bp, Homo Sapiens
  misc_feature (52)..(87): n is a, c, g, or t
tttttgacttatacttattttatttaaaaactttaaatacccaaattatgcnnnnnnnnnnnnnnnnnnnnnnnnnnnnnnnnnnnncagaatatgctcaaaaaccaaacagtctgagagagggttttaagccaaggtaaaatgactttaaaaccagtggcataaacactgtgctggctgtctcttcccgttcagaaggtatctgcccccgaagactccatgtcctcctgcattgtgctgagactcagagactgagagcagtcctcgaggttcactgacggcagcatcactgacatcttgggcagggggcatctgtgaagcggagagtgggcactgctttcccaccctgcacaaagggagaagctcattcagctcaacatgcggtaaccctgaggtatttacggtgcttttatgctttgcggaaata

SEQ ID NO: 332671 - DNA, 276 bp, Homo Sapiens
  misc_feature (172)..(184): n is a, c, g, or t
tttttgtacaaatccaaggttttaatggctgttaaataataaaaggaaggatatttgcactatatacattctgtccactgacgatactgtcagctggccatgcattttattgcacatataaacagtgtacaaggatcttgaagacgtcttagccatagaaggactgcatttnnnnnnnnnnnnngcaattttacagaagactgaagccatttacattacacaaccaacttcaagaaaataataaaaattaatatcaaaagaaatactttaattttg

SEQ ID NO: 332672 - DNA, 575 bp, Homo Sapiens
tgaagatgcgtttatctgtgttaaatgaaatgttatgctgccctaacagaatcggagttgatgctgcttcctgtcctgacccctgtgggtctggtgttccctgataattttacacaacactgaggcgggaagaacgtaaattccaggaatgcatttatggttaatctgttgttgaggtttagtcagacagccagtgttttataaaccaagcctcccatgaaattgggctggaggaagagggatctaatagagcagataattaccacttgctctccattaactcagcccttgtgcccgggacacttttccttttggccagcaaaattggagtggctttgtcatgtttacagggagcctgcctgttggctattagagagggacagaaagaatctgcatatagaaaccctgaaagaatacacactaggcaactaataaaaatggtcgggaacctgagcagcatagtgagaccctttctctaaaacaatttttaaaaacttagccaggcatggaggcacacactaggtcccagctactccggaggctgaagtgggaggatcccttgaacctaggagttt

SEQ ID NO: 332673 - DNA, 459 bp, Homo Sapiens
  misc_feature (147)..(147): n is a, c, g, or t
  misc_feature (165)..(165): n is a, c, g, or t
cattgtatttcatggtgtgtttgtaattgtccactgaataattttactatggctgctttaaattttttccaaataattttaacatctctgtcatcttgagtttgacatctattcattgtatctttttaattgttttgaaggtttttngttcttgagtttttcctnggttctttcctggtatgttgagtgatactttattgaaactggacatttttatattataaaactctacgaccttattttaaccttctattttagctggctttctctgacaccaccacggcaaggaaagttgtcgggggatgtaagcggaggaggcaggtgatgctgccttactaaccaggtagagatagaagtccaggttttctacttggcgtctgacctccactgaaacctcacatatagtctctgttatcactggaccagggtggaagttctggctacccatatgatctctac

SEQ ID NO: 332674 - DNA, 506 bp, Homo Sapiens
tttttttacatagaaagtgctcagtatttattgaatgaacttataaatgacagcagagaagcagcgagccttaaagataaacttcaactgaaatatccaggtggcctcttgaatcacatgcccctccctctctacagaggggtccacagaactcttttgcttcttctaagttgaaggtggttgggtcttctcctcatagatgtttcctctgaactaagcttgaggttcccagaatggcagcagctcctcttcctgcaggagattggacacctctttgtgttccagggcaacatgactggctatgcctgggggcttcactccctgccttctgttaatatttatacctaatatctaacacagtgcctagcacaagtaactgaatgatagaccatgactattacttggactacaggatccaagttaggttggggatgggaacttattccaaattacttgctaatgtcttccaaatcaaacccccaaatttgaggtttaatataattttc

SEQ ID NO: 332675 - DNA, 457 bp, Homo Sapiens
  misc_feature (439)..(439): n is a, c, g, or t
cacattttatttttagtaccatatcctttgtcagtgctcatcagaatgcacattaaaatgggtttattttatgcatattactgtaccgcaataaatttattacaaatcacatgacctttatgttagacattttaatacatcaataggaggtcacgtttcattcagaaaatagcagtttttccctcaaacaccttcaggtttactgtgggttcacatagcctaggttaagcagttggcaacattttgcttcactgtctggttttacaaagctttcttgtgacaacaggtataaaagagtctaccgagttcaccaagacatctgcttcaaagagagctgtgaaagcacaagcctcaagaagaccccaaacaggtgcctctggggagcaggcccatgccgtggtcctgcatgtagcccacagggtgatggggcaagggcggngtgctatgggatgctgca

SEQ ID NO: 332676 - DNA, 704 bp, Homo Sapiens
  misc_feature (56)..(103): n is a, c, g, or t
gaggcagagtctctttctgtcaactaggctggagtgacagagtgagtatccacctnnnnnnnnnnnnnnnnnnnnnnnnnnnnnnnnnnnnnnnnnnnnnnnngacaacttaccacaagggttgttttagtaacgtaggcattatgtaggataagattattgttgctttatcactcttacctcctggaaaattgcatcctattcccccaattgcaacctcatcttttttttccatgtttgattaatctgattggcagctgttactggtcattccctatatggtgtgatcatgagagatgttcctacaggttcccccttttccacttcttccagatgaaaggctgccaggggagactgttgtggaaatcatcaggagacggagttgtagaagtagaccaccctgttgccttctgttgagtgagtagcagacaaggagaggaagatggtaggctagagcatgcaggcagaggatacagatctggtccaggaagttcagagaggtcggagtaagctggggatgtacctggaggtgggggaagaaccaagggggatgtaagcaattctgaagatttctttaagagagataaagcactagagagttatcagttagtatctctaagttgtttgttgtgctcctgtaaggaggtgaggcagtcttccccctttttgctacctctctaggtaccactgaaagtagctctcct

SEQ ID NO: 332677 - DNA, 503 bp, Homo Sapiens
  misc_feature (14)..(14): n is a, c, g, or t
ctcctcctttcctntccttttttaaaaaggtggggtctcctcctatggtttcccccaggctgggtcctcaaaaactccctggcccacaaagcaatccctccctgcctcggccctccccaaaagttactggaaattaacaggcatgggctgcccttagaactctactaatatgagtcaggataagatgagcttttaaggccaccttggcacaccactgaattggatcacacacggcatcacctcagacctccatatcctctccttgggagtcactgcagagttctatctcagcagcattaatgtggaaggcagtaaggggtcagtaagaataggccctgagggactgggggcctcacccatacagtagtagcaacagcaggagagcaggcaggttggcaggggcacatatgccctctgctggaaggccagaaagatgagcaccacgatgcatgctggcaccaagtagttacactgcattggagatggcagttacctttatcagc

SEQ ID NO: 332678 - DNA, 498 bp, Homo Sapiens
  misc_feature (400)..(400): n is a, c, g, or t
  misc_feature (486)..(486): n is a, c, g, or t
aaattatcttccctacccagaaggcgtcctttgaccatttcccatgaataatcagtctcattataggaataggggatgatacagaaatccaaagtattccagttgcactgcatttgcatgcgatgttcgagactcaccacccaatctccaagccaaataacagactgtcttaaatcattaatttgattagcttgtgtccatcccttaagggcactgagtttccctgggctgtgggtaggtccagagattctgtccagggagccagggcctgggagttggaaaccttaggaataatcctgggtgctctgttttactgtggctgagctgggcacccagggttacaagacagcattcctttcccatttctttccctccccttttttccagggcagatggattnttttccccgtgttccaccattaccacaggcccacaaggagtttttttcagggtaccacaaatgtttactttaaggcccaagggttntttcattcagtt

SEQ ID NO: 332679 - DNA, 276 bp, Homo Sapiens
ggaagtagcaggattccagtatatttcagctcaaggcagtgatttcctgaggagaaatgatccagaccctctcccagtgagactgtggaaggcagtaacattttaactagaaataaattgctgattctaggttattataaactaaacttttctgggaaaattggctataatatgaatctttcaaaactataatgaacaaaacaggaagcacagcaccttaacgagaaacagcctggagtcagggttccttacagactttctctgcaggaaatgtca

SEQ ID NO: 332680 - DNA, 424 bp, Homo Sapiens
cacctccccaaaaagcccggccgacctattttttatttcacccaaaaagcatgccaagttgtccatgaggactgtagggagaggcccaaagcctttgtaaatcctccttcctacccaacattttccctcctcaatatagtagtaggtaggcaaggtagggaaagagaatgtcgaggggatttaacttttaatgtttagatcacacacaagtttggttctcttctcaaactttaaaccaagtttattcctacagattggaaaatcattttagatctttttaattgggggaaagatatcatgtctcttctcaattaaatgaatttgtaattataaagggtttagaatgatatgtgacagtggtaagcactatataaatatatgttaaatataaagggtgtacgtgtatgcagaactcttgttcatc

SEQ ID NO: 332681 - DNA, 517 bp, Homo Sapiens
ccaaataaaataaaaccagaaaagagcagtgccggcctgtgtcccctgaattcctacaattgtcagattgacatggatgttccactgggggccgtgagctggaatcccgggggcaaaaagcctcactcttttagttttctgttctattccgatgatgctgacacttgctggttcatttggccttcctgatagcaaagaaagggcttgagactccaggagataattttccatgaaaaggagaagccttgtcatccacaactcagcgtaaggcagagttcaaagtgaagacttcccagagcagcccaggcactgttggtcctctttgcctgtctcatttttctccatagtgcttgttactgcgtgccttcatatgcatgtatgtgtctgcttatttttgtcttcactaaattgtaggcaccttaaggggagagggctttgctttcctcattgctctgtgtcaggatcctgcttaacctatagcacgtgctcataaacccagttgacagactgtgtggac

SEQ ID NO: 332682 - DNA, 431 bp, Homo Sapiens
  misc_feature (65)..(73): n is a, c, g, or t
acccttgaaccctggagctttaaaaggccctcctctggaaattccctctaagttgtgaataccannnnnnnnnaaagcatggtgtaaaggaatctgctggacccaaaggcatttgccccaccctggagtctgccccaagtaccccaggaccctgtaattctcagcctgaacagccccacctccacttcccagggtttgtgttttcctcttccctgggtgatattctcctgatggttgcatggccactgagagagagcacaggggcaggtgcttgctggggaatgtgaaggcggtgatgtcacatgtgtgcaagtaaggcccttgtgggtaggacagagccagggtgaggccaaggcttggtctcccccactgccttggggtagagctctgaggagtcttgagattttatttatttattttttatgagacag

SEQ ID NO: 332683 - DNA, 109 bp, Homo Sapiens
ttttcagatacagctacacttatttctattaacctaatacaactgaacagcctcagttgaggttaatcattacatgtaaagggcctgagagtcagaagtctgtgttaaa

SEQ ID NO: 332684 - DNA, 572 bp, Homo Sapiens
caccagggagatttttctttaaaatatttactagtttccagaaaactgccagtagaagccagcattgactggctgtgcaaccagcagcggctctgctctgcacagtagttagctgctgacttcattctctggtcattatataagcaagatgacactgttctctaatccagccaaagctgataagtaccatcaacctgtcacttcctacatttcaaattctaacatcacagcatcaaagagtttttaacatttcgatttcttttgctggcagcagccggtagcctctcattctccccacagtgttctaatgctgcatttgcacaccggggttactcccagactgaatagcaggtcatcccctgctcactgagctcatctgtggcccatgtgctaggcaatttagatccaatcagcccttatttagctcaagagtaatgagcagcatagtgacacagacttaagcctgaccctcaggacactgctcatcaagcagtaaaactgtgacaaaatcattcatcttccacccgctggcaagaaataatactcgcactcactgtattacttttcaagat

SEQ ID NO: 332685 - DNA, 767 bp, Homo Sapiens
ttcttcttatctatatgtttaatatatttacctttggactcaaattccatgtagaggtaaaaccttatctgatccaatagccaatccccccactgctgtctccattgtcaataagaatggattccagtcacacataacagaggatagctggagagtgctggaacccggataaagccagaagttaaagggctgacaagggtccctctcctggttctgttccttgactcacggtgtaactgctgtgccctgccacttaggctgcaattatgccacagggaagcagagataaaaacagaaaggctgtttataaatcattctgggttgctcagatggggacaacaaaaaagacaagtgctccacactagaaaatggagggaaaactgttcttggcatcaattctgcaagttcacttaggaagtgaaacagtgaaagagctactatgctaggacctcatttttctacccagaaatgaggcaccctgggggaatgatcctaaaaggttctttaccctggatttctaggcgccagtgtattgtggtgtggtatggaggcaagttttgaagattaggtgatgcaagctcagtagcctgcagggttcaagcgagctgagtggggtgtgtcgaggagagggtatgtgcctggccaaagagcagagggctttgctctagtccaaggttgcctagtaggatggagggcctgatgttttcaaagcttctcatttctttaaagagttccaagaagaattctgttttttaatatgaactctc

SEQ ID NO: 332686 - DNA, 446 bp, Homo Sapiens
  misc_feature (342)..(342): n is a, c, g, or t
  misc_feature (379)..(379): n is a, c, g, or t
  misc_feature (386)..(386): n is a, c, g, or t
  misc_feature (405)..(405): n is a, c, g, or t
  misc_feature (410)..(410): n is a, c, g, or t
  misc_feature (418)..(418): n is a, c, g, or t
aaatacaacaaacacagatgaacccaccactgacccagaccaaaaatattgattagtacatccaaatacttcttatccactgaggtcaaagtcttgttttattttatatagtccacaattgtacacaaatggataaatcttaatctttaggtcataaaacactgtctttgtggtccattcttgacattctttcatttcgtcacttttgtactcatctaattcatttttgactatgcagccactacacttgaaggtcaccatttagcccaagaccagtgactattctggtataccctgttggatacacttccctacccctcaggcctcaacagcctgggaccngggggcttttgttttgggggattaacccccacagganggcaggnggactagggaaggggaggntactngggggggncagggtggttaggagggggatccggggg

SEQ ID NO: 332687 - DNA, 196 bp, Homo Sapiens
cattttgttcaatgtttccttagtaccttaaatactagaatagtagatggcacagagtagatgctcaataaatatttcttaagtgaataaatgaatgggtgaatcattgccttaaagacacttaaagggtaaagacctaatttaaactatttaaaaacaaaatccttggtgttgaaatgattaaattatttaaaat

SEQ ID NO: 332688 - DNA, 399 bp, Homo Sapiens
  misc_feature (69)..(69): n is a, c, g, or t
ggacttgagagaggattaaatgtttccaatttcgtcttggcttttccttttaaatgtttatattaaaanggaaaaacattccacattaaagaagatttagagaatatgaaaaggggaaaatcctacatgttaacattattgggaagaaaacatagatttacaggagttgagagcttgctgagatcttagggatcatttaagccaatgccttgtcttatagcggagaaaactgataaacagagcacctaggcaatttgcctactcactctcttcccttagttaaaaaggcaaatcaagcatggcacagtgtacacttgtagttccagctacaagggaggctgagtgggagcatcccttgagcccaggagagcagcctgggcaacatagcaagatccccaa

SEQ ID NO: 332689 - DNA, 509 bp, Homo Sapiens
caaatgacatagtgagagttatgatcggttatttgggttgtaaggattgaaaacatacctagatcatataaatttgtgaaggttttgccatcacaagcgttatagggaataatgaacatcaactatcctacagctaaacctaatgaagaccaaattgcctccaaggtcaaaacaatagttctttgtgctcaaaagtggttcatataattgatgctgcattgacgctgtctatagagattctagttttctccacattttctctatttttcaatttcctttcttttcactggggtctattgttctttaacagaagtaatggccttttataaatatataattttcacgttgtaagcattctttccaagctagctgcccatcatcacgttttggctagtcccagtctctgctcatagaacacttgtccacactctaaattctctctgttctccatagcccccactcatctaattcctatagtcttttaactcaaagccttcaacttatgtaca

SEQ ID NO: 332690 - DNA, 473 bp, Homo Sapiens
cgcttctttgctcaaaaaactttggtttgggctgggctggggacaaggctgtttgcgctgggctcccttggaattcaactccaggtcgctgcaacccacccaggaggcttgggtgggcggagggtctggaacggcctccattgaacaggtgtcggggctctggtgctgaactgcccagttgcgtgtctctctcatgagctctcgtctgtctgtcttgcctgcactgtgccaagaggaagagtgaggggctgcctaggccccagaactcacctaacaccatgtttgccacattctattggtcaaaaaaggcccacctagattcaggggtggagagacaggtgctatccttgataagatgagctgtgaagaatttgaggcccttttaaatctctatctctgtatctgacatggcatagtttactgtggtggagggagaacccagtgtttgtgtttgttttccagctgtgccgata

SEQ ID NO: 332691 - DNA, 895 bp, Homo Sapiens
  misc_feature (31)..(31): n is a, c, g, or t
agccattgtctccacatttcctcacgaaacncccccttgtggaaacacactttagcccaaagagaaaccgggataccgcaaacaccgattaagccgctcacgattcggccgtcccgccctctatacacgaatggtccaacttacgggacaatttcccccgttaaccccgctccaataactcctcacagcgatagtgcgcgtattaagacttttctctttttgacaaacactataaacgaccgctttggatccttgaacaaatcagaccagagccgaatcgagacggctcggttcacattcttccggtctcgggccgggttagtactgaacagcaggcttgcctgtgggttgtcagcgatgtgaagtaggaccaccaccagggcttactcccgtcggccgagggttgcctgcgcgcccggagcgggtcgggctccgtggcctcccccaaagaagctggcacttcccaggggttcttggggcccagtccttcgcaagcccttgattaaagttcttgggtcccatccccagagagttgcagaaatgaagtccacacggccagccctcttcatccgggcggggatgatgactttcttgatgactttggcgtagccaggggcttgggcaatgacaatgtggatacctgggggcagcagtctccagtagtcaccatctggggctgtggtgatgtcgtggcgaatgcctttgactgagatccgggcgtttttgactggcttgccgaatttatctgtcaccacacctttgatgccccggtgcaccgtctccacgaaattcaggagtgactccttgttgtgctgccagagtgtgtacagggcctcctcgggggggaacttcacacagcccagctctaccgtgatctcaaagcagttggtgtgca

SEQ ID NO: 332692 - DNA, 398 bp, Homo Sapiens
  misc_feature (103)..(111): n is a, c, g, or t
tcccaaggtagggaagggctgggaacggggtcaagggtcaagtcttgcctgcactaagtgtgctgttgagggggggagaatggtgtgttccactgaggtggtnnnnnnnnntgtcctcttgcctactgtcccctgaaagctgtgggaaacctggggagggggagggccattagatgactccagtggttactttgcaaatgcccagttcttcagagggagtgggtggaggcgaatttggcttgagaggaagaagacattaagtcctcatctgaggtctgggttcccagggacccattcatctggccgcccaggagcccctacccccaagagaaacttcggatactgaactgcagaaatgtcacatattcacagaccaccccatccccagctgtgccgaa

SEQ ID NO: 332693 - DNA, 578 bp, Homo Sapiens
  misc_feature (466)..(466): n is a, c, g, or t
  misc_feature (509)..(509): n is a, c, g, or t
tatggttcttagctctctctcgtatttggaagtgttcagaaacatggctgcttattttctgagatttctttcctttattccctcactccactttcaaaattaccctttcttaaagtgtactatttggtgttttttagtatattcacagagggagaaaccattaccactatcttattttagaagatatttatcacccccataagaaaccccatacttattaatagaactcctcattcctcacttcttccagcccctggcacccactcatctaccctctctgtctctagatttgcctatgttggacattggatataaatggaattatacaatatatgatcttttgtgactggcttcttttacttagcataatgttttctaagttcgtcattctgtaggcatgtatcagtatagtcatttgctgcataacagagtttcaggggccaggcacagtaggctcatgcctatnaatggccaggcactttggggcgggctggaggtagggagggatncatttggaggccccatggagttttggaggatccagcccgggggcaaccataggtggaggacttacattc

SEQ ID NO: 332694 - DNA, 663 bp, Homo Sapiens
gagaatttaatgtttaactgtacccctttccctcaggaagatttaacatttgcttgggaatgtgattttgctcccaccctaaggaatttttatcaccaaaatgaatgttaatgaatttaaaacccatggtttatcattggcaagaggcaagttgacttcatcctgtcattccagcctggggtctgccagccagccctcctccccgacccagcgcctaagctcacagagtgtcgtcgcccacctccctggtccttgctcttgttaacccaagatgctgctacacagatgccaaatgggaaatcttccacagggctttttcagtaaacacgtgatgtggagtgcaagctcctccccttcccactagaacatactttaacagaaaacgagtcggaccttcttagctgcactctgtactgtgtgcccgagaaggcatttctagacccgtgtttttaaaggagggaactttggggattgccagcccctgctcctcctcccagggagccaactgtccctcctcccctggtcgccttggcccatggggcccggcagtggctgtgtcccctgcctgagggctctgtgcctcctgcctcagatgcggcctgtgccagagaggctgcctgtacagccagggtcagtttggccccaaacagggattcagaaacc

SEQ ID NO: 332695 - DNA, 442 bp, Homo Sapiens
  misc_feature (403)..(403): n is a, c, g, or t
ccatttttatatgcacacacaatgattacacacagtcgatgatgtgataatgccactttcatggaatcaaatttgcaaaaaatgcataaaatgaaattagaactctgaaagtctttaacacaatttaatacatcccagtattgaaaatgatgcaaagatgaaacgcatagcatggcaaattggcgctgtgaaaaggcagaagtcatacatagttgaataatttggcaggggagatttcttgcattttttgcctgtattatcatttctatgatcttcaaatcacttgctgcatttgtatttggagagtggttgtggtcttcaaattttgtaagcatatgctggcctggcctctacttccttctccaggtgcaccttctgccagactctcttgctctctcccctngcaccagctggcttccattcggcctcgcagactcgttgc

SEQ ID NO: 332696 - DNA, 502 bp, Homo Sapiens
  misc_feature (405)..(405): n is a, c, g, or t
tttgcatctaaggactttgggattgaccagggctgccttagctaacatttgtctcttcattatcagctggtgtattggagagagaaaatccacgtggtctgatcaaactggcagaattgaaatgtcgccgctgatgctggcaggcctgggctttccagacaagcagaaggagtgggtctagaaggatcccatcttcaagtatgctgtaattctggtcctgcatttgccctaaagacactttggaattatttagtctggcttcctcattttatacaggattgttctcttttctttgtgggcgatctacttagcttccatattatgcagatgggggatggtttatttgaggaaagagacttgcagaactgttgggtgaaaatccaagggttacacgcattgagtccngcagggctgtttgctccaccacaggcttaggtaggtgaggattctaacgcccctcctgccagcatcaagtctccaccctgccaggcccacgccgagc

SEQ ID NO: 332697 - DNA, 365 bp, Homo Sapiens
  misc_feature (107)..(107): n is a, c, g, or t
ccccccaggtccccctggtccccagtttggcttggggccccttggcccaggccctggctctggaccctgggctgtcccactcccaaaatatgagggccgccgaagtntgcagctgcagcttggctgtcagtgccttcacagagtcccaggctctccccctcctcatcctcctcgtcctcttcacccactgcctggaatttcagtagccccagggacatggcaggtttgaggtgagtgacagggcagggctgcagctctgagattagggaaaggctggcagtattgcccagggagaggtggcagaagttgagggtgagaagagcgtgccagggagtgtgtggtggtcaatgttcaagctgtgccga

SEQ ID NO: 332698 - DNA, 394 bp, Homo Sapiens
tattattcccttattcaccaagacatgttcagttttaggtaacagaaaaccctactcaatctggcttaaggaagaaaaggaagttgggtggcttatagattgggtctaacaggagctgggtccaggtggtcagaattcgatctgcagttttctcggtggagaccatttcgctttttaccgaggcaaaaggggcccctcacagctctcaactttattctaccagctctgcaactctaatgagagtctcttttccttgatgacactgctagaagttgcagagctgccactcaatggcctgatttgggtcatgtgcccatccctgagccattttcagtggccagagagctgggatgtgctcactggccgagtaggggcatggggctagcactacgtt

SEQ ID NO: 332699 - DNA, 345 bp, Homo Sapiens
  misc_feature (198)..(198): n is a, c, g, or t
  misc_feature (252)..(252): n is a, c, g, or t
  misc_feature (312)..(312): n is a, c, g, or t
atgaaccatgatgaccagctggataaattgtttcaggaagggttgagatgatgttgaacatcatgccctccacatcaatttacggggaaaaaaattcatcttgtttctgccgattcaagagggctgacaagagcagaaacaatagccaacactgtggtcatttcaactggttcagcttacaaaattctgactgaaaanttaaagttgagcaagctttccactcaatggctgttaaaaccctttgcacccagntcagctgtagacaagagcagagcttttgggataggaaagtctagacaagtacgttcaagntcctgaagcactttttcgaggactgcaataggg

SEQ ID NO: 332700 - DNA, 455 bp, Homo Sapiens
ggagataataatacctacatgcagatacattgtgaggtctcagtgaaatagaatcatccagtgtggtgcctaaagagggttttgtttggtttgttcactgctgtatcccccagcacctaggatggtcccctggcacagagcaggtgcccactaagtgctaaaatgaatactgaatgaatgaatgactgtggtcagtaaatgatagctattgctaaaggcatggcagagctgtcagacacaagaagtgtttgtaaagcaagaggctgattattcagaggcttgaaggataatgctttgtcataagctaaattaatttttccccaccatacagcatggctttaggattcttcaaaaactaactacgttggtctgatggtagtgggttaccagaacttattaacattagtgtcactaaagttggcatataatccccctgtgctaaatttgactgcctt

SEQ ID NO: 332701 - DNA, 478 bp, Homo Sapiens
agactgcatagggctcggcgtgggttggtagttgtgtccttaacatttaggaatgacatagcctctggagtctacaaactgaagaaactttcatctgatccagccttgggaaatcccaaagtttaaagagcctatgtgtctcttgaggcgggggttagaggattccaaatttgggatgatgctcattgattcctgaccatagcagtgagaggccattttttgtgcaggaaatgtgcttaggactcagtcttgttttcgattatccaccacagaaaccctgagacacagagcagcttagaagtctctacccaggcgtaaatagagctccctactccagaccacctgccacccacctcccaagttgagaacacaaagctcagctgggctggagagtcaggcttggtgcagggtgactttggcgaagttttgtcagatccataaagcaaactggaatttgagctttcacttaccctagtat

SEQ ID NO: 332702 - DNA, 439 bp, Homo Sapiens
  misc_feature (56)..(64): n is a, c, g, or t
  misc_feature (104)..(104): n is a, c, g, or t
  misc_feature (322)..(322): n is a, c, g, or t
  misc_feature (418)..(418): n is a, c, g, or t
  misc_feature (425)..(425): n is a, c, g, or t
taaatactgtttaattttctagtaatgtcctttaaaaaaagctgatacattgagannnnnnnnnaatcttctcagatctgcctctgaaaccactgcaaagcgcntatgcaaattaattcttcagtactcatatatgtattaatggaggaaaagccactctgaggaagcacgccaaggacatgtccccacgtgggcacaccccatcagcactgggtacccagggaatgtgaatgcaaccctggcatgttcacagctaacattatgcccttgcattcttttttgctgtgagggacaatatgatcacacagcactgaaaacggtnggacacaaagggcctgcctttttctttctcatttttgcctttccagcttgcacttctattcctactccagtgacccatttattccccggttacccntaatggnaataggttctgtca

SEQ ID NO: 332703 - DNA, 300 bp, Homo Sapiens
tcaaaccagcaaaataaaatgaggcttttgaccttcagagcaatgatgaaacatacacagtggtgttagccacagcagcgctgaatgctacagaaatactacaagtgacaattctgtctttaacgagatacaaaaccaacattaataatctttagtgttatcataggctggctgaaggagggggaggaggtggaaacgtaggtgcagacatcaacagtgagtgacacccgagtataataaacacagatgctttcagggtttgaggaagccgcaactgtgctgagagacattccaccattt

SEQ ID NO: 332704 - DNA, 963 bp, Homo Sapiens
tttggtttttagtttttgtacagacaggctgtcactgtgtagcccaaggtggtctgcaactctgggcctcaagagatattcccacctccgcctccaaaagtgcggggactgcgggcatgagccatcatacccagcctgcagagggagttttgaaggtcagatgctacctagagttttgactcatgtccatcccaaggtggatctaatcagtttgccgttattgcctcttcttgaatgtgtaatggacacacatggcagctggcaggactctcactttcttcctgacctgtagagtcagggacattattagagcagaaccaaggggaagcctgtgaaattctcctccactggcaacaatgattgaaaaataataatcacattctccaaggaatggaattgatcactaccatgacaaaacacttgaaagttgcaggggatggtagtctttttatatgcctatccacttaacctatctggcctctaccaaaaccagatacactataaaatgaatgcagatttccataaatttaaatcactacttacaaatgctctctaggatgtggtatcttccctgagcagagcagagctcctggcagtttgcatgtggctcttgatttagtgaatgtttcttattttacacccatgggtgggtcagcagattaaaacaattggcctttgtgtggtaaaaacaagagcactgcttcactgttttatgtcagggctttgtcacttctgctctcagtttaatttacattttggaaaacatcatgttaatttaatatattaataacgttacggtaattggtacaataaccaggaaatggaaagttacctaattatagtaaaatacttaaacattaaatagaaataaaatatcagaagaaagagacatgcctgaaaatatttagagaacaccaacgcagatattgttttcaggggtcccatattcctggtccacatgtt

SEQ ID NO: 332705 - DNA, 310 bp, Homo Sapiens
gtatcaatttaaatgaacattattcagagtgtgcaaggtaagctgtcaaaaactgttacctctttttaggtacttgtctttgtgaatcaaaacgtttttcacactgtgacagctaaacaatgacacagaatttattcagatgttgaaacactgaacgactacaatggcaatctagaatattctgattacgattttctggttaaaacacctcattgtacccttgactaactttacattaggaaaagttttacattataacttacaattataaaaatgcccctttcatatacattggagtttaatgcagctt

SEQ ID NO: 332706 - DNA, 848 bp, Homo Sapiens
  misc_feature (132)..(144): n is a, c, g, or t
aacaatcaaggttgatttcttcctcatatcttatgtcctttgcgagttggcaagagctactcattgtggttatttgtgggcctgagctgatgcagctgcccccatcttgtgctaatcatagtgccagaagcnnnnnnnnnnnnnttgcacattgataaattaagcagtgatggctaaaagcctcctacccaaagcaacacattctgtttctgctcatgtttcatgagttaaagcctgtaacttcaaaggggtagggaagtgtaatcctaccaggtgtctaggagaagaacctgaactgtttgatgaactgaatacttctaccactgtgttggttttcaaggaaggggtgggaaagtctttgaaaactctcctgtgacccataaagttatatcctagaagccaatcctttctgtgttcataaaatcactggccttttcctgtggccgccaaggttgcagagagcagagctgtttgggaactcacttcaagaagtggtcagagcttgaggagggagggtcaggacaggagcagaggcagatggcatggcactgggccaggttccatatgacctgggtgccagcaaagctggccttggttttgcttatgcttgtatttgttaccaacctatatagcaagtatcacagtagaaaaacttacagaatggcctgactacacagagctcactgttgaaaaacgctgggttgtaactctaagatagcatctgctacattgctaaagaatgttttataacagggcttagatctgttaggaatcttagctgctactgttgcaacaccaatttatggaaagctgtgttatttattttgaaatataaacatgaaaaaaaa

SEQ ID NO: 332707 - DNA, 492 bp, Homo Sapiens
  misc_feature (33)..(33): n is a, c, g, or t
  misc_feature (49)..(49): n is a, c, g, or t
  misc_feature (108)..(166): n is a, c, g, or t
  misc_feature (176)..(176): n is a, c, g, or t
  misc_feature (457)..(457): n is a, c, g, or t
gttaagaaatttttttccccccccaagaaagancatgtcctccatgaancttttcccctctcctcccctccccctaagatggcccttttccaaaaaagcctccttcannnnnnnnnnnnnnnnnnnnnnnnnnnnnnnnnnnnnnnnnnnnnnnnnnnnnnnnnnngccttgaacnccacaggccctaaccgtgtatttaattaggtggaaagcaggcccccccagccttgcaaggcaaatgtttgtatgtggtagagggtcctatattaggtgtagacccctctttctgtatgaacatgtcttagactctcttcctatatgaatgagaacgtaatgatggacctctgatacacggtgtagagtaagggagtgggggctacaattgcacttgttactttttttcggggattagcatcctaggcaacaatgcaagttcttctggagtcagagcagacnggaaatatgtcttccattctgattcatgtgtcaaa

SEQ ID NO: 332708 - DNA, 613 bp, Homo Sapiens
tccttatacttgtaattcccctatacacaaatgccagcaagaatagtcccattgaggacatgctaaatgtagagaggtagtagtatgacatggaaaacactccccaacttgtctccctgtctcctgcttatgtggtacatggccactgactacagtattaacctttacttgagccctgtgcttctggaaaacagtgacagttaagaaatccctccttcttgttacatttcaggaaatggcttattgcaaagaaccactagaactgtgagtaacaccttcatttacctatgataaagccagactcagaccctccaaatcccattctttgcctcaaaataattagttgaactatttgtacccatagactaatctggacaaaatgccctttaacttgacccaattttatgcttctcccttccccgtaagccactggactttgatccaccttcagcctgagccagcactggactgtggaatagtccctccttttcccctcctgaaaattgactagccaccaggaaggacattccctgctcagctgtcccattaacgtcacctgctcctctcctccacgttagtttttttctagcctgtttattcctccctgtaagag

SEQ ID NO: 332709 - DNA, 410 bp, Homo Sapiens
ccatccataaacatatgtctttattctctttctgtacatatgggcaatgataaagcttaaagatgcatgtcctaagaaatatgcaaaaacaatgaatttacataaataatttatacttcagaaaattaaagttgaaaaatattttccacattattagagttcacagtatttaaatcaagctttcccacttatactccagactatattgtcttagcagagagtgataaaatctaatcagggattaaaatgatcaaggtttctgtttttattcagtgcacgagtagacgctatttcagtatcaggccgcgccaagtgtcgaggctgcagcctctcatcctgacccttcccctcctgagtggctgtgacccagcagaggtcactggcgtggaatggttacagcgtcaccaaac

SEQ ID NO: 332710 - DNA, 483 bp, Homo Sapiens
ctgtccatggaaaaattttcttccatgaaactggtccttggtgtcaaaaaggtttgggactgctagtcaagaccacagttgaaaagatgtattatttgccctttagaagcttacaatctaaactatccaaatccaacataaaggaagtaataatggcttaaaataaacaaaatacactgagcaataatttaaagactcaactaaaatacacattttatgccagtaaaatatcaatgtatttgttatacacaaagaaaaaagcagtgaagaagtttcatcaatccattgtttttacttattttagaatgacaagatattcgtgacagaaaaatacacttgccttttaaagtcaaagcacctatcaagtgccaaattagaagagattgtttcattttataaatcgcagttaggttacagagtaggtgcaaattcagatacacagaaacaaattctttgaaaaagtgccaaaatcatcccccatgt

SEQ ID NO: 332711 - DNA, 530 bp, Homo Sapiens
  misc_feature (120)..(120): n is a, c, g, or t
  misc_feature (128)..(128): n is a, c, g, or t
  misc_feature (146)..(146): n is a, c, g, or t
ctttttactattagaggcacaaaatgcccaaaattgacttttttccccgaaagagtgtgcagttctagttgccattcctgatatatttaaacccatgtatataaagatgttaaaaaaaanaccccaanctgtgagagtctagaagntgtttgttatcttcagctggtgcacaattctgtttaggttaaaaaaaggcattgtttgagctgtcccatctccactgttatccctttggggttttttaatataaattattagttaccatcatttttgtatctacatcttttttcacaaatttgtcttgccttattaaagttctgtaaaatatacttaaatggaaaaaatgatgttcatttagattgaaaacttttctcagatggattgataattgcattcatcttgtgttttatatgagaaggtgcctcaagaatttcctgttggatttgtttaaaaggatttttatctttcgtgataaactttgctgtgtaccaggaactataaaaacaaaaacttgttactaaagaaaataa

SEQ ID NO: 332712 - DNA, 625 bp, Homo Sapiens
actataagcatgtattactcataataatgggaggtagatccaaattttcaaggaataatctgaacttttataacagaaactgtacttaagaacactaatagaggttggctgacaccctgaaaaactggtctgttacgtttaactgtgggccagtcagcttcaaactcaggaaaacctctcacctcagttgcaggggaaatgggcaacaataatagtagctactgctgacaggctgggccctgtgcttaactccatctatcatctccaccaactatcccacatggcatgtgctaccactattttacagatcagaccgtttacataactgagaccgaggatgcacatacgcccctcccctgaaacgcaagtctcactgaaggtagactaagatgccaccttggtgtaaataacaaattacaataaactctgactcagatactgaagaacagtctaaaaatattattgataaaaggtaggtgttcaaagatgacccaacttctattttcgccttcaataattgttacacagttaaaatacagtgacaagctgcttccacatggctataggtagggatttgttatccaaatgcaaatctatctaggtctgaatttctaaaagtagaatc

SEQ ID NO: 332713 - DNA, 235 bp, Homo Sapiens
  misc_feature (50)..(50): n is a, c, g, or t
  misc_feature (161)..(161): n is a, c, g, or t
cccaggaggtggggaaggggtggtgaggacaggaccaggagggggcaccntcagagcctgaacaggggtgacctgctgcccaaaggctgggggaggaaagtggtggagccaagccctccctgggcaaacgagaccccaaaatagctccttggcccctggcngggaagccacattcctgcccaggctgggattagaaacagaaacatttcgggggttggagggtggcgcgggaaga

SEQ ID NO: 332714 - DNA, 426 bp, Homo Sapiens
  misc_feature (410)..(410): n is a, c, g, or t
cttcttctctccgccttcccccatctcaccattatttgtccatggatttgtcctgggctctgggaccttatgaaacccctttcctaatgacataagaggccaaggtgcaatccacccacctttgataccagaccctgagggcttcatacctgctgatgggttttcttttctaaaaggaatgctcgccccagcagggtcctggggctgcttgagcagaggcttgggtgagaccatgcacttctctgttctctcctccccctgcccagtgagttagcacagcagtagcactgcccttgaggcacagttctttccccaggggcaaagatggttttgtgaaggaagctgcttcccttacaagtcttcacgtgttgaaaggggttcagcttcagagttggagatttcgttgttcnaagtttttaaaggcaa

SEQ ID NO: 332715 - DNA, 579 bp, Homo Sapiens
gttttgcattttcctaatgattaattcagtggctcctctgtttggttcccaagataaaatacaaactccttaacctgatcttagctcctgtgtaacccagccctgtctgccactgtctctactccagccactctgtccttctgggtgtcagttcagctgcctttggctacatgtaacaaaatccatacagcagtgccattggcaagtggtagtttatttggctcaataaagaagtgtggcagtgcgtggctgccagcatgggttcagcagctggtagatgttaggggtggtgtctttgtgattctttaggcctttcccttctattttttgccttgtattttcaagatggctgttgttagaaaacttatgtttaaaggagaaagtcaaggagagggcaggcaaacatttccttgcgccctctcctccagtaagctacttgtctgtattattggccagaaccgtgccacatggttacttctagctgcaagggaggctgggacagttggatgtgctacccgaggctgagcacgttgccaccctcaacataaccagggtattgaagctcatggtgctagctct

SEQ ID NO: 332716 - DNA, 544 bp, Homo Sapiens
  misc_feature (452)..(452): n is a, c, g, or t
  misc_feature (454)..(454): n is a, c, g, or t
cttcaactcctcctctggggaaaaacggaactcccttaaacccaacaaattacacacacagtcctcctacatccatctcctcccaaagggaacaaacccccctgaaaaaaacaggaaacttttaataataaataaacaggtcctgcgggaacagggaggaaacctgaagggccttcccataattttaacactcttccaaaaccacagacaatagcaagggcaagctggggtgggggccttgcgagggctggaccacccccgccctgcccactcaactgaggggcacactgcagaccctggggctcttgtggcaggggccgggagtctctccccaggagtgaccagtcacatgctggggacagggatgagggtaacactgatgtttcagaggaaggtgtcattgtacttggcagtgggtgggggagaaggctgagccacaagggctattagcnantcgtgtccgggccagtctggggggcccccaaattttgtgcaggtggggggactggagcagtccatccatcatggttagtcttgttaatac

SEQ ID NO: 332717 - DNA, 434 bp, Homo Sapiens
  misc_feature (25)..(25): n is a, c, g, or t
  misc_feature (37)..(37): n is a, c, g, or t
  misc_feature (83)..(83): n is a, c, g, or t
ggccccttccccctaaactggggancccctaaaaatngccccatccggtcaccggggccaccataaggtaacctatttttttnccccacctagggcatttaatgccatattccatggtttcctctgtcctgcttttgagacacttgtcagattagtccccttaggtgtctttatgcagaacactgtttcaagtcgatttggcaatcatatcatcatcctcaaaatcagtacacccatgaacatatttggtttgtacaaggtattttataataagctcgagataaaatgtttaaatatatggtggttcatgtagtcatagacaatattaatgagatagagaaaagagattgggtaaattatactttttaaaacagttttaccaattcagatgcagttcacttgggctgtgtggagtttgacttatgtttatggaa

SEQ ID NO: 332718 - DNA, 431 bp, Homo Sapiens
tttttccaaacccatctccctctgtgagttccttccttcctcacatatttcctgacctttatcatgttttagtggcttttttaggtgctgggaatggagaagtgaatataacagtgtcttctttcatggcgcttacattttatggtgcatggaccaatgttgtttctgcctcccgggctcagcctttactgctcctctgctttggaaagcacttatcctctcagggctgcaaagacagagcgagattaatcagtagatccagggactcgctagcctgtgacctctataaatgggtcatgtttatctcctcagaggcatacttctgcagggctaaataaattaaataatacaaaggcccttaggcaccaattaaatggtaagggtaaatatggatcctataatttggggatttttaattatcaggttttgct

SEQ ID NO: 332719 - DNA, 482 bp, Homo Sapiens
  misc_feature (139)..(139): n is a, c, g, or t
gggctgggcagtgtgccccaacagctcagtgctttcctgacactccagtgtctggggtggttgaggagcgagttctctcttcctcccagaccaagttcctccctcgggtttgccttgagacgtgttgcgtttttgggcnccgtggcctctccctgttaggctgccacaggccctgcttctggaaggtgaacagctcctggctgctgccgagagggttcctcgttggggtccccaaagtgtgcccggctgctatgaaaaacgttgggaatcttggtttcagttttttattctatgctaggttgtacagacttatttatatcatcgttttgagggactaatggaggcttattgtaacatataatattagtgaaaccatggaattatatgaaaatgatacatgagaaataaggaaactattttgctgattgtaaatttttgtgggaaattttgtgataacttgagaattatacttgtttgaatca

SEQ ID NO: 332720 - DNA, 434 bp, Homo Sapiens
  misc_feature (390)..(390): n is a, c, g, or t
cttttctccatacttttctcaccttttattggatccttttccctgaaccctataaaacataatgtaactcctgttagttgagaaaagacttaattcagacctccctactgaagttatttcaatgaagcttaaattaaaggtatctcagagtttctgaaacccaattacaataaaaaggtcttttcactatctcattctctatcacacatgtggaaattccctcttgctcatctctctagtctcccctcacttaggagaccaccatgttcccacttctcacagtaacagcaggactgtcagttccagtgctccaccccaacaatggacggcacggtgggaagtgtgggctgtaacccaggagactggccaattgaaatgcactactttctngggtcaaaggcaataaatccacaggtggggcacatggactcaat

SEQ ID NO: 332721 - DNA, 559 bp, Homo Sapiens
  misc_feature (466)..(466): n is a, c, g, or t
  misc_feature (536)..(536): n is a, c, g, or t
ttaatttccaaacaaaagaggtttatttggctcccagttctgcaggctgcacacaaagcacagtgccagcatctgctttggtgagagcctcaagaagcttaaaatcatggtgcaaggcaaagggaagccaacatgtcacacgtcaagaaaaacagcaagacagagaggcagagatgccagcctcttttaagcaaccagatctcacatgaactcattactgcagggagggcacgaaggcattcatgagagatctgcccccatgacccaaacacctcccaccaagccctatctccaacattggggattacatctcaacacgggatttggaggagacaaacataaaaactattatcattctgcccctgggcacctaaatctcactgcaaaatataatcatctcttcccaatagtcccccaagggtcaactcgttccagcattaacttcaaaagtccaaagtctcatttngagactcaaggtaagtttcttccacctatgagcctggtaaaatccaaaagaagttattcagctccagatnccaaaggtgggtacaggtattgt

SEQ ID NO: 332722 - DNA, 444 bp, Homo Sapiens
  misc_feature (307)..(307): n is a, c, g, or t
  misc_feature (325)..(325): n is a, c, g, or t
  misc_feature (352)..(352): n is a, c, g, or t
  misc_feature (386)..(386): n is a, c, g, or t
  misc_feature (399)..(399): n is a, c, g, or t
aatctcaatttctcttacttttcttattccccctatgctgatgccaatcagtttcttttgggaaagttttaacagatcggttttatgttttgaagtacagcaagtatttcatcctctctttaaaatacaaaacccagaaacccaggcttttgagggctctctgctctttgtgtgatcacaggggaggggaagagaggggaataaggtgaggagggaggttattggctcacaaaagtccagacagtatttgactaaaaaaatgcagagtgggggagccagggcagaagaaatgaatccggaaatcccncctaaccagaggaggggntaattttcctcctaaaggattaagggnccaaggggtttccgggccttaccccagaaggggnccagggaaagggnttttaaccccctggcccccaatccaggtttgggggcctgaaccaa

SEQ ID NO: 332723 - DNA, 478 bp, Homo Sapiens
gaccattgcttatttggtttgactttcattttcttccccattgtggtagtcattttctgaatgcctgttagtttgtccatctctctcctctgtagtccctagagtcagatgaactcctctgcaggtgcaatggtgtaacactctctagtgctgaattttgagcaggagaagagagcaagagtgaccagtacctttggaaactctgccctcctgagaatttggtgtcttctctgcaaatgttgcaaacctgttaacccacaaggccggagagagaagacaagccagaatcatgatctgttgagcttcagtttaatatttgatgcacagagatcactgagtttttttataagaattagagggggaagaaatggccacagagaagcaatttctatctccaggtgaggattcaggagataattctgcgaacagaacttcctgagaaactgagatggggggaaatcgctggtaatagaaagag

SEQ ID NO: 332724 - DNA, 468 bp, Homo Sapiens
ttttaattcaagaggcaatctttgcaccaatgttaggcttgtttatacagtccctgtctctaaagcaaatagcaaactgtgcatcctctcctactgactttggccagcagggaaacaagcttggtctcttctctgccagggtaccacagggacacacgccaaggtaacctgcgtgtgatgccagtacttctgaaactaagaaaagaagaatactttgggttggagaatttaaaggaatggtggacaaaggttcagggctgaagtttcaagcagcagaatttcccgacttaaatttgaggtgaccaagagtattcccgccagcagagtgcttctttcttctcttttctgtttcctacaggtacagtccctggaacccaccttgccagccttttccttctccatcaaggcagaggcatttggtgggtggggagggtcctgaggtgctctggccacaggtgccatctgtgt

SEQ ID NO: 332725 - DNA, 754 bp, Homo Sapiens
  misc_feature (645)..(645): n is a, c, g, or t
tcttttttgatgggggatgaggattatacagaagatttggcaacctaaatgaacatgagagaaagccaatagtataactaaaggagggggatcgccaaaaccattcacttaggggaatttcaaactttggtgctaaagcttccaaataatcagcatcaccattcaccaaggaaaagtggaaatctaattccatgtagcctggaagaacccttacaggtccaggggctgtggagaggtcgggtgaggaccaggagttcccaccatgccactagggttctggaagccctgggaagctgccagtggcacttgcagcaccaggaactggttcctagagaactgcctcaaatcagacacacataaggaagtcaggcagtgatgtcgctgcatgggaatacaagcagaacaatctcctcagaactacttcgagggtactgtctctcagccatcttccaggttttccacaacccacaaaggtctttcaggtgggtataatttggggttacttgttaagatggagttacagcacagcttcattggcaaagacaatgggatctcatatctagaaacaaaactttctggtttcaccatttgcccgttatcccctgagaaacatcagcatcacctgttaacttgcttgggaatgcnaattctcagacccaaccgagacctatgaatctgaaactctggaggggggcggcagggaggagggcaggaatttgtgtcttagcccctcattgttaagattctgatgcac

SEQ ID NO: 332726 - DNA, 336 bp, Homo Sapiens
  misc_feature (38)..(38): n is a, c, g, or t
  misc_feature (45)..(45): n is a, c, g, or t
  misc_feature (51)..(51): n is a, c, g, or t
  misc_feature (61)..(61): n is a, c, g, or t
  misc_feature (87)..(87): n is a, c, g, or t
  misc_feature (218)..(218): n is a, c, g, or t
tggaaaaccctaagatccccggggccccaaccgggccngtgaganatcccngggataatanccccatccctaatatcctccaccatngggatattttaggtgccataaaattgaaaactagacattaaaatgcaggcctcgagggatgccttacatagccttgtgaaatgacatttccacaattaaatgtaccttagtgtattataggattagcttanaaggacatcacccaagacacatgtagaatattcaggttttgacatttcaatttagagcaattattttaagaacttttcaaaatgtatttttgaacataacaggcacaatggtaaggta

SEQ ID NO: 332727 - DNA, 303 bp, Homo Sapiens
  misc_feature (12)..(12): n is a, c, g, or t
  misc_feature (29)..(29): n is a, c, g, or t
gtcttaaaaaanaacagggtagcctcatnaccggaaaactttagagcccttcccaagagagccccttttgtccctctttgcaatgcacacggtggcaggtaaggatgaaaagacatttccccagggacaaaccccagagcacaggtgatggcctcggtcattggcttgggccgcaaagctaactaactatggtgactgctcttatttctcaaactaacttaaaacaaaaacctagtgtaaaaagacgacaaaaggtaacgacttccgcaccaacacccaagaccttcagcttccgtggttttc

SEQ ID NO: 332728 - DNA, 585 bp, Homo Sapiens
  misc_feature (152)..(170): n is a, c, g, or t
  misc_feature (196)..(196): n is a, c, g, or t
  misc_feature (552)..(552): n is a, c, g, or t
agtcctgacaggagagtctgaatcagaattaaattagaggccaaaccacctttaaattcaggaacaattataccttaacaatggaggcagaatgttagccataaaggataattagatatagaaatatctgatatgtggctaaaactgttcgnnnnnnnnnnnnnnnnnnncaaaaagaccatgcccctgaaaggancttggtgttcacatgaataaaagcctcttaaactgatattataaaatataacttgtgatgaaataccttaatggttcagaaaagctgacttcagaccaggagagtaatagcgaatattagtgatgtgttttcatgaagagtttcttaccagtttcctatcagaagccaggccttttggctagagtaaatgaagacacgtttacagtgatttacttacagagggtcctggggggccagtcccgtcccagcagcaccaggggaaaccagtcataccctaagagcccaagcacattagaattccacagtcaacatcaactccaagaatttgggtaagatgggaatttctttgttttggnaaatcaggcagcttcatataggtcattatttag

SEQ ID NO: 332729 - DNA, 410 bp, Homo Sapiens
  misc_feature (22)..(22): n is a, c, g, or t
  misc_feature (37)..(37): n is a, c, g, or t
  misc_feature (63)..(63): n is a, c, g, or t
atgcccgacccctggcctgatncccctgcctgacacngctgcagacttggattgggtcccaanccctggtagatgctgcccaaagccctatgaggtcccagagagcctcattttttgcctgcctagtgatgaaaaccatcgccccttgagtgctgcatccaacagtgatcagctggaggacccaggctctggcccagatgaagccttacagcaggttggtcccagtgcaagggcagtactctgcaccttgtgtcacatctgccactgactgcatctgtggggagaagagatggaagccacacggagtagctgagtgaagctgatcactgcagggctagacactttacattttagtcagaacgctttgtaactgaatactgtagacataattaaactattcttgatgactt

SEQ ID NO: 332730 - DNA, 388 bp, Homo Sapiens
  misc_feature (23)..(23): n is a, c, g, or t
  misc_feature (74)..(74): n is a, c, g, or t
  misc_feature (104)..(104): n is a, c, g, or t
cttctcctaaaatccagggtggnaaattgggacctcagggctggttccagggctgaggtttcccgggggatganatgattcccagcccagtgggaaggggtgantggatggatgacccctggcaagtcacaggactatggacttggctgtatgttgcatgtatgtgtaagatctgagttgagacctttgatttttgcccagaaagtccagctaacatactatataagccagtgagaccagccagtgtctgttcattgcctctgccttgcccctatgcctgcccgcctcctatagcaggtccctatagcataatgaaaatgcgaacaaccttttctctggacactggggaatctagtctggtggataaagatggatggctgttaaactg

SEQ ID NO: 332731 - DNA, 420 bp, Homo Sapiens
  misc_feature (343)..(343): n is a, c, g, or t
  misc_feature (399)..(399): n is a, c, g, or t
ccctcaggaattttcaaaattcctgttttctcctggctccactcaagacccagctcaaatgccatgtttgtcacgaagcttacctaagaacagcctttgacccaggggtcctgtctcccatgctggacttggtccctgcccacctctggggtgttcactccacggacgtgcagtcccctgggctgaaagaatgaaggatgcccatcccccaccactaacaaccctcacacacttgcactggggacagacacttttcctgggctttatctcttgggtgggatggctttatctcttagtcttcctaaaagctttcaagagaaggagtgagtttctaggggaaatngggcttttaatttcacacagtgatcacttgggtcttgtcttttcagggaagggttncaggggagagatgcttcaggg

SEQ ID NO: 332732 - DNA, 417 bp, Homo Sapiens
ttttgcttcttgtgccattttaattttcaatggagagattaatgacacataactgtttagtaatcaaaacttgaaagaatttcatacaaggctcaaatcacaagttacataaatctttgacaacaatattttgatggaaggcaggtctaaactaacagagtagagaactaaatttagcattcagggtgaaatatgccttttctagaaacagccccaaagggtattaagaacatgttggggggtcagtgttgtggctgctttttctttatttgtcagaattatctgaatcctgtctcagttttgtttcaatttgtttgtacggttatcactaacattttggtggcattgattcctacacaaaatatttttgaccatcaatacttttcacgttatttgaactatgcaaggtcttcaata

SEQ ID NO: 332733 - DNA, 469 bp, Homo Sapiens
acagctagaaagcaaagttattttttagaactattatttctgttgtgaccttttcttcaagttaactgataatacacagtgagttgctttttctaatacagaaacccgtggcattctaggagcttatttataaccccctgcgaggagcaggcagtaaggaagaaagcttcattatgcattttaaacactgtgcttcgtgtggtcagatgaaatgttattctgcttgcactgtggtatcttttacgtctgagcaaacatacctggcttactttccccaacttccccctctcttttttctctgttcaggaaatcaatttggttgaatttcttgtgtagggtgaaatccatggactcgtacagagttggtgagtgggccatcaatgggatctctgttagctcatttttcatcagggagatacatttctttcccaaagctgtgatctaggagagttgccaagcagctagagtt

SEQ ID NO: 332734 - DNA, 332 bp, Homo Sapiens
caacatcatagtgttttattgacaaaaccataggaaaaggcagttttaggatgtaaagtaaaaatggttctctgaaatatctacacaaacgtgaattctgaaaagttttcattaaaatcgtatttcatacaattataaactaatgaggaacaaaacaattttcaacttctccataacccagactgagcttgatttatgcttgccatacagaagcaggaactcttcccagagagggtggtggctcccacacagctgacagccaggtttggctgttacctaagccccatcttcccagtcggtgttcaaaacaagggcacaaggtctggcttttc

SEQ ID NO: 332735 - DNA, 410 bp, Homo Sapiens
atatattcattcattcattaaacctcttaaatagttgaattaaaagaaaatatgagtgtggtgcccataatctgtttccaaaaagctctgagtattgaatagcccaaaaggtaaaggaaactgctgccttgcctagagttttgttggttggaaaacaccccaagttcattctgtgattctttagcattcattataagtaatattgccattttatcctcacctttatgacaggcgtctcttttttagtatcaagcagcagatgcctccaaacagctgtggaatccccctcaggttcaaggcccattagggaaaattatgcctgtgaaacagccctactaccttcagacccaagaccccataaaactgtttgagccgtcattgcaacctcctgtaatgcagcagcagcctct

SEQ ID NO: 332736 - DNA, 381 bp, Homo Sapiens
ttatagctaaacaattttattggctttttgtgaaataaaaaacacacaacaaaccaccatggttaaaggccataatcagcatcaaccaaatgaaccagccacttggttacagtagctgataacaacactagtggatattattgcttataccccaagttcatttatacatccattatattttggcaagattacaatcaaatgggagctttggttgtaaaatttcaactatgactactcattgaaaactcatcttctaccattttatgggtggggatacatgtcaattcttccacatcttgtctcctttctccttccatcggataaggatttacaagcctattggaaaataattaagatggatgcatttgtaactatccctac

SEQ ID NO: 332737 - DNA, 312 bp, Homo Sapiens
aagacctagacctacactgaatatgttggatagacccaatttcttttccaaaatctgtatggatcccaatgtggcctccctaggctgtctgtcttatgtctgagaatgactggcaggtgatgcttgtgttccagccagaatgagccttcattcacagtatctggacgaatgccactacattatgttgtgttgttgaagattaagccggctttctcaaaggacttgtgctttgtagaggctcttccagatatcagcttcattgaaaatctgtcagacttttcctcctgtaggaaagttgtttgaaagtatgca

SEQ ID NO: 332738 - DNA, 236 bp, Homo Sapiens
tccatatataataattaacctccataccccaagggccctcaatgtaaggggtaagattgcaaaattccttagaagcaaacatagaagtagatctgcatttccctcagatttgacaatggattgttagatttgacaccaaaagcactagtaacaaaatttaaaaatagattagattctgcaaaaatgtaaagcttttttgcattaaaaaacattttcagccaggtgcagtggctcat

SEQ ID NO: 332739 - DNA, 231 bp, Homo Sapiens
atgaagggacgtaaaacagaattccgtgacccaacctcctagaggaagggcaaagacctgctttgagggtttgaatttaaagttttacttcagattggcaaaggaaatttaagtatactcaactacattttaaggaggtcaacaattaagttttgtaggactttgaaatacacttcaagaaaatagataaccaattaatttatgtaaataattaaaatgcatcttgaaatc

SEQ ID NO: 332740 - DNA, 396 bp, Homo Sapiens
  misc_feature (382)..(382): n is a, c, g, or t
taaagtttggcatagtttaatgaggttgatacatgcgtgaatccacagaggagacagatctcaagaagttagggagtgatgtccatttggccccacagcacatggcccaggcaggcgtcccatcagtgctcagtagatgctgagtgtaacagctggttcccactcttcccctccatggatgggaggccttagggaagtattcatactgccagggtgataactaatcttgggagcgtggcctctaaggtgatctggaatgtgacagagatgtaaaatttggtttccttcaggaaactcctgtagcccaagtcagagggaggcagtgatatggggcatcagatcttgggcttgcttttttttgtgtttggggacaagagagggnaagtctttttttca

SEQ ID NO: 332741 - DNA, 509 bp, Homo Sapiens
  misc_feature (381)..(381): n is a, c, g, or t
  misc_feature (492)..(492): n is a, c, g, or t
taaaaagcaatatttattggaaagaaatattacaggaagtctccttaattcctgtaaggccaaatatggtggcccattcctcccttcccctcctccacacccctaaaatatctccgatttgctcagaaattctctaccctgactcctgggaatctcccaattcctcgttccaaagctagggcctgcatttacaatgtatatagctcccagagggctctgggaagcagcatgaaataatgctgccctgacagtttgttaggctaatcaaagggaaggatgggctaggaaaggtcaatggaattgagggtgcttttactttggacaattttatctttaattaaacaggttctttaaacaaaggcctcggtacagggcaggggnggggtaggacggttctttctggttaaaggtcaactttccaggatggtacttggggttcacccaaaaccctggggggcgatttcaaggaggtcttttagggggaggtatttntggccaggggggaggga

SEQ ID NO: 332742 - DNA, 478 bp, Homo Sapiens
  misc_feature (342)..(342): n is a, c, g, or t
  misc_feature (421)..(421): n is a, c, g, or t
  misc_feature (429)..(429): n is a, c, g, or t
  misc_feature (443)..(443): n is a, c, g, or t
  misc_feature (448)..(448): n is a, c, g, or t
  misc_feature (453)..(453): n is a, c, g, or t
ttatttctgttgagtcacatgattttggagtttatttttcagagaaggtcattaactcagcctaacttatataccaaaggcacagtgacgtcacacaacctctccagagtcatgaggctagtgagtggcaaatcattaaagcctagaatctgtctcctacctaacatattccaacctgaataaaggcaaagagtgtgtgacagaagtgggaagacgggggaccatggggtcaagggctccatgactgctcaagaccacaaaatagctgcccatgggattttcagacacagtgatgcctggggtgggtcttcaggctgcccctgattccccgcttgcccaganttttcaggtcacccaacccttcggcagggtgctttttggggagaggggccttttttttcaattgttccacagtttcccngttccatnttttcccgtagggntaggntccancttttggttttggggaccagggttt

SEQ ID NO: 332743 - DNA, 493 bp, Homo Sapiens
  misc_feature (461)..(461): n is a, c, g, or t
ttttaatgaataaagaggtttaattgactcacagtcccgcagctatacaggaagcatggctgggaggctcaggaaactgacaatcatggtggaaggtgaaggagaaggaggcatatcttacatggccggagaaagaggaagagagcaaaaggagagggggaggggccacacactcaaaaaaccagatctcatgagaactcactcactatcatgagaacagtaagggagaaatccacccccatgatccaatcacctcccactgggcccctcctccaacactgggggattacaagtctacctgagacttggggtgggggacacagatcccaatttctaccctgaggatttggggtgggggatacaggttacaatcccttttcagggggccacttttcacgggggacggggaaggaaggcagattggggagtagttcttgggggcaagttgggcttcatggctntgttttgcacccttcagtttgcttttagtttt

SEQ ID NO: 332744 - DNA, 391 bp, Homo Sapiens
tttatatgttactattagttgtttattatgtcaaccttaaataatgagattcagaaaataagactaagtatagagtttctttgagtgcaaagtttgagaatagccacccagtaagcattgactccaaaggcatggggtgagcattccaaactggagaagttaaggtttcacttccacaggcaaagagagaggaattttagcaggattacaacattttccatacaagaccagtgcgtatgttacagtgctttgattggttatagattgctacattccaaggaagatgactttattaccccctgaggaaagggtgggtgatctaaggtgggggatctaaggggagtcttatctctgggtgcccatttgggtcttccctaaggtaattacagga

SEQ ID NO: 332745 - DNA, 436 bp, Homo Sapiens
  misc_feature (31)..(31): n is a, c, g, or t
  misc_feature (51)..(51): n is a, c, g, or t
  misc_feature (57)..(57): n is a, c, g, or t
  misc_feature (147)..(147): n is a, c, g, or t
aaaggggtccagcattttaggaatggagaangaccagactccctccccaancctaanctggggatggccacccctagtgaaaccctgaacagagggaactgaagttagaagatatggaaaacaaatggtaccaataatgagacagtngggccgtggctgggagggagagcaatctgtgtgtcattactgattgctcactgtgctccagaccagacactgagcccggaggctttctgtatttcaccctcatttcattttcacaccagccataggaggtagataccatcctccccttttaagaggagaaaactgagtcttgcctgagttctattaaatgacagaaccaagattcaaagctaaatacatctgatttcaaagctctaaaaaggtacaaaaaagcaacacatcacatagattgacctcaggcagagtccat

SEQ ID NO: 332746 - DNA, 583 bp, Homo Sapiens
tacagccccgttcccgagggtgtgcaatatcctctagccctttgttttatcttttggtatttctactcagaccagtgtaggtttggcccaagctaaataccttaaaactgactgaagatggagatgatgtgatgatggagggaaaaggaatagatgatttatccctctcaaaagtaatctgaaaattcatgcaatgaaaacagacaggaacccagctggagagaggatggatttggcgccccaggtccaactgcgctgagactcctcgctctgtctctctgagcgcagtgccctggtaggtgggtaacctacctcttctgtgtgatagaggtcatttctgcctcatggggctcttttgaggattaaatgagattgtgtagtgggcatggggtttggcagcttccctggcatgacagccatcatgggaagtgtggcctgagctggggccagcccaccctccattgagcagacgcggcgccacggtgttttcagagtcccctaccagtaattgcaccagccctgtgttctggggaagaaaacagcagtgttgtgggggaccggtatccttttttttaacatactg

SEQ ID NO: 332747 - DNA, 451 bp, Homo Sapiens
  misc_feature (22)..(22): n is a, c, g, or t
  misc_feature (239)..(239): n is a, c, g, or t
  misc_feature (241)..(241): n is a, c, g, or t
agttgtaataaggtaggagaanaccccaggcatcaggtcatatcccacgctttgttcccccacccataggaatagagattcatggtgaaatgcaaggcccttctcctccccactttggaaccttcagcacaagggactggaggagtatgcaatcttgctggacagtaggacttcctatgctggctggcctgggcaatggcagcttcagtggcagcatggacaggccaagatgtcacccncnacaggcttctgcctggggccccgggtttctgcatggatttaagccaccctgggaaggaaatgaacaccaggtctatgttctcagagcaataccttccatagatagcatcatctccagtcaggactctgatttctcacccaaacttgcccagcacattttgatgaatggaaaagaattgaagtccctgttttctctacaacagagtgccca

SEQ ID NO: 332748 - DNA, 288 bp, Homo Sapiens
  misc_feature (33)..(33): n is a, c, g, or t
  misc_feature (55)..(56): n is a, c, g, or t
  misc_feature (58)..(58): n is a, c, g, or t
agaaggaatataaatatttaaaaaaatatatanctttgaaaaatatagtgttttnntntttaaactgtattcccaaagccgattcctgagactgtgctttatatgcacctacggctcctaaaaaacatcagccacagcttcaagcctaagctcacccgagacccaagtcaggaccctctggtgtggagcctggggatctgtttttaaagaactccacagtgcacagtcagcattcagaaccaccattctaaagttttatatgtttcacatggataggcagatagttga

SEQ ID NO: 332749 - DNA, 486 bp, Homo Sapiens
ggaccaaatataaaaccctgagtaaaaattttctattttagggttttccaaacaacatttgactttgtgagtgttttacatctagggtaaatatttgccgggcatttccagcccacgtcagagtgctaatctaaaaacctgttttgttctgctcttaataggaaaattctacattcaacgcagggtactcactctgcctaggaactcacaagtactcaccttccctcagtctccaaggctcgcccacaatacgagcagcaagccgaatccgcatgagagccatttctgagaggctgtttctatctaccctcgactgcactttctcttaatgaaggctacccttcacggtgggtagggaacagggtaggggaacttaatggaaggttacccttcaggtggggtagggaacaggggcacatgggagggaacagggtcaatttgcccgccctcacactcagggtgcatctgcctcagctgggcaaggcc

SEQ ID NO: 332750 - DNA, 481 bp, Homo Sapiens
  misc_feature (201)..(362): n is a, c, g, or t
  misc_feature (452)..(452): n is a, c, g, or t
taaacttctttaaatttaattcgtctgaagtttttcttttatcacaagtcacatcaatccctcgggcccctgctcaaatgccacctcttcctgaaagccatccctaagtagtctctccaaagagccatccctgcccctttctttgctttatccttcacagcacttatcactacctgaaattatgccacacagctatttacnnnnnnnnnnnnnnnnnnnnnnnnnnnnnnnnnnnnnnnnnnnnnnnnnnnnnnnnnnnnnnnnnnnnnnnnnnnnnnnnnnnnnnnnnnnnnnnnnnnnnnnnnnnnnnnnnnnnnnnnnnnnnnnnnnnnnnnnnnnnnnnnnnnnnnnnnnnnnnnnnngaattaggtgtgtggtaccagtggttctaacattggcctggcattttccatttttcccaaaggaggcccagttacttattaacatactgntttttccagtgacaggggttcaaaggtat

SEQ ID NO: 332751 - DNA, 531 bp, Homo Sapiens
  misc_feature (21)..(21): n is a, c, g, or t
  misc_feature (387)..(387): n is a, c, g, or t
tgttgggaaactttaatttantacctggcagtttttctaaatagttccttcatactagtaattaagttatatctctatttcttaaggagcttagaacacgttgttactttagtaaaattcgatgtgtcttcaggaatgcaaaataggaggaaatggacttaaactgcatcagaaggaatctgggccaaatgcaaagaatttccccattatcatgagtgacatcaaaagcttgtttagcctgcttcccaagaaaaggaaagacctatctctctggaaggtttagcatagctctgtgtagaggtatggtgttgaagttcatgtccctggaaacagttttataagtgggcgaatctgctcatctaccatgcttcagtcgtgaatgaagtntccggcacagctgccgatggagtgggtagaagggcatctaaatttagtcgttattcacttgagaagattttcagggactatatgtctctcatccatgctttagtctctcatccatgctttagtcatattccttcttctggaggc

SEQ ID NO: 332752 - DNA, 316 bp, Homo Sapiens
ctcttcccttgtcaaactctctctctcgtccgagtcgccctgtgagggagacgccctggcacccacgtctcattcgagaggatttcaggccctgctctttcctgctctgtgctgtcacgttcttccgcttctctcttacagtaggagtagcgatgattcatgtgttgagaataagacccagagtgtgagaagcgctttccacatttgtcacattgatagggcttttctccagaatgtaatcgcatgtgttcaatcaaatgatgtttgtgtttaaatgccttttttacagattccacactcatgagggctttttacc

SEQ ID NO: 332753 - DNA, 440 bp, Homo Sapiens
  misc_feature (330)..(330): n is a, c, g, or t
  misc_feature (378)..(378): n is a, c, g, or t
tgcttatggtatgactttgggtgggaatttctgatttagtggctgtagttaaatttgtatcaagaaacgtgtcctcaacaatgcaggaggagaaagggaggacacttgctcatgggggcagggacaggagcaagcactaatcacaaaatatttctctttggcaagaggtcctgttttcattgacaggagtgctcctaagtaaggacgatatttcctgagcatctgcactggggcaggcactaggcatgctgtataaagtatgacattaatactgctgcaactcagtggtgcagaggatttttattatccatttttaccaaggagggaaanctgaggctcaggacaagcccaacggaactttgcccaaagtctcacagncaagtgagggggaagttgggaatggggaacccgggtctctctcactccaggattcttcgtct

SEQ ID NO: 332754 - DNA, 196 bp, Homo Sapiens
  misc_feature (25)..(25): n is a, c, g, or t
  misc_feature (48)..(48): n is a, c, g, or t
  misc_feature (109)..(109): n is a, c, g, or t
aacaaaggaagcaagctcttgcccnaaacccctggcaccaagcatccnacgcaggccccccagcgcaataagcagctgcctcaataaagacttgaaggaatgggccggncgcagtggttcatgccctgtagtcccagcactttgggaggcgggcggatcggtcaggagtttgagaccagccctggtcaacatggcc

SEQ ID NO: 332755 - DNA, 235 bp, Homo Sapiens
ttttaaatgtcagtgtttctatgattgtaaactattaaattcttttcctattaaagtacagatctaatctaagtattattaagttgatagccctctagtcagttatattgctattgtaaattcttgtttgttgagtaaaatgtttaaatactatatgtatctcatgtacaaagttgacatacattatattcatgtacataaaattaaagagattagattatatactgttcatttc

SEQ ID NO: 332756 - DNA, 182 bp, Homo Sapiens
tgatgcccctgaggaaacttttggaaggggaggggtatattcacctaccttgattgtggtgatggtttcattggtgtatacatatgtcagacttatcagattgtacactgtaaatatgtgcacttgattaaatggttaaaccctcaattaaaaaagaaaagaggctgagtgtgttagctcat

SEQ ID NO: 332757 - DNA, 526 bp, Homo Sapiens
ttcacaatccaaatctcaaattacagaaaaatgatatacctttcagctatgtttttttgtgtgtgtgttggctgggaatgccaaaaaggttggcaaaaggggcaggaaaaaagtagtggggctctctggtgtactccactcctcacatgtctaccattctgagatttttgatgtcaggttctgccaagtctcaaaacctcaagagttgccagaattcagtcccagtgtacacattctactctaggagagaagataacaaccaccaaggccaccaccgaggacagccctgccttttaggtatggggatgcgggtgtcatcaattgctttgggtttccttctgaggtccaggaaagaggaatttcggggagtcactttctggccttcagtcccggggggaaggcaacagggtggaatttcacaaggcatctgggcagggttcttggggttcctctttctctgggggttttgacagcagggtgggctcttgtggcttcttgtggactgctaagggcatgctcttgcttt

SEQ ID NO: 332758 - DNA, 453 bp, Homo Sapiens
cagtttgacattagtcttttattataaccatattgaatggggtcgctttgccaaaaggagaaatcatttcttaaatcagtatgagttatagcataaagatggatgagaaaaaagcgatagggcatacatggcgtcactgaatattccatcaatcaaatgaattgtgccactgtgagaaaaactactatgacagcttttacatcaaagtggtctcaagcctgtttatacgaactttatatatctttttaacagtataaaaagagagctttagtaagtaacactgaggaaagcagtctggcctttgaggaaggaagcctggcttgccaggtgccatcctcaatgtatccggcctcttctctctgctccacagcctccccagtgcccctcctccagacacacagggcaggggccaggggccaggtgtgtgtccgcaggaaaggagggatggaattg

SEQ ID NO: 332759 - DNA, 458 bp, Homo Sapiens
ccgtttctagcggctttatttttgacatacacgacctcagacacaagcggggcgcgcagcctaggtgtacagaaaggagcgggctcggaccgacaccccctcccccgcacgcaaggtccaaagcaaacgcaactgcggcgggacacccggcgcaggcctcgggcggtggagacaggcttagcttccaggaaagagcagcagagagcgattcccagaacgcgagggcttacagttccccgagaagcaaaagaaccaggtccttcccagggttctccattattttttcctcattaaaatatatttttaagtcagcacaaacataaccaaattgtacagctttaaagttcaaagcagtctgcatctagggaacgtgcatgtggtcaggagtgagcgcgtgacagcgaactacgtaactagcacaggtgccaggccccttgatgggaatccccatgctcact

SEQ ID NO: 332760 - DNA, 334 bp, Homo Sapiens
  misc_feature (13)..(13): n is a, c, g, or t
  misc_feature (28)..(28): n is a, c, g, or t
  misc_feature (90)..(90): n is a, c, g, or t
accccatactggntggagtcttgaaacncgaggggaataaggcagagaagaacgcgcccggtcttgggggggtataacacatatgcaatnaggtgatgacatatcaccgttagataataatcgcagacactgaagagtgtgtattcttctcagctcacatacaatctgatagcccagttcactcttccctccaatggtttttactccatcctctttctggtcccaccatcaattaccttggagacagtaggaaatgaaaaagaaaagaggtggaggtaagagagaggaaagacaagtgggaacccagggctcaactagtctgcacctcctcatc

SEQ ID NO: 332761 - DNA, 538 bp, Homo Sapiens
  misc_feature (249)..(249): n is a, c, g, or t
  misc_feature (340)..(340): n is a, c, g, or t
  misc_feature (444)..(444): n is a, c, g, or t
  misc_feature (468)..(468): n is a, c, g, or t
  misc_feature (483)..(483): n is a, c, g, or t
  misc_feature (494)..(494): n is a, c, g, or t
  misc_feature (524)..(524): n is a, c, g, or t
actgggaaatggatgacaatggccagaaaggaggggaccagggaagcttcatttcctatagaaattttttcagggaattcaagatcgacacttagatgctaaggttagcttcagagctgccaaggctctggctgactggaattctttcagtcccatcacaccaagaacctgactgctacttggatagagaaatgaaaggacaggggaaggaggggcatactattaagatcaataagaagcatcgctggngcctattatagctaattagtctagttccttggaagtagctctaggcataaaccaaaactggctgaactgtgacacacaagaacatggggantaaatgaacatcagatactaggacactcttaaacagtgggtcagtcactttagtaggggctccaagtctcttgaggttgctctttaagctatgcttaaccatangccttttcctaatcccaaagaccnggaggggcttttttnagggtcaagtnttcctgtttgcctgcaggcttgggaaggcntccctgcccctggg

SEQ ID NO: 332762 - DNA, 357 bp, Homo Sapiens
  misc_feature (52)..(52): n is a, c, g, or t
  misc_feature (69)..(69): n is a, c, g, or t
  misc_feature (215)..(215): n is a, c, g, or t
  misc_feature (248)..(248): n is a, c, g, or t
  misc_feature (253)..(253): n is a, c, g, or t
  misc_feature (278)..(278): n is a, c, g, or t
  misc_feature (301)..(301): n is a, c, g, or t
  misc_feature (331)..(331): n is a, c, g, or t
  misc_feature (338)..(338): n is a, c, g, or t
atttgaagagatttattctcagccaaatatgatgtgaccacagccatgacanagctcttgggaggtccngagaacatgtgcccaaggtggttggggcgcagttgggttttatatattttagggaggcatgaggcagcaatcaaatacatttaagaaatacattggtttggttcagaaaggcgggacagctcaaaagcaaggtggggagggggttntggctgggggggcactggcgggggcgtctgcantggcntggggaggcaccactgtcatgacangggtctgggacgatgaggtcccnggggtgacggcaggggaagggggtgaggcntggcctncacaagagggaggattcgg

SEQ ID NO: 332763 - DNA, 426 bp, Homo Sapiens
ttaaggttcttttatcatcagatatgacacaaagggaaacatcaaaatgcacccgtaaagttaaatccctagttacctttttttgaagctgttggcaaggtttgaccacttggggcatcttctgctgtgagatgacacttgaaaaacacccatcaaagttttcctggtaggaatctctctttactgcgtgtttttttgaaaagctgacagagaatatgctttggctttgacactaatgaagccaccacgcccggcaagcatttacagttttaaatctcccagtcaggaataaattcttattgaggggccatacctagcctgtcttcatccaaactcatagggtgaatctttgtcaaacctatagggagagaggatgcaggccataggaggatgggtcttgctgaagggcttataggctaaattagg

SEQ ID NO: 332764 - DNA, 245 bp, Homo Sapiens
  misc_feature (33)..(33): n is a, c, g, or t
  misc_feature (205)..(205): n is a, c, g, or t
gagatggggctttgtcatgtgacccagcctggnctggaacatcctgggctcacgcgattctcccacctttgcctcccaaattgctgggggattacaggcgtgagtcaccatgcccagcctaggatgagtttagtaagatttggttatgctggggagatgggaaaagccagggttaggggcacgcaggctggaggaacggggtctnttgggggtggatggatagccatggaggcagaaaggagcct

SEQ ID NO: 332765 - DNA, 507 bp, Homo Sapiens
  misc_feature (18)..(18): n is a, c, g, or t
  misc_feature (30)..(30): n is a, c, g, or t
  misc_feature (42)..(42): n is a, c, g, or t
ccggtgccctattttaangaaatggcccanggccaccccctncctcagcacccacccacccctggtcagtccaaccaccccaacaacctccggggcaagaccccccccttctgcaaaaagattaatggaccttggctgaagggcctcagatggatcctctaggcaagttttaccttgtaaagtctttttaaaattaagatatgtaccattgtttttaaacataatgccagtgcacatttaaaagactcccagtatggtataaataaaactcttatatgcactaggaaaccaaaatttcatgtgactattgagttatttgctttattgtggtggtctggaactgaatatctccaagatatacccatacttaaaatgctcagaggaagaagaagttatcaaccaagagttctgaatcagttaaaacattattcagaaatgaaggtgaaataaacacattcccagataaaccaaactgagaagactcagtgctgcagacatgccacacaa

SEQ ID NO: 332766 - DNA, 468 bp, Homo Sapiens
tttttatatactcctgacaagaaagagttaaggtgggtggtgtacttaagagaagaacacaatgaaaatatctgtgggatatgtgtggctgtgtgtctttacattgcatttacagttcttttaatagtacataaataaattgttcattgcactgtttagagtcatcacttccatgagtccggacctgatggtccttcagagcagctttgtatgtctcctctcatttactataattcacctgtaaactgtccttgactgttggagcccatatatcctatgtcaagaaggtcgctggcattgcgctggtggcctgctctcaacacctcggttttcctaggtccagtggatcccttagaagaagctgttcctgatgagctgtggccacctggagatgggaaactgggcttgctatagggcaccaaggcctcctcatctgtcattccttcccttcgatgaggcaatgctggt

SEQ ID NO: 332767 - DNA, 461 bp, Homo Sapiens
  misc_feature (17)..(17): n is a, c, g, or t
  misc_feature (177)..(177): n is a, c, g, or t
  misc_feature (425)..(425): n is a, c, g, or t
  misc_feature (450)..(450): n is a, c, g, or t
ttttgtaaaaatgtgtnagagggcagctctcatgttgctgcagggctctggagagagacaggcctgacctctcctctccactgtcttgttttgatcttaggcaagttattttagtctgttcctccccaggggaccctggtgtcccacatgaagattagagagagggtgtccaagaancctggcaggtgctaagcagtagatgctgctgaaatagatggcagtgcttctcaaagcatgttccccagtccaagagcctcagggtcacctgggaacttgttagaaatgaatattctcaggcctagactccaacaggaactccgcaggtgggcctagtcatctgtgtattaacaagcacaagaccatcctcgtgtacgctggagtttgagaaccactgataacctcactaaccattataaggtcaactnaaaggtacctcacttattttttttntcttaatttaa

SEQ ID NO: 332768 - DNA, 402 bp, Homo Sapiens
  misc_feature (251)..(251): n is a, c, g, or t
agcctcccaaaggctggaattacaggcttgagccaccgcgcccggccctgagctgagtcttgaaatgtgagtagatgtttgttagataaaccagggaaagggcaccttaggccatcgtggatgacatgatgcacttctcaggtccctcttcaaaactgaaggattaattcctctagctgctggggggctctgttgacagacagccctctgctgcccaccttcttcatgagctgtctcagcgaaggagattntttcagccaagggtcatgggcctttcctttcctggggaaagtccacattcaatgactggttgatgtaggggctataaaggcccagttcttcaccccaacttgggcaagtcagaaggttcattccaagtttagatctcctgggttggttttc

SEQ ID NO: 332769 - DNA, 448 bp, Homo Sapiens
  misc_feature (273)..(273): n is a, c, g, or t
tctctgtgacatatacaagtatatttttgtttttggagctataaattatttaatttagcaatcttcaaagctcataaatttcaacttttcaaataagaaattttaacttcaaataagaagtctaggactttatggctattaattttactatcaaaatatccaagggactccattcaatgtaatagttataattcttctaaatatcatttgaataattctttgtggacgctagactcaagactatgctacatccaaacagtacatctataaccnggggttttggaaggtgtttccatctcaactaccctgtccttcaacttgctacttacttcctctcatgccttcatttattaaacacaaactgtcattttttaaaactggaccttctcctccaaggccctatcagataactttgtgaatatgcatttacagtctctaaacacccaaa

SEQ ID NO: 332770 - DNA, 526 bp, Homo Sapiens
  misc_feature (354)..(354): n is a, c, g, or t
  misc_feature (379)..(379): n is a, c, g, or t
  misc_feature (384)..(384): n is a, c, g, or t
  misc_feature (394)..(394): n is a, c, g, or t
  misc_feature (427)..(427): n is a, c, g, or t
  misc_feature (430)..(449): n is a, c, g, or t
  misc_feature (489)..(489): n is a, c, g, or t
  misc_feature (496)..(496): n is a, c, g, or t
  misc_feature (508)..(508): n is a, c, g, or t
taaacatccattgtatgattagatccttaaggaaaggaattaatctctatattctgacgtaaaagcccagtgactgccctaatagcaaatgctcaataaaaattaatttgtgttgaataactacagaaattaatattataataaaatcctatcttcctatgtcctttatcccaatatatctccctcctctaccaaatatgaggaaggtatttcaaggaaatgttgacttttttttcataggttttgcttgtttttgaggacaggaatatctcggctctggtcacccaggctgggagtgcagtggccccatcatggactcactgcagccttggacctcctggggacttaaggggntcctaccccatggtcaggcctcccnggggnaggctagggnctacagggcaaggcaccacttacactccggctnaannnnnnnnnnnnnnnnnnnnaaaggatggggggtctcccctatggttgcccggggtgggnctccaanctttctgggggntccaaatctttccccgtg

SEQ ID NO: 332771 - DNA, 340 bp, Homo Sapiens
ggttgctgatgttacagtcagaggcctggcttgggagcggggagcatgtgggctcagactctagcgcctcctctcaccagccatggaaccccagaactctgtttcctcatgtggaaaaacagggatgagtattagaagcagtaactgataaaacacatgtgaaaatctctattataggtcagaccttgctgtctcctgctgttgatcacgtccagaaatagaatcgccttttgtaatatgtgtctctccaccacactctgaatggctcttactgcttttctgtctctaaaacagcaccagggcccagctcagtaggatgctctttcacacagcttttttt

SEQ ID NO: 332772 - DNA, 506 bp, Homo Sapiens
  misc_feature (80)..(80): n is a, c, g, or t
  misc_feature (227)..(227): n is a, c, g, or t
  misc_feature (407)..(407): n is a, c, g, or t
  misc_feature (414)..(414): n is a, c, g, or t
  misc_feature (489)..(489): n is a, c, g, or t
ctttttaaacttttaaaaaggcacaaaacaagaaactatgctactcctgcctttgtcgattggtgtatgagcatgcaatncctagagctatggcaatcatcttgcagccaagaaaggtacttgtggtcatggggagagaatggcagcatagaaagagggaaaaaaccaaggtgcctgattctgacctggggacatatcttagttaaaccaaccacccctcccctggngctgtcctacttagggactgacattttatgtgagatgataaatctgattatttaagctgctcctatgttctagtgctgcagcataaaacacatatagcctaaagtgacccatgagtctttacccacagttacatatgtctttttccactttcccaggaaaatattagggtgggctgaatnccccttnatatttctgcatcacagggtagggagttggcatggggttgctctgtgccccaaaccccatctctgtcctttattnccagtctcttcagggtc

SEQ ID NO: 332773 - DNA, 432 bp, Homo Sapiens
  misc_feature (51)..(51): n is a, c, g, or t
  misc_feature (98)..(98): n is a, c, g, or t
  misc_feature (107)..(107): n is a, c, g, or t
  misc_feature (158)..(158): n is a, c, g, or t
  misc_feature (240)..(240): n is a, c, g, or t
  misc_feature (411)..(412): n is a, c, g, or t
aagcaacccttttgccccctgggggtaaaagcccaacttaataggccccanggcgcccttaacgtgctttctccccctgggccctatgtgcatccctnaccctgccnagttatggtggctgccaaagccccaaagggctgtcaatgggggctcttgcnaaacttcccttcctgagctgacctgacctcactgccacctcttgcattgggatcctgagggctggcccctgctcactggatngccctcccaggcccgtcaagccctggtgaaggagcttagcttgtcttcttggcaattcacaatgcctcactccacaccctaaaactggagcgtcccctatggtctcctgctgtggcttgggtgccaggcgctcccgcctccaggatctcctctcacctgcccccattaaanntctgccactcatgaaaaaaa

SEQ ID NO: 332774 - DNA, 431 bp, Homo Sapiens
  misc_feature (39)..(39): n is a, c, g, or t
acccctagaatttccctagaaaatggccctgactcctanaaacactgaatttaccatggtaggtcccccacttgagcctaacctcttttaaacctttccatgaaagtatcccacacgctgttgcctcagttgttccattgatggttacattacttgtgtcattcctagtctgcccctatggaaaaggcagtacctatagaaaccaagcaaagatccaaagaaggaggatggtctctttctgccatctgcattttctctttccaaggatcaggagctcccccaaacagctctcttttgcagagaggagatagagatcacttcattctacaatggacaaagaagggtactttgtggaattttgcatggcctggggtcccagatatgccaccgattaaaaaacttaacagatggactctgagaataggaatatg

SEQ ID NO: 332775 - DNA, 444 bp, Homo Sapiens
cttggaaccagttgaaacatctacttatttccctcatgaattaaatgtttaatgcatgttcatttttatatctgtatgagtcatgatcttacctttttatgaaaattatcttttaagatatataaacattatcatataattcagaaaacctatatgctaaatagttacaactagtatactatataattgggcaggaataattgcttctgagtgagagaaatcaggttaagtgttcacagacagatgctactagtactttgccttaagagttattagaattttaagactcagaatttgaagaatatttcaggcaaacaaaaggcctgttaatcctaagggactctcatggtaatggacctagccagcttttagagtccccaaggagaggccagactcattcccgtgtgattcatgcaggggcaatacccaacttgaaccaatccc

SEQ ID NO: 332776 - DNA, 416 bp, Homo Sapiens
  misc_feature (40)..(40): n is a, c, g, or t
  misc_feature (44)..(45): n is a, c, g, or t
  misc_feature (55)..(55): n is a, c, g, or t
  misc_feature (62)..(62): n is a, c, g, or t
ttttttacaattagttatctcactttaattcttccaagancctnntaagataggnattcttnatttcattttacaggtaacagaggggaagtagcttgccccaaatcacacagggagcaaacagaaagcttggaagttgggcccaggtttaacacccaagcccacagcaccaccaacactgtcccctcctctggccatcccaccccgatcactcatcctacacgaggccagagagccctcttgaggccggtcaaggctgggaaacgcaggctggggaactggcaatggttacctggaagcacgtggggcccggctccccgtggggatgtctgactggtagaagactttgagctctggagtcagcgcgatgaccgtcttaatcaccacggagatgatgtcagaccagaccttcttga

SEQ ID NO: 332777 - DNA, 385 bp, Homo Sapiens
  misc_feature (215)..(319): n is a, c, g, or t
  misc_feature (346)..(346): n is a, c, g, or t
  misc_feature (363)..(363): n is a, c, g, or t
agtcatctaacctgcttggttttccagaaaatgtattatggtcacaccagtatattgtggcttatagcattgctcaaaaaaagacagacctcaacttttaagatgagatcagggaaaacaagtgagtcaaaaccctgttgaacactagcaaagcctttcccttttcatttgatgtattgtgtgtattaagacaccttttttaggctgggcacggnnnnnnnnnnnnnnnnnnnnnnnnnnnnnnnnnnnnnnnnnnnnnnnnnnnnnnnnnnnnnnnnnnnnnnnnnnnnnnnnnnnnnnnnnnnnnnnnnnnnnnnnnttttacaaattaggctgggcctgggtngcacacacctgttagtncccagctatttcagggagggct

SEQ ID NO: 332778 - DNA, 401 bp, Homo Sapiens
  misc_feature (96)..(96): n is a, c, g, or t
ccttgtggtgttgaattgtgctgttttgatccatctgagcacaatttattatctataaaatatggtaattgtgaagatcagctgacatttaggaangcttaagttagggaccaatgatggaaaaatttattcctgtgtaaaagttaaaataggatttagggatgtggcttatgcatttgtcttagcttagtaaaacaaatatgattaatggaaacggtattgtttcgacaaatcactggaattttcaattcagaaatgtataaagtgggaagagaagggttggctcacacctgtaattccaacactttgggagcccaagcagggaggattgcttgagctcaggagttcaagaccaccctgggcaacatggcaagacctcatctctactaaaaattagaaac

SEQ ID NO: 332779 - DNA, 301 bp, Homo Sapiens
aacctgaatgatgttgagacaatgttacgagaagtcaacctttatgtattgcttttgaagttactttgaaaaccacaaagctcgactgcagaagtctcttcaagggaaagggaaactgaaaattattataataatcttacatgttgcaactcagaaaagcaaaacagaaactagatgggggaacttagacatatttagaaaaagaaaaatttcctttaccttatatagtatttttaaatacttaggctaataccttcatactaattgtaaatggaataggttggtataatcaagatcacac

SEQ ID NO: 332780 - DNA, 411 bp, Homo Sapiens
  misc_feature (30)..(30): n is a, c, g, or t
  misc_feature (78)..(78): n is a, c, g, or t
tgtttggaaaataaattctaaatgcctttnaggaatgccctcaatgttgccccccatggaacctcaaaacaatcaagnaaggtgcctgggaactcttatttagcccgttcgaatgaatgcggttgttgtcccaggaggtcaagatgccagcagcttcatcccccttgcagagctcttgcatgtggagaagcaggtcctttcgtgtagggctggggtaaggagctatgggaggcggcgaggcctgagccccctttgctcggtcctgaaggagctggtgagatagctcttccaggagcttgctgagactctcctggacccctgggcttctgtgttacaggcagccacagaacagccaaccaggcgcaggtggttcctggtctcgtgcaccaccctcatcctcttgccgtgtgt

SEQ ID NO: 332781 - DNA, 292 bp, Homo Sapiens
  misc_feature (93)..(93): n is a, c, g, or t
  misc_feature (100)..(100): n is a, c, g, or t
gagaggcctgctttgttacaaagctcgggtctccctcctgcagctcggttaagtacccgaggcctctcttaagatgtccagggccccaggccngcggcancagccagcccaaaccttgggccctggaagagtcctccaccccatcactagagtgctctgaccctggggctttcacgggccccattccaccgcctccccaacttgagcctgtgaccttggggaccaaagggggagtccctcgtctcttgttgactcagcagagggcagtgggccacgtttcaggggagggggc

SEQ ID NO: 332782 - DNA, 300 bp, Homo Sapiens
  misc_feature (222)..(222): n is a, c, g, or t
  misc_feature (264)..(264): n is a, c, g, or t
  misc_feature (273)..(273): n is a, c, g, or t
acacacacacatcaatttattttagttgtataatgcttttctattagtaaagcatcagctaagcttcagtggcctgctccatcccctaatgactcccatgggctatcctaaaggaacttccaggaacctttgttggtgtgttgacattgaccatgcagaccaatttgggcacaactgggacattgattccttttacacaagggctgcctcccaaaggtaggntaaatttttcccagccctaatttggattctggggggcaggtnttggtcgtnttggatggggaacctttcctactggtt

SEQ ID NO: 332783 - DNA, 333 bp, Homo Sapiens
  misc_feature (305)..(305): n is a, c, g, or t
ttctaaatgttttctaatgtccattatcatttcttctttaacacatagtttataagatttttactttttagcgtgcagctattttgctatcatttggtcctgagatctaactcaatgaggctgtaatcagagaatgtggcccttatgatattggtccctgaaatgtgttggggctgtctttagcacctaccaggggtcaactttcataaatgaatcgtgtatttgaaaataattttttatattaattgggtgcaatattctatacatatccattatagggaagttgttaattttgctgtgcaatntttctatatccctaccaatttttcccct

SEQ ID NO: 332784 - DNA, 330 bp, Homo Sapiens
tatttctaaatgttttctaatgtccattatcatttcttctttaacacatagtttataagatttttactttttagcgtgcagctattttgctatcatttggtcctgagatctaactcaatgagggctgtaatcagagaatgtgggcccttatgatattgggtccctgaaatgtgttggggggctgtctttaggcacctaccagggggtcaacttttcataaatgaatcgtgtatttggaaaataatttttttatattaattgggggtgccaatattctatacatatcccattataggggaggttggttaaatttgccgtgcccaattttcc

SEQ ID NO: 332785 - DNA, 511 bp, Homo Sapiens
  misc_feature (20)..(20): n is a, c, g, or t
ccgcactgtccgagtggatnaagttgcccgctgtggatgttcagtgaaatagttggttaagtgcataaagatgcggtgccaggtttttgggggtgggctcctgatatggctcggtacaaaacctagagagtccgtctttggctatataaatctctaaggggtctaaggacttgagtaagacatacagacgaaatatcaaacttgagcttgtcgaataaggagaggtttgcagatgtactccctggaccaccgctggcctgctctggagggtccctgcccaggcggatgtcactggggtctttaatgaggtagattccatcaccctgacaaccaccatcaggtttcacgataaaagtgggcttccaggaggggtcatcgtctttcaccatttgaacctgagcaacaaagagctggaactcgtcaggcagaatccatgagcgagggtagaagttgtactcctcaggaaagagattctgcatggttctcacttctctgctcagagtaattttac

SEQ ID NO: 332786 - DNA, 346 bp, Homo Sapiens
  misc_feature (69)..(69): n is a, c, g, or t
  misc_feature (313)..(313): n is a, c, g, or t
  misc_feature (323)..(323): n is a, c, g, or t
caggccgtttcttgatgtaccttctgacctgaccttttccctgccttcaggacttctgggcccagcctncttgccaggcatgcatatgtgagatatgcatatcatgtatgtgtcctcttggggtgagacttctgcacagccatgcctgcctctgaccagtccacttttcatgttgggggctgtaggctgggggcaggttcagagtctacccaagtacctatgtatgagcaggcagcagcagggcatgggcccatcttctcctttttagcctctgtgttttcattagggcatttcatccttgccaaccaggggnagggcccggnctttttgggctttttggggaaca

SEQ ID NO: 332787 - DNA, 423 bp, Homo Sapiens
  misc_feature (308)..(355): n is a, c, g, or t
ccctaattttaaattgacctgtaaagtaattaaaatgtgttaaaaatattggtaagccctccccatatcttccccctggtttgaagtagaaagatatctaaatgcaaaaaactcaattttggattgctttcactaaaatagttttatggtttaagttgccatgttcttataaaattgggtattgtgcaaattatttcacaatctaatctggatgatggcattttgtgcttctcaaataatccaaaagacaaatggatatattgtactataggtttgaggaaacttgatgtggggctggacgtgggtgnnnnnnnnnnnnnnnnnnnnnnnnnnnnnnnnnnnnnnnnnnnnnnnngattgcttgagcccagggagtttgagaccagcctggggcccaaataggggagacccccccttcacttt

SEQ ID NO: 332788 - DNA, 311 bp, Homo Sapiens
  misc_feature (172)..(172): n is a, c, g, or t
  misc_feature (215)..(215): n is a, c, g, or t
tttcaaaaagaaacggttttattatttttttgtcgaagaaaaaaagccatataaatattagagtataaaacttgcgtgagacacaggaggagggtggggtgggagctacgtgactatgcgaagagaagcgcttataggagaagtcagtacgggggagggggtcgccttagcncgtggacacagcacaaaacacaacacgggccgccgcgggcagntcaaggacagacggctgcgcggacccgccgcccgctgcccacccgccatcacgtaaaagcacaccgcactacactactggctattctacaccagcc

SEQ ID NO: 332789 - DNA, 504 bp, Homo Sapiens
  misc_feature (336)..(336): n is a, c, g, or t
  misc_feature (358)..(358): n is a, c, g, or t
tggggacccaagagcctgcaccccaaggaccagagtccatgccaagaccacccttcagcttccaaggccctccactgcccggctgtcgccagtcaccacggcctcagacagggcttgtgctcagctgacacctgtgacacagctcttctgcctcatgagctgttgtccagctacacctccccgactctgtcctcgtgctgctggcggttctgaggtctgcagattttagctgagttccgggctgttgaaagccttctgacgcttggttctgttatcagtgggaatgaggtgactttcccggagttgtgcaatccttcaggtccgggcagtgtcttntttccagttactggtttcaaanaagccaaaagtctgactttggtgtgtttgtgaatcctctgaggaagccgctgttctcctggggtctccccttcccaccggacctgcctaactttcccccatttagtggcacacctggggtcttcagagatgactccgcggtctgtc

SEQ ID NO: 332790 - DNA, 399 bp, Homo Sapiens
  misc_feature (343)..(343): n is a, c, g, or t
cttttacaggggagacgtaaagctgtcccagttatcaaaaaattcaaatctccgttttcttctgtggactggctgtcaatgagctttcatccagggtgtctcccatgttctgggaactacttccagatgttcctgaagcacttcctgggtcaaaggactctgctgcttccaggagctccatatcacttccttctttctcaaaggacttctggaataggtcgtagatcttctgctgctttgggtccttgtagaggtaatcagtggattctgtcatttctgaaaaattggtctcagaaagcccggcttctgccagaacctttaatcttctcttgaatcagggggnccaaaggtagtcatcagctgtgcccttttgccacgagggtggtgaatgcccacgga

SEQ ID NO: 332791 - DNA, 372 bp, Homo Sapiens
taatgtgtatgtcctagtaaaccgttttcgtcagaataataaagcccgctaagacaaatcacttcgattgcttaaataatctgcttgctctacaaagaagcagtatcaggtagcaattaagcacaaggattctgaatttgagtctacctgtgtttgagtcatggcttctgcatgtactagctctgtaactcttagccttagtgttccctgttggtaaagggggaataacagtaaagttgttttaacgattaaataaggtaatacatgcaaagtatttagagaaatagctggcatatgataacctgcggttaattatctgtatgctgtaactccctgtgggaaaaaaatttaaattaaacttaagtcataaag

SEQ ID NO: 332792 - DNA, 490 bp, Homo Sapiens
  misc_feature (347)..(347): n is a, c, g, or t
  misc_feature (372)..(372): n is a, c, g, or t
  misc_feature (387)..(387): n is a, c, g, or t
  misc_feature (400)..(400): n is a, c, g, or t
  misc_feature (411)..(411): n is a, c, g, or t
  misc_feature (453)..(453): n is a, c, g, or t
  misc_feature (480)..(480): n is a, c, g, or t
tttttcagagcaacaaaaataaaagcttttatttgttcatttgaatataaaacaggcgttatcacagatgtacaaagcgtactggtggtttaacatacaagaaggttgctgtcctttgcacataaaaattttgtttgaaactgtggctggttgagtacatgagtttctctaaccagtcaccacactctgaaataacgctgctaacattcaactgataaaaggggacccatctcccttggggtaaagtgtcaagcagggattaaatatatataataaaccaggcaccatgaggggatctgctcctgtttgattgggggctgtggtttatatgttcactgtggtccccnctttttttgtgccaggttggattcncggggtttgtctggnctttccaaaggcnccagggggtcncagggccaaccatttttttccatccccagggatggtttttcntccgggaccattttggatacggggtgncccctctttt

SEQ ID NO: 332793 - DNA, 369 bp, Homo Sapiens
  misc_feature (23)..(23): n is a, c, g, or t
  misc_feature (36)..(36): n is a, c, g, or t
  misc_feature (50)..(50): n is a, c, g, or t
  misc_feature (52)..(52): n is a, c, g, or t
  misc_feature (210)..(304): n is a, c, g, or t
  misc_feature (310)..(310): n is a, c, g, or t
  misc_feature (341)..(341): n is a, c, g, or t
tgttttggggagcagtggggggntcccgggcaaagnagggggttgggatngnaggaaatgccatgcaaccagggactacttgacatgactcttccagctcatgatctaacccagaccctgcccctctttagctgtagttccccgtttcccactgctcgctggacagtgctacttggctatctctgtgtcttcttaaattccatgtggtannnnnnnnnnnnnnnnnnnnnnnnnnnnnnnnnnnnnnnnnnnnnnnnnnnnnnnnnnnnnnnnnnnnnnnnnnnnnnnnnnnnnnnnnnnnnnnggtcangtccatctctattaaagaaattaaataaatnaaaaaatttccacatgggcccaaatttt

SEQ ID NO: 332794 - DNA, 404 bp, Homo Sapiens
  misc_feature (25)..(25): n is a, c, g, or t
  misc_feature (86)..(86): n is a, c, g, or t
aaggcaacctttcctgctgctgttnaaattttgtcccttggtggtcaatttcccttggctgcaagcaccccagggcaagctctggnccctggcaattgaatccgtccctggggcaatcacccactatcttgcgctgcttggcaggcagctgggaaaggacgtcggacttgaaggcgcccgcagcatgactgcttccctcccagcaggagcttcagctctcccaggttggaggaacctgagtagtcccacccccaaggcatccgtttggcatcacagtagcgaagtccaaaggcatgaaactgggggaagaaagttggcttgactgcgatgatctgcgtgtagagctctgcgggccgggacatggctggtgtgcccgacaacaggatcaccctcttggcaacctt

SEQ ID NO: 332795 - DNA, 462 bp, Homo Sapiens
  misc_feature (268)..(268): n is a, c, g, or t
  misc_feature (306)..(306): n is a, c, g, or t
  misc_feature (337)..(337): n is a, c, g, or t
  misc_feature (343)..(343): n is a, c, g, or t
  misc_feature (352)..(352): n is a, c, g, or t
  misc_feature (363)..(363): n is a, c, g, or t
  misc_feature (384)..(384): n is a, c, g, or t
  misc_feature (392)..(392): n is a, c, g, or t
  misc_feature (405)..(405): n is a, c, g, or t
  misc_feature (440)..(440): n is a, c, g, or t
gtgaaacccttccatctgtctgccctttggacataactcaaataggagcacacatctcatcaaatcaaatgtgggtgctgtcaaaaagtctgccaaaatatcatgccatttgctttttttaaaaagaagaattaaaatcagatttaacaaaattagttatttgttttgttgcttttctttccatccattacagaaacatagacctcaatttactacatgcaggtttatacagtggccttctaggggtattcccaaattaccctaaggntaaactaggataggcacagttttactggggggcaaaanttaggcaggtaggaggaaaggaaacccattncagggngggaccagnggaggaacccngagggcttcttaggctcctgnaacccccntagggggccaggnaaccccgggggtttaggggggcaattacccccatntgggcctttttctcttctccct

SEQ ID NO: 332796 - DNA, 172 bp, Homo Sapiens
  misc_feature (158)..(158): n is a, c, g, or t
aaggttcaggccgtaggttcctcaaggaatctcttaagttttgcccaaagactggtacttcctttcagtagggcgctaatgtatacacattaatgataagttgataacattaaaaatgtagctgacttatcctattaaacctcctctgctatgttcanagaacccccctcac

SEQ ID NO: 332797 - DNA, 362 bp, Homo Sapiens
  misc_feature (45)..(45): n is a, c, g, or t
  misc_feature (51)..(51): n is a, c, g, or t
  misc_feature (208)..(208): n is a, c, g, or t
  misc_feature (260)..(260): n is a, c, g, or t
  misc_feature (276)..(276): n is a, c, g, or t
  misc_feature (286)..(286): n is a, c, g, or t
  misc_feature (300)..(300): n is a, c, g, or t
  misc_feature (308)..(308): n is a, c, g, or t
  misc_feature (319)..(319): n is a, c, g, or t
gcttcaacacatttattgggtggtatggaaagctaccaatttgangtgganccctagcaagacagtgctctgcagcaagaccctgctgggaatgcaaactgtcttgctgtccggccttgtgtctcagcagatccaatgctgctagtgtccctggaagataaagatgctgtgtgaagtcttaagcaaccctaacaggtgaatcacagtncagaacctcagggatctggaacaaggcaattcctttgacagtaagtaatttnaaaagcagcccctggngatgcacttnagtcccagcagagncttaagantctgggccatntaacttctaggtgattaatgcaacttaagccccatcacggagc

SEQ ID NO: 332798 - DNA, 466 bp, Homo Sapiens
  misc_feature (346)..(346): n is a, c, g, or t
  misc_feature (352)..(352): n is a, c, g, or t
  misc_feature (372)..(372): n is a, c, g, or t
  misc_feature (391)..(391): n is a, c, g, or t
  misc_feature (403)..(403): n is a, c, g, or t
  misc_feature (416)..(416): n is a, c, g, or t
  misc_feature (444)..(444): n is a, c, g, or t
cagtaatagtttattgatttccaaatgcacaggggcaccaagtccgaacatcctgggatagcagtaaatctctcttacaaaataatttacagtatgaaaatgatatactgaaacattaacccaaacgtgtaattcccttgaaagattcagtgttcccttgtttaatgtaaagggtggaaggggaagattcctaaggaggggaatgtgactgtgcacagggaaaatagggcagaggacaatgggattcattgggttctccccattcatgcagtgtgggcctgtcactgtaggaaagactgggtcagggtttaaccctcattaagtattaatctgctgtcccctcaangtcatntcaagcccagtatcggcacngtgggctttttttgcaccnatgtatccatangtgtctccacttnttttcatttttctggctctggccctcgntctgctgtttctgggatgttct

SEQ ID NO: 332799 - DNA, 259 bp, Homo Sapiens
aggtcatttttatgcacaactttctgtggggctcaggtgcacctatgatacataaattttacagttcttgatccccaaacagagcaggaggcagggtgcctggggccagggttcctttggggaaatgtggtccttgaggtagagtcacagatgccggagggtgaccagcactactgggggagagatctcctctggggagagatgcatgccaaaggtccctcttgcattcctcatacctcttgatgcggacagagggggt

SEQ ID NO: 332800 - DNA, 473 bp, Homo Sapiens
ggttagtcccaggtgagtttcgtctccagatgagacaggtacagggagtccttggcccccatccctgaccaggctgagagggtgtggtgcaccccattatagatcaagctgcagaatgctgttgcgggtagggctgaaaataaaggctcagaagcactgagatattccatctctggctttctgggagattaaagccctagaaggcaatgtcacttgcagagtaatatcatgggcaccccacactcctcctctgtgcaaggcatttggcagttgctacagcagttctgtttggtgtctattaactcacccctcccatcgttatggtgtcatggccaaagagactgaggctggagaagccagacaacgtggccaaagcaggtagaatgtggctccttggtgcccttcccttcaaaggtgtgagtctcactgcctttccctgagtttgagctggcctcagtgtctggcttctcatg

SEQ ID NO: 332801 - DNA, 320 bp, Homo Sapiens
  misc_feature (222)..(222): n is a, c, g, or t
  misc_feature (294)..(294): n is a, c, g, or t
gtgttagccaccatgtccagcccataacttttaatgattctattgtctccacatagcaatgaaggtaggtatgaggaggctggccaggggatcttctgcatatctgctctttgcaaatgggtggcctctgcagctagtgggagctcaccaggggatttggggctagggagtaatagttaaccaaggccctggggaaatcaccaccattcccaaaggggcatngacaatggttggactcccttaggtgtttcaaacggggcagaaattaaggggtcaatggtaaccatctcatcnataaacttctttatttgaaacacttg

SEQ ID NO: 332802 - DNA, 127 bp, Homo Sapiens
acataataacaagtccagaggtgtgtttagatgactgtgcaatgctaggccactggttctgatgttcttggcttcttccttatggtcacaagatggctgcttcagtaccagttcttatatctgcatt

SEQ ID NO: 332803 - DNA, 428 bp, Homo Sapiens
tacaaagtgacttaaaaaaactttattgcagcttcttagagcagaactgagtgtgcagtgctaggaccatgttgggatcttcagagtgggaaactgggacatcacaggagaagaaagcaagccactgctgggagggctggcgcccccagggaagccacaatattcacaagagctcttgcttgccacactgcagaggacccagcgacatctggccaggagggagaggccgccagggaagatgggctcagggcaccatgttccaccacttgaaggagaagggctttctgcgcacgttggtgcgcagtgcactccccatgcctgatgtggtaggtgaagaagtcgttgatgaaggtgcactggaggcccagtggctccagcagggaacacaccttctcctccaggcagcagcggccgttgatgacgggccc

SEQ ID NO: 332804 - DNA, 466 bp, Homo Sapiens
  misc_feature (448)..(448): n is a, c, g, or t
agaagaaacatttattaattcacatagtttctgtgggtcaggaatttagaagtagcttagctgggtagttctggcttgggttctctgatggcagtcagataattggccaaagtttcagtcatccgaagctttgactgggactgcaggatctacttccaaggtggctcactcttggtttgctagggctgctgtaacaaagtatcacagactgggttggcttaaacaacagagatttatttcctcacagttctgggaggcaagaagtgcaacatcaagggtatctgctgggttgtttcttctgaggcctctctccttggcttgtagacagccatatcctctctaggtctttatatgatcttctcgttgtgcatgtctgtgtccacatttcccccctcttttttttcaagacagggttccattctgtcgcccagggctgaggtacggtggnacaaacatagctcactat

SEQ ID NO: 332805 - DNA, 404 bp, Homo Sapiens
  misc_feature (26)..(26): n is a, c, g, or t
  misc_feature (286)..(286): n is a, c, g, or t
  misc_feature (310)..(310): n is a, c, g, or t
  misc_feature (361)..(361): n is a, c, g, or t
  misc_feature (374)..(374): n is a, c, g, or t
  misc_feature (384)..(384): n is a, c, g, or t
agttccgattgacccatcttgggccnggcgtccctagacaaaggctgtgcagtttacacagtgacctccacaacagccgtggagagatgagggagcaatggatgcttcccaggaggggagggtccattcccagaaagggagggagggccaggctgcaaaaacaatggggacccagtacgaacaggacagaggaccttccctgtgagtgaggagacagctctcagagaaaggagttattaatggtacaggcagaagttccatgatttcacccaggtcagagactttnggagcccatttttgactccctctnttcagactccctctgttcactgtccacccactttcccttgatgtccaattnggacacttaactnctagtacttnctttctttgcttgctttgct

SEQ ID NO: 332806 - DNA, 417 bp, Homo Sapiens
  misc_feature (111)..(126): n is a, c, g, or t
  misc_feature (366)..(366): n is a, c, g, or t
  misc_feature (394)..(394): n is a, c, g, or t
tggactctcttactgattcctggttttagtgtgtgtgtcgggggagtgtgtacctatatataaaggacaagtgtgatatgtgtgtatatgtatatacatacatacatgtcnnnnnnnnnnnnnnnnatatttgagagctaaggaaaactcaaagcagccccttcattatcttgcgtactacttcaaagatttctgtcagccctaattacaagtgtcaccatatagttgggggcttagggtacttgcttacagggaaggaggcaattccctaggcaaagggtcattaggctcctaagggcactgagttcaaagtgacagccctggaagggaaattggcactccagccctcctccagggggtgttctnattaaggtggggggaaacttggggatgncccaggccttttgggtggacctg

SEQ ID NO: 332807 - DNA, 460 bp, Homo Sapiens
  misc_feature (17)..(17): n is a, c, g, or t
  misc_feature (25)..(25): n is a, c, g, or t
  misc_feature (35)..(35): n is a, c, g, or t
  misc_feature (51)..(51): n is a, c, g, or t
  misc_feature (60)..(60): n is a, c, g, or t
  misc_feature (91)..(91): n is a, c, g, or t
ttggcctcccccagggnagccctancggctgaaanggggacagcctacaantaccgggangcctggactcctggttaatccacaaaaacangggaatgtccaaatgccagtaaggaaagttccacccagaaaaagagaagagcccactcctcctaatccttgggcttggccactgaccctgggcaaatcatgtgcccttcccaagagccctcaattttccacaattataaaacaagagacacacagctgatctcctagggctcttctcaactaaaacatatagaaacctttattcacattgccattcctttagaaataaatcatctctacaaattataaagaggatcgctcacagagaaccagtatcagtaagacagctaatgataatttcctgtgaactgattgataattactttttctgttaatcagccccgacaagacatctaaatttctatttggc

SEQ ID NO: 332808 - DNA, 393 bp, Homo Sapiens
  misc_feature (27)..(27): n is a, c, g, or t
  misc_feature (60)..(60): n is a, c, g, or t
aataggaaacatatccagaaaagtccnggaagccataaaccccaaggaaggatttcctgnacaaagagcctttagataaaaacatatttatcaaaaaacaaatttttcagtcaagggcctttagacactgtatcattttctttccttataacagatattcagactacttccttggaagggcccccaaatgccttgccctaagaacaatggacaaaagtcgcagtctcctaattccattagtcagaaaacattgtggtttcagaagtttttgcttatagggcattttgtagcggtatcctggacaggggttgacatggaaacctgtgtttctccaatagggtttccatggcaattctatagattttctcatttgttaatagcaatagccttggc

SEQ ID NO: 332809 - DNA, 648 bp, Homo Sapiens
  misc_feature (11)..(11): n is a, c, g, or t
  misc_feature (21)..(21): n is a, c, g, or t
  misc_feature (36)..(36): n is a, c, g, or t
  misc_feature (47)..(47): n is a, c, g, or t
  misc_feature (51)..(51): n is a, c, g, or t
  misc_feature (59)..(59): n is a, c, g, or t
  misc_feature (62)..(62): n is a, c, g, or t
  misc_feature (81)..(81): n is a, c, g, or t
  misc_feature (245)..(245): n is a, c, g, or t
  misc_feature (359)..(359): n is a, c, g, or t
  misc_feature (504)..(504): n is a, c, g, or t
  misc_feature (510)..(510): n is a, c, g, or t
ttcttttaaanaaacttggtnaaaaccgaaaacctnccggtctccgnaagncaaggaanaanaagctcccaagaatttggnctttgccaaggcccctgaacctgcccagggtcttggggccccctcgttaccggggcaagtggggacccacggggcccatccttctactcctcaagtagcctgggcctctcttggtccaggcctcgcttccgtatgtctatccgtctgtccagagacacagcctnctgggcttgctttccccctccgtcacagggggcagggaggcaggtgggcaggggacccagcccgcctggtgtgaaagctgagctcgactccagtgggccctaaagcgggggacntcatcttcttctggttaataaggtccaggtagaggtcagaacggagaaagcgagggtacgagtccttttccatgagcccgaagatgcgattctgtgccaggtcgaagcagcgcgcgcgtgacctctgcaggttgtccttggtgtntcccgngtgtaggagtccaggttgacctccttgcatgcctggatcgcgatgtattcagcaaagatcttcttggccttggatgccatcttggactgtgacttgaccttcttgaagtcctcacaagccaaccagaactccagattc

SEQ ID NO: 332810 - DNA, 521 bp, Homo Sapiens
  misc_feature (66)..(78): n is a, c, g, or t
  misc_feature (371)..(371): n is a, c, g, or t
tcacctgtgctttcggtgtctcttctctttttttgtgcttgctctttaattcatcttcatctaccnnnnnnnnnnnnnaaacacatagaaggttacacaaacatatcttcctactcagccttggtttataatttactgttgccctaagaatttcagaaaggaaaagaattcttgcttccctggctaggctcttggggtcttgatgtgcaagaagaaatgctgttgtgaatacaaagaatgatgaggaagtatacaaaaggtgccctaggctggctgcgggggtccagcaggctggctacattattctgtggtcaacctcttacaaatggggtgctcctgtccgtctccgtggccagctgccaccagccctnatggtgtgaatggcaaggaagtggggactggcggctggccgaactccaggatgcagccttggctggcagagaaccaaaggcagagggggaaaaacactcttgagtatgagagaaataatgctagctccgaaacctataattcgcaagttt

SEQ ID NO: 332811 - DNA, 445 bp, Homo Sapiens
ggtggtaagtacaggaaaaggagcaatgtctaccattttctttctaaccttcgatttaactattgtaatgttgtaagcttaacagagacttacacttaggcttaatttcaagctcttcaatcatttttcccggttggtgattcaggtgtattctcatgtcttatgtaaacttatcatgagtgttgttgatttataatatatttctttatgtaagccatagccttgtcagtttgagttatatggaagacaaattgtagggaaaaagagcaacagattactcagaaaccttctgtgtgagctgggcatagtagtgcatccagtaggcttagctacttgggaggctgaggcaggaggatcacttgatcccattagtttgaggctgcagtgagctatgattgtgtcactgtactccaatctggacaacagtgagactatgtctgttttt

SEQ ID NO: 332812 - DNA, 295 bp, Homo Sapiens
tgcatagggctcggcttggttatttggatggttggatgactggttatttggatggttggctggctggttatttggatggttggctggctagagaacacagttagttgagtggttatctggctgttccattggctcgattgctttgctgtttggctgatttgttagatggttgactatttggtaggttggctggttagaagttaaattgtttgactatttgttgtcagttggttggtttgttagcatagttaggttggctgtttggtaggttggctggtttattggttgactgaat

SEQ ID NO: 332813 - DNA, 406 bp, Homo Sapiens
  misc_feature (327)..(327): n is a, c, g, or t
  misc_feature (341)..(341): n is a, c, g, or t
  misc_feature (353)..(353): n is a, c, g, or t
  misc_feature (363)..(363): n is a, c, g, or t
  misc_feature (396)..(396): n is a, c, g, or t
agaataagagaggtttttgtgctttatttattcatggtccttttgagttgagagggaaaaaagttttaatattttcaggttggtatcacaaggactgaataatacacttatgaaggctttcaagaaaatgcttgatttgtttctaaaggagaggctgctgatggtaatttgtgtgctgctgtgcaactggatgagctggaactgtcaccggaaagcctgccagttgaggcaaattgggaagtaggtgttctgataaggatgacatatccacagacatccccatttgctgtgtgtaagcaggttgtcccagtagcctgactgtagggntaggagttctgggntccatataggtngggattgggnaaccagtgtccttgtcccaaatgcctatccaanttcctccagg

SEQ ID NO: 332814 - DNA, 411 bp, Homo Sapiens
  misc_feature (222)..(222): n is a, c, g, or t
  misc_feature (293)..(293): n is a, c, g, or t
  misc_feature (311)..(311): n is a, c, g, or t
  misc_feature (317)..(317): n is a, c, g, or t
  misc_feature (342)..(342): n is a, c, g, or t
  misc_feature (366)..(366): n is a, c, g, or t
acctctttttttcagagtctctggtaagaagagtgaaagcaaagaagccaagaagtctgaagaaccaagaattcggaagaagccgggacccaagcccggatggaagaagaagcttcgttgtgagaggtgatgcctgcaacgcgaggctcgccctgcctgtcggggccggggctccatgcatgctcttcattgcagggaggagcttcccaccatctacaagtntccttaccaggggctgcacggccgtgttaccgaggcgctgacggcatgaaggtgagcactggctgtgctgnacccaggcccggcagctntcagtntgaacctggggggaggtagcaggtntttctgcagcctaactcagacttntgcccaaggacactttgacctaggttaaccgagaccttgaagcat

SEQ ID NO: 332815 - DNA, 334 bp, Homo Sapiens
  misc_feature (21)..(21): n is a, c, g, or t
  misc_feature (94)..(94): n is a, c, g, or t
caaataacaatccaatttggncccacagccgccgccctcagtcccctatgtttaaaattagttgttaacaaaattggatgggaaaagtccctanccctctgtgattttctcctttcccaccaattggcatcactgtcatcccaaaacaataattatttcacccatgtttaaaggtgagttcattgtcctcaacagcttcaaaatcatataaagctctcactttccgtgcaaccttattatttaactgaatttctgaagatggatataaggattttgtttctgtgtgttgctgtttctgttcttgcagcgataattcaatagctttagctatgtc

SEQ ID NO: 332816 - DNA, 290 bp, Homo Sapiens
ggtggaggagggggtggaggtgattctggaggtggaggtgggggtggtggcatttcccaagggtaatggaggttgaagcacaggaacatttgactgaaggagggtccagaatggagtaagtggcatgagtgatgaagaagaaacttgaccagaaaaggattctttacaaagagaacttgtagccttccccagccctctttatcgtcaatagggaagtttcacaatatatgggactattagatatatatccccaggaatgttgaaggggattttctcctccgtgcgcgaaa

SEQ ID NO: 332817 - DNA, 475 bp, Homo Sapiens
  misc_feature (15)..(15): n is a, c, g, or t
  misc_feature (27)..(27): n is a, c, g, or t
  misc_feature (32)..(32): n is a, c, g, or t
  misc_feature (42)..(42): n is a, c, g, or t
  misc_feature (48)..(48): n is a, c, g, or t
  misc_feature (56)..(56): n is a, c, g, or t
  misc_feature (83)..(83): n is a, c, g, or t
cggggcccctaaaanatgaccaaaacngtaanaaaaccctgntcccantgtaaaanggtcccaaagggggccacccaaagaangaagaggaaaaccaccatagattcctgaaagagcccatccaaacaacgaataggcctgaaggtaccccacagacaaaaaaatattccctgagggtaaggcaagactatttgtgtgggaaggagttacccccacctgaatgccattgggagttggttgtgtatgtaagtattgcctaaattttacacaggtgaggtttgaggtatgggttatttcccagattggaaacaagaggtcctactaaaacggaagtggtgtttatttctgtgctgaagttgttccattgttcaggtacagggattgaaacatatggcctgaagttcagggggaggcatatccaacagttagtagggttttgggccgagacctcatggagcccagtgagggtggtatt

SEQ ID NO: 332818 - DNA, 345 bp, Homo Sapiens
  misc_feature (220)..(237): n is a, c, g, or t
  misc_feature (272)..(272): n is a, c, g, or t
  misc_feature (310)..(310): n is a, c, g, or t
  misc_feature (327)..(327): n is a, c, g, or t
tgggtactggcgtgggggttgtttgtcaaactgattttcaataattggatttaattttttttaacattgaaaagtgcctgaaaaatggtaaattcttaaatgtgtgtgagattgtcagaatcaacaaaactaggttggttaaacatatctctggtacatcaaggggcatgatacaaaccagtctaaagactgtttataaaggagagagctggcgacttannnnnnnnnnnnnnnnnnggacagagtctccctttgtcacccaggccggagtncagtggccatgatccatgggttcacttcacccctaccntcctgggggctcaagtnttcccctcacccttatcc

SEQ ID NO: 332819 - DNA, 246 bp, Homo Sapiens
  misc_feature (146)..(146): n is a, c, g, or t
  misc_feature (196)..(196): n is a, c, g, or t
  misc_feature (209)..(209): n is a, c, g, or t
ttagaaagaaaagtcttttattagtactgtgtagggaaggctaaagaaatatacatttaattcagaataatttttaagaaaaaacgtggggttccaagaaatggtgatttacattcaaatgaacatgtacatttgcaaacctgggntaagtagatattttcatgaaggcacgctacaaggaaaattcacacagganttatttgtttttncaaaggcctctttccaaagtacaggctccaagtccat

SEQ ID NO: 332820 - DNA, 329 bp, Homo Sapiens
  misc_feature (12)..(12): n is a, c, g, or t
  misc_feature (21)..(21): n is a, c, g, or t
  misc_feature (100)..(100): n is a, c, g, or t
tcctaactcccnaataacagnataaacactcaaaatgtgttcctcaactaatttgaagtcctcaacatgtgtccttaaaggcatgagtgttcaactgganaacatctcccacatgcttaaacatcactgacctcccctccgttgtggcttccctatcatttgaatcccactggaggttggctcccccaaaacatcctgctgaagggctaactctttggttttaagttgcactttccattctgaagcttggaaatcacctctctgcactgtcctagactcttcttgttccagccaagagatcagactgggtttgaagagctgatatccta

SEQ ID NO: 332821 - DNA, 378 bp, Homo Sapiens
  misc_feature (325)..(325): n is a, c, g, or t
actttcaatctatttctgtctttggatctaaggtgggtctcttatagacagcatgtagtaggatcatctgttttttttctcttgatgcatctgcctttgtccatttagtgttgccataaaagataaagagatttgtctcctgagtctggtggctggaaagtttaatatttagcaggtacacctggtagggcttcatgctctggctcatggtggaaattggaaagggagcaggcatgtgcaagcgatcacatggtgagagaagaaggaagagacagagaaaccaaggaagccagattctttcaaacacctcactctcaaggcaacntaagagcgagaattcactcacctggggggagggcactgatcttttcatgaggg

SEQ ID NO: 332822 - DNA, 289 bp, Homo Sapiens
  misc_feature (192)..(200): n is a, c, g, or t
  misc_feature (279)..(279): n is a, c, g, or t
ttcaaattacatttttttattctaaataaaaaccacactttgtgctgaacaatggaatataaaagaatcagatgtacaatgattttagacatctactatttggggaaaaaagtttacaaaatatacaaaactttacagcaatagatagtaaacacaataaataataggagggcaggacttattaaattaatnnnnnnnnntaggagggcacaaacaagctccgcgttttacagaggagctatgaaacaaacaaggagggtggcggcagaagggtttggnccgggggggg

SEQ ID NO: 332823 - DNA, 532 bp, Homo Sapiens
  misc_feature (22)..(22): n is a, c, g, or t
ctgtttgtgacagtgtcacttngccaaggcagcatctattttgctcactgatgtctcttcattctttcaacaactctttatggggctttgactaggggccaggctatggggagattaggtgaaccctggccttagagtcaggctagagttaaagacttcaatgacattattgcgctaactcaagcactgtgcaatgtggcaagattgcacagagaggcataggaggataaagcagattgcagcgagacctggaggacaggcagcgcacaccaggcagggagaggaagaaaagcagaatgagcggcgaagggcatgtgtgggctgtggcgggaggggcacggtggaccccagagactggcagctgtcagggtggctggagccgagaaggccagagaaagagcagagccagatcttcccagggtttggagtcctttcaagaagttctgcctttacctgtgtgtgttgggaagccactgaagagttggattctgtgtctgcggttcctggaacatggtggcccctcaaaagtatt

SEQ ID NO: 332824 - DNA, 448 bp, Homo Sapiens
  misc_feature (391)..(400): n is a, c, g, or t
atacccggaaggtcatatttcgccattttgtctcttagtgagcatgaccaggaagttttttctccctggcatctgcattcaactaacactttaatgttagtagctgtggatcatcaggaaatggcctcgctctggcgccctgaatgggctgccaaattatcatttttagagggggcagtgtgataattgtcaaacctcacctgatattcctagtggttagggggagagctctctcctgccctgctcatgcctatctaactacctgtaacaaggtgagaatgaggtacaatttataaggtgaagtaaggtgaaatttcatttcagtgtttccaaaaacatgattatcatttcactgaaatgaaattttcccagtgttataaattgcctattnnnnnnnnnngcttattgaatgcctacctggcagtatataccaggcaatgtgctggtt

SEQ ID NO: 332825 - DNA, 321 bp, Homo Sapiens
gccataactatactaaaatatatagatgtatttcagtatatataaatatgtatagtttcattttttaataaagggtttttagctataaaagtaaaacgtacttactgtaggtaatttggaaaatacaaatcctaatcctaactcagagaatagagaaaaaaaccccaacaattccaataccacaaaacaagcaccatatgtaattttgtgtaccgttttttcatgacgtagtcttgccctagggtcagcaaatctacatgccacctgtttttgtatggcctgtgagctaagaatggttttaatattttaaatagttatggg

SEQ ID NO: 332826 - DNA, 456 bp, Homo Sapiens
  misc_feature (174)..(174): n is a, c, g, or t
aattcagtcaggttgctgtcagggtatttaataacctaaaaggcaacatttagaggaaatgattttctatgcttcatgtctcctaaacttccaacagcatgtaacactgcccctttgcactccctctgagaagggagggtggggtgggcagtgatttggagggcccagcggttncctcattgttctctcatcagtaaaattaaattccatttaatttaattccacaaatttcaagggttaaaaaagttcatgttggtgcctaatcaccctggtaggctactgtgtagtcctgcacagtccaaagcaggggccatttgaaatgtggctagtccaaattgagatggcctgggtcatgagtggaaaattcacattggattttaaatacttagtatgaaaggacaatataaaatatctcgttagtaatttttatattaatgttgaaatgatattgtaaat

SEQ ID NO: 332827 - DNA, 423 bp, Homo Sapiens
cagtctgatgcatgatttttttataaatatttcatactcttgtgaatttggatctttttactttgagcatatattttagaatatgtgtatgttaaaggatctccacaatgtctgcagtgtgaaggcaggttcattgtggaatagtttaacagtcaggaaggctaaactggtcagtattaatgtgtagccctaccaaaaatagccagtagtatctgaaaatgaaaaataaatgaagtatctctaggaaacagtctggcttaactatttttgaaaatataactgtttcccctctctgctgctttagatgttgctttacatagaaccagaaaatggaatttctcagctaaagcatgtgtgcctgtttcatctaatcaagcagagctaaaatgttcataccgaataaatttatattaataaattact

SEQ ID NO: 332828 - DNA, 344 bp, Homo Sapiens
  misc_feature (15)..(15): n is a, c, g, or t
  misc_feature (24)..(24): n is a, c, g, or t
  misc_feature (36)..(36): n is a, c, g, or t
  misc_feature (41)..(41): n is a, c, g, or t
  misc_feature (54)..(54): n is a, c, g, or t
  misc_feature (86)..(86): n is a, c, g, or t
  misc_feature (92)..(92): n is a, c, g, or t
  misc_feature (287)..(287): n is a, c, g, or t
  misc_feature (289)..(289): n is a, c, g, or t
ccctgggttcaaagngaattctcntggccctaagcnctccnaaagtaagctggnaggaacaggttgttgaatgccgcaacccaagncctgtntctctttttccactccttccttttttcctcatctcttttctgggttaacctgttggctttccttaatctgcctgttttgcaagcaccttctcctgtgtccttgggagccctgagacttctttctctccttgcctccacccacctccaaaggtgctgagctcacatccacaccccttgcagccgtccatgccaacnancccaaggggccccattgccaaagcatgcctgcccaccctcgctgtgccttagtca

SEQ ID NO: 332829 - DNA, 417 bp, Homo Sapiens
atctgagtgccaactgcctgaagcagtaggggaaggactggaggcagggagtgcaattgaagtgagtggtgacaacctgcaagtgataagggggtgggtatggtagatacatgagagaagagtacacaaggtttagtgattatgctgtgggaaggggaggaaccagaggtgattctgaagtttggaactgagcgactgagagaatgataaaaatagggaaatcaaaattggaagtcagtagggtatgggatagggtaggtcagtgagtagcgtagttgatggacatgaacaggaagagtagaacagtgtcaggaggctgaggccggagaatcacttgaacctgggaagcagaggttgcagtcagctgaggttgtcccagtgggctctggcctgggggacagagcaagattctgtctc

SEQ ID NO: 332830 - DNA, 298 bp, Homo Sapiens
tttggatagtcctattttccaaggtaaaacaccttagtgaatattttagaagtttagattgttaaaaaaattagtgtgtgtttacttaaaacgagagaactttaagtctatcataaatgtctattttggttgattatgggtctagtgaggcataacacacaaaaatgttgaacattccatttaaccatgtgggaaaactgggaattctgaaggattaaattttggtagaagacaatgggaaaattccatataactaagaggagatgagaagaagtatataagcttataattttctgga

SEQ ID NO: 332831 - DNA, 235 bp, Homo Sapiens
  misc_feature (28)..(28): n is a, c, g, or t
  misc_feature (56)..(56): n is a, c, g, or t
cctaattttgtaatttgaaacccatttntttttgcatgcccctcccttccactgcntgttttaggccatgctccttcattgttccattatatcacacctaaaatacttagcaattcttcgtggaatgctgcaagctgcctttatttccccactgaccatggtataagctctatactccccagggctgtggaccctttgaacagttccatagctgggcctttctggagggactggc

SEQ ID NO: 332832 - DNA, 573 bp, Homo Sapiens
  misc_feature (27)..(27): n is a, c, g, or t
  misc_feature (36)..(36): n is a, c, g, or t
  misc_feature (65)..(65): n is a, c, g, or t
tctgaaacccctgcctggtcttgtttnaagtaccanttcctgtgggaaattgttgcattgttccntagttgtgccccggttcccactccccctccccccaggactggtttgatgtctagagctgccttttcacgtggccccaccctcccctcttgcatagtggatctgaaaagcagcaccttgtgacttaacatcacctgcttcatgtgctgggctagctctcgtgccagccaaactcgggaggaaaagggacctaaggatctaggccaggggctgggctgaaatcagtagagggcagggaggaaagaacacagttcccacgctctcatctctgctttgctggtgaaggctgattgcccccagtgaggccgcatggacagtaggcggggtgggagtacttggggagggtgcacctgggatgtgctgtgccctttcacacagacggaggccttccccgttcctgggagggcaccgacagtcagactgccccgggctggacggaaatgtattatgcgtgtttctgggattgtctgtcgctaccccagagggatccctctaggcaagtggggaaca

SEQ ID NO: 332833 - DNA, 321 bp, Homo Sapiens
aacaggaaacaatggccaaatccaactatggcagtttttgctagaacttcttactgataaggacgctcgagactgcatttcttgggttggtgatgaaggtgaatttaagctaaatcagcctgaactggttgcacagaaatggggacagcgtaaaaataagcctacgatgaactatgagaaactcagtcgtgcattaagatattattacgatggggacatgatttgtaaagttcaaggcaagagatttgtgtacaagtttgtctgtgacttgaagactcttattggatacagtgcagcggagttgaaccgtttggtcacaga

SEQ ID NO: 332834 - DNA, 234 bp, Homo Sapiens
  misc_feature (193)..(193): n is a, c, g, or t
  misc_feature (204)..(204): n is a, c, g, or t
ataatgattccatactctgtcatgacaatttaacttagctaggtcatcttacactaaatatgggacaattttaatgggttatcttgtataacattactcactagcagttgatgcaggtggagaatatttagctgaaagacttaaaaatgctttattcttggctactgaaagtgtggttcatgtatccaacagncatccagcatncacctgagggttgtttaaagtgtcaggact

SEQ ID NO: 332835 - DNA, 396 bp, Homo Sapiens
  misc_feature (16)..(16): n is a, c, g, or t
  misc_feature (21)..(21): n is a, c, g, or t
  misc_feature (312)..(312): n is a, c, g, or t
  misc_feature (356)..(356): n is a, c, g, or t
ccctcaattttccccnccccnggaaaatggagaccagcacctaccctgccccaaaggtaccttccagatgaacggagacaatcacaaacagtatagcctgagcgctctccctaatttacacatggattgaggacactgactcctttaggattttaagaatctactgtaaattgacatctcacccaaatcatgtagatataaaactcaaattttattgtataggttaaaaagtatcccagttataggtctgggccttcagtagggtggaaaactagtttcagtcttaaaattatagagttggtcaggtgtggngtacgccttgtaatcccaatacttttggaaggcttgaggtgggnggatcactttgaggtcagtttgagaccagccttggccaac

SEQ ID NO: 332836 - DNA, 492 bp, Homo Sapiens
  misc_feature (293)..(293): n is a, c, g, or t
  misc_feature (296)..(296): n is a, c, g, or t
  misc_feature (304)..(394): n is a, c, g, or t
gtagagtcagtttcccctctatcttgttaccccataattcctgtggaaagtttcccgtgaacttgaattctgccttctaactattgtcaccatttggagatttcctattatatgttgtgtcacaactgctggagatctaccttttcactttttcatctcttcttcgtttagcctgcttcgtaatttgtaacctccccaccatctccttagaatgcacgggcagtccttatttctggcatacatcaagaaaggaatcagagcctgattgctttgaaaatgcccaggattcctancgngcccgcannnnnnnnnnnnnnnnnnnnnnnnnnnnnnnnnnnnnnnnnnnnnnnnnnnnnnnnnnnnnnnnnnnnnnnnnnnnnnnnnnnnnnnnnnngtctctacaaaagatttctttaaaaaattgccaggcatggtggcacaaacctttggtcccagctactcaggaggcttaagtgggagggtcgcttgaac

SEQ ID NO: 332837 - DNA, 375 bp, Homo Sapiens
agcaaatacctgaaccaagtttttttctgatattctaagaactgccctggagtgccttttaacttttgtactaccacgcaaagtgtactatcaattcatgtccctttagctcttctaattcttcaatgcatttctccccattcctgtaggtatggcggggatcaacttttcatacccacccaagagtcacccctattccctttgaagtaactgccctatggcataagcttgttcatacggtgttcaaacagctaccgttcacttctatgagggtcaccttactggacaccaaggtatgacgagtaactaaatcttctcatcaagcagaagggagctggactttagaaatggagcctgggccacgaagagtcgtca

SEQ ID NO: 332838 - DNA, 423 bp, Homo Sapiens
  misc_feature (22)..(22): n is a, c, g, or t
  misc_feature (60)..(60): n is a, c, g, or t
  misc_feature (67)..(67): n is a, c, g, or t
cccgagtagccggggacctaanggggtgcgtgcccaaacacgccccgggccaaattccanacctttnaaaattttataataaataggttttccttcctgtcccttcctaatttcagagaccctagacaaacaataataaaatacttgtacagaatgtgagactttaatagcaaaataaatctagacctgatatcataatttgttttctaaagcttctcaaatcctttaaggctaaaaggtaaagaacctctgaagatgtctatttttggataaagtgcagtgaaggaggaagtacctgtgttataagttgtcacatctgttagtgctcagcgctgtcctcagattgtaatgactggagtatgtcccctcacccactgaccccgaatctaatcaaatatgtcgccccataagatttactcagcg

SEQ ID NO: 332839 - DNA, 408 bp, Homo Sapiens
  misc_feature (28)..(28): n is a, c, g, or t
  misc_feature (34)..(34): n is a, c, g, or t
  misc_feature (50)..(50): n is a, c, g, or t
  misc_feature (64)..(64): n is a, c, g, or t
gctaaaaagagaaaacacattgaataanagccantccctgaaaatactgnaggcccccgtgttncctcacagccacgtgcagctgggaaatgctcagaaagaggatggggttgtagggagagaagaaagctctaatctccaatgcctctcttcagacaggtgctgcaaatgcagacgagtcactcaggactctcccagtctctcccacccagacccgggcttctgaagggcaggccccacctcagcagcctccctggaacttgttcgagaggcagctcctgggccccacccagccctcttgacccagaaagccaggatttggggccagctgtctgctggaacagatcctgcaggtgcccctcactgcttaagaacctctgccctacacagaggggtttctggtgtttt

SEQ ID NO: 332840 - DNA, 410 bp, Homo Sapiens
  misc_feature (82)..(90): n is a, c, g, or t
  misc_feature (314)..(314): n is a, c, g, or t
  misc_feature (374)..(374): n is a, c, g, or t
ttttaaattaaaatgaccttttatttgcctggacaacaaaaattttccatgattttgcttttttgaaacaatgataagaaannnnnnnnnaggcaataagatactaagttgtatcaacaaactgcatgggatatttccacaaggagaggattttgttccctgattctagtttacgtgacattttcccttatgctttgctttctctgagctgactcttcttaaactgacctagatggtaccctatttcaactgactcagagttcattcaaaaatatgatatggtgacttggcttcactgacatgaactccagggnactctctctactcttgctcacattcttccttgcccaaggttccagcgtggattttagggntatcttatgccaacccagtgtgcccgtcacttctca

SEQ ID NO: 332841 - DNA, 366 bp, Homo Sapiens
tcagggtcacgtgcagattatatctttattgtagaaaactccagtgaactagtttatgtcctattgtggaaactttttcagatattgtagaaaattaatggacattatcttggacctagaaaacttcaatttatagtaagattttaataaagagggaatttataaggggatttcccaattattttgttttggctaatttgtgccatatattccccttaaaagcctcagataattcagagtttcagtgtatttcaggttcctggaatactgatcctctaccaagctctaaggcaaaggagtttaaaattaccttcatttgttgtgtaatttttttccctaacaatagatttcctctttcagaagtaa

SEQ ID NO: 332842 - DNA, 370 bp, Homo Sapiens
  misc_feature (12)..(12): n is a, c, g, or t
  misc_feature (22)..(22): n is a, c, g, or t
  misc_feature (126)..(126): n is a, c, g, or t
tgggcccctggngggaccctgngggatatggccccattcggcatcccccaagaaaactggtattttccccaccctattcttgggtttcaagttgggggaaccccactgatatgggagggccaactntatatattgaaaacaatttgcatataagtagaccccacactggttcatacccctgttgttcagggtcagctctatatctttccaactttgtgcattgattgaaaaaccaacaacagtatgatattagggctataacagatctgttagccaagcccacatgcccctgaacagaacattctgcacattgggccaacttccaactgccggcacctgaagttatttgcattatcagctatctttgtcc

SEQ ID NO: 332843 - DNA, 423 bp, Homo Sapiens
  misc_feature (11)..(11): n is a, c, g, or t
  misc_feature (48)..(48): n is a, c, g, or t
  misc_feature (291)..(291): n is a, c, g, or t
  misc_feature (319)..(319): n is a, c, g, or t
ccagagatttnttgggtatgtggaagaacttctcagaattgactaagnattttcttggaaatttcttggaaacatttaaatgattagtgctgaagttgtgggagagtaatttccttctccatgtaagatgactagaaagagagagtgtgtttggttccggttacaaccccctgaagaagtgagacttcaaaagaaggccgtgctgcccacaggtcagctgtccactccttccatatgagggcgtctcctcccacttttgccacagctcatctcttaaccctgctcctccgnttcctcccaaaacagaaacttgaatggnaagtccattgctgatttgtcagagtggaaaggaccacttctccagaagaccgagttctccccttcctgttctgacatgtctgctttaagtaaatccgtatgcac

SEQ ID NO: 332844 - DNA, 402 bp, Homo Sapiens
  misc_feature (303)..(303): n is a, c, g, or t
  misc_feature (352)..(352): n is a, c, g, or t
  misc_feature (367)..(367): n is a, c, g, or t
  misc_feature (385)..(385): n is a, c, g, or t
atttagcagtctgaaacacaattagatatacaattttggtctgcagtgggaaggtggctggtagtctgaatctgattttcagatagctctgtttttttggccaacatgctccaatttactgcagtctccgccactccctattgtcctacactaggcctgcttcactcatttgttgcctacctggctctcataggtatcttgagtttgtacttcttttactaaagcatcaccggctccatgaagacctcaaccactgtgagttccacaaatgcactcagggaaagcataaggaaaatacagganggttaaagttctcaggatccatctttctgctcacttctataaacttccnggcagccccgtgctnatcacttcaggacacggntaaacctggcatgcttt

SEQ ID NO: 332845 - DNA, 415 bp, Homo Sapiens
  misc_feature (22)..(22): n is a, c, g, or t
  misc_feature (32)..(32): n is a, c, g, or t
  misc_feature (37)..(37): n is a, c, g, or t
  misc_feature (83)..(83): n is a, c, g, or t
ccttaggccaacaaaaacagtnattggtaagntgtgnaccaaaatttaaggaccttggaagatgtggagaattttccctggantatcccaggtgggcctaatgtaattgaaagggtccttaataagagggaggaaaaagggtcagagtcagagaaggcaatgtgacaacggaagcagaggctggaatgatgtgctttgaagatggaagcagaggccacaagctaaggaggaaacattctcccctaccgcctcagaaggaacaaagccctgcagacaccttgcttttagcaccgtaagactagtttaggacttctgacctccagaactataagataataaatttgtgtttaagccaaaaagagttcaactttaaaaaccccataattagtataattctgtttcagaatatcttaaa

SEQ ID NO: 332846 - DNA, 468 bp, Homo Sapiens
  misc_feature (438)..(438): n is a, c, g, or t
  misc_feature (456)..(456): n is a, c, g, or t
agactgcatagggctcggcgtggatcttgttaatgctgattctggtacagtaggtctagggcggggctgagattctgcatttctaacaagaacccaggtgatgctgacgctgctgggccaaaaaagacactttgagtagcaagggttaggcaacctttaaagggcccttcaagagtctaagattccatgaaggatactatttcctctacaagcttgtgaaagtcttccagtgctactggggaatgggggtacagggataaatctcactgtttttgacctcacaggaagttaaaccccttaggattcatgtttcttcaaaatggaaacactgggattgctggaactggatgggcatttgaggattaagggctcccaaaatcctgggggagttttccttacctaaactcccactggccttttgccttatggatggcacantgcttccctctattcccnccctcccggggt

SEQ ID NO: 332847 - DNA, 462 bp, Homo Sapiens
  misc_feature (36)..(36): n is a, c, g, or t
  misc_feature (42)..(42): n is a, c, g, or t
  misc_feature (56)..(56): n is a, c, g, or t
  misc_feature (71)..(71): n is a, c, g, or t
  misc_feature (316)..(316): n is a, c, g, or t
cctccccgggaggtgcccccagggtccccccctcgnggagtnccagaagagaaaanggcccagaacccccngttttaataaatattttggtgtccttaattccattttaaagtttcctatgcctgtaatactttttataatgtgccctaatatagtagtacaaaagtaaaagggatatatgctttaaataaattaataaacacacagagagagtgcatctcacgaagtttttgctgacaggcatgtgtaattgaaacagatgggggcccactgctttggagaattcatgtgcaggcagagtggttagggaggcccnaccttccgggctcccacactcacctgaggaagcctctgcaggtgttcagaagagcaatgccccaagatacctcccagacctgattgagaggtgatgcctcgtaatcttgatgctagattttccttgaatataaggccactcgtgcc

SEQ ID NO: 332848 - DNA, 432 bp, Homo Sapiens
  misc_feature (54)..(54): n is a, c, g, or t
  misc_feature (400)..(400): n is a, c, g, or t
  misc_feature (408)..(408): n is a, c, g, or t
ggaggctcatatattgctgcagtttctgtggggtcaagagtgtggaagtggctnaagcagaatgagtccagctcagaatcccatgagtctgctaatcaagctattttctggggttgcaatcatctgaaggcccagctggggttaaagaacgcactttgcagctcgctttttgcctggctcagaagatccatttccagactcacttacactgggcaggcctcagttccttgccatgtgaatcactgggatggggcttgcctgggacctcctcaggatacagcaattgctaataaaagaggtttaaggggaaccagagaactagacgataaaagagttggctaacctggaaagccccaccttccaaccttggggattcaccttttttaaccttgaggttttnggaggggncacacatccaaaccttttcagacc

SEQ ID NO: 332849 - DNA, 412 bp, Homo Sapiens
  misc_feature (188)..(188): n is a, c, g, or t
  misc_feature (215)..(215): n is a, c, g, or t
  misc_feature (273)..(273): n is a, c, g, or t
  misc_feature (302)..(302): n is a, c, g, or t
  misc_feature (362)..(362): n is a, c, g, or t
  misc_feature (376)..(376): n is a, c, g, or t
taaattttacaaataataaatttatttccaaatcctgaattataaccaaattacaattccctttaggtcttttttgctgctttacacaaggattaaaaaagacagccacagccaagtcacgcatacaccaagtgtcctggggccagttttagatgcgatgggtccagccacctcccgctgccccggcnacccttcgggatactctgcagccccgntcccgccatgccgtgctcctgcatgggagggaacttcaccctcctctgccagagagtntgggtccagcagggaactcccctgggggnccgtggatatgcacagatgaaagtcctcagatgaaagggctttgtccgcagcctcagggntcccgccagaaggnttcaggacccaatacctgctgccatcctttttgggg

SEQ ID NO: 332850 - DNA, 471 bp, Homo Sapiens
  misc_feature (428)..(428): n is a, c, g, or t
gcataatattttaatttgtatatttttgtgatttattttggcgttatgagtttgactctcggggagttttgttgttatgactcttgtgtcttttgtcacaaaacaatgatatttgctaaacgatatatggaatttatttttcgattggtaataaaaaatcaaatatgtataaatcctggtgaatctacaacttgcctgtttgttctgtcagtattcagtatgttgttgagataaaagtggctgtggctggctgtctcttgtgatgggacaagggcaataaaggattctaggaccattcagcagtgaaatgcaatcagaaatgggaatttctaaatatagtcaaggctgtccgtcacaggagtgagagggacgtggctgctggcagacatacaggacagatgtgctcagctgccataagcatgagtccngtgaacagatcccatagggccctggcttgtgagtactggaggg

SEQ ID NO: 332851 - DNA, 410 bp, Homo Sapiens
  misc_feature (25)..(25): n is a, c, g, or t
atttcttggaattctttcccccttncattccctttggtttgcatggttctgagtgatattaaatctcagcatttggttgtgcagacccttctaggctcccatccccagcaaggccctcaccaagcatgctggtctttaccctctcaccccacccacctcctgcactgtgaggctgtgggtgagttacagctgagtgctctcgtgcccagtttcccacaccacatcttcgcgagtttgcaagggcagggagtaccttttgttctcgtgaaccctcccttcctagacaccctgcaaaccccagtgcctttatatgatgtaggccaaattgaccatagagatttgagttttcacctaggttttctccccgtgcttgcaagttgtactgtaacaatggacaaaggacaaaagtt

SEQ ID NO: 332852 - DNA, 593 bp, Homo Sapiens
  misc_feature (320)..(320): n is a, c, g, or t
gtcacattgtactttatttaaaggtggccacagcatttaaagtgtcagttcattttgtacaaccagaaatggaaaatgagtcagtcaagctgaagcagaagtttctaacaaagtctaaggcatagttctatataactaataataaggatacaatatttggcttactgaattcccaaactgaggtcactaaaatttaagattatctaccaaaacttaagcgaaatctcagagaaactttaaaaataacattttatttttgatatttcaaaatgtttcaatcaatattctgagcctaaatgtgcaggtgagtgctttctccnatctttgcacatgtgaagtgcgcctggaaccatagccccatttttctcaaacaccatcacactcatagaacagaaaggaaagggtagtttcaccagctagcccccacaagccactccctggggtcctccccagcacctgctaaatttgggaggcctgatttcaggggggtggataatgaactggcaaaataaacccaaaagaatcgtaattacaaagaccaactcaggttccagttagacagcccataccagtgcttttgatgttagctgcgg

SEQ ID NO: 332853 - DNA, 456 bp, Homo Sapiens
  misc_feature (222)..(366): n is a, c, g, or t
acccaagtgagtcttaattggatttctatagctagcagttaaaagagtttgagtacactgacatttggtaaactatgttttttcattcattcaatgaaatttgttgagtccttgctatgtgctaggcactgtgcgggaaattgagaatataaagcccaaaaactgctctcttaaggtctttaccccagtgaaagagaaccttgaactaataatcacggtacnnnnnnnnnnnnnnnnnnnnnnnnnnnnnnnnnnnnnnnnnnnnnnnnnnnnnnnnnnnnnnnnnnnnnnnnnnnnnnnnnnnnnnnnnnnnnnnnnnnnnnnnnnnnnnnnnnnnnnnnnnnnnnnnnnnnnnnnnnnnnnnnnaaaaagaaattcatgatagactgaaggaggaaaatttccaactagcatttctgtggcagcctccataaatgggttaccaggggtatttgc

SEQ ID NO: 332854 - DNA, 164 bp, Homo Sapiens
ttcccaaagcactgagattacaggcctgagccagcatgcctgggcctaatgagaatcagcctggcctgaggtctgtaaactttaagagggtaagctactatcaaatattcactcaaattttctttttagggactatggaattattaggtataatttcaagcatt

SEQ ID NO: 332855 - DNA, 449 bp, Homo Sapiens
  misc_feature (351)..(351): n is a, c, g, or t
  misc_feature (356)..(356): n is a, c, g, or t
  misc_feature (374)..(374): n is a, c, g, or t
  misc_feature (416)..(416): n is a, c, g, or t
ttggtcagaaatgcatttattaaaaaccaagcagtctcctgttgtcccacatccttccttgttattgcatcctccctccctccctgcctcagcctagaaactgcagccagggctccaggaatcccagccagtggtgaggacttgcactgaggtttctttcagaagtgtggtctttaaatccacggccaatgaattaaatggacatttaatgataaacaatggctatattgtttattccagccatctccatgaaagaaaacaaaactcccttaaaatttgaatatattatttagggaaattccattttacatttgtctctataatgtattgggatgtattatattaccaaanttccnaggagccttttaaaaagncttctgtggtttggcctttggtcttctgtgtcaatgaggggnaaaaaatggattaattggcttctttggaatccc

SEQ ID NO: 332856 - DNA, 694 bp, Homo Sapiens
gacttccataactttattctaatattttgtattttggaatcaaaggagtcagaagatgcatgcatcattttctgggtgtccatttgtgctgccagaagaaaataccacagtctgggtaacttatagacaatagaaatttatttctcacaggtatggaggctggtaagtccaagatcaaggcactggcagattccgtgtctggtgaggactgctctctgcttccaagatggtgtgttgttgctgagtcctccagagggaacgaagactgtgtcctcatgtggcggaagggatggaaggaaacaaaaccactccctcaagcccttttagaaggaccgtgaccccatctataagagctgtgccctcacgacttaatcacatcctaaagttcccacctcttgttaagtttcaacacatgaattttggggaagacagggataaggaaagaacatggtgattaatgctgtccccctggactgattttcaagctttctatggcaagagtttataggcaaaaacaaaatccgtccattgcatgtttgatagtgccatgaacctctcttttgttgcactcatcacagttgtacattaatctatataattacttaatgctcatcttcccttctgatctacaagctccatcagggcaggaactgtctttgttttgcacattacttgacatatagtcctaatagtt

SEQ ID NO: 332857 - DNA, 461 bp, Homo Sapiens
  misc_feature (365)..(365): n is a, c, g, or t
  misc_feature (395)..(395): n is a, c, g, or t
  misc_feature (413)..(413): n is a, c, g, or t
  misc_feature (428)..(428): n is a, c, g, or t
  misc_feature (433)..(433): n is a, c, g, or t
  misc_feature (439)..(439): n is a, c, g, or t
aaaaaggtgaggaaagcctcacaacagctcttagggtagagtactactgttagttgcatgttagggagtaaacaggcacagagagatgagttcacatacttgaggtcacacagcttatacatggcagggctgggattagagcccagggttcattgtatcaggagctgtgctggtcccattttgccatccaccctgcaggagaggacagcaggagtcctgccagagggtaaggtccatggcaactaagaaccagaagggagtgctgccccacccacagaccccggctggggctggggttcggggcacaaaggacttcagtggcctggttggaggaggggagagaaagggagtagcccggcctgagnttcgcccagggatccctagccaacccaaanttccctgcttccagcttnaggaagggaagcatngcccnggcttnagcttgccacagagctaggctt

SEQ ID NO: 332858 - DNA, 301 bp, Homo Sapiens
  misc_feature (241)..(241): n is a, c, g, or t
  misc_feature (258)..(258): n is a, c, g, or t
  misc_feature (287)..(287): n is a, c, g, or t
ttgaattcatgaatggctacgtattgggcagcacagctctgaatagtgatagtcatcattattgcttttcagtcttttggctaagatcaagtgataggtcatcactgacattgacaagcgaactccaaatgaggcacacaatttcctttatacactgattctggtaatgcccctgcccacatattattggggcacaggccatgcaggaatgccacagatgctgggtgggtctcaagtcccngcccaaagaaccctgcnatatatttgccccgcagggatttttattnttttaaattttttt

SEQ ID NO: 332859 - DNA, 398 bp, Homo Sapiens
  misc_feature (18)..(18): n is a, c, g, or t
  misc_feature (36)..(36): n is a, c, g, or t
  misc_feature (53)..(53): n is a, c, g, or t
  misc_feature (124)..(124): n is a, c, g, or t
  misc_feature (144)..(144): n is a, c, g, or t
  misc_feature (192)..(192): n is a, c, g, or t
aggcaattttcccctccnatggcccagggctctccnagaagtacctgcgcatnaccccggcagcagaactacccacagcatgggagagcatcctgcagcaccctggccttctgcatcaccaacnggcatgacccccaaggcctncctagaacggtacctcagtgcgggccccaccctgcaatatgacaaggnccgctggctctctacacagtggaggcttgtcagtgatgaggctgtgactaatggattacgggatggaattgtgttcgtccttaagtgcttggacttcagcctcgtagtcaatgtgaagaaaattccattcatcatactctctgaagagttcatagaccccaaatctcacaaatttgtccttcgcttacagtctgagacatccggtt

SEQ ID NO: 332860 - DNA, 409 bp, Homo Sapiens
caagtacataatttattttgaaactaatcagctttaattacttttaggtgaaggacaaaacctgagaaagaaagatgtaataaaacagaaagagtaatttctcatgtagacacccgtactagtccattcttgcacttctataaagaaatacctgagtctgggtaatttataaagaaaagaggtttaattggctcatggttctgtaggctgtataggaagcatggcagcatcagcttctggggaggcctcagggaacttacaatcaaggtggaaggcaaaggggaaaccagcacttcacatggctggaacaggaggaagagagagaggtgggagaggccatacacttttatacaactagatatcatgagaattcactatcctgaagacagcaccaaggggggatggtgta

SEQ ID NO: 332861 - DNA, 1104 bp, Homo Sapiens
  misc_feature (833)..(833): n is a, c, g, or t
  misc_feature (844)..(844): n is a, c, g, or t
  misc_feature (864)..(864): n is a, c, g, or t
  misc_feature (866)..(866): n is a, c, g, or t
  misc_feature (868)..(868): n is a, c, g, or t
  misc_feature (900)..(900): n is a, c, g, or t
  misc_feature (930)..(930): n is a, c, g, or t
  misc_feature (940)..(940): n is a, c, g, or t
  misc_feature (947)..(947): n is a, c, g, or t
ggcacgagtgaaactgcttaagatgtaatgtaactccgcagtagttccagtatatctccgtatatagcaaaaatatacaataatttacatgtattaacctacaaataggagctcttcttatttaattcaaattatattcagggactcttaatacttcatgcacaaaaagacacttcagtcctaaacctgtattttagtgttgtgaactccagtggtttcaagtcactaaagtttcttaagtcttcagtgttttcttaagcagttttcccttgtggctccctggcgtgttctctgctgactcttgtcccctgcccttagtgttattcccctgctttctatcccaaagcctccgaatgcacacccccagctgccctctgcatggactgttgcatgtgagtagacggccatagtggcgagtcaccttctgactcctgttgggtgcggcatgacccaagtgcagcgcaggccatctgcaggcaccagcgacagacgctgcaaggggtgcttcgtttcagcgttaatgccgctcaagttatcgtttgtcctgagaggtgctcccatgtcgtggtgctgagacctcctctgaagatgggtctttattcctcctgtaacctacctctaacagtccacccagctctgctttaaactgtatgtagaagaggcccatttccagaagcccctggaatggaggagacaggggctgaagcagactcatctgtgcatgactagttcattaggagttcagttgaaattagattagatgctcctaaaaccatgggcaaccaaatacataaagtggggctttcttttccccttgtaacagtgtttttacnttataagattnatttaaagaaaaaaagtttnancnttccccagggggcccgggtgtttccctgacgnagttggtgagaagcctccgtgctcctgagnggccgcgtcncctgggnagggaccctgtgtggccatggggctctgagcatgggagtgcgtctctcctcttctttcctgccctccttgtcttctttccccccttcttcctgtctccccttttctttcatttgtttattttttacttgtttcacttgttaaaggaagtgggcgtta

SEQ ID NO: 332862 - DNA, 392 bp, Homo Sapiens
acacaaaaacttacaaattggcaaattgtttttcagtgttttccccttcacagggctttaaaaatatcttgagtatgttggggttagattgggtggttggaacgcaaagctccaagtgctagaatggacggctgccctctgcagcttcaacacagggatccactcagcccccttagctgactactggtgcttaaaacggtttttgacaaacgccagagtttcacaaatatagaagtagcagttatagaggtggttttgcaagtcccttggaacattcatgcaggtctgcagtcactcttaatttgaatgagaaagaagatggtagaaactatttttattttctcctgggagcaagagaaaaggaaggctagaactctgtactatgtaatttt

SEQ ID NO: 332863 - DNA, 283 bp, Homo Sapiens
  misc_feature (11)..(11): n is a, c, g, or t
atgattaatgnaaaaaaccatggtaaatgactttatagactggtgttagggatacttaagtcatcttgttctcaagggttttgggattttgttcataagcgttttagataggtagatatttactttaatatgattagtttactgataaattaaccagtaaagaaatgtagagatgaatgagataaaagaggcccaagcttggaccaatgataatgactgttggggtatgagtcagtgaggttgaataacagtttgtatctggaaatctgaggtccaacacaat

SEQ ID NO: 332864 - DNA, 542 bp, Homo Sapiens
  misc_feature (47)..(71): n is a, c, g, or t
ctaagtaaaatctgcttcttcagaaatgatgtaactcctctgctaannnnnnnnnnnnnnnnnnnnnnnnngagacggatctcgctctgtcgcccaggctggagaaattgggttgtgagttattattataaacagtagaacatgttaggctaatgtgggtaaaagaactaccacatgagctttgtatggtatttagcaaggcatttatcaaatattacttctggggacccattcaaatccaagtaataagtagtgccataactgagtttcactatgtataaagatgttcattccaaaaagtacaaggatatttttttcccctagggctgcttctgagcggttgccctctctatacctgaaagaatcagaaattaaccaaaagtaggaattctcatggggcttacccatcaagggaatacctttagaatgaggtgctaaggaaatcagcattcctattcctgaaaagcctcaacaagagaagtgaaaatcctcgcccaggatggcttctcctttcacatgctccatgaaatccaccagcctaa

SEQ ID NO: 332865 - DNA, 412 bp, Homo Sapiens
  misc_feature (140)..(140): n is a, c, g, or t
gaggcaacacttccagttgtggtgagagattgaacaaaagaaaaagcatacaatgttaaagctggcaggaccttaaagacactgcctagccctctcactcagcagtgagtcgtagatgattcctccagatcttgacggangccacaggcccttgtttaagaacgtcgcttgctgctttgctgcttctatggggcacattctggtgataaaggccagctgtttttctccaccagcatggagttctctcaactttgtttctggtttttagagtccctggccaattgtctggagacccagagagccactgttagtctaaggtcgcttcataaataagggtaatcccggtcctggattctgccagactcctagaaagactgacagtgaaagtgtcatttcttgcttgggaaaccaa

SEQ ID NO: 332866 - DNA, 475 bp, Homo Sapiens
ggctttaaagcagcctccagcttttatttacttagcccgtaatccttccttggaattctgttgtgccggcagtgcacccatgagatacaattttatgagcactttgaaatgagaaatgtgatgggcaaatatcaagtattgttaatgatttatgtaattatcattggattcatcgcagctgacaagtggctgcttctgtacactctctcagcaggcagggaggagattagaagaaggtcccccttcaaggttgctggctttgctgaccatccttgtcataggaacagagctgtgaggagtcaggagcactggagacccctagtttcaatggattcacatccaccgcagcggccccaatctgggacctggtcagtgttgccgctgctgatggatttgtccagggagcaggagaacatacactggtgattaaaataatgttttctgctaagttactgcaaactttctcctgtgtagt

SEQ ID NO: 332867 - DNA, 277 bp, Homo Sapiens
  misc_feature (67)..(67): n is a, c, g, or t
  misc_feature (116)..(116): n is a, c, g, or t
cccgctcccctggtctcctactccccccaaattatccctttaaaaatccccagtctctgaattttcnaggagactgctttaagtaatacataaaactctggtctcctgtttagccnagctctgtgtgaattaaactctttattgccaattcctttgtcttgatgaatccactgtctgggcagcgggcaagattgaaccgttgggtggttacaatgacaccaggaacccctgggatcaagacttgctcgaagccagccacacttgagacctgttaacc

SEQ ID NO: 332868 - DNA, 401 bp, Homo Sapiens
  misc_feature (311)..(311): n is a, c, g, or t
  misc_feature (366)..(366): n is a, c, g, or t
  misc_feature (374)..(374): n is a, c, g, or t
ttatttttatgaaatttatttccaaattgaagaggcagtgtatataaaggtaacagagcttgtgataatttacagaaatgtttgctacaacatgcacattatgaagtatttcaaacatatacatattaggtttcatgctgaataaataatccccccaaattaatttttatttttacataaaaatataatattgcactcttaacaagaccagttattctgcatattttctctttagataaatgatgaaattcggtttttaaaaaaagatgagtagcaaccctattcctaataggggactaatttaaggttcntcggtaaaaaaatggaaagctggacaatagctggcaattttttggttaaccaaangcaaatcnccttccaccgtggattagggaggtaat

SEQ ID NO: 332869 - DNA, 555 bp, Homo Sapiens
  misc_feature (22)..(22): n is a, c, g, or t
  misc_feature (35)..(35): n is a, c, g, or t
  misc_feature (46)..(46): n is a, c, g, or t
  misc_feature (53)..(53): n is a, c, g, or t
  misc_feature (87)..(87): n is a, c, g, or t
cttgagccgttgaccccatttnccaagtcctgganttaaggccttnaatgggnaattggttcccaaaggcctactccagtaatcccnatttggaggatttaattctgaaaaaaagttttacttttccttagaggcaggcatgggggaaccttttgatcagaaaacacttgcccaaagatggctaatgggcattgtgtcaaaaaagtgaatctgttcttttcatcagacattctgaggacagcataattcctcaaagtgtccttggttgtctaaaccaagcgaaagcaccagcgtaacccaggtaggagggctgtgtcaagaagacggacctaaagggcttctcccctatcctgacaactgtgtccacaggcaaaggtgacagtatgccctgcccggactgcatcatgagtagcaatctgattctgctcgcttcccaacagagaaaggcaagtggcttcatacaccaaggcccagaggaagaggcacagaaagctataaaagtgatgctgggggaggtagaggcgggcagaacacgaggtcaagaaatcaagacca

SEQ ID NO: 332870 - DNA, 436 bp, Homo Sapiens
  misc_feature (146)..(146): n is a, c, g, or t
ttttcccagcagtacatgcagaccgcctttattcccattcccacccccaggttgtgacgtgcccgctgttttgtccgtctatctgttgtcagattgtggcccaggctcctatttccaagcctgagtcccttctcttgtcccggcangtgaaggcaggagggagaatacagtggggaggcagtgggcagaggtttaggttggatggccattatcttcttctctctcagactgctgagggttcaattccatcttcttttccaccttctccagaaatccaagcccatcttgtgtccagccctctcttccctgggttatctacttgaagtctgtctcattccgcagcttcacacattcaaaggagcactaccacttctacgagatatcatctttctctgaaaccaaggccaagcgcctcatcaaggaggctggtcaggac

SEQ ID NO: 332871 - DNA, 452 bp, Homo Sapiens
  misc_feature (206)..(206): n is a, c, g, or t
acttcacttgtttctttttatttggtgttggatccaggacaagggcagtggggaatcgaagcaggggcttccctagcttcatatcccccaggcccctgcgcctctggaatgtaccaacaaggggcaggggtttcagggggctcagctcttcatggggcaggcctcagcctgggtttgtcacagtctggccttgaatttgcctttgncttgaccttccgacaggtgctaggaattgttccgacttcaaagggcagaggcaacaaggcacttccagctgggggcctcggaggcacaggagagcaggagcctcgggtgtgaaaggaggggagaagagggagatgatcagaagtctgtgggaggaaggggcttctgagggagaccagctcttcccttggggtgccagccagcctggggagctgccctcttcctgtgccctccagccctgaccccgt

SEQ ID NO: 332872 - DNA, 443 bp, Homo Sapiens
  misc_feature (22)..(22): n is a, c, g, or t
  misc_feature (63)..(63): n is a, c, g, or t
  misc_feature (79)..(185): n is a, c, g, or t
  misc_feature (211)..(211): n is a, c, g, or t
  misc_feature (220)..(277): n is a, c, g, or t
  misc_feature (282)..(282): n is a, c, g, or t
  misc_feature (295)..(295): n is a, c, g, or t
  misc_feature (298)..(298): n is a, c, g, or t
aacatagcccagaaggtgaaanacacagttctttaaaaaaattaaggatgcctggcccaggcngggggcgctcacaccnnnnnnnnnnnnnnnnnnnnnnnnnnnnnnnnnnnnnnnnnnnnnnnnnnnnnnnnnnnnnnnnnnnnnnnnnnnnnnnnnnnnnnnnnnnnnnnnnnnnnnnnnnnatgggtgtggcagtgtggcctttaanccagctacnnnnnnnnnnnnnnnnnnnnnnnnnnnnnnnnnnnnnnnnnnnnnnnnnnnnnnnnnntaaantccagtttttaantantctttgttaggatacagaaatgctttgtgtcctgcaatactgttaaatctccttattagttttagcagctttttttgtaaatcccttaggattttctatgtatgtgattgttatctgcaaataaaggcatgttttatttcttctt

SEQ ID NO: 332873 - DNA, 647 bp, Homo Sapiens
  misc_feature (613)..(613): n is a, c, g, or t
ttaaatagaagcaaaggccacatttattccacttcttgaaggtgcaggccttggacgtgcccagactcacagtcctggctgcatgtcccaggaccagctggagcctcagagagtgagggagagccaaaggggccccaagacactggcactggccttggccacccattttctcaactttaggctcagtcagaccaagcatagaaagaacaggaggctctctatgttgcctgaggctggcagtggtgaccctcagaaatcacaagggagcggagagagctgtgttcaacatgaaacgcttgaagaggaaggaagacttgtgatgaggtcgtttgacctactgccctggggaaaccccaggaggcctcctctcctgttggctagggagtgaagtcctataaaccagagggagtgggaaggcgtatgagagcttcttctccccacgcccaaccatgggcatggaggagcagtacctgagcctagagaagatagaaaggtcagccatgcagttgctgccacactctttcctgtgggtcccaacagaggtggcctggtgcccagtctcagctgtgctgcttcccagggagaaaggcagtggaaggtaatgctggcgacnatctgccagcagccaggagggaggtaggctgatg

SEQ ID NO: 332874 - DNA, 310 bp, Homo Sapiens
  misc_feature (18)..(18): n is a, c, g, or t
tattcatttacccagttnctgttgagctcccactgacacgtagccgaggctagtcactcagctacatgtcaggaataaaggcaaataaggttcttgccctcttggaagtcgaatttcgttcgaggtgagggaggatataaaaagacaaaatagtacctcatgataaaacctacaaggaaatagacaatagaatgaggtagagaataattgggatggtctgttgggcatgtacttcaggtgatcggaaaggtctctaaggaagtgccatttagacacaccataaaggcctggtgcagtggctcacactgtt

SEQ ID NO: 332875 - DNA, 208 bp, Homo Sapiens
aacaagtaaaaacctgcaaactctttattaaattctcccatttcatctgtacagaaaaaaatgcacattatgttcagaacatatctcagtaacatctcaaaattacacagcatgaacatgtaaaaacaagggaccaccacgattttatacatagaaaggaaacccttttacaaaagaggcttgttaattgtatttttttctttctttc

SEQ ID NO: 332876 - DNA, 459 bp, Homo Sapiens
  misc_feature (16)..(16): n is a, c, g, or t
  misc_feature (30)..(30): n is a, c, g, or t
tggtcttcattttctntttctttttctttntgcttcaagactaaaactttggcaatttctatataaaataaagctttttcaggccttagttccctccatttataactgatgcctgtgtatctttcttctgttaaagtctgtattctaattgaaatttgacttatttttaaagttgtcagaatttatgtgtccaaatcggtgacatttcctttgatactcctgcttttgccaggaatgatttggcaacctccgagaatcttggtcaaattcttctgtgtgtcataaggatgagaaatcattactctttaagagtgatttgagcctgggcaacatggcaaaacctcatctctataaaaattagccctgggcttggtgactgtgctcccagctactccagaagctgaggtagagaggattgcttgagcccaggaggtcgaggctgctgtgactgtgaccgca

SEQ ID NO: 332877 - DNA, 689 bp, Homo Sapiens
  misc_feature (319)..(362): n is a, c, g, or t
gggatgaggtttgccatgttgcccaggctcaaatcactcttaaggagtaatgatttctcatccttatgacacacagaagaatttgacccaggattctcggaggttgcccaatcattcctggcaaaaggcaggagtatcaagggaaatgtcaccgatttggacacataaattctgacaactttaaaaataagtcaaatttcaattagaatacagactttaacagaagaaagatacacaggcatcagttataaatgagggaactaaggcctgaaaaagctttattttatatagaaattgccaaagttttagtcttgaagcnnnnnnnnnnnnnnnnnnnnnnnnnnnnnnnnnnnnnnnnnnnncaatacagttggccctccgtatctgtgagctctgtatccatggattgaaccgactgcaaatcgaaaatattttcaaaaaatggatgcttgtgactgtactgaatgtgtcaactgtttttcttgacattggtccctcaacaatacagtataacaactatttacatagcatttacattgtatgaggtattaataacatgtacattcatgtgtcacttaacgatgatgatatgttctgagaaatgcatcattaggtgatttcattctgtaaacatcatatatttacacaacctagacagtatatagtctactacacacctaggctacatg

SEQ ID NO: 332878 - DNA, 274 bp, Homo Sapiens
tggctcccaaagtgttaaaattataggcatgaaccactgcactgactggacacacccgttactccacccctactagctgtggaaccctgaacccagtcactcacatagtcctagcatgtttctcacctgcaaaataaggtagttagatgatctttaagatctcttttagttctgagttttagggcaacaagtaatacagatgaggtcagtgggcatcaagggctcccacatccccttccagagggaagggccagatctttcatcagggccctgg

SEQ ID NO: 332879 - DNA, 531 bp, Homo Sapiens
  misc_feature (31)..(31): n is a, c, g, or t
  misc_feature (46)..(46): n is a, c, g, or t
  misc_feature (81)..(81): n is a, c, g, or t
gcttaaggaattgcaaaagccccccttcatngaagcgccaattgcntgcccactttgccccaagaaggtggggcattgtgnacaaggcagccagcaatagttcttttctagaagactaatagccactgctactagggattccctaggacattcccagcaaggcctcctcacagcatcatatgacgcaaagtaacagccccacgggttgacattggagtgacaggcctcaactcccaatgggttgacattggagtgacaggagtaggcactggaggcactaagggagggtgagtgagctgattgtcaagttaggaaaggaaaacgaatggagtggagctgaagtggcccaacccagcgcatggcctgtgaagcagcaaagtctggtcttcatcttcaatatgagtaatgtcctcttaccactccttatctgttactgacaaggtctattaccctttagagccaccaggcttcctggcctgggcaactctacaaattctttagttaaaaacactacaaagggccgggtgcaag

SEQ ID NO: 332880 - DNA, 780 bp, Homo Sapiens
  misc_feature (299)..(299): n is a, c, g, or t
tttgacgctgagtgtatttatttatctacgcgccctggagaccggcccctaaatttaaatatccagcacggggccttgctcccttggccgtgggtggttattgggacgggtcctggagcccttccagggagtaggaacccagagcccggagttgggatgcccctgagccagcagctgccgatagcaacaaaaggtgaggaggagatgggagccaggcactcatcccaatcccagagacgccaagcggaacgggaagatgcttcgggccccaccgcaacgcttgagggttggccaagctngggggtgcacacatgtggaagaacttggaggcccagtgccattgagcagaggctgtaccctagatgcccgccccagtgccagccaacccaagacaggagaaagagtttggcagtttcgcctctgaggaatacatgcctggccctcctgtgaggtgaggcggtaggggggaaggcgcaggctccgaagtctgagggcttgccggagggggagtttctgagccttttgccatgggtgcatgccccctgccccccagcccttcagaggctgatgtggaaggcatcctgcagccactggtcacgggcattgtgcgtctggggcacagtaaggggtggcgggtcaggaggcaggctggcatcgggaggctcctcgtcgtcagacaggcccgcatccggtgggtaggagctgtccgaatggagggaggatgacaggtcctggcagaagctcaggtcttggcacaggtgtttgtagtcctggattgac

SEQ ID NO: 332881 - DNA, 367 bp, Homo Sapiens
tttttccaagatttataactaaagcatacacattagatgacttattaacattcacttgatacaacatataaacaaaatagtaacagattctgagtggttattttgtggactgtgacaagcacttcaaatacaaaatgttaggagggcaaaacggtgcgggccctcgtaggtcaggcaggcacccgtgggctccttcctgctgaaacttgtggctgtgagatgagaccgctggctgggtcacagagtgaaatccagcgttccgtgtgcgacgaggagacaagctgtcctggccagccatcgcaccccaatgtcttcagcttgacgttgcttctctgccagtggagcctcctccaccacctgggaacat

SEQ ID NO: 332882 - DNA, 413 bp, Homo Sapiens
  misc_feature (72)..(72): n is a, c, g, or t
  misc_feature (82)..(82): n is a, c, g, or t
  misc_feature (92)..(92): n is a, c, g, or t
  misc_feature (99)..(99): n is a, c, g, or t
  misc_feature (133)..(133): n is a, c, g, or t
  misc_feature (142)..(142): n is a, c, g, or t
  misc_feature (155)..(155): n is a, c, g, or t
  misc_feature (235)..(235): n is a, c, g, or t
  misc_feature (271)..(271): n is a, c, g, or t
  misc_feature (306)..(306): n is a, c, g, or t
agcccaggagcacatgcaaccctgaaagtgtattttttaactttaaaaacttaactgtgactgtcacttcantgaagactcnccctaaaatncacagancgaggctgaggtcagactctgacaccctgcttcnctcaaattnactgtccccagcntccccaagagttgctctctaataactttcttgggttaacttcttagtgtttctccagactgaattcctggcttgctcacnagaagaaggtcatgtgatgctgaatctgagccgccnttttgttaatggagcggtctgctcagttgacaggncagtcttgctggggagctgcagcaagatgcttctctggcgggctggtgtttcacacgtcattcattttagaccacgtgtagaattctttgacccttaggtctataag

SEQ ID NO: 332883 - DNA, 400 bp, Homo Sapiens
  misc_feature (36)..(36): n is a, c, g, or t
tttttccaaccccccatatttgcctaagggggttantccaaaataccaaaaccgaggctcccaaccttaatagaagaaaaaaatcccatataaagacctgattaaataatgggcaaaggactttaatagatatttctccaaagaagacacacaaatgaccaacaggtacgtgaagggatgctcaacatcactaatagagagatgcaaaattacaacgaggtattatctcacaactgttagaatggccatttgaaaaaaatagtgttggtgaggatgtggagaaattggaacccttatgtactgttactaggggtgtaaaatggtgcagctgttttgaaaaacagtatggaagttcctcagaagaattagaaatgctatatgattcaggattcccacttct

SEQ ID NO: 332884 - DNA, 300 bp, Homo Sapiens
  misc_feature (15)..(15): n is a, c, g, or t
  misc_feature (22)..(22): n is a, c, g, or t
  misc_feature (31)..(31): n is a, c, g, or t
  misc_feature (65)..(65): n is a, c, g, or t
  misc_feature (71)..(194): n is a, c, g, or t
tggtacccggttttnggcaagnaaagaacanttttaaagttaaaagtgtgtacattgtttttganttttannnnnnnnnnnnnnnnnnnnnnnnnnnnnnnnnnnnnnnnnnnnnnnnnnnnnnnnnnnnnnnnnnnnnnnnnnnnnnnnnnnnnnnnnnnnnnnnnnnnnnnnnnnnnnnnnnnnnnnnnnnnggctgaggtgggaggatcacgtgagcccaagaatccaagtcaatgtgagttactgtcacactgctgcactccagcttgagtaacagagtgagaccccatctctaac

SEQ ID NO: 332885 - DNA, 419 bp, Homo Sapiens
  misc_feature (41)..(51): n is a, c, g, or t
  misc_feature (75)..(75): n is a, c, g, or t
cctgtaaaaatgcaggagaaggcctatacctggggccatgnnnnnnnnnnngaggccccgggatccacctggggncctccgggaagctggctccccacatatataaaacaatattttgtagcgcttttaaaaaatatatttgtattaaaaatataaaaacacatgctatattatgccccctctagtggttacctctggggactctggggagggaggaacgggacagggtcaaacaggtaacaaagcaaacttcaaatgtatctaacatttgcaattacatgcatatgtgtgtctgaaggaaatatagccaaatgctaacatttattacatctgcatggtagaaatacacggattttcttgaaatcatttacctttcctatatctttgaaatatgtcaatcaagttttaaggtaatgaat

SEQ ID NO: 332886 - DNA, 213 bp, Homo Sapiens
  misc_feature (121)..(121): n is a, c, g, or t
agcttgagccactgcacccagcctggaaagtatatttatgaaaggtttgcactccacaaaagcatctttgctagggtgtcaaggaagagatcactaaaccaaccccaacacatccatacanttccagcaatctagagagggctggtccttttccttttctggattattttctgttctcagtaaaacaagtatttactgtgatactgaaacact

SEQ ID NO: 332887 - DNA, 546 bp, Homo Sapiens
gcttatttttagtttgaaatataaataactacaacaatgcatatttcagttgccttcattcttaaattctgaataagcatcttacttttctataaaacattacagaaactcaaaataataatcaatggcttctccaattccaaatattcaacttaatggagacagcatcttttacatttaatgaaaacagaggatttgaacacgttctatgcagacatggttttactatagatttgctgttaccttatttttttaagggggtggtggtagggagatacagaagtcaggctagcccagtgcttgggagttacagcactcaagacaccctggcctctacagagcatcactgaagccactgaagactgtctctaccagccttttgtcttccaagactataagatgggcataggcctgagatataagcttcaggccaatgggtttttatgggctgtttaagaaccagtactaaggatacattcttttatgtctttcccttctaaaatgtgacacaatagaataatttacaccaactcgcttttattatcg

SEQ ID NO: 332888 - DNA, 398 bp, Homo Sapiens
tcacatttttaccagatctacttttatttcagaaggaagtttgtattatagtatttacttttgtttatatacaagttcttcacatttgtgtttaaaatgcacagacctcccttagttctcttgttcctgcttaaattagctgttattttacaatacaaaaaataccaaaaaattgcagtcctaaatgtatgtataacacccacaatccccgcaatgaaatagtttacaatacttactccatatttacatgagtgtaatagatgctaaattatacatattaacaaactaagcttgaatccaaacaaacgaaatcgtaaataactataaaacaaaaacatttccagagccagaattagttcaacgaaacaggcttcactagtgtttagaatgttttgtgc

SEQ ID NO: 332889 - DNA, 377 bp, Homo Sapiens
  misc_feature (329)..(329): n is a, c, g, or t
  misc_feature (361)..(361): n is a, c, g, or t
ggagacagagactcactccaccagagattcttgtgtgacttgttgagtcaaaggacaaaaggaccccatggagatgggctagaggcaggtacctattgatagagaattctattaaatgggcacagattttaagcatttcatttacctctaagatttcattaaacccctttaaagttggaagactgagccacttactgaaaattaattatccagcttgtgagggctaattaactaccacagctcctgtctgcatgaggaaagtggggctgttaaagcaggggcaagacgaaacctgagcagctctggggttcacacagtggggagtactnttcaatcagcgctccgttgtagggagtagggnttatcttgaagttggg

SEQ ID NO: 332890 - DNA, 252 bp, Homo Sapiens
  misc_feature (200)..(200): n is a, c, g, or t
  misc_feature (205)..(205): n is a, c, g, or t
  misc_feature (220)..(220): n is a, c, g, or t
  misc_feature (230)..(230): n is a, c, g, or t
  misc_feature (238)..(238): n is a, c, g, or t
tgaggcaccacacccagcccagatgagcttcttttcttgtttattgccaaataagagtcctttgaattatacatcatgttgttttgagccattcacatgctgatgaacatttgagttgtttttcactttttgactattattgatgctgctgtggaacgttcacctgcgtgtgcttgtgtggggcattctgaggaccagancacgngtaagcaaaagtgangctacatttngttggganatgatgctggtatc

SEQ ID NO: 332891 - DNA, 601 bp, Homo Sapiens
tacaaaagtcacctgtattccagccaaaatagctttaaaaaggaatccctgctaaagggggggacaaactacgtaagacacaatacatttaaaatatgtattgaaattacaaatcaaactttttccatatgattccagagtacaaaacacaacattaaaaggcattcaaacagctcttttatacatcacagtgttagtggcacaaaatgtactgacatttcaaaaacacaaatcaaatctgttttgattttgtttcaccaccacttgtcaaatacataacgtatacatgtgcatgactcattcatgcatatttttatacaagattaaaatacacccatagtaaagtgagcaaagaaggaaagaaagggcaggcatggggcatgtagctacccctcactgaaggctccggaactgtggaagacagaattgcacaaatcaaaggaagggtggagaccctgggttttttaaacatcaagacggcatgctctcctagttgtgaagcattagcaattaggttttaacgcaggcccctttgttccttttggtgtttttggtaatacctgtcataatcccttcattttgtttattttcataagggctt

SEQ ID NO: 332892 - DNA, 374 bp, Homo Sapiens
  misc_feature (194)..(194): n is a, c, g, or t
tccagttgcttttgctatataacaatcccaaacttagtgccataaaaaaaccaaccatttttttatggtcacagtttctgtgggtcaggcattcagaaagggcacagcagcttttctgtcttccatggtgtctgaggtcttagctggaggaccgaaagatcctgggaagattctatgggctggcaactgcaatncaacagaagcctcgtttacttcgcatacctgatggttggatgctgggctgtcagctgaggaactcagcttggggttattcatccagaacacctacatgggaccctcttacatattaacttttggggcttacttacagcatggatgggctgggtttctaggaaggacagtgggccccaagg

SEQ ID NO: 332893 - DNA, 196 bp, Homo Sapiens
ggcgtattcacgggtcatgcacatgtgcacacgtcaatacttattaaaccgtacattctaaatatgcacagtcaactatacctcaatgtacttactaaacatggtatccagtgtttgcaatatctttttcaagaacaaaagaggtaataatcttcttttgtcctgcttttaagacatcatctcttgacttagctga

SEQ ID NO: 332894 - DNA, 178 bp, Homo Sapiens
  misc_feature (125)..(125): n is a, c, g, or t
  misc_feature (137)..(137): n is a, c, g, or t
attcggcacaggatttcataaccaaaatatgaagacaaaccagactaaaaaagataattggaacatacataacagatcattagtattcaaaaaatgtaatatctaaaaactgacaagtaaaaaanacaacatagatnaatgagcaaaaatgcctgtactcccagtgctttataggagg

SEQ ID NO: 332895 - DNA, 466 bp, Homo Sapiens
  misc_feature (386)..(386): n is a, c, g, or t
  misc_feature (393)..(393): n is a, c, g, or t
  misc_feature (421)..(421): n is a, c, g, or t
  misc_feature (443)..(443): n is a, c, g, or t
acacctggctgattttttaattttggtagagacgagggcttgcagtgttgcttaggctggttttgaacccgtggtctcaagcaatccttccgccccagccttccaaggtctagacagttctcacaaaacccttcttgttatccttagctttattaacaagccttgcctcattatgggctgttacttttcttttaggttagagccaccactcttttttttaactatgccttctgttttttgtacgtgtttgtgagtggccttttaacatctgtactcaaggaatggcttttcgattgtgctagtctcttcagattgttccctttttaaaatttggaaattaggccagatgtgggttggcttacacctgtaattcccaggcatttttngggaggntgagggagggcagatccgcttgaaactnagggagttaaggagacccagcnttggggcaacatgggtgaaacct

SEQ ID NO: 332896 - DNA, 404 bp, Homo Sapiens
  misc_feature (314)..(314): n is a, c, g, or t
  misc_feature (332)..(332): n is a, c, g, or t
acacctggctgattttttaattttggtagagacgagggcttgcatgttgcttaggctggttttgaacccgtggtctcaagcaatccttccgccccagccttccaaggtctagacagttctcacaaaacccttcttgttatccttagctttattaacaagccttgcctcattatggggctgttacttttcttttagggttaggagccaccactcttttttttaactatggccttctgttttttgtacgtgtttgtgagtgggccttttaacatctgtacttcaaggaatggcttttcggttgtggctaggtctcnttcaggattgtttccccnttttaaatttggaaataggccaggagtggggtggggccttacaaccggtaaatcccaggcatttggggaggg

SEQ ID NO: 332897 - DNA, 301 bp, Homo Sapiens
tggggaaactggggccttctttgagtactagtgagtaagacattttgcaacagtgctgagtatgaaaggccctggtctctgaaaggctaatgcaaatgttggaaggcctttaaagaagatgccaagccacagtgagtgccagctgctagctctgaaatagtgatgtgaaaaggtagatttcttttgtgctatatttgtgctaagcagtgcctttaaaaatataactagaatcattacggtgaatagacacaggaaaataattttatgttatacagtagttgtatactaggcttcctttaaa

SEQ ID NO: 332898 - DNA, 291 bp, Homo Sapiens
ctttttgactattattgatgcctgctgtgaacgttcacctgcgtgtgccttgtgtgggcattcctgagaacagaacacgtgtaagcaaaagtgaagcctacattttgttggatatgatgctgtatcaagaatagttaataacccgagagaaatataaaggaccttctacatgttcatcaggtgacatcattacctgggagtggaaccccatttgcttttgaacttttgatccctttggtcttcttccacaccataaattcctgggagtcagggattctgtcttataaaaca

SEQ ID NO: 332899 - DNA, 910 bp, Homo Sapiens
  misc_feature (179)..(179): n is a, c, g, or t
  misc_feature (899)..(899): n is a, c, g, or t
ttatcttgtaaaaaatatttatttatcaatctttctggcactattaaaaatgtcccattttcactagacagaatcacaaaggtatacccactcaatcataacaatttgttttctatggagcaatattcacagatcctgtgaataaataggtgacatactccaggtggccccctgtaggntctgttatatttagagttttctggaacacacataattatgaggtttggctctcctacagtcttttgtttgccatttcccttgtctttgaaccaaaacacagctctttccaagcttggagcgtgggagagggccctcttctcccattgggtgaaggcaacaggttcaccaccgatccactcccagtggccagcatgcacttggtcgttcaaacctatccaaaaggactttctcccaccaatgtccccagagccaccgcatgtgctgcctggagaatacagttacaaggttgcccaggtattggttccctgcaagcttggggcagccgcattccaggtggcctttctgctctggtgatcaagatgtgacagtagcctgagtgctggtggccacccggctggaacaggatttgtcttcccacatccttggtttggggactcccaggctttcccaggcgatcccattgcactgatacagcttctggatgccttcttcaaaatggaagagtccctttaattccagagtgcagttctttggaaatgagggcaactggtcctgtctggggaagtgtgagtcagttgtggattccaccttatctgcttgagcagttctgccactttgattgtcttttgtggctgactaatgatggatactttggccttccttttgtgagttgggaaactgtcatcctccagtttcaaggaaactatcccatgataatntctgtgccgaa

SEQ ID NO: 332900 - DNA, 328 bp, Homo Sapiens
tgtgtatgggattctaaagtggcattccacctggatttcctgtgctacctatccaaattccagtaactacttcagtgtcattggcctttgttaccctaaccaaccttcactgaaaggcaaatttagttcaggaggttagttttttagctagctttggaagtaagcctttatttattactttttggaggaaatcagagaagtgtcaatggaccgtcactcagactgagacttgagttattacagaagccaggaaaagtgtattagaaactgttgtctacaccacttttaattggtgaacaatttttctaagttatggtcatatataccc

SEQ ID NO: 332901 - DNA, 431 bp, Homo Sapiens
cttatttttattttttcactttcttatggtcctgagaccactcctttctgagtacaagcatcttggctggcctagaatatagtcacaactgtgttccacggactttactgaaggtggaaacaactgtcttcccagcatcccatctgtactggtccatttgcattgctataaaggcaatttataattcacagtttattatggctcacagttctgcaggcttataggaagcatgggacgagcatctgctcctggtgaggcctcagggagcttccaaacatggtggaaggcaaaggtggagttggcatatcactgactctagttaggctcctttcctggaatatcattagaaaccagaagtaagggttgtttacaattcccatcaaggacatttggtgtgatctcaggaagggctaacagggatgtgattatag

SEQ ID NO: 332902 - DNA, 440 bp, Homo Sapiens
  misc_feature (409)..(409): n is a, c, g, or t
  misc_feature (419)..(419): n is a, c, g, or t
ttaattttaaaaatatttattttttttcctaaaagatcacacaaaagttgggaagagaaggatgtcaattagactacatcaaaatctgggcagagggaggacaaagagctgcctaaagaaactggtagctggagcaaactgcagagatcaagatgaccctagtccacggaaccagcagcccaggtcagccacattcaggagcaccaccgaggcacggcagggagagcaaagttgctggccccaatcattcctccttttcagggcaggagaggcagaagctcactctttagacatgttcttgatggtcttgtgctctttcatggccttctcccaatcgctgccattgaattcctcagtgaccatactccgcacagtgccctcatccaggggcagttgggggcttcgtgcngaatttcttnggccttcgagggccaaatttt

SEQ ID NO: 332903 - DNA, 436 bp, Homo Sapiens
  misc_feature (67)..(67): n is a, c, g, or t
  misc_feature (183)..(183): n is a, c, g, or t
tggcttttgggcaagctcatttaaaaactcctgtccttttccacatttgaaaacatgaaagaagttnaaccccatccaaaggttttccgaaactacgtgccacagtttcccccccagggccttgccttcctcaaaatgtggcccaatgccatgtttaacacattaggagtttatctgaaatgncagagtcctcaggtgccttcccagacacacagaatcagaatctgcatgtaacaagcttccccaggtgactcctcgctctaggggctgattccaactggggctgcttctgggagaaagaacaggtgggccaaagttattaataatatggatccagtactcgcatacttttcaacttaaaaaaataaatacatgtacatagcttctccagagatttggtcctgaaggaaacattcctatttaaatctgtgccgaa

SEQ ID NO: 332904 - DNA, 214 bp, Homo Sapiens
atcaagaaccccacaactcctgaacttttggaaagacaaggtcccttattgcctggacccccaggtcccagcaagctgcaacgaaggaaatggggaaactgcagtcccccacagctgccctgtcatggggttgggggataagagatggcagcccctgctatatgaaaaagtaaaatcaaaatttacccgcctctgcccaggtgcggtggctcaa

SEQ ID NO: 332905 - DNA, 402 bp, Homo Sapiens
  misc_feature (366)..(366): n is a, c, g, or t
  misc_feature (374)..(374): n is a, c, g, or t
attgtatgtataaagattatacaaaggtgcaattgtgtatttcttccttaaaatgtatcagtataggatttagaatttccatgttgaaactctaaatgcatagaaataaaaataataaaaaatttttcattttggcttttcagcctagtattaaaactgataaaagcaaagccatgcacaaaactacctccctagagaaaggctagtcccttttcttccccattcatttcattatgaacatagtaggaaaacaggcatattcttatccaaatttggatggaaaaggcgccaacacgtttggaactggaaatacggacttgttcatgtggaactgtaccccgatgtgctacggtatttcccactttntccccggncgggggggttccccggtttttcagggaa

SEQ ID NO: 332906 - DNA, 571 bp, Homo Sapiens
  misc_feature (46)..(46): n is a, c, g, or t
  misc_feature (144)..(195): n is a, c, g, or t
cagttttctatggatatgaagatttactcctagtcatcagtggacnccccatgaagtcagccagaaagcctatatccaacttatgtacctttgcaaacttgtctggattttgactgtatgtgcaaaacagattgtacttagcgnnnnnnnnnnnnnnnnnnnnnnnnnnnnnnnnnnnnnnnnnnnnnnnnnnnnatctgaaaaacaaagatggtccctgcagtttaatgtgaagagctatcttaattgtattccacaagtgtattggtcgtatctttgttttggtgtttctacctaaataaattttatattaactaaatggatactgttaggtggaaaaatgcatgtttaagaaagatattgctgttattttattaaaatacaaatatataaagaaaaattttccacttaatactgtattctagggatttatattctgtatatagttaacacattttagacaatgaaaatagcctatgtggttgcctttgctggatttttattgctaaccgtaattcttttaagatgaccaacaatgttcattaagttatctcattaaattttaaaaaaa

SEQ ID NO: 332907 - DNA, 445 bp, Homo Sapiens
  misc_feature (46)..(46): n is a, c, g, or t
aaaatgaatcccctttccccccgaactgccttcctgtccctagtgncccctgggaaatccttgaagtcaaatccccctcaagtaaagtcaagtgaacctaggggaaatccccctctctgagccctcccccagttccatgttgccttagggaaccctgatattttccgtgaaaccctgccctacacatgggcagccccaacagcagaacaaatggtggtgacccaaagtgaacaaagaagtatagttgtgccagcttcgtagttgcccatgtggacaagtcagcaggatcaggacacgaggaagagtaaatgtgagacagtcaatgtgacttctgcgataaacagatttttaaaccccgaaattttgcaaaattttggtgaaacctgaactttcttcgttgcatatactggcactatctgtaccatcatacaactgtctcacatta

SEQ ID NO: 332908 - DNA, 614 bp, Homo Sapiens
gcaggaggagattttggggagcctggcaactcctgcaaggcccgcagacaggcccctctgtggggatgcgtggtgccccatctgccgcccttctgaagaatgcactgccttcactttttactgtgttagagtccatccagactgttctatccaaaagtttctttttcccccacaggcaatcaggaaatgattcctttcccgactgcttctgtctagtgcctgggaatcttgagtcaatccctcagtaagtcagtgactagggaaatccctctctgagcctcccagttcatgttgcttagggaacctgatattttcgtgaaacctggcctacacatggggcagcccaacagcaggaacaaatgggtgggtggaccaaagtggaacaaagaagtatagttgtgccagcttcgtagttgcccatgtggacaagtcagcaggatcaggacacgaggaagagtaaatgtgagacagtcaatgtgacttctgcgataaacagatttttaaaccccgaaattttgcaaaattttggtgaaacctgaactttcttcgttgcatatactggcactatctgtaccatcatacaactgtctcacattaaagctatttttcttggg

SEQ ID NO: 332909 - DNA, 430 bp, Homo Sapiens
  misc_feature (333)..(333): n is a, c, g, or t
  misc_feature (413)..(413): n is a, c, g, or t
gggtataaaaaggtttattactcacatactgagactttccagggagatagggcaggctcccaggagggtcgagaaacggcttaattggtttggcttttatccgtcttagagtgtgaggctggggtgaagcttcctgcatgcatgccagggcttgcgtgatttgaacttcctgctggggccaaaggaggaggcacccatgcttccatcagcttgcccagatgtgcagcataagggagaagggaaaggtgagtcttgaaagatgtcagcagtcaaacattaaaaacggcattgaagtctttattacagtcaaatgaacctaaaaccccggccctnttaaaagcgtatatttttcagtctcttaagggcaatctagggggcttaaaaggcctgcacccagcaagcaggggggctgncaaaagctgcggatgtt

SEQ ID NO: 332910 - DNA, 420 bp, Homo Sapiens
  misc_feature (246)..(246): n is a, c, g, or t
  misc_feature (308)..(308): n is a, c, g, or t
  misc_feature (352)..(352): n is a, c, g, or t
agcaagggggggataaagagctgtgcatagttactttttaaatatatgtctaaagcatgctaattttaatgactgagatttgaggtaggttagacatgtagtgtacaaatcagcatgggcttgagcacggcaaccacaccgcctaactctggaaacgccattctgcggggagtgggggacatccaatggagactgcctcttgactcacctctcagcagcctatctcctactgcaggaaactgatgnaaccaagggctgtttggggctgggggggacagacgtcgcatgctttttagcttgtattgggnttctccttttccatcctaatgggctttccctacccaaaggggtnatgagggggggaggagtttattttaaccataccatcaggggaggatttcaccacatgcccaggtatcc

SEQ ID NO: 332911 - DNA, 427 bp, Homo Sapiens
  misc_feature (13)..(13): n is a, c, g, or t
  misc_feature (26)..(26): n is a, c, g, or t
  misc_feature (41)..(41): n is a, c, g, or t
  misc_feature (47)..(47): n is a, c, g, or t
  misc_feature (53)..(53): n is a, c, g, or t
  misc_feature (118)..(118): n is a, c, g, or t
  misc_feature (132)..(132): n is a, c, g, or t
tccggggaaagantccaacaacatgncccaaagtatccagnaatccncccccnggggttaacaactcggggaacccttccccaaaacccaaacagcccaaccctggggccttccccangggtccatacaganggtccacattcctcccaaatgtttccgtaaaatattgtatttccttgccttaagatcatttaaaatgaagttttcaaggcacccccgcatcctaccctaagcacggagtcaaatgagacctgcataaaagtactgatgcgataagcaaaatagcatttaaaggacccaatttttcctcaaaactagaaaattagcatgctcattaaagactctgcttcctttagcttgtcaaactgaaggtcagaggttttcctataaatctgagttctgaataattctaagtcctgataagctc

SEQ ID NO: 332912 - DNA, 751 bp, Homo Sapiens
  misc_feature (278)..(278): n is a, c, g, or t
  misc_feature (293)..(293): n is a, c, g, or t
  misc_feature (305)..(305): n is a, c, g, or t
  misc_feature (307)..(307): n is a, c, g, or t
  misc_feature (661)..(661): n is a, c, g, or t
  misc_feature (677)..(677): n is a, c, g, or t
  misc_feature (705)..(705): n is a, c, g, or t
  misc_feature (711)..(711): n is a, c, g, or t
  misc_feature (724)..(724): n is a, c, g, or t
tactgttgtttatgacgtgtttcatgtcagtatttcaggcccacccactggcttccccctcccagattgccaaagttgtggagtctgtttttcttagttgaatgtcttagttctctgggacaggtgaacagatctcaagagcaaggaacatcatcgcaggtctgaggaggctagattcccagtcctgttggagttttttaaatctgatttaatgatctgaccctcccactcctatctctgccccatccgagtctgggctgctttcccagggggcaganagctgtgccaaaagnaactctaacgtnanaagcgcccttcacttgtagcttgtgcaggctagtcttgcttacccctttagattaacaaaactgccttcacttgtctcattgggattaaaggatcagaatatcaagagagattgaagggggaagatgccagccaacaggtgattcctcttagaacctgccctctgagttcctgcagctgaagagaaaccaaatgaaggcgattagtctctgcctggggtcccccttcccaagtgggtaccactaggctggggaaccttcggccccctccaccagggccctcttccccagcctgttccttttagggattggttgagttcagtgggtttaggatgtttctttacgggctctttctnttggaaacgggagttnacttgcttcctttctttaggggcacccntggggnttcaggccaaggnccttgaaccccaacttgacggggtttt

SEQ ID NO: 332913 - DNA, 489 bp, Homo Sapiens
  misc_feature (176)..(278): n is a, c, g, or t
gaatgtgaacaaaaatatttaggataaagaagtttaaaaattataagttctttacggtcatgttctaataaatttgaaaatctgaatgaaatggactgttctctaggaaaagatccaaaattggcttaagaaatctgcactagcaaaccgttgcagtcttttatttatttatttannnnnnnnnnnnnnnnnnnnnnnnnnnnnnnnnnnnnnnnnnnnnnnnnnnnnnnnnnnnnnnnnnnnnnnnnnnnnnnnnnnnnnnnnnnnnnnnnnnnnnnagcatgaaccaatgtgcctagcctacagtcttttataaaattatcaaagaattcttttttaaaatggctgcaagtccaggtgttttacaagtggattgttttaaaatttcaacatgaaatatttaaagttatttaaactgtcccagaaggtagaaaaatcatccaaattcattttatgcagttagcatgaatctggtatcaaacagttggc

SEQ ID NO: 332914 - DNA, 530 bp, Homo Sapiens
  misc_feature (328)..(328): n is a, c, g, or t
  misc_feature (431)..(431): n is a, c, g, or t
  misc_feature (499)..(499): n is a, c, g, or t
ggaagataaaggatcatatcattatgttctttgaaacaattatggtaaggaataaaactagttaaagttttttgaaaaggctatcagtagtaaaagcaaacaatttgttagaaagtaagattaaagttggttaataattaaaattttggataataatgctagtctagcaacatgctgaggtaatcataaggaactctagaatctgataaaattaaggcatgttggcaatcctctctctgagatgcccttctccctctattaatccacagctagcaccaccttcaaatcaggctcaagaatcacttctaggctttcccaaattaatctncacctcactctgatccaccctttactggattctccactctttgtttagccaacatattaagcaactactatgtaccagatacattgtggaaaagaatattaanaatctggtccttggccagacgtggtggctcacacctgtaatcccaacactttgggtgccaaggcaggnggatggcttgagaccagtctggcaacatagc

SEQ ID NO: 332915 - DNA, 413 bp, Homo Sapiens
  misc_feature (197)..(197): n is a, c, g, or t
tccccaccttgtgaaatctgcgctggccccttccctttgaccaacataaacgtggccttgccagcttcccattccttgcctgctgagatgcccatagaaagtaagctggacaaaagagcacatggaggcagaggctcaaccaacagcactaaccaccagacttgagggtgaggtcattctggacaacaaagctgacnccagccaccaactggctgcaacccaaagcagtgagcccacacaagactagcagaagaaccacacaggtgagcccagcttaatatgcacacccactgaatcatgtgcaagtaaatggtggttgtttcaagccactaagttttgcagtaattttactaaggagcagtaaaataacagatatatcatcttagcaaggatatattttgagttcagagcta

SEQ ID NO: 332916 - DNA, 595 bp, Homo Sapiens
  misc_feature (67)..(67): n is a, c, g, or t
ttggctgaagatgctttattgttgcattatcaaaatcggttacagttttcaattaaagctgtaattngatttctatgtataaaacagctttgaagttgtaaatgtagtttccaatcgttagttaatgctacattagttagcaatatttgaaaattttattggtataaaatgttttaattactaaggctgtttgtaggctgcatagtaagcttcaggatcatcacacgttttttccctgtaattggtgggataggaagcctttaaggtctcttgcttctcatgggtgggctacaaggagcagcagccatcgtggcaggcttgtgatctttttcctgctgacacctgctgcttgacatggagaagttctgcacagaaagcagtggcatccttcatgaggtggtacttggggcagacactgagagcattgtaatcgtcttttgtatcaatctctctaaagtagaccaccacgtatttgtgcagatgaatctggcttcttagatcactgcagaaaaggttaaaggcaagggggaagaggtcttgagagttctcactgggactgccctcgctcttgccacaggtaccatcgcacacactg

SEQ ID NO: 332917 - DNA, 484 bp, Homo Sapiens
  misc_feature (115)..(151): n is a, c, g, or t
gctccagccgcaagggcgatgctgtggacgtttgtgtggatggtgcagtgttcttggaatctgtagaccagatcggtggaggtatagaagtgcaagagtctaaaggctgattttnnnnnnnnnnnnnnnnnnnnnnnnnnnnnnnnnnnnnaaatcactgctgtgtgttttcttccgcctgaggcatcagcgtcacctcggtgtggtcgtccgcgcttcccgcccttggcctggcctcctctcagtttgggttttgccctcacccacatgagcccccccatgccctgccccccttgcggccttttgtgttccccgatgtctgggctgtgtcctgccgggattcccagcctttggggtcagccgtcgagccacttgctttgctcagttctgtgtttcagccacatttccacggtggaccctgtttgttttaaatattctgttcccatgtcaatcagtgacgataaatacagccttgatttggatg

SEQ ID NO: 332918 - DNA, 312 bp, Homo Sapiens
  misc_feature (277)..(277): n is a, c, g, or t
atgatttatacaagttttctaactgtgcttcaagtttggtggtttgtattttcctttaaaaaatcacctatttttctcagattttcacatttatttggcctaaacttgaacattaaatgtctttataactttaaagatctccatattagtgcctatagcctttcatattttgtaatgttatacatttacattttaaataatgttttaattttatcatttatgtttttttaatgtggctaattcatagggggtcctaccttcctatcccctattaacncccttggttccccaccattccttctgggatttatt

SEQ ID NO: 332919 - DNA, 444 bp, Homo Sapiens
  misc_feature (345)..(345): n is a, c, g, or t
  misc_feature (349)..(349): n is a, c, g, or t
  misc_feature (362)..(362): n is a, c, g, or t
  misc_feature (384)..(384): n is a, c, g, or t
  misc_feature (414)..(414): n is a, c, g, or t
ttgtgaatttttttccaatcttttaataaggaaaatgtttttttcaaaataatggcttatatggagtgtcaacataaaaacaatataatttcaaattgataagtaaaatatagtcagcaatctcacatacgtcaaaatttggtatataacacacattctggagaggtgttgcttttggtcttactttttttccatttttaaaattgtaaaacacatacaaaatttagcattttaatgacttttaagtgtacacttcagtgtccattaaattcacattgctgtgcaacccatcacggacccatcccatcttcagggccactttggcatccctggtggtaaccgggnaacntcttaccaccccntttaattaacctccccctttcntcccccctcccctcccggcggtctgggggnacccacccattcctactttggtctctatgg

SEQ ID NO: 332920 - DNA, 471 bp, Homo Sapiens
  misc_feature (91)..(91): n is a, c, g, or t
  misc_feature (117)..(117): n is a, c, g, or t
  misc_feature (154)..(154): n is a, c, g, or t
ctggccgacgggaacagccaggaaaaccccgggagttaatcccccggaaaacttccaaacccagtgaaagggccaaagaggttagtaaaangtccttaagcccctcaaaggggaacnaatcccagaggccataatcctccaatgtaaatcctanccagagggagttccagccgaagactgaatgacccagttgccccagtgtggtaatactacttattaaagcacgccttattaacttttgtcccttccctgtctctttccctacttcttcaacattcttaaatgaactatttggaaccaaacaaatccttgtctcagggtcttcttttggtggaacccaaattaaaacaccatgtagcattaatctcaaaacggtgtttatgatcgacaaaactacaaccttcctgtcaatacagtgaattatgtgggaagcaatatgtttaaatcattaagttatttgctgtgccgaaa

SEQ ID NO: 332921 - DNA, 475 bp, Homo Sapiens
  misc_feature (34)..(34): n is a, c, g, or t
  misc_feature (51)..(51): n is a, c, g, or t
  misc_feature (69)..(69): n is a, c, g, or t
  misc_feature (80)..(80): n is a, c, g, or t
ggcccccctggcaaacacggccggcaagtggacnaaggagcagccggctgncccctacccggggggggnccccctcccangtccccatatggtaaacctatactggaaaggcccaatggcatacaagaaaggggaattacacaccccattagagtcacgaatagcaaactgcctgtcctatatcccaacaaattaagcacctgaagaacccataggttccctaaaaacaacgtaagactatcccagcaaacagtaaaaagcaacagaatcaagagattaagtactaaaaaatgtggcttattttaattttgtatatttgtcagacctgtgattaactcaatcaaagtaggaccatattctatcatatatttcatgtagtcaccacatgttcaatttgctgtagggctctgctcttatgcaattaaaagaaaattagcaagtctttccccagcagagttagcgagctgtgccgaaa

SEQ ID NO: 332922 - DNA, 231 bp, Homo Sapiens
tcctacttttaaagagttccatatttttctttgtggtctggtacatgatcgatttttaaaagtgtttcagaaacaacataattttatcctctgttcggtgcaaatttagatatgtagtgagccctctgtgtactaagctaattattcaaatccttgctgtccttgacacctgttttaaagtttccttcttggccaggcattggtggctgccacctgtaatcttagcacttt

SEQ ID NO: 332923 - DNA, 506 bp, Homo Sapiens
  misc_feature (23)..(23): n is a, c, g, or t
gtgtcttatccatatgatgggantatttactccacccattaaaaacgaatgaaaccactaatatatactatcatgtggatgaatcttgaaaacattacggcttaagtgaaaggaagtctgacacaaaaagcttatatgttctggtgatttccatttatataagctgcccaggaacaggcaaatcttatagacacagaaagcaatgtgtggttgcccaggagctgaggggaagggagagtggggaaatgtgaacactttccatgccatggggtttctgtctggggtgatcaaaatgttttgaaatgacatggaggtgatgggagcacagtgctgtgaatgtactaaatgcccctgaatggttcacttgaaagctcttcattttgttatgtcaattttacctataactctctctatatacagatttcaaaggatatgctgcttctcaccaggcccctgggttgttttcttctcctccacccagctgtagtaggcagagtagtccccaa

SEQ ID NO: 332924 - DNA, 554 bp, Homo Sapiens
  misc_feature (115)..(127): n is a, c, g, or t
  misc_feature (297)..(297): n is a, c, g, or t
  misc_feature (386)..(386): n is a, c, g, or t
  misc_feature (443)..(443): n is a, c, g, or t
  misc_feature (538)..(538): n is a, c, g, or t
cttcggcacaggttggtactgggttcttggggaaagtctccattgagaagaccatgtcatttttcctaacgttagaaatttctcagatcctattccctcctccccccaactttcnnnnnnnnnnnnngcctcctttgagtctcttcttgcctcatttgcaccccccggcagctcaaacctacttgtttcaacaatgcttttatgaactaactggtcccccttacccttttgtcccttccccagcatccactcttgccaagcccaactctagattaatttgagtctccttacctcccnattgccccccgctgggctgggcaagcatttcctgaaggaaagtcataaacccaggctgagttgttcatgggagtggagagacgccgagntcatcgattgtacaaattgaaagaatcaggagatatcaagtcttatcaccatcctgnaagagaaatggagagttcgtttttagtagagctaaaaataagagcgaaaatttccttactcctgtattggtgttttccaacatagtgagttgagnagtagataaattgagg

SEQ ID NO: 332925 - DNA, 320 bp, Homo Sapiens
  misc_feature (269)..(269): n is a, c, g, or t
gtgtgagccaccatgtctggccagcgactaattttttaaaaaaatggggtagaacagggagaccagaggacaaaatgagaccattggcttattccttgaaagaggatctccaagtccaaagagactcgaggggctgtctctggagactggtcccactcgaaatcattcttgaggcagagaccagaagacaaaatgagaccattggcttattccttgaaagaggatctccaagtccaaagagactcgaggggctgtctctggagactggntcccacccgaaatcattcttgaggcagagcccggggttctcatcccttagc

SEQ ID NO: 332926 - DNA, 518 bp, Homo Sapiens
cgtgagtttattgcatatgtaacaaaatgaacctgacctcctgcggcccagcctgcgtgtacaatcactgtttgttttgtgtttccagctggttccataaccacattaaatagaactagtatttcattaaatacttttgattttgacatagaacattagtgtacaactttcacaaaataaatcagtgataaaaacagtgggaaggataacaaggatagcagcaatacttcaaaacaagacattacaaaataaattaaaaaatacgttataaagtggttgagaaacaaaaataaacacatttttaaaatccatactatgtttcgggaaggctgccgtgtggcacacacctgttctgcagatggcgggtggggggacattttctctgcagaaggcctttcctgacatctcgggttgggtgaccaccttaatctgaatttggaccatacgtccgaacaagctcaggggtcgaaattcgatctggtggcagattctcttttcagaacttgagagagcccttt

SEQ ID NO: 332927 - DNA, 535 bp, Homo Sapiens
taatttctgagaagtgtctcataccttgcttttcttgtttcttagaagtgtcttataccagcatgtcagcttcttactcataggatatggttaatgcttttttcttctttaggttattttttatgagccctctgatttcttgttctaattgcttattaggtcagctgcacaactgtcctactagtattcctttccattgttcttctgggttaattctataatttttgaatctattgtctccctctttcttgaattcagttttcattttgccagagtatatcttcaaggaatttttcagaaaatgtgcataacaggggtggtggtgcaccaaataaatccaaatccttgaacctctaaatgtgtctttactatgccttcacacttgtataagagattgcaaatgatttcccttcagaatttgtagacattgctctgttaccttctagcaagcccattgcatatgaaaaatcaaatgctactttgattgttgtttctttttaggtatcctaaatattttccttaagaagttttaaga

SEQ ID NO: 332928 - DNA, 357 bp, Homo Sapiens
  misc_feature (30)..(30): n is a, c, g, or t
  misc_feature (126)..(126): n is a, c, g, or t
  misc_feature (130)..(130): n is a, c, g, or t
  misc_feature (182)..(182): n is a, c, g, or t
tgcggggctcactcggtgatggtggggcgngtggccacgtacacaaacaccacgatcaagagcacgaccacggccagcgtgggcagtaccactgtagtgaatctgctgccgggcctcctgcatggncttnttcctgctccttcttgtccttggaggtctccttcttgggcttccctttggantgccgcatctttcctagaggatgctaggagggtgtgtccagagggattccaggaagggccacactcctcttccaaggctggaacctcctgtagagagaacaacttttcttcaacttcaagaatcgttgattaatttcagcaaactgatttccagtacaggtgacttgagttattc

SEQ ID NO: 332929 - DNA, 363 bp, Homo Sapiens
  misc_feature (41)..(41): n is a, c, g, or t
  misc_feature (299)..(299): n is a, c, g, or t
cctcttcctgaattgtgaaacccctggctcggccctgaaanccctaaaactggccttgaaagaaacaacacacagaccaagaagacagcacggtgaagttaacaaagtgcccacggagacccagggtttctgaacacaggatgtggaggatgcttctctgcaacctagtgcaaggcttcccctgcccattccgagaattcacggatctcacaggtggaggtggggcgagcttctttctagtgtggaccagaggtgggggcaatgagtaaacatcttcactgtaagggttttgggacctngcctcagggcttgaggtctcggcatcgtgtctcagtcagtccttggcgatgtcccctcagacgc

SEQ ID NO: 332930 - DNA, 459 bp, Homo Sapiens
  misc_feature (336)..(336): n is a, c, g, or t
  misc_feature (375)..(398): n is a, c, g, or t
  misc_feature (429)..(429): n is a, c, g, or t
taaaaagtacaaatatcttttattcctcaaaggaaaaagaagagttacacatgcctgtttctcaccaataagaggggtcagggcagagtgagtctgggagagagagttctaccaccacggttcccaaagcatcgtctaggggcctgttaggggagcccgaggtctaaactatttccacagtttcactaagataagattttccttttccatcctcacattcgttagtgtgcagtgaagtgctccagaggccccagcatgctacattacagaagacttgaactcagggagaggatgagggaattaatcccctccattcacaccagacacggggagggntttgccaagggtgttgaggacatacagtcctttacttcnnnnnnnnnnnnnnnnnnnnnnnngttgaggcgggggttttcacttttgtccccngggggttgggagtgcatgggcccgatcttg

SEQ ID NO: 332931 - DNA, 291 bp, Homo Sapiens
  misc_feature (102)..(102): n is a, c, g, or t
  misc_feature (104)..(104): n is a, c, g, or t
  misc_feature (265)..(265): n is a, c, g, or t
gcaaaagtaaaaatgccctttcttctaaggacagtggagttctcacttgtggctccttgcgtggaatcgaaccaaggggaatgcagcaaccaaaggtctggnanttttacaagatctatctacggttaacagccaagaactaataagggtggacaaagatgatcaaaataaaagcagacatcagtgctaaattatgatgcaacagtttggctcatgcatataagaaaatacatagtatatcacaacaaaggccacacactcttantgcaattcagttcacattactacttt

SEQ ID NO: 332932 - DNA, 292 bp, Homo Sapiens
  misc_feature (202)..(202): n is a, c, g, or t
  misc_feature (210)..(210): n is a, c, g, or t
  misc_feature (274)..(274): n is a, c, g, or t
gctggaactaccgcacacaccaccacacccagctaatttttgtatttttggtagagacagggtttcacttatgttgcccaggctggactcaagctacccacctacctcagcctcccaaagtgctagaattacaggcatgagccaccatgcctggccaccagtattttgccaggctggagtgaaactccatctcaacaacaantaaaagtntaagaactaggataattctatctaccaggggtgtattaggaactcatgtattatggattccagncggataactttgggtttt

SEQ ID NO: 332933 - DNA, 416 bp, Homo Sapiens
  misc_feature (77)..(77): n is a, c, g, or t
  misc_feature (158)..(295): n is a, c, g, or t
  misc_feature (347)..(347): n is a, c, g, or t
  misc_feature (361)..(361): n is a, c, g, or t
  misc_feature (377)..(377): n is a, c, g, or t
  misc_feature (391)..(391): n is a, c, g, or t
aacattttgggaaagttggaattttaaataaatgaataattttctaaaccagaataccagttcaacagccaaataanttctgtctttcccatgctgtaattttaaagcatttaattttcccaactttttgttcatactcaagtgtgtgaacttcctgnnnnnnnnnnnnnnnnnnnnnnnnnnnnnnnnnnnnnnnnnnnnnnnnnnnnnnnnnnnnnnnnnnnnnnnnnnnnnnnnnnnnnnnnnnnnnnnnnnnnnnnnnnnnnnnnnnnnnnnnnnnnnnnnnnnnnnnnnntctttaaattaggccggggcatggttgtgcgtgcctgttattcccagtttantcagggagggctgngggcgggaggattcanttggaacctggagngggccggggttgccgtggggccagg

SEQ ID NO: 332934 - DNA, 308 bp, Homo Sapiens
  misc_feature (278)..(278): n is a, c, g, or t
acaggcttgagccactgtactcaacttaagttgttcttataactaaattataattatgtatattaataaaattttccttaaggaggggagattaataacaaaattttaaattttttttgtacttagatctcctataaccccattagaaatatttactaagaacataaagtgacttttgtttctcataaattttaaggatttcaattcaattaggataaagtacccatttttggaatttaaggataaccaatatatttcctaaagcccccaaatggggnaatgtccaatccttaggccggttacctcct

SEQ ID NO: 332935 - DNA, 488 bp, Homo Sapiens
  misc_feature (36)..(36): n is a, c, g, or t
ggcatatagaaacaatttattgccgggggcaatagngggtaagagaagccagaaatttttgcagccagcacccaccccacccccaacttctactttacaaaagaaatttttacaatcaccagccctctgtacagagctcccccatccggatcccttctcactgtacacagctgcctggctccctctggtccctgcttcagaggaggcctgggctgttggaggctgaccttggagttggtctgagcccggagctcgccttggtgctgggcacagttgggcccctgccaggcctgtcctctcctttttgagctgtcctcagccccatctcccttagagtgctttgtgggagcttcagtgggggcggggtgggctatcagcccatgtcctgctgccgtcttgggactgcagttggcagtgtctgggcaccagttccccctcttgggccagtccttgggagtgaagtgcagacacttggattcgatccgcag

SEQ ID NO: 332936 - DNA, 457 bp, Homo Sapiens
taaacaaatccacaaggaaaattctatgttctggattctagctcttgtacatttatcagaatgtactatgctcactccaataagcaactagagggcagactgtatattttacactattgtttgcccaaggccaagtacagagcctattctttattagcaatttggtaaacatttattcaactgaaatgtttaatttatcccattgctcatggttttcctctttccagcaaacactaagaacagtcagttttcttcctttcattcatccatcaaatctgatttgggataagttctatgctcactttctaattaagcagtcaccaacctttttggcaccagggactggctttgtgaaagacagtttttccatgaatgggaagggagctggggagagatggtttcgaaatcaaactgttacacctcagatcatcaggcatcagattctcataaggaatga

SEQ ID NO: 332937 - DNA, 541 bp, Homo Sapiens
  misc_feature (62)..(140): n is a, c, g, or t
  misc_feature (207)..(285): n is a, c, g, or t
ttttgcctgtggtatttgttccgtctttatttgcctttgacatagcctcttcccgcaagtgnnnnnnnnnnnnnnnnnnnnnnnnnnnnnnnnnnnnnnnnnnnnnnnnnnnnnnnnnnnnnnnnnnnnnnnnnnnnnnntacattcttctttgccttggtagtaggttaaaaaaataaacagaagaaaaatagtttcatatgtttnnnnnnnnnnnnnnnnnnnnnnnnnnnnnnnnnnnnnnnnnnnnnnnnnnnnnnnnnnnnnnnnnnnnnnnnnnnnnnnccgcaagagacctttctaaaatgcagattcacgactctcctcctcaagccaccctagtcggcagtggggtcatttcggatcagagattcctggaatagatctaactaagatggtagatattattttaaataatgcctttttgaggaactagctgctaggctctctatcctggggagaagaaggtgaaggttcccgcaatatcaattttccccaacttcagcccaaggattttcccagcatcttccgggggcaaggt

SEQ ID NO: 332938 - DNA, 751 bp, Homo Sapiens
tgcatgtattttgttttatttaaacaaaatacattactgcaatccagaaacttgagagaaccacatacaggatgtatataagcacaacatccaaatccttaacactgggaactagagaatgctgtcagagaggttgggaatccccgggggtaagggcacctgttccctgtgatgaagtaagcagctcccgtgtcacctcttctgccacgagttcagccacagtatctggcttaaggccctgtgtgctgatgaaggcctgggctcgtttgcatcggtcaggctgctgagaggccaagattttccggagcatggcttcaccatcctgagcagcaacatctgtgtaggaacagcccaactccttggcaagatcatacagacagaggacctgtcgacagtagttccttcccatggaggcatttgcttgtcagcacttccaggttagttaccacttcattaactggagggcactgtcacaaacttctgactatccagacttgaagtgctgtggactctccttaggggaatgtcgggtgcttcttcctcaagcagctcagcactttgtaggagagcatggatctctgggtgcagatcctccatactagcttcccctgaggccaagtgctctgcagtgcaataccaaggcgacatctggattataaaaatgaaaataccggcatactctacttgcttcatgcacacagccatcatccagtaggcgcccaatcaaaaagtttagtgactcctgctcttt

SEQ ID NO: 332939 - DNA, 364 bp, Homo Sapiens
  misc_feature (191)..(278): n is a, c, g, or t
  misc_feature (317)..(317): n is a, c, g, or t
  misc_feature (342)..(342): n is a, c, g, or t
ttttcactggtgggttctgagtcttcactttattactatgtcaccagaagtcaccaccttcacttggttcaccacagatggatggatgtcataaaggagggtgccacggggccactggattcactcgagacttaaccaggtggtgggggggtctagagtggaggcccaggatggggaccgcccttcaccgnnnnnnnnnnnnnnnnnnnnnnnnnnnnnnnnnnnnnnnnnnnnnnnnnnnnnnnnnnnnnnnnnnnnnnnnnnnnnnnnnnnnnnnncacaggcagtaacgctgcgggaggggccggggcaccacnaagggctgtgcgcaccagggacatngggagtttcaggtcaagtgcat

SEQ ID NO: 332940 - DNA, 187 bp, Homo Sapiens
ggatgctatagtctagtaaatttgggaaatactgaattgaactaagttacttacaccaggttctcaggtcttttaatacatcaacatataatgggattctcttatgggaaacaaagtattcagtgctttccggatttatgtgaccatgggatctttacactccaagcatctcctggaaaaaatatac

SEQ ID NO: 332941 - DNA, 384 bp, Homo Sapiens
  misc_feature (296)..(296): n is a, c, g, or t
tcttgtgataacagatcaattttaattctagcacctgaagctatacaagggtatgctctataaacttcatgggactgttgtacacacttgataaagtgacaactgtgcaataccacttagcatctcaaaatcaggaacatactattgaattgcttaaacacaatccacagaattaaaaacaaaatcagatgccatccacagttatactaattatccattaaaagcttacacttaatacttggaaataacaatcaatatcctcggtgccggaattcttgggcctcggggggccaaanttcccctataggtgaggtcgggtatttaaattcgggtaatccatggtcatagggctggtttccccgtggtggaaattggttatcccgg

SEQ ID NO: 332942 - DNA, 404 bp, Homo Sapiens
  misc_feature (285)..(285): n is a, c, g, or t
  misc_feature (364)..(364): n is a, c, g, or t
  misc_feature (380)..(380): n is a, c, g, or t
  misc_feature (393)..(393): n is a, c, g, or t
attagatatggaatcatttattagcagaagcgtgggctgtgcggggaacatttctaatctgttaaagtcagcatcttagagcaaagcaggcttgatgacacaatctcccttaatgctgccactagagacagaatctgcaactgtgaagagaggaagcagcactggtttgtgtggaggtggtttcactccgtcatttctgtgctggctaggggttctaggggtgggcaagtgacagagacttgaggtcacagtattagggcccaaattaaccaaacaataaaggantttaatggggaagctatgggtatagcctcttcaggaattgggaaggggaaaagcttgggaaaatgagcccttttggggnaaaaacttgggacccngaggaagcctctnggggtttcctt

SEQ ID NO: 332943 - DNA, 223 bp, Homo Sapiens
gaacacatttacattcatttatttgctcacttaatatacatatgtgctgtctactatgagcccaacactgttagagcagattagggtttctagaataataataaacaatgaaaatcacagattccaaggagtacctatttgtacaattcctaggactcagaagagagagcaccttcagcccatgtcagaggctttctctttccagaaaaactttaaaatgatt

SEQ ID NO: 332944 - DNA, 497 bp, Homo Sapiens
  misc_feature (461)..(461): n is a, c, g, or t
aacatctttacattttaatgaaaaagtagataatctatttgaaaagtacaaactcaattgcaatttcaagaaaaaaatatgtatttatataccataaataagcaaaattggactctgaagccctaatacttcaaaagcattcatcctattccataaaaacctagtattattcagcaacagtactactactgatttaaaaataggaaagcaagtctatcttcacatgtaggttctttgtctttaatttgtacaactcaccaagggttattttcattcttaggcacccgggggttcacggggggggtggatcccaaagggcaaaccaggcataggggttttttaacagggaaaatctttgccgggggggacctttccatggacctggttatttttccctcacctgggggagggagggctggtcccccactcggcatggatttttggaacagtggtggttgganggttattggcttcgggattggccatccccgacaggc

SEQ ID NO: 332945 - DNA, 622 bp, Homo Sapiens
  misc_feature (608)..(608): n is a, c, g, or t
tcacatatgagtaaaatcatgtggtatttgacttgccttttaaaacacagtgaagaatctgtcttactttattcagggtaggagaagctacctgtagcgctagaacttgcactggccatggcagtagtatcatctgtggtggcaattctgtcctgggctctctcttcctcatctttcaaagcctcctcataccacagtgggaaggatcttggatcactcccatttaccttggccaaaaatttcaggagactcatcttcctaatttcagcatgagcccttggaccccacagaaactcataccgtgcaggatcactgcccaggcacctgccggtactcccaggtagttttcctgcacccaatcttgggtgagcagcttcctgggctccccataaatgaggtgctccatcccatcatacagccccatcatattcagtgcttcccagatgacctcctcaggggtgcagtagccctctatgaagattatgcttaggataagtatgagaatgccagtcttgggcatgctctggacatcactcagcatcccatcataggtgaggcccagggaggtgacaaggacaaaggagtggccagtgggatccactcctttncatcaatgcccaaa

SEQ ID NO: 332946 - DNA, 499 bp, Homo Sapiens
  misc_feature (166)..(214): n is a, c, g, or t
  misc_feature (479)..(479): n is a, c, g, or t
gtaatttattatattgtttcaatccttaaaacactatcacctctttccagttagtatctactgtcagctcattattttgtccattattctttcaaactgtgcaaattatacataatgcaaaatttaccactttaaccatttttaggtacaattcagtggcattaannnnnnnnnnnnnnnnnnnnnnnnnnnnnnnnnnnnnnnnnnnnnnnnncaaataccactgaaactctatacccattaaacagtaactccccattcttcctcccttccctgacaaccactgttcttattctgtcagctaatttttttatcagttgatttttatagttaattactcatgggttttttattgttttatttaaataacaattgctactaacatttctgatttactaagtgtcatgctctgtattaggagttacgtatatattacctaatttaatcttcacaaccatcctaggaggtagttgctttcntaattttatagataatgaaa

SEQ ID NO: 332947 - DNA, 362 bp, Homo Sapiens
  misc_feature (233)..(233): n is a, c, g, or t
  misc_feature (266)..(266): n is a, c, g, or t
ttaactcattctttgagtgataagtcacacgctcatcctgggttgcttgaaagaacctcatcatcctgcacaaactggacatgtatcacattctagccagaaacagtgtcataagcctcagcaacaggccccagcaatgaaaaccaatagtcacgtgaaggaagagcttgaacacccagggcgttgagcattttaagggaaggagggataaacttgaaactgaaaaaaacctngaggaaggaacctaccaaccccggccaaagganggaaggcaggcaaaagttttttcttttagggtggaggccacctttgttttcttttccggttaacataggcttaccctttagggagggggagggctt

SEQ ID NO: 332948 - DNA, 312 bp, Homo Sapiens
  misc_feature (26)..(26): n is a, c, g, or t
taacccgcccctaaaaaatattggtncccccctttatatggtagaaccctaaaaaaagttaactccttaaaaagcagaagccttcccccagggttgaagggcttgggggtggagagatgtgggtccaaaggacacaaaatttcggttaggaggaataagttcaagatctactgtgcaatatggtaactacagttaatacccagtgtatcacattctggaaaattgctaaaagaatagattttaagtgttctcaccacatacacacaaaaatgtgtgaaataatacatatgttggtcaggtgtggtggctcat

SEQ ID NO: 332949 - DNA, 664 bp, Homo Sapiens
tttgagcttgtctgtggcactgccagggtcaaatccaagcagccgagctccagaggtaatatgcttaacagctacagtacagtgatttgcaaatcactgtattaacgtactgatttccagatcactgtattgaatgccttatgaaaagagatcaccatctatacaaaacaattagaaggctttgtgtaggaggtggcatttagcctctaattgaatactattaccttccctgaacctacaatgagatatttaaaagttattatatattaaaaattctaattatatattttacttagtgtaagggggatgagatttaagcccattttaattacaaacaaaagcagatccacatgtcagctgtctgtgatgcctttgtggatatccagacacttgttcttaaatctgtatattacaaactgaaacaacaacaacaaaaccagaagaaaagtaacacaggaaaaattggctaacaagtcaatgaacctgtgactttactgatacagcaattataaaggtcaaagcttattttcaccctatgtaaattaaatttaaatgaactcctaaactatatattacaagatccagaattaaatttagattagccagagactttgtttgtagaagacgctcttaataatctttggcttttgtccagcccagattc

SEQ ID NO: 332950 - DNA, 107 bp, Homo Sapiens; identical to SEQ ID NO: 296683

SEQ ID NO: 332951 - DNA, 604 bp, Homo Sapiens
  misc_feature (223)..(223): n is a, c, g, or t
  misc_feature (236)..(236): n is a, c, g, or t
  misc_feature (261)..(261): n is a, c, g, or t
ctctcttcattccagcacggacaggctctagtttcctgtcctcagggatgtttgtgcatggcagaacacagtaatggattgcaagatttcctttcctgtcttttgtctccagagcttgagtcccttgagaagattctgctgggtgttgtggtgggtgtgagtagaggggggaggctctgaggatgagaggaaaagaataccatcttccctaaaataaagcctnggaaaagaggatnggggcagagacagagcagtcttgtngggttccatgagcagcgaggagccacgtaccctctgagatagggcccaccggaagcaattcacctccaagtggcaggatgcaggctgacttagggaggctgggctcctaggttcccagcctcaccaagactctgctccaagcatggtaagggaaccatatgggccaggatggcaagtgggcatcaccatagtgaccacagtgggctgatgctgatgtctgctgggggggcctccctggtgcttgagcactgtgtaagacacaggacctttgcttcagcttggtcagagagctctgagaaaggctgagattgaatttcttgatgatctggcaggataggcattc

SEQ ID NO: 332952 - DNA, 447 bp, Homo Sapiens
  misc_feature (258)..(258): n is a, c, g, or t
  misc_feature (308)..(308): n is a, c, g, or t
  misc_feature (313)..(313): n is a, c, g, or t
  misc_feature (322)..(322): n is a, c, g, or t
  misc_feature (342)..(342): n is a, c, g, or t
  misc_feature (358)..(358): n is a, c, g, or t
  misc_feature (372)..(372): n is a, c, g, or t
  misc_feature (393)..(393): n is a, c, g, or t
  misc_feature (423)..(423): n is a, c, g, or t
aagagtttggtgctagctttctgcaataaacttttgggctgtctgctaggtgctggaaacaaaattataaaagagatattccagctaagtgcaaataaattgcaacatagtgaaaaaaatgcctcactacagatatagcaaatgtgatttcacagagtaagtcaaatgacacatgatgacagttttgcctcaaacaaaatcccatggtataacttggggacactgaactgaaggctcttagtttcttgaatccctatncaccatatgtggcacatacgggctataggggtttaatattctgtgttccntttgngggtaaccncaggtaaggtggatactggnataaggcaggtcaccngggttttttatttncccggtggcttttaaagggtntggtttacacttacagtgggctttttaggngtggcctagggttttgggtttttt

SEQ ID NO: 332953 - DNA, 641 bp, Homo Sapiens
tgacaaagtagtaacttgtaaatagtctcatggataaattattaaaatgctaaccaaggtgatttatttcctgcttttgaataattttccagataaagtttcccatttactttctctggttatgttgaggaccagggcagaaacctcttgctaagctaggtaaggagcctcaactgaccggcagaaagagtacacactgtatgacctctgaagggtttttctgtaggcaccacattcagcacaaattagcttccacagccaaaagagctctaacaggccggccctcaggcctctttttaaacacctctgtagtcaacactacacctagccaaagccaagtgagtgtcttccgttgttattcacactagtatcatcacagttgcattcaccaaatattctgaaacaaacaagttaatgtatcaaaaaggaagacagaattttatatctggaacctcgacttatagacacaaccttcatttccattcctcaaaggttaaataaaaactgaacatgtaaatataacaggagaaaaatacagacgtgaaaacaactggaggcaggaaaaggagtatcaatgtgatttatgcaagaggctgctgaagagattaagtccggaacgctctctcaaaacccttactaca

SEQ ID NO: 332954 - DNA, 425 bp, Homo Sapiens
  misc_feature (21)..(21): n is a, c, g, or t
  misc_feature (39)..(39): n is a, c, g, or t
  misc_feature (56)..(56): n is a, c, g, or t
  misc_feature (72)..(72): n is a, c, g, or t
  misc_feature (82)..(82): n is a, c, g, or t
  misc_feature (119)..(119): n is a, c, g, or t
  misc_feature (145)..(145): n is a, c, g, or t
gggaaaacatttttaaaaaanccataaaaaagatccccntcaaggcaatatccctnaagggaaaataaaagntgccaatggnatccactgaatacactcccctaccccatgcccctaancctactgaatcccaagaactggaaanagggtcctccgggttaattgctgtcggccaggattgctgggctgccagtgtccttggtgggtgtaagttttaccgtgaagaatgaagaggaagaagaatgggaactctcactggaaaactctgcgcgtctcggtactggtgctagtctttttcatttttcttctcttagccaaaggggccttatcaacattctgaaggcaaaacccctctctcttgtatttgttaaaggcgtggaaggttgctttcacacaggtatgcacggcagctccggaagatccta

SEQ ID NO: 332955 - DNA, 493 bp, Homo Sapiens
  misc_feature (224)..(224): n is a, c, g, or t
tttttttcattaaacttctgggctttatttattgtttttaatacgatcattacatattacacaaaaataaaagtcaaatgaacttggtatttataaattattaaataaaaatacaggaatatagatttatatttatagagctttcttttcttctaaactaaccaaatctgttctgccgttttatgattttaaaaaagtaaaatagtgtttgtgtgccctaggantaagtggggagtgggattaataatcgcaggaccgagttgccctacttccgctccttccttggcctaaacaaagtccctatttgtccctttggctctggagagcaagaaacccctctcctcctacttaatctttgaaaaatggcaattacatttatttcccttattttttaaaaaatgaaatggatttaaaaattgggaaccatactcagccttcttggccaagagctaatcccaaggaactatatggctctagaagagagtccctagta

SEQ ID NO: 332956 - DNA, 440 bp, Homo Sapiens
ttaagcttttcttttgcttttattacaagcatataatattaattggcaaaacactgaatacaagcttcactatcataaaatcaaaacatttaagcaatattccaaaaaagatttgacaaaaactagccaccaagagtacaaaaattacacaccaacacaaagcataaaaaatgtaaactttcaaattaaacagtcaaacacatgtatcttcgtgatcacctccacacctcgactgccttcgtctgccgtacgctgctggtaaaggctgggtggctgcactgtcttccccaacccaacattgctttcgtctgggaaaatgcgtctgataggcaattaagccatgggagtggacatttacacggaggctacgcacatctcaggggaacgctcaaactgcagctcgttcctcagacgcactgttgggtggaaggacactggag

SEQ ID NO: 332957 - DNA, 639 bp, Homo Sapiens
ttggctagaggatccatcactttattttcagaaaaagatggccaaagaggggaaaaaatacagaggcattcccacagcacagtgaaaacaattagccatccaaaaagctgaatcaaaaacaatgccaatcagctttcacgcccacacaggtgaggtttcactgtgcaacagcacataaatgataatctaaatcctagagagaaaagtagatagcaccttgtgtttttccttggcaggtggatggcacaggcttggagacttccatgtcatctccgcttttcctcctctaacacagggctggttggtttcacctgcaggcactactgacttcagggcttgctggagaggagatggttgtgctgcagttcacttggtgactataaacactttgatatgctcggcagtcccccaagtcttccaagcaggaaatcaggtcccccccgacttcccacatgggccaatctgcagcacagacaacataacagcacagctaatccgtgaagacggacagtgaatcaaggctgagttccaggccagtgacttgtgtaccaggggcaagatggaaatgccagataggaaatattaaatccattccattttagctcacaagctcaaatgcgccttccaaaaacacctaga

SEQ ID NO: 332958 - DNA, 480 bp, Homo Sapiens
  misc_feature (309)..(309): n is a, c, g, or t
  misc_feature (403)..(403): n is a, c, g, or t
  misc_feature (427)..(427): n is a, c, g, or t
  misc_feature (438)..(438): n is a, c, g, or t
  misc_feature (467)..(467): n is a, c, g, or t
ttggaaattgtcttcttcccttccccttctctctcccatactggggagacaagaaggccaaagggtactagagttggagaaattcccttctgcagcagtggataaggccctggtaaagtctttttccctggtgagtagaactgttattgagaatgctttggtctattttaaaatggttacttttccactccacctgccagagccactgtagggattctctgttcctcaccatgaggaagccaatgtgggctactttcaccaagtgcccccagcagtttgtcactctcagtctaggtccacactcagccntctaggggatcttgtcaaaattccctatttaaggttttaccagttcatgggcttgttttaaaatatacagtattaatttttttaaatgagggtncagtaagggccaccatatcagggngatgattgccncttgacaaggcagttacaattcccaggangagaggggtagcc

SEQ ID NO: 332959 - DNA, 525 bp, Homo Sapiens
  misc_feature (53)..(53): n is a, c, g, or t
  misc_feature (281)..(456): n is a, c, g, or t
ctggcctataaacaactcttaaaactaacaataaagttgaataatctgatttngaaatggacaaataattgaactaaatttttaccaaaaatatacacaaatgtgaagaagcatttaaaaagacacaaaattacaatttgtagagaaatgcataaaaatcacaatgaaacacaagatcacctatcacccatttagaatggctactataaattttttaaaaatacaaaatctgttgatgatgcaataaaaataaaaccatccaggtaggtacagtggctcannnnnnnnnnnnnnnnnnnnnnnnnnnnnnnnnnnnnnnnnnnnnnnnnnnnnnnnnnnnnnnnnnnnnnnnnnnnnnnnnnnnnnnnnnnnnnnnnnnnnnnnnnnnnnnnnnnnnnnnnnnnnnnnnnnnnnnnnnnnnnnnnnnnnnnnnnnnnnnnnnnnnnnnnnnnnnnntgtttgaacctgggacatgagaacaaatcactgcacttcagtctgggtgacagagtgtgactccatctc

SEQ ID NO: 332960 - DNA, 420 bp, Homo Sapiens
  misc_feature (167)..(167): n is a, c, g, or t
tccttcccctacgatccccgcctcttcgccatctccgttggcgtctaagtaactttctgaatggagagaagacccatagggaaacttaagggttttgctttttgggggccctctccagacctggcggagttgatccgaaaagggtcgtttaaaagtcagaccctcanttcttgagccttaacgtcttatgtggacagtgttgttttggattgtgtgttgctcctgttgtgacatttcttttggagagacattttagatactgaggaaagtagggaagagcactgtcaggatgtccagggcgatattagtatcaggcttgtgttaattttttgagttactcagattaagagattacctaaatcagtttcaggagttctgtttgtaaactagcttcaaactatagtgtcacctgaaattttt

SEQ ID NO: 332961 - DNA, 502 bp, Homo Sapiens
  misc_feature (11)..(11): n is a, c, g, or t
  misc_feature (39)..(39): n is a, c, g, or t
  misc_feature (72)..(72): n is a, c, g, or t
  misc_feature (81)..(81): n is a, c, g, or t
  misc_feature (97)..(97): n is a, c, g, or t
  misc_feature (123)..(123): n is a, c, g, or t
  misc_feature (469)..(469): n is a, c, g, or t
tgaaaaaaaangccctggcaatggaagggcaaccctaanaaatggcaaaccccggaaggtaaccaaaaatcnaaaattaanccctccctaaaaaaancccaaccccttttggccccccctggntcaattttccccaactggccaactactttaaatcagggcccttatcctttttttcccccccctaagacccattacaagaactcctacctactcttgcttcccaatctgtctctccctcccaaactgttatcctcagtgttgtagtagtgatcttccctaattgcagatatggtcttgtcacttacctacctcatgttcttcagtggctctgtaataaaatcctagactggtatctggaacactttaaaatcatatacttttgtggtcaggcacagaggctcacacttgtaatcccagcactttgggagccaaggcaggaggaacacttgagcccaggagtttgaancctccgcaacatagggagactccatctaattca

SEQ ID NO: 332962 - DNA, 289 bp, Homo Sapiens
ctctgtgcccttcctccatttagacgagtttctcacgatagagccaaaaagaagagctgcaggaaaccagagagtaccagggggaccatgaagatatgtatgcttgggaaagctacactgtaaagctgttggtgagctccagggctgaccactgagccgtgattgtaaggatctcaccctaattagcatcctaaagactttcagatctaaactcacgaacaaactaccgctcatgccgcacagtaaccagagtggcacacagtcatgacaggcctaaagagatcttaaa

SEQ ID NO: 332963 - DNA, 355 bp, Homo Sapiens
  misc_feature (282)..(282): n is a, c, g, or t
  misc_feature (322)..(322): n is a, c, g, or t
  misc_feature (339)..(339): n is a, c, g, or t
ttttttagctctttatcagagaataacatttattttatttggaaagttttcctaaatatgagactatctgctatttctcagactaagtgaaaaatttaataaaatagctgccttgataggaggaaaacaaagttcttactttataaggaataacgtatgaatcataaaagaagaatgagcgatcatggggaaacatttagcttttcaaagtttttgggaacatgtaccttaaatgcttttggggatcccggtaaaggcccggggaaaggccaaaggagttgnaaagtttcttggggatttatccctcggtactttaccatcnattagggtaataggggnaataattgccatcctc

SEQ ID NO: 332964 - DNA, 581 bp, Homo Sapiens
  misc_feature (441)..(441): n is a, c, g, or t
  misc_feature (466)..(466): n is a, c, g, or t
  misc_feature (478)..(478): n is a, c, g, or t
  misc_feature (531)..(531): n is a, c, g, or t
  misc_feature (543)..(543): n is a, c, g, or t
  misc_feature (566)..(566): n is a, c, g, or t
agtcagcttctgcttagctccatcagatcccaattctctacggagtcgagaattatgaaaactaaagctatctacagctcttaacaattgagtaaagtatactgttaccagaattgggagcatatttgtttctctctacctggtttctccagaatttggaaactatttagtcactgaaaactaagctgtgctttcttaaagccctgcaaactgaagccagacaacttacacttcagaagaaaataatagcaacctatttacatacataagccactttcatacctgcctactaatgtgtggacttcagagtaatgtggcctatatcgatttttccaggattgttcttttgtttgttgttgtttttctcccttcctccccccattttctcttcacagggacatgaggacttcacaaccttctaaggaatgaggctttcagggnccctaactactaggggctcgtgccncaattcttgggnctcgagggggccaaaatttcccctataggtgaggtcggtatttaaattcgggnaatcatggtcangggctggttttcccggtggtggnaaattggtttatccc

SEQ ID NO: 332965 - DNA, 515 bp, Homo Sapiens
ttttttttcttcttgctccctctttctcttactttttccttttggcatgtttaattagagaacattttctataagcattattaagaataattgtccttaaggaatgatggataatataagggaaatgaaaataataaagaaaatgctacatggaatctcttattcttgaaccatgttcagacactattagctgtgaccactgcaataggaaatgaaaaagagggtactttttcactgaaaatcccactgttcaaagaaacaaagaaacggccacataaactaaatattcacaatactggaaatgaaccacagactttttgagtaatactccagtgaactcatgtccttaaatgagaagggcagccacagacatctgcccactggaactctctggtggccacatttagggatgcattcttccttacaagggcagccacctgtggaagtggattcttaaataactgtgtgcaccaaggaccatctgggcatggcttaatcactgtacagactctgca

SEQ ID NO: 332966 - DNA, 591 bp, Homo Sapiens
tctggcttcaaacttttgctttcattcttgaccatatttggactttatctccaaataggttacctccctcagtaaagttcaggtcactatggtttccagaacctgtaattacctcagcagagctctctgcagagaacacacccaacatgttcagtctgattccagaagtcaggctcagactgagaaaagtcaggaagcaaaaagactgggtggatgttgtcacgtggcccttaagaacaaaggcagtttcagagcgaggtggccgagaggaaagagagcatttcagggataaagaaaagtagataggaaagtctgggcaactttagggcttttatagtatgactgtgcacagtacaatcacaaaaatatgtttagttcaagtcatttaaaaagctgtaatctagtatatttacattaaattgtttccttattagtggcaagagaaaaactgataacccacacagtagagacactgggcactactctgactaggtcatccaaaattaaacattccccgttgagggcagatggatatagtgtgctcctgatgtgacacctgagaagagccatctcgtgccgattcttgctcga

SEQ ID NO: 332967 - DNA, 390 bp, Homo Sapiens
  misc_feature (52)..(52): n is a, c, g, or t
  misc_feature (68)..(68): n is a, c, g, or t
  misc_feature (90)..(90): n is a, c, g, or t
  misc_feature (260)..(321): n is a, c, g, or t
aggttgttcacaaaagccataaatatgcccttcccaaagcccaggctgcccnaaaaaggtcaaatccnagaaaccaagtcttaatagacntgaggaaagcaagtgaaggtaacttgacacgccataaagaactgttcaagtgagtggactcattgtgagatgcctgatgcactccagagaaatcagatttaggtccaatagcataatacaagaagtcaagcacgtgagggcctcctgtgagatctcgatggggcagccannnnnnnnnnnnnnnnnnnnnnnnnnnnnnnnnnnnnnnnnnnnnnnnnnnnnnnnnnnnnncattttgagcccagggagtttcaagatttaggcctggggcaatattgggtggaaaccccattttcttac

SEQ ID NO: 332968 - DNA, 454 bp, Homo Sapiens
  misc_feature (98)..(98): n is a, c, g, or t
  misc_feature (418)..(418): n is a, c, g, or t
  misc_feature (432)..(432): n is a, c, g, or t
ttgagggctcttaagattggtacatatacaagggctctgtttgaaagactttggctgccctggcgtcctggctgttttatgcctggtagctctagcgnttaaaagctctctctgtcttgccactcctattacccattaccagtacatttgttggagaactttggttgtagaatataaatcccagaaacagagctgtgtgtgcatggttaagttttttagttcatgagagaagggggaaattaaagatcttgactcatacctgggccagtacaacattgcacagggaagaaaaatgcaattaggtgcttgctttacagtaggaaggaaaatattggtaagtgtttttacatcgggtcagattctgggggattttctaattctggaggccgaacttatgttactgtgaagggaatgggtngggtggttttttcnggaaattggggaaacctttttt

SEQ ID NO: 332969 - DNA, 630 bp, Homo Sapiens
  misc_feature (522)..(522): n is a, c, g, or t
  misc_feature (568)..(568): n is a, c, g, or t
  misc_feature (595)..(595): n is a, c, g, or t
  misc_feature (615)..(615): n is a, c, g, or t
gaacataggacattctaaagttccttgatttgatcattataagaagtgtgggactcaagcacaggaaactgaactcttttggtgtcattggatgtttcatttttgacactaattttttctggacaaactctttatgtgtttttcccaagaatagttatctacttcctggaggcaaaatccttggatttactaacatgatgatttaccttttcttcaccgttgtcgttacattgttagaaaagcaacaggaaaaaatccaattcatttgacctaaaaacaagcctcaagtttaaaaccaagctcacgtttttcttaagggaaaaattttctttctttaaacttacatctagcaacttggaaaagcactttctctggggatcttcttttgtaacttttgcagacaaataagtatgagtcactggggagagagtttggttattgaaatagatgttgcccatggaaggattctccttcctgggattgactcttaatcatcagggcatcattcctgggtttgcttcntctacggatctcaattccaacttctctgcagagtctggtacagtgnttaagccatgccagatgggtctttggntgcacacagttaatttaagnatccacttccacagg

SEQ ID NO: 332970 - DNA, 440 bp, Homo Sapiens
  misc_feature (223)..(223): n is a, c, g, or t
  misc_feature (336)..(336): n is a, c, g, or t
  misc_feature (403)..(403): n is a, c, g, or t
ccaaaaaataagtttgttttgcttggttttatgttgtgcagcagcaatttgctaaccacagtcctgaagaaatatagccacgcagcaaaagaagcatttattttcagaaacacatttcttttctgacattacaggggagtgggagggaaggtccagattaactgtactttttaataagagatggagtgctattggaaaactattaaggaaattgtggctttanctcagattcaaggaagcccataaggaaggaatttactacccttcccagcttaatactgcagcaggggcccagttcttacagaccccacttgctcccctggaatgattctgggnggaggtatttgcggagcttgggggttgttcttggggagagggccaatcagcccccttgatgaggctncccctgctttacctttcccccaattgatttcccccag

SEQ ID NO: 332971 - DNA, 699 bp, Homo Sapiens
  misc_feature (482)..(482): n is a, c, g, or t
  misc_feature (485)..(485): n is a, c, g, or t
  misc_feature (495)..(496): n is a, c, g, or t
  misc_feature (515)..(517): n is a, c, g, or t
acaaaaatcggaaggaaaaataactaccaccattctctctgctaccacagagcactaaaatctaggaatttgactttactgcagccattaacaccagcaccgatgccacttctgtatcaggaacttaacgtgacaaccatgaaaggtcctctgaaagccagatgatacatatggcaaaactcatgacagcatatggacaactgcacacaacttgtgcttcatgttgctgagtgcagatgtttctaattaccgaagttactgtctgcctcctagcagcaaaagagacttgaggaagtaaggttcataacatggaggttcactaaagtatagaaaggccattcaaaaggttgtgggcttccacaaaaatgggtaagtattcattacatcctcctagccttctgtggatgccaagagtttgattaagttctaagagagaggagatcttctttaccttccagcggatgctggcatcttggttctgnggnggggttgtgnngtttgcgcccaggtgtctnnngcttatgatcacctatactcctcatcaatacttcccaggtctccagaattaggacagtcatttgttgttaaattagctgtatatttctcccagcgatcatattctcatgaagcctgatcaacgactgacccatttggtcataggactatgctatccaagagaggacccagtgatgccaccac

SEQ ID NO: 332972 - DNA, 350 bp, Homo Sapiens
  misc_feature (53)..(53): n is a, c, g, or t
  misc_feature (65)..(65): n is a, c, g, or t
  misc_feature (70)..(70): n is a, c, g, or t
acctaagggctcccaatcccccatgaccctccttgaaaatccctcccaacccncccctgaggccnccccnagcccccagtgtggggaaaatcctgcctttagagggatgttatgaatattaaggaacaagtgattaattaaccttttggcaaacatacagtccctatagaaatgttaaccgtatgttccccatttaacttcatttatagcacttggacgacactaagacatttgcctcttgtttaggacttatactagtcagaatttgcaaagaaatcattaggcacttcctacataaggcataagagacgctgtctacatcttcgtgccttctgatccagagggtttgg

SEQ ID NO: 332973 - DNA, 279 bp, Homo Sapiens
  misc_feature (230)..(230): n is a, c, g, or t
  misc_feature (247)..(247): n is a, c, g, or t
atgttatctatttatttgtattgttccatgggtatgtatctcctatttgctttcatcagagattcagaggacagtcctcaaaatgaaaagattcttgtagttgttttctgaaacatccaagaagtacctggggaagacaaagggaacaaataactactactattaatcattgggacgctgataatgtgctaaagggtgatatcttattcacaactgcaccatgtaggtgntcatccaacattcttcngtgttgtactcagggctccggggggggtaggg

SEQ ID NO: 332974 - DNA, 428 bp, Homo Sapiens
  misc_feature (356)..(381): n is a, c, g, or t
cttcctcttgttagcctattttgcaaaggcaaacactgagactcagtgaagggtgcaggttgttcaggcccctgtgaaaaatgagaagcagaccacctcctctggggcaccagatgccaggacggaggtgaacagcactcaccttcactttgccgcattcagctcagcaggacaggccctggtggacctccaccctctccagacccattgcttggctcgatagtaaaataatgctgacccgaaagatcagaagcagaagacggcttgctgctatccacatctgctgcttattcagcattcttgctgaacttttaaaaaatccctgagaatgccagaactagactatagcttgcttnnnnnnnnnnnnnnnnnnnnnnnnnnctgataatgtgaggaatctttcctgcaagtcagtgcaaattaaatgg

SEQ ID NO: 332975 - DNA, 441 bp, Homo Sapiens
  misc_feature (17)..(17): n is a, c, g, or t
  misc_feature (143)..(158): n is a, c, g, or t
  misc_feature (279)..(291): n is a, c, g, or t
gtcttgccactttttancaaatttcatagccagcacgatggctcatgtgtgtaatcccaacagtttgggaggctgaggtgagagtatggcttcaaatcaggagtttgagactatcctgggcaacatagcaagaccctgtctcnnnnnnnnnnnnnnnnttaggcaggcatcgtggttcacacctgtagtccccaattactcaggaggctgaggtggagggattgcctgagccccagggttcaagactggcctgtgcaatatagcaagaccccatccctnnnnnnnnnnnnncacctatcagggtgggtgcatgccagtagcctcagctactcaggaggctgaagagagaggatcacttgagtccagcaggttgggacagcagtgagctatgattgtgtctctgtacttcagcctgagtgacagagcaagaccaatgactca

SEQ ID NO: 332976 - DNA, 294 bp, Homo Sapiens
tgtaggagaggctttttaaaaattataaatttcaagcctttttttctgattatgaaaaaatactgtatatatcataaaaatgtacgcaaggaaaaaataaagattgctatgattctgttaccttcaggtaatcactgttaaatttggtgcattttatcctaacctgtaaagttatgttatttttaaaaacaaaattgagattataatgtttatattacttgtaaattttttccatcttaatatgttagccttttcagtgccattaaatttggccatatgtaactgaagcttaag

SEQ ID NO: 332977 - DNA, 455 bp, Homo Sapiens
ccacaaattatttgataatcagcaaaagcaaatacttttattctgaaaaaataccatgttgatttttaaatctctttttaaggattcatgtggagtgcattactcccttttactactaacaccaccaataaagagccacataggtgctcctaatgagaagtaattcctaacaatatgtcaaagtgggactgcaagggaacttccctgctgttttcatgttgtttcttcaagccaggcaagtttctggaaataatttacccataggctttcactgaagggagtttctcacctatgcagaagatgtttccatcggcggtggcagaacagatagcaatgagtcaagtcatatttcaaaggtggaccatcaccaccaccatcatcagacaaccaagcggagaagaactaccactgctgtagcatctctggtcaacagatttgagtactgggatacactg

SEQ ID NO: 332978 - DNA, 297 bp, Homo Sapiens
  misc_feature (75)..(75): n is a, c, g, or t
  misc_feature (171)..(171): n is a, c, g, or t
  misc_feature (259)..(259): n is a, c, g, or t
  misc_feature (265)..(265): n is a, c, g, or t
  misc_feature (277)..(277): n is a, c, g, or t
tggactcaagagattctcccgcctcagcctcaagtcgctggaactacaggcatgagcaccgcccctggccatggnctgggtctttaaaaagattgtgactatttgaaacttaaaacttccatggggcaggaagtgggctgaggaaatccacacaaccctcaaggaggggtngggaacacacaatccctactttcagatatgatccgagtaaagtaagggtaggggggaaaaagagcttttaaatgaggggagcgaggcncccttnaggagcaggcgntgaaggtagttcctttcccg

SEQ ID NO: 332979 - DNA, 439 bp, Homo Sapiens
agtgaaagggctggaagcagatacctctcttgccacgttggcctctgtgatggcccgtggtggcaccttccaagggcagttgatgcgcccacccaggcaggcggtttgaaatcaaattggcagcagatcttgggatctgggccacaggtatgggggaacgtccatagctgtaagaagggcatcatgtgaacagaagatgtctgtgctggagtccgagtccccatgtctgcctccacatgaactctaggctgtgggtggcagcaaagtgcttcttgatggcatagtgcactctctgaatcagcatgctggtgaggttggcacggcgcagcaggtaaggcatggtggagctgtatccaaaggggtccactgcccagccagagcggggggttgcaccaagatttctctccagccactggtgtccttcgatgagctggtcaaa

SEQ ID NO: 332980 - DNA, 479 bp, Homo Sapiens
  misc_feature (466)..(466): n is a, c, g, or t
aatctgctgaaaacgcacaagtttattgttgggacaagatgaagattcccttcatagtgttccagttgcacaaatgggtaactatcaggaatatctgaagacattggcttctccactgcgagagattgatccagaccaacccaaaagactgcatacttttggcaatccgtttaaacaagataagaagggaatgatgattgatgaagcagatgagtttgtagcagggccacaaaacaaagtgaaacgtccaggggaacccaacatgtcctatgtcatctaagagaaggcggagtatgtccctgctgttgaggaaaccacaaacaccacctacctgtaactaaccatgtgggcggaaagggaccaccctcagcctcgtggttcccatcttatccaaacctcataaaacccacccttgtacatacagatgctactatcattcacgatggccatgaggagaagatggaanatgggtcagatcg

SEQ ID NO: 332981 - DNA, 377 bp, Homo Sapiens
ccccctcaggatgctttttctgaaggatgccagcctaggggaaaggaagaatgagaacctagggtctttctggagcacaggctgcattagcaaataccctccagggcacgcctgtccccaggccacagcgataaccaatccgaatggagaggacactggcatttgtgagtttcagagttcttggggactaacgtgtatttactggattctagaacacgtgatgctcccgacactcacctaccaagttagtcacctctccctccacaaggactcccactcctgaggcttcccgttactgtgacacaggagccggtacggaggaacacgttccggcttgaacacttatctatgacaattggctgtgcctttgtgttggt

SEQ ID NO: 332982 - DNA, 342 bp, Homo Sapiens
  misc_feature (72)..(72): n is a, c, g, or t
agaatgcttccccaaaaagtaacaatagctgggcacccctggcacatgttttaatactctcagctacttggnaggtgctgaggcaggaggatcatttgagccccaggagtcagaggcccagcctgagcaacatgctacgaaggggggcaggcttctctgataaggtcgagcccaagtaggcaatgagagcagagaattccaaagggagagacagttctgggcccgtgagccaatcctgctagccaggtcccctccaaccccctattcccaggcagaccacttctgtgtcaaggtctgaaatccagccttgactttattttatttatgtattttttgagaaca

SEQ ID NO: 332983 - DNA, 518 bp, Homo Sapiens
gacaggggctaatacattgtatattaaaaacaatctatatgaaatagatcaacattccaatgaagtcacaaacatagaaatatcataaaggtataaaagatgttcagtgttcacagtaatcaaggaatcaggacactgaaacgaggtgcactgctaccatcaatgagaataaagggaaaaggcacatgttatttttgggtgggtagcttaaatttctagggagtttgggtaatactaaaaactcccaggagtttaaacatttcaatcatcctttaattgtacatttccagtgagaggaatttttccaagggagataacgggtcgtgtgtgcctagaagacggcacagtggtgcaagatgcagtcctggtgacgatgaacagggtcaatattaatacaagtggaactgcattttgacaagtcatacaacgaggactgggttacccacagagatgatgtgatccatgttcacagacgggaaggtaacaacaatggctaccatttatgaacacgtacttct

SEQ ID NO: 332984 - DNA, 393 bp, Homo Sapiens
cttatctttttcttttctcttaccaaatgctgttgagcttttgtcttccaatttcacttttttttctgttttcgatattcctgctgctgctggagctcctcttccatcagctattgctttggaagaaggatttggaagcatctgtgtatcctctttttctgccctgggacattcattacggtaagaggaatctgaggctaccggtgctgtaacttctgaaccacgacttaagtcaagagggagacagggtcccagcttctcaagtgggcaaatgtgcaacatcagggcacctctgggactgaagattcttgctgattttgagaactgatggagaatactttcccatcagtggctggagagggagaagaaaccttttctacagaatcatcagga

SEQ ID NO: 332985 - DNA, 534 bp, Homo Sapiens
  misc_feature (439)..(439): n is a, c, g, or t
  misc_feature (502)..(502): n is a, c, g, or t
  misc_feature (518)..(518): n is a, c, g, or t
gagggtttgggataataacctgtattggattgcactggtttagctgacagttaggggaagctgttcctttagtaaaatgactttatgattttaggaaattacaactactggttggggcagtccatccttgctctttagtggtccacagaacgttggaccaactatggcataaaagctctggattggggatggggggaaagactcccagttgacactggggtcttcattgaaatcttcctagactaaatgatcccaattcaccatgtccagtctgaggagcacctggggaaggacagagggtaattttctgaagtgggagagctatctttgacttggccagtctccacagagtataacaagggcaagcatcaaatgtaatagtttgagggcaaaattgacttgggttacattaatagctagggtggtcagtaatagagtnagggaaataagggagtaatgggaataggtgaaagagagttaatttttcttagcctttagtttnggtagggggttccccnggggactatggccccg

SEQ ID NO: 332986 - DNA, 360 bp, Homo Sapiens
  misc_feature (350)..(350): n is a, c, g, or t
caaataatctaaaacaaaaaagactatggaaaacatataacagctttccaaatgttcagaaatgtattttcccaaatagtagcctttcttcattctattccaactctatttttaaatggaattaaaagaatattctgatgctgatgaatgtgtgcagaattcatcaattcttattgatattttataacatgaggaaagatctataccctaggataaaatatcaggtaggccaggttctgggtatggggacacacatctttctactggacacaccatttctggaaaaggcataaaggccaattggggtggggtaggtgtggggatatggtttattttcaccaccagttggnattttaatgg

SEQ ID NO: 332987 - DNA, 420 bp, Homo Sapiens
  misc_feature (285)..(285): n is a, c, g, or t
  misc_feature (401)..(401): n is a, c, g, or t
agaggcatcagaatgcaaaagtgaagtagacacctgccgtcagcactgggcagccctgctcctggggccttacttgactcatcctggtgggttttccaaatggcagaggtgcacaaccacttcttgcaagcatgggcacttgaattgtagcccatgtacacagtgattcttggaaaaagtcatgagtaatgaatggaacttttctctcccaggttgatcttgtgttttgagacataaagagtccaaaggttggttcccagggatgctccattcttattgtttttnggtagtttgattgttgaaggcttttgacacggccattgaagtgaatatttgggggcatttttctcctctgggcttttctcttaaaggaccctcacatttcctctctcatgtttccnggggctttccggggctttt

SEQ ID NO: 332988 - DNA, 399 bp, Homo Sapiens
agtaacctcataatgcattcctgaggagcccagttagtccttgctcctgtccatcccacctccttcaggccggtagaccagaagaagggtcttcatctcaccccagctaaagcatctctgcttccagaaagtgtggatgagttggagccataaacctggggaaataagccacatgctacccttttggttgttgtttattttaacaaaattctatgaccccagggaccatgtttctaaggagtaggcacttgaaggcagaagggaaatatttagttcaaatttttacaattacaggccaaatacagtcttaatggggaggccagcaggacattgttgggaaagggggttttcacacaccatttttattgttgggggagttagggttgatgacggattagt

SEQ ID NO: 332989 - DNA, 431 bp, Homo Sapiens
  misc_feature (59)..(59): n is a, c, g, or t
ggggtaacagcccctccaaagagaaccttggccatgaaacctaactgtgaatgtccaantaaaaaggttggtttccatgaagtgtccagggccttaaccccggggcaattccacccctctcactagtggaagtcccagcccacacgcctgggaacactgagaagagtacacagcaagattagtaatagccctcaacatgactgtatataatttttccctctcccatgaaaataggcatgtaacaagtgtgggtaaaaaagatatatggaattaaaagcattgagatatatggaattcaaagcattaagttacgtttctatgactaacaatgtatttgtgtttagtaaaactaatttctccaatgggatcaggttcacagtgatccaagtcacatgtggaacaatttcatataatttagagctgtgccgaaa

SEQ ID NO: 332990 - DNA, 357 bp, Homo Sapiens
  misc_feature (328)..(328): n is a, c, g, or t
ttggttgacagtttattaaatacactacatttgtaccttattctgtcgttttttaaattgttcacgcatgaactgagtaaaaacgtactttatagaaaaccaagtgcaaaactaaaatgaaagaatgcacatattgcacacatatgaaactgctgcaatgttagaaattaatctgtacaagtacctaatgaagaaggttatgaaatattagggggttcgagtttcttaaatctggcaccagaccatgactttcaaagtgttaatgttgaagtgtcgatgccaaaaatgtctattaaccaaaactgctttaacactgtttgagggaacngggggccaaaataattgtttttctttccc

SEQ ID NO: 332991 - DNA, 712 bp, Homo Sapiens
ggataaatatatacaaatcttttattataaataaagcaaaacttaaaaagaaaattattatcctgggtctttgtacccttgaaaatcctgtttacatttttcaaaggtgacttgctggggctttctccctgccagacttcctgtgttttcccccaagagttttggaaaagggcaaattcctcacaatgtctcctctttaagtggggtcaacaatgcaggtggctcacaacttgaccgctaagcaggaactgatctccagctgtctgatttaaaagtcatatctcgcaaaagaagcttttgaaaagggttagtgactaaaactgaaagtgggagccctgggctagattccttgttttcctctgattggtgtgacataaagtatggacacacacctcgtgtggttcagtttcacccatccataaaaataggatagtgatatttttcacctttattataatagaaatgtactttaaggtcaccggagatatacagtagatgcctgtattttaaataagtatttatttttgccttaaccttcttcactggttaataaaatcatatcccttcatatagttgaaaatgtctgtgaatatttctcacaaaaacttctcagaaaatgcaaaaatttgaaaacgtgaataatttttgaagatcaagaatacacaaacactggttagttctcaccaggagttagagatttcacgctcatccc

SEQ ID NO: 332992 - DNA, 349 bp, Homo Sapiens
  misc_feature (249)..(249): n is a, c, g, or t
  misc_feature (259)..(259): n is a, c, g, or t
gagattttaagtcattagagccaatttgtaaaatactcatttccaaggggaagtcaaatcaacaggtctctctgaactgtctttacccactacaattaggaagattgaaaattaataaaggagactgaaataaggccaaataagatccccgataaagacataagagagcaacaatttaaacccaaaagaataccacagaattttcaatgtaaattaaaacgaagctgttaccttgctgggactcttccnaactgaggtncctcgtttccaggggcttcagaggaatacgggagctcaccaatgctctgggggacggacgtgtccctgctgggctgggggtgtccaggaa

SEQ ID NO: 332993 - DNA, 409 bp, Homo Sapiens
  misc_feature (29)..(29): n is a, c, g, or t
  misc_feature (95)..(95): n is a, c, g, or t
  misc_feature (126)..(126): n is a, c, g, or t
tcctgtgccatccaaagggacacctattncccgtgaaaagtccagtcccacagaatccagaggaaatatttgcaaatccatgtatcctaataagngattaatatcccagaatgtataaactcaatnaaaagtaaacaacccagtcaaaaaatgggcaaaggccttaaatagacatttctcccaaagaagatatacaattggccagcaaacacaagatgctcaacatcactattcattaggaaaatggaagtgaaaaccacaatgagataccacttcattttcattagaatggctattatcaaaaacaaaaacagaaaataacatgttggcaacgatgggagaagttgtaaattgctggtgagaatgtaaaatgctgtagccactgtagaacacagtatggcagttaata

SEQ ID NO: 332994 - DNA, 370 bp, Homo Sapiens
  misc_feature (325)..(325): n is a, c, g, or t
  misc_feature (334)..(334): n is a, c, g, or t
tttttagtttccatttttattaaagttgtgtttttctaaggaatatatcacacttaaagttcaataccataaatattagttcttaaatcttctattttacttattaaaaatgtaaacataaaacaaccactccatccctgtccctgacccaatatatattaaaaaaatattactcctctcaggtaagttcttttcttcagaatgagtaacacagacttcattaaaatctttttagtcctcctgggctgcaaggacatggcaggaatgactaggtgtccactgtggacaaggggtctgtgacactgtgactgagggcccgtctccntccctgccncggcggactcatgtgcccctgaggaggcagggctcc

SEQ ID NO: 332995 - DNA, 395 bp, Homo Sapiens
  misc_feature (22)..(22): n is a, c, g, or t
  misc_feature (35)..(35): n is a, c, g, or t
aaggcaatgctggtctcccttnaacccccgcgggnaacttcaaggcaagaccccagttcctgcagggtgaaaggcccatcaagcttccttctgtaagaacttcccacccagcgttcatctcgaatggcaagaggagtccgtaagggcgccctgacagttggagcagagccactgaaggcaggaccgccccatcctctgagaaggaagagtctttacacaggtcccaggtcgcggcagaagttacagctgcggcagatgacctcaggaagcacgtaggagcggcaggggtctcggaactgggcctcctcggagaactcgccgacatccaccaggcgaagcaggtctcggttcagcttattcacctggtttgtgatgttggtgtccagccgtgccga

SEQ ID NO: 332996 - DNA, 455 bp, Homo Sapiens
  misc_feature (381)..(381): n is a, c, g, or t
  misc_feature (405)..(405): n is a, c, g, or t
  misc_feature (426)..(426): n is a, c, g, or t
  misc_feature (431)..(431): n is a, c, g, or t
ggggcgagggacgggttgcaaggggaggaaaagtcaggaaggctactgaggagcatagagccgacttcagcctctgttgggaagggaaccagcagtcaagccaaatcctactacgggtgtagcaaaactcaacttctttcaatacgaatttgagatctaagagtagtttattctggtggagcaggcttacccatggtttcagaagttagagaggagactctgaggagtcaagccctgggttgtttcaagaccccaattaagggcagggagaaagcaggacattagggcaggttttcccaaggaaaatgagccccattagccatttcaagccttcagttgaccagggccaggtattagggtacttcccatttcagttagttncccagcttgagccccattagtttntttggccccaagtttcccagntgttnatttttaggggtttcacccaatta

SEQ ID NO: 332997 - DNA, 370 bp, Homo Sapiens
  misc_feature (308)..(308): n is a, c, g, or t
  misc_feature (331)..(331): n is a, c, g, or t
  misc_feature (356)..(356): n is a, c, g, or t
ggttttaccatgttgcccagctggtcttgaactcctgggttcaaatgatctgcctgccttggctcccaaaatgctgagcttacaggcatgagcactgcacccggcctatgaagatacttttatatctattcaataataaaaaaagatgattttaaaagacataaaatatatgacagatcaatgtacaggtctctatgggatgtaaaaacagaaagcacagctccttcttgttgaatatggttaaacaggaaaacacataaaaagctaggcaatcatggaataatgttttcccaaacattatggggggngggggatcccaggggcggcccgnggattaacctatccccattaatggnaggggccccattat

SEQ ID NO: 332998 - DNA, 451 bp, Homo Sapiens
  misc_feature (76)..(76): n is a, c, g, or t
  misc_feature (161)..(161): n is a, c, g, or t
  misc_feature (168)..(168): n is a, c, g, or t
  misc_feature (183)..(183): n is a, c, g, or t
  misc_feature (190)..(190): n is a, c, g, or t
  misc_feature (334)..(334): n is a, c, g, or t
gattggaaatgtgagattcagcacattgttttatccctttgggaccaagggaaagagcttcgaacggtaggagganctgctccggcggcacagaagcagcgcttccaagagaagcactgcgcgccgggagcaggagctggcagaacgtaaagatgacatcnggtgacnggaaactgcacctgnctatgtncagctgagccaggagaagccccggggtccgcaagcgcaagggcaacttcaaagcgcagccgcctgctcaagctgcgggaaggcggcagccacatcagcctgccctctggtaccccacccgtgtccccagagcgcccccccaganggctgctgggagcagccccgacctaggatttatctcttccttttctttttcaacttgtttttattgctaaatatatcgcacatagtcagtgatcagcccagtgcagtggcgagcact

SEQ ID NO: 332999 - DNA, 417 bp, Homo Sapiens
ctgaaggacttcctgcccaaggattatgtgaagcagaagggagagcgtaagatcttccaggcacacaagaattgtgggcagatgagtgagattgaggccaaggtccgctacgtgaagctagcccgttctctcaagacttacggtgtctccttcttcctggtgaaggaaaaaatgaaagggaagaacaagctagttcccaggcttctgggcatcaccaaggagtgtgtgatgcgagtggatgagaagaccaaggaagtgatccaggagtggaacctcaccaacatcaaacgctgggctgcgtctcccaaaagcttcaccctggattttggagattaccaagatggctattactcagtacagacaactgaaggggagcagattgcacagctcattgccggctacatcgatatcatcctg

SEQ ID NO: 333000 - DNA, 604 bp, Homo Sapiens
  misc_feature (569)..(569): n is a, c, g, or t
ttttctccctggaaatgtgaaaactgaacctataactctgataaggacttgagatgtgtagaaacgttgggttatggaagactagtttcttccataaccctgaattggagaccttaatgctaagtgtagattattgaggtttgttagtgaggaaaagaataagagttcagaagcctttgttatcagatagcgaaatcagggcctagtgaggagcacaggtcgactacataatggagtccattggcgaaccctattgcaatttggtccaactatatcttctggtgaaggaaattaatgatgtaagaaaatgcaagaggctcaacttctcttccaaaaatcttctggcttctgaactcttcctctgcctctctttaaataaataacacagaatttcaagtggtaggagacttattaagccagtcaccaagcttggtctgtcagcctgtcttctaacacctcaaagatcttgtgccctgtgctgtccctcccttgtaattatggaaaagttctttgggtttcgggggtgaattcttaccccatgtattaatgagggatttctctcataaccntttttgtcttgtctgtcatctctgtttcatccctt

SEQ ID NO: 333001 - DNA, 555 bp, Homo Sapiens
  misc_feature (290)..(290): n is a, c, g, or t
  misc_feature (295)..(295): n is a, c, g, or t
  misc_feature (370)..(370): n is a, c, g, or t
  misc_feature (397)..(424): n is a, c, g, or t
  misc_feature (453)..(453): n is a, c, g, or t
  misc_feature (466)..(466): n is a, c, g, or t
  misc_feature (473)..(473): n is a, c, g, or t
  misc_feature (479)..(479): n is a, c, g, or t
  misc_feature (540)..(540): n is a, c, g, or t
agtgtagatatagacttttaaaggtaaaaagaaagaataaagatggagggtgtgataatcctatgaagtgtctgggtttgggtcctgagggcagccaattacatcccagactcactggcaatcaacagtccaagccagggtcccatcagctgaatcctgaggtggggatgcttcagtctttacagaacagggtcaaggaagagtccagaaaccgccgtcattggcttcatgaaaacccgagcacgtctttgagatctttttcaaattctgccctcttaaggtcaagtccntaccntaggcccaaagtcaggaagccctgaaaggaggaaaaaaggcaaaccaaacacatttgaagggattgaggggattnccagccccttccaaatcacttcatacnnnnnnnnnnnnnnnnnnnnnnnnnnnngagtcaggggtcttttcccccgtcacccnggggctttgggtncagtggncccccntcatgggcttcacttgcagcctttgattccagggggggttcatgtggtccctccccccttnagcttcctggggagg

SEQ ID NO: 333002 - DNA, 490 bp, Homo Sapiens
  misc_feature (19)..(19): n is a, c, g, or t
  misc_feature (75)..(75): n is a, c, g, or t
  misc_feature (82)..(82): n is a, c, g, or t
  misc_feature (217)..(217): n is a, c, g, or t
cctgttgcctccaactccnaaggcccttctgaaggcctaaagggaaaggcctgaacccccagggcccaggaacangaagcanttttccccagtgcctgccatatttccagtttccagaacaatgggaacagggaaatggtcctgaccctcctaagttcctcaaatcccagaagagtccagcttgccatcccagttcccagtccctgcacccaattangctatgacccagtggggcaggatctagttgaagaaatgactatgattggcctagcttgagttaagtgcccgtccctggaagagtcaatcattgtcaagggctggaatattgtggttgtcatagtttggatcaggtatctacctgtagaccaaccaattctggcctaggggcagcgttatagaaaaattatggcagctccatggaaaccttatcttgttgatgccagtacagggaaaggggttgttgttcccagataatacagggtattgaagc

SEQ ID NO: 333003 - DNA, 395 bp, Homo Sapiens
aagctggccctgctcccaagaatggatctgggaacctttgtgccccccttaaaacaacaaagaaagccccccaactccaaaaaggcccaaacactgtccctcctaaatttccccaggaacactaaaatggcccacttggtccctggttaaactcatttcctaaacacaaaggggacaggtctgaagaaagtggcgttctctaccctaccctgagctcatctgttctgaggacaaaagggacgggtgtgtcccaggctggtggcaaaggctgcatttccggggtttctttgctgtggaccccatgtctgaggaaacctgcccggggccttttgcttctggcttccgactccagggttcttcctctgtctcctgtccaggacggggctccagaagtc

SEQ ID NO: 333004 - DNA, 382 bp, Homo Sapiens
cgtgagaatctggattttggcttgtgagccctgcttatttggagccgggtctagagggaaccctctatcagcctcaggaaaacaagacctctgtgcacctcacttttggctcactgcagcccttgtccttcacctccacacaggaccagctggaagcagaaagaagaaaggccaatttcacagggcaccaaacaagtatgaaatgtaaatcagaaatgcagacaccccagacgagagcctcacaggagggagggggccccacaggctccccaggaggctcgtgtctttggcccagagccagccttagtttgtccctgccatctactgtctgaggccatcgctgctacactttgtttttatttgtatctcatactgaagtttc

SEQ ID NO: 333005 - DNA, 485 bp, Homo Sapiens
  misc_feature (406)..(406): n is a, c, g, or t
  misc_feature (415)..(415): n is a, c, g, or t
  misc_feature (430)..(430): n is a, c, g, or t
  misc_feature (465)..(465): n is a, c, g, or t
ttggaatccactgattacattttaatgtttgtgaatacacatataaaacacacattaaccttaacaattggtggggaagattggcagcacaggactatgcacaacaaattagcaggcactaaggcagaatatcttttacagcagaaagaccaaatctgtccctttctgatgcacatcttcagttttgggtcatgagctagtggtggaggtcaaggccaaggtcaacctaagaagtctacaatagcatgcatcaatgggaaatgctgcagaaccaaacatgggagggaaaaaggtaaaaatgctcttgttaacccatccaacaccctggcaaatatggcccactttactcctttttctcttgtgaggtgcaggtgaggccatggacttaaacacagtaggctctctngggggaggngccaggattaagggngtctttcaggattgagtttgttaggtttgtttggntgctttccaagtgggggttt

SEQ ID NO: 333006 - DNA, 482 bp, Homo Sapiens
tcgttaatattcttttgggctaatagtgacatagtgtgcagaggtgtaccagggatcatgggggatttcctagcactagtatgcttctagttttagataactccctcctttattccctggccccttgtattttccttatcttcctctttcaagacccctacccattttgcctatccgtaggctggggcttgtgtctttgtcattgtctggttcttaagagtcccagactttgggagaccagctccaggtggcgtcctccctgcctctccgtcttgtaatgagttgtagtatttactcttaacataggatcatttggaacaggagttctgaggaggagagagtgagggttttgctattgactgacttgaacgatggcttctcctcaagctgtaggctccagagcttcctaacctagtaaaatgtcaagaacagacgggagatattagtgtctttccctctatcattaaaggtgttttaaccaa

SEQ ID NO: 333007 - DNA, 285 bp, Homo Sapiens
cttcccaaaggccccacttcataatccatcactcaaaatagatatttggggagctcaaacattcagacaatcgcagacccttaagaactagcttgtctaatttaaagatcacaatttgagtatttagtcctagattgttaaatgactattacttaaagctgtgcagaaatccagaggaagtataagacatggtcttaggaaacagatccagactcttctagttgtaggtgtcagagccttaacttgaattaacaaaagccaataaggccagtgcctgtggtccta

SEQ ID NO: 333008 - DNA, 433 bp, Homo Sapiens
  misc_feature (100)..(108): n is a, c, g, or t
  misc_feature (308)..(308): n is a, c, g, or t
  misc_feature (343)..(343): n is a, c, g, or t
  misc_feature (388)..(388): n is a, c, g, or t
  misc_feature (419)..(419): n is a, c, g, or t
catttcagagtcacattttttgcattgaggaaattcaaaatgtcataaaaataactgagtataattttttgtaatgtataattaatgagaagaataaacnnnnnnnnncttgggcgtttgcttaattgagattcaaagttagtaccccataatgaaattgggtacaaatgttcacctgtaaaatctattcttaacttgaaagacataggaaaaacaggcaggttgaacaatagggccatagcttccctgacccttgggttaggaaaatcaaataaatcataggtatgacacaaatataacacctaatngttaataaatggtaaagatacaactattaaatccnctagattaaaattacaggccagaccgtgggtgggttccatgcccnggtaatccccaacacctttagggagggcctnaggcaaggccggga

SEQ ID NO: 333009 - DNA, 299 bp, Homo Sapiens
  misc_feature (239)..(249): n is a, c, g, or t
ctgtaaccagtggtttatttgatgatgaagcccccggggcaacaaaggggagaccccctaaaatttaaaaatttagccctagccatgggtgggtatgcaccctgtggttccagcctacctcaggagagtgagacaggaggattgccttaaaccccaggagttccaaggcctgcagtagcccatgaattggccactgcactctagccctgggtgacagcaagatcctgtctcacaaaagnnnnnnnnnnngtaaactagtgttagagtagaagtattttagacacaccctaataaggctt

SEQ ID NO: 333010 - DNA, 436 bp, Homo Sapiens
aacattttatgtctaatcaaacactttcttcaaggctgcatatggactttattatcacatctgtgccatattagagctagggagagaatagtaaagactgtctcattctaattcttattaccaatatcataatgtagagtttaatttaaaaaatgtaaatgtctacactaaatatagctttcttccctcatgttttctatttgattttcaaatgcttaacaaggtttattcttttcccaaattaaaatggaaattattcaaactgtgcacatggctaaaggtttctggagagcagctaatataattcactcattttacagatgaggaaactgaggcccaggaaaaaagaagccacttgccttaataggagcagagcctaaaactggattcaattcgccaacattctttcctactacaccgtggatgttacaacact

SEQ ID NO: 333011 - DNA, 433 bp, Homo Sapiens
  misc_feature (22)..(22): n is a, c, g, or t
  misc_feature (415)..(415): n is a, c, g, or t
agctggccttttgaaggggggntcccagagggcccctggttaccctcggaaatgcccttaccccagcaggaaactaagctcagtatttaaatgaaatgccctgctggaggttatgatcggggtttaataaactttgggcctgtgttcgggacccctggctggcccggctatgggttcccgggaatgggaaagcagttccagacggaaactacacagaaataccacttagcttttatgatggtcacaaatgtggccaaaatgaccagggccaacaagctggttaaaaaatctacaccaggacagaaaggaaccctgtaaacacctgcacatgtaaatgatcagcttctcatctgaagatgccttctgtttaaaaaacaaaaatcaactgccagctgtaaccatcttggctgtgaanggaccaagcggaaggctg

SEQ ID NO: 333012 - DNA, 403 bp, Homo Sapiens
  misc_feature (140)..(140): n is a, c, g, or t
taagaattaagcaaaggcaggcagagagatgttaaagcagcttggcctaaaagttacacagacactaagtagcaaagcagttaactacgtatggagctacaaagatgcctggctgtaaacctggcagctgtgtagctccnacagctccctcagtctgtgtgcttaaccgctaagtacatggcttctcagaactgatggtttcctctatacgaaaggttattccttttgcctaagatgctcaatactcttttcccatgtcttgcatgccagcatccttcctgtcatttaggtctcagcttaacattgcttccttagaggagcccttcctgatcacttaatctaaagtaattccccatttagttcttatcacagtaaccaattaaacattcatcacagcacttat

SEQ ID NO: 333013 - DNA, 317 bp, Homo Sapiens
  misc_feature (19)..(19): n is a, c, g, or t
  misc_feature (44)..(44): n is a, c, g, or t
  misc_feature (67)..(67): n is a, c, g, or t
  misc_feature (73)..(73): n is a, c, g, or t
  misc_feature (102)..(102): n is a, c, g, or t
aattaaaaattaccctttnaaaaatatattcagaacctaatgangtctaacaagcccaagtgcttcnatcatnactcctgatgtgcaacagcaatggtctcngaaagttctccctcctcgcggccttgctcctctatgtgctattctctcatggtaacccgagggagccttgaaactgtagttagatgatatcactcctctgttcaagactctcctgtggctcccatggggaaaagcaaaagctctatctgatctggattccaccacttcctggacttcatctcccagctctctccctgttgctccctcagctccag

SEQ ID NO: 333014 - DNA, 506 bp, Homo Sapiens
  misc_feature (145)..(201): n is a, c, g, or t
  misc_feature (274)..(383): n is a, c, g, or t
cccggatattcaatattttgtattctaccttgtttggtgctggatatttttgtaaacctatacatatctttgcatttgtttctcgaatgtgattaagttacttggaaactgtgtggtccttttttttcaggcagggtctcactgnnnnnnnnnnnnnnnnnnnnnnnnnnnnnnnnnnnnnnnnnnnnnnnnnnnnnnnnntgcgtcaagtgattctcccacctcagcctccccaatagctggggccacaggacgcatcaccacattggcgacnnnnnnnnnnnnnnnnnnnnnnnnnnnnnnnnnnnnnnnnnnnnnnnnnnnnnnnnnnnnnnnnnnnnnnnnnnnnnnnnnnnnnnnnnnnnnnnnnnnnnnnnnnnnnngtgtgagcccccacatctggctctgggtcttgttattcagtggtgtttggtgggacctgaactgtatttagtctcgtgttgatgcttccctactacggggtgagaacttattcctgctctaac

SEQ ID NO: 333015 - DNA, 511 bp, Homo Sapiens
  misc_feature (167)..(167): n is a, c, g, or t
tgttagctttggagcatgggaccttttggtggtatcttggattttgaatatgcagtgaggcacatgagagctttgactgagaccacttaagagtttaagtgggaaaggttaaaaccataatggcatagaagggaggtgcaaggacaataaaaatgtatttttttctntacttttatctttcattattaagtgtagctttgtcctattccctttttccatgggcctggtaaaatttcctggccagagacaggttgaggtatatgatagaggtatgactcactttgtctttgaaacatattttaaaataacactaagtctttgttttaaaataaagaagaaaaacaagccctagagtcaattctgttactcataccctgttagcttgccgtaacattaaagaaagaaaagatgttggtacatgaaaaaggaataataaaaagtcaaaattagtcttcttcatgaagatcctttcttatttcattttccaaattccaggtaagtttcttaccag

SEQ ID NO: 333016 - DNA, 492 bp, Homo Sapiens
  misc_feature (16)..(16): n is a, c, g, or t
  misc_feature (94)..(94): n is a, c, g, or t
gactgggtggcgcgtntgatggcccaggcattcgagagctgccagctgacagcatgggtcactgcgttctggttgtgcgcccaggcagcactgnagggcccctctgcgttcctgtcatatgcagactggttcaaggtaagtgacctgcaatcggctaccttaatacctgatcttcccagaaggcctgggagtggggaccatgctgtccccacctgattctctgtcatgtgagtgagcaaccttgccgtcagctttgccgagtggccttggcagatcttcctctgcgtgtgccgaggagcctgggttctccctgtcggggcctcggcggatcttcctctgcatgttccgaggagcctgggttctccctgtcggggcctcagctccttcccctggtttccgtctcacttagttgacggagcctcctgctgtcttttataagaaaattagcgaaatcaagcctggacaccatggtgaaacctcatctccaccaaa

SEQ ID NO: 333017 - DNA, 1251 bp, Homo Sapiens
  misc_feature (728)..(728): n is a, c, g, or t
  misc_feature (731)..(731): n is a, c, g, or t
  misc_feature (737)..(737): n is a, c, g, or t
tcttgatctgtacagatatacttctgatattccatccactaaattattttccaccatattcacccaatagttacagaatattgccagaccattcatcttctttttaattcccttcagattctaagtgagaaggaactctcattccctaaagattttttatatcaaggggacagtaatgcaaagcaatccctttctgaggcttttgctcttacaaagatacaacacaccatagtaccaaaggacacacgtccccaccttgttacatcagattttaatatggcaataaatgccttgaaaaatacacattttaaacttaaaagggtattgaaagccattcttctccaggtaattaccaattacccctaagggtggtagctgtaaaaccacttgatcagacaaaagtcttggtcttttcaaaagttaaagttaagtcaggggcagttgattctgctttctttactgttcccatctgagagaagtatggaatttcttaattgggaccatttgtgggaagacattgagaaagctcctttgagacacttttttttctgcttggccaactgctctagaaagaagaaacgtcaaggtgggtggagacagtggtctgggcccaccaccctcccggctgaacagcctgtcatgctatttccaaagagaactcgccaggaggggagatgactgcagaacaccaggagatggatagaatagggtaggctttaggtgcagcngtngttgcncacccaatcctggggcccccagggaggaagagggggcttccgttgagataaagccacatgccttaggaaatatccccccagaaagaacccaaaggtccaagtgttcttgcaagatccaatggagtccttgtagaaagggaaggtggatggtgacgcctgctggggtcaatgtagcggttgtccaagtcagcgttcttgggggccttgcaatgtgtgcaacatcccagagcttcccaggcagtccttgagcagcacggcgcagcaccagtggaacttacaccccacacttggtcatccgggtgacatgggaggtgtcgtagcctctcccacagcacatgacttcacagctgtccatgccccgggaagtcaggttgcacacacggcctgctgtacccagggagcctgcctctcggtccctgatacagtagtctggagaattctcaaaatacacgaggtcatttttcgttggcttcttaaacctctcgttagccacagtgaaacctgtgccatccct

SEQ ID NO: 333018 - DNA, 416 bp, Homo Sapiens
  misc_feature (81)..(81): n is a, c, g, or t
cactggaagttttggcatacagcgaaactgaaagcgtacttatacaaatatcacattttatttttattgtttctaatagcnattccaggttagaaatgtcaaattatttggggaaagctgagggtctgggtagataaagcatgcagcagagagctaggaggctggctatttcccagtcgttatcctaacatgtcttgggcccccaagtcacgccacctccatggtacaatgggaactgtggcagaagtccacgctctctcccccaacacatggggataagagacaagagaggtgaaatgttctggaacatatccgatgttatacaagtataagctgtgagatgatccaaacgcaaatattgaatatttcattttctagaaagtataccaattcattccacccttctcaatactaaa

SEQ ID NO: 333019 - DNA, 376 bp, Homo Sapiens
  misc_feature (238)..(267): n is a, c, g, or t
tttttgtacattttaccattttaaagtgtaccatttaaacactttacagtgtttcctgttagctgcctccagcagggtataactaaacaagcaaacctcccagggccgccacagaggatcaaacgctgcgtgagtctctggaaactgtcaagccctctacaaaatgcgggttgcataaccagagcaagtcaccctcagagtgggtactcgggggtaaattctcttgggaggaaaaggnnnnnnnnnnnnnnnnnnnnnnnnnnnnnnactcacgggcaggccttgggcaggtggaagcgctggaagcacccacaagtgcaaaagggagcacctaccttcagggccactttctggggactaggaacacagccgcacg

SEQ ID NO: 333020 - DNA, 249 bp, Homo Sapiens
tgccatattggccaggctgctctggaactcttgggctcaagtgatctgcccgccttggccttccaaaatgctggggattacagacatgagccactgcctccagcctgtaaaattctttatatacatttctcaaaagggatatagctaagggcatatccactgctttaaaaacttgggttgtgtctggaaattattataaggccaactttcacggtttaacccccatttttataacagccatggcatagg

SEQ ID NO: 333021 - DNA, 469 bp, Homo Sapiens
atttagtcacgaaatttgaaaattatctctgaattagcatagctattcacattattttccccaacaacaaaagaaatgccactgtaatagttgcttagtactttttaacatgaaattgatgttagtgacagattttcaagcatgtaatttgtctcaacatgtgtgtccttttatttgtaaaaactcccaggactgaagaatgaagtttcaaaaagttatttattgtgtctcctggcagggtagaatccacggaaaacaatcaactaacagaactgtgtgatggtctataagatttggaattataccattgttatagaggggaaataaaagacatttctcctgtaccagcttctcctcccccaccacccctagtaagaagtggaaaatgaatataccaaatgaacatacttggatttgattttatgatttgatttttatgatggaacgtcttgtaaatgggagcagattc

SEQ ID NO: 333022 - DNA, 400 bp, Homo Sapiens
  misc_feature (49)..(61): n is a, c, g, or t
  misc_feature (336)..(336): n is a, c, g, or t
  misc_feature (342)..(342): n is a, c, g, or t
  misc_feature (389)..(389): n is a, c, g, or t
gcttttcctctgaggcccacgattacacaaccaaatcagaaaataatannnnnnnnnnnnnaaacctgtttacataagatggaggtgtttacttaactaagaacctcggtatttactcaaatccggttttgggttttatggctaaaacatttctccagattaaccttatcagtttggaatatgtttttattttccattaaatatttcatccaaatcatactgaattttatttatcatgggcttttaatgttctctattcaaggtcaaatttctgtttccctaattacttgggcttgggtgatgggcatttaatattgggttgggggaggctaggangggtcntctggctcctattttggatggatggggccataggaggccaatccatnacacttggggt

SEQ ID NO: 333023 - DNA, 747 bp, Homo Sapiens
cagggggttatgtttttattctacgttattggtaggacagggaacagggccaagacctccacactcccctgggaagaacagtcaggaaaattagatccatttaaagggggcacaggacagaggccaaatcttcctgggaggtggctgaagagacttaggcttaaaccacgggggccaggccgacctggttgtttgccctgtcgaaaacggtaaagtactggcggatgaagacatcacccaggatccaaagctttccaaattcgggggggaggttcatgccctggaagccactgatgcagttcccctcgctctgcaggatgtaggcactgggtggcacggggtactggactccattgatggtgaagacaatgtcgggcaggctgctgatggctgagcagctgaccaccatgtcgccatctgagttctcgctggctccgatgtcgctctggatgttggcaatggggctggttgggccggtcagcagagaggtgccggtgtcaacaatggcctggcagccctcagcgcaggcgatggcctctccgttcatggtgatgctgtccacggtgatctgccagtaaccctcgacggtaacaggcacccagttcagacttccagtgtagtaagaagagtcaatgccaccaaagatcaccacgctgccactctggtcatcggggctgggggtagacagagaagagttcctgagaaaccaggccctggttccagatgttgtcaaagacgggttgtggc

SEQ ID NO: 333024 - DNA, 778 bp, Homo Sapiens
  misc_feature (501)..(501): n is a, c, g, or t
cgtgtatttctacatttatctgcggaagataaaatacaataaaaagtgagaagtgttcaaattccaccactaggaaaagaaacatcttgggtagagatgagttcgccttttgctgctgctgctgaagtggcttcaaatgttaaagctctggtgcccagggcatgccccaaaccagcaaaacctgggctctgcaagtgttttctacagctccccagggtgactagagcctatgaccagtttgagggacaggggcaataaaggggaactctgatttctctcgctctctctctacaaatgtgagcttgaggcctttccaccctttacattacattacagacaagaaacaacatatttctttaaattaaatcatctctcttatatatgcatccatcttttgttgaatacaagaggctccttttaaatatatacattcagtacttctacatttatgtattcatttaaactctgtactgtagtaaaatatgcattgttttaattcanaaggatttcctggcaacaatcaggttgatacttcactgcgtttgctgattaagagcttagtgagccactccagggaccaattctcccttctggatgcggagaagccccatgagctattttaggactataatgagactctactgtgaaagcaaaatctgtctaatcttattcttatcacttacatttgtgtaatctgtctatttaagctacctttgggagtaggggtaaaatgttactgaaagcaactctaagtgcatggaatgaaatcaacgttaat

SEQ ID NO: 333025 - DNA, 461 bp, Homo Sapiens
aggatccatgggtccctccagtctcccattccatggtcgtacacgtcttgagggcatccacatggttcgttcatctcctgcaaaaacacaagcataccctcacccccacattagtaaatctactgaaacagaagcaaaaactgttgtggctgtagctgggaggccactgatattgagaaacaggcccttccaacagaaggcaccaggaaagcaaatcaaggcttaaaagcaatccttaaaccttcaatttgcactgtacaggtgggtccactagatgctgtggctcatgatagatcttcagatgtttggtgaggacccacacaggcacctgatcatcacctggagagacacaaacaaatcctcttcctcatattaaagaatggaattcttgtgcatcagcaaagaccacagacaccaatgcatctgccctttaagtttaaaggaccaaagagtcctattgg

SEQ ID NO: 333026 - DNA, 421 bp, Homo Sapiens
  misc_feature (261)..(261): n is a, c, g, or t
  misc_feature (263)..(263): n is a, c, g, or t
  misc_feature (284)..(284): n is a, c, g, or t
  misc_feature (308)..(308): n is a, c, g, or t
  misc_feature (322)..(322): n is a, c, g, or t
  misc_feature (372)..(372): n is a, c, g, or t
tttattagtaaaaataaaattcatttattgaaaagaaaaagcttaacatacgatccatgtgcaaaccccaaaacaggatctacgaactctggcatgatccacatcgctacacataccatgctggaagtgcacatccacacaggcacgtaacatacacagtactgtctagttatcaacacctacagattgggttgatttttcttcacacaccattgacatgttttacaataggaggttacccaattttattatccactgaangnggcataggcttcccccaggantcacttttggattttaaacccaantaacacaggtggantgacagggggcacccctgggcaccctattatcctggcttaccccttcccnttacttctggggataaccctccctaccagggcaccatttatggtcctct

SEQ ID NO: 333027 - DNA, 509 bp, Homo Sapiens
  misc_feature (68)..(68): n is a, c, g, or t
  misc_feature (233)..(233): n is a, c, g, or t
  misc_feature (465)..(465): n is a, c, g, or t
  misc_feature (496)..(496): n is a, c, g, or t
caaggatgcaccaagatcttctgcctagatggccccacggtacagatcaagtgggtgcaggactctcnaggactaaccctgtgaccaataccctatgccctgagcacccaagataacctgacaaaatagataaaagccaagcagataaagactgagcccagtaatgacttttaggaaggtaagagcacctcattcccacaagtatgtttccttttaaaagctccttcattcangggaaggaattactaaactgtgttgttcaagtcacccgatgacatccaaaacacagaggcaccacttgcaagttcttgtggaagatggcggtcccttggatgatggaaatattgcgtttggacataagaggatcttggttcacgtctgagctctaccacttcctggctgagaggctttggatgattcacttaccctctctgaacgttagacacctcacttgttaaagagaancaataatactccatttctcactttgctcacnatcgtgccgaatt

SEQ ID NO: 333028 - DNA, 390 bp, Homo Sapiens
  misc_feature (345)..(345): n is a, c, g, or t
  misc_feature (378)..(378): n is a, c, g, or t
gagtcaatgaatgccagatgttctcacaaaacatcttcatatctacaggacggcctgtgaaagtactatttattattgctcagagatcatgaggccacaacagatttataagaaggctgtggtcactctcagtgtctcctatagttaggagatatttgtggcaagagtcagggagggctcttctttctacataatttacttccccaggggccaattagctggggtcagggttaagagcagagggtgggttttccccctcagggcaacaggaaagcttgttaaagggcagcgagggccacggtaaggacttcccaactgtcaggaaggaacagggaggggaagggnggaatgttcaaaaaggaataggggagtgtgagncaccaggtaggg

SEQ ID NO: 333029 - DNA, 525 bp, Homo Sapiens
agatatcatgtttttaaaaaacgaagtttgcatctgtgagaacagaacagaataacacattaaatagacacaattaaaccttaattataaaatggtaaacagtgaagtcttttaaagtctggcaactgagaataaacaaaagaactgcagacaaaaaacagaacttgacatcatgaggcatgagctcatttcatacagcttatgtgtacataatcctattcagacagctgggactgccttctatatagaattttgacaaatgctggaattttggcttcagttttaactaaagttacatctgattaatgtgataaaattaattttttaaaacccactttttcctcacaaggtaaaaggattcttcagctctttgaaagaaaatggatctcagctccgttgtgtccaacagacaattgaaaccattgaagaaaacatcggttggatggataagaattttgatcaaatcagagtgtggctgcaaagtgaaaagcttgaacgtatgtaaaaattcctcccttgccaggt

SEQ ID NO: 333030 - DNA, 443 bp, Homo Sapiens
  misc_feature (16)..(16): n is a, c, g, or t
  misc_feature (25)..(25): n is a, c, g, or t
  misc_feature (41)..(41): n is a, c, g, or t
  misc_feature (47)..(47): n is a, c, g, or t
  misc_feature (68)..(68): n is a, c, g, or t
  misc_feature (77)..(77): n is a, c, g, or t
  misc_feature (92)..(92): n is a, c, g, or t
ataccagtggccccancacctaatnaggggcctagttgaanaacatnaaataacaaacaaatgaaatntacaaattncaaaaacaacttgtntttagctttaattgttggtgccagaatgtatggcgggggctggttgtctggcagccgctttagctttgctcgcttggcttgctcgaacggcagtttcctagacgcactttccaactcaggagcagccccccattactgtccttgaaagcatgtggatacagaggtccaatatgcattaaattctggagtgcaaactcatgaagatctttggaagctgaacttgctgaggcaaaagaattttcatccagcaggtaagatatcaaagtgggaactaaaagagcaagtagctggactctgttttgttcttcaccaagagcaaccagtgtttcaagaacttttattccttcttga

SEQ ID NO: 333031 - DNA, 219 bp, Homo Sapiens
  misc_feature (126)..(126): n is a, c, g, or t
  misc_feature (132)..(132): n is a, c, g, or t
cccttgccccttattaaataaataaataaataaatagttgggcaactgtggcctcatatctgtcatcccccagcattttgggtttgcccaatgcaggaggattgcttgagcccccaggagtttganacccancctgggcagaatagcaagactccatctctacaaataataaaatattaacccaggtgtggtggtgtgcaccctggggtcccagccacc

SEQ ID NO: 333032 - DNA, 535 bp, Homo Sapiens
  misc_feature (490)..(490): n is a, c, g, or t
ttgctcatttggttttacttgtttgtaccatgtgaaactgaacaacactgtgcgcaggaggggcccagcggcgcttcccttcttggtttctttctccagctgaagtgcacgttggaaggaatcagaccaggttcccaggcttcctatctttgcctttgatgggtactattgtgctctctgcattgttctgctgaaactgcagtctgctgcccctgtgtgcgttgctgcgctgggtgatggaggaaagaggcgcctgggtggtggcccatcacctcgctgtatgtggggggtggcccctccatcctcccgttactgctgcaggtgcttgcactgatgcccgagttgctgctgggtgggcatggacccccgctatacatagcaatgtctattaaatcactgtcaaatatggttcggttgggtggggccctcacggactctcggttgagttccatctgctgttcagggtcccggagctgcagggtgcagggcncctggtaaggaggtggctcttcaccgtcggacagggagatggtgg

SEQ ID NO: 333033 - DNA, 351 bp, Homo Sapiens
gcttttaagaaattatgcttgtctttctatggcaggaagtagaagtggttcaaaagggaccgggccagtcatcaacaaggaggcactcaggcctgacgtgcctgacagatcgaggctttctctagtactgtacagctgctttaaggcacagcatgtttatcaatatgtataccccccaatgacagctcctgggtaaccctcaggggacagagatcccacaggtgccatgggagcgtggctgagtgtgtaatgctctctcggctctaaggtgactgctccttcagtgctccgctaggcatgggttcacttgggaaacccaaggggaagggttgacacttcccaaggtacact

SEQ ID NO: 333034 - DNA, 421 bp, Homo Sapiens
  misc_feature (16)..(16): n is a, c, g, or t
  misc_feature (30)..(30): n is a, c, g, or t
  misc_feature (36)..(36): n is a, c, g, or t
gtaacccttcaagggnaacaaaagatcccnacaggntcccaagggggcaacgtgggctgaatgtggtaaggctctctggggctcctaaagtgaactgctcccttccaagtgtccgctaagcatggttcaactggggaaaccaagggaaggtgaacaactccccaagtacactaaaccctcttcctacactgatctgcccaggtatcaatgagagccttccaaacaagtcttttcctagagaaaggtggactgagaaaaatcaaaggtgctagaaaggtgctattactgtttctctagagccactatcctttctcaggtttattccttcaagacaaggctgccggtccaggcctgtctgctgtcaagatccattcctggcctttctccctgctcttcttctctgtgtcacaagagaactgat

SEQ ID NO: 333035 - DNA, 599 bp, Homo Sapiens
  misc_feature (290)..(290): n is a, c, g, or t
cgggctatgaagaaattatgcttgtctttctatggcaaggaagtagaagtggttcaaaagggaccgggccagtcatcaacaaaggaggcacttcaggcctgacgtgcctgacagatcgaggctttctctagtactgtacagctgctttaaggcacagccttgtttatcaatatgtataccccccaatgacagctcctggtaaccctcagggacagagatcccaccaggtgccatgggcagcgtggctgagtgtgtaatgctctctcggctctaagtgactgctccttcangtgctccgctagcatggtttcactgggaaaccaagggaaggtgacaactcccaagtgacactaaaccctcttctacactgatctgccaggtatcaatgagagccttccaaacaagtcttttcctagagaaaggtggactgagaaaaatcaaaggtgctagaatggtgctattactgtttctctagagccactatcctttctcaggtttattccttcaagacaaggctgccggtccaggcctgtctgctgtcaagatccattcctggcctttctccctgctcttcttctctgtgtcacaagagaactgat

SEQ ID NO: 333036 - DNA, 248 bp, Homo Sapiens
aaacccacacaaacaatactgtgcattttctatgaatacacatatgtaaatgtacaagtatttaagtaaatccttaaagggtctggaggaatcccctctggccagacggaggggactagggtgaagagtggtcagccaaaggggattatagccttatgtataatgttctgatttttacaaaggaaaatttttgttttcattttgatcttaagtcacataaagggggcctgggtggagtggcttacact

SEQ ID NO: 333037 - DNA, 462 bp, Homo Sapiens
  misc_feature (415)..(415): n is a, c, g, or t
tcccagctccaccaggcaaccccgttgttctgcagctgataaccggattaggcagcagaatggggcagatgagtaccctgaggggccctgcctgggaacaggggctccctggcctggcgtgagggctgccactgtcaacaccctaagccgctgcctcctgcagggcatttgcatgtgtgtgcgccctactgtacgcgcccaagagccagtgggaaatgccggcggtggcagttcacacggggcactgctgcacaaagccccaaggccaagcggcagggtggccctggctggcgaatgtcgcgcacccagtctctcgcagcagcgcctggcgcgacgactgctggaagccgggccaaacgcagtctttgcatgagtgtggccctggctgtgggagccgaagcacagccaccccgcngcgccggagcgcagggagagtcgcctgcatcgtccaaccctcctctt

SEQ ID NO: 333038 - DNA, 434 bp, Homo Sapiens
tctttctgttcctcacactcaataattttaattgtcctaaccttcaatttcactgattcccttcttctgcctgccaaatctgcctctgaaaccctctattgaatttttcattttagttactgtacttttcagctccagaattccttttcattttcttttcaggttttctatctctttactgttatttccattttgttaatacattttgtcttgatgttccccacatactcctttagggtctttcaatgtctttaacacagttgttttaagtctttgtctaggtgaatttatcatgaggcctttttcagaaacagtttctgttgatttatttttttgagtgggccatactttcttgtttctttatataccttgtgattcttgttgaaaatgggaccgtgaacttaatgatgtggtactctgggaatcaaaattct

SEQ ID NO: 333039 - DNA, 437 bp, Homo Sapiens
attcggcacaggggagttccttcagatctccagtaaacttgtttgtggaggtctggggagtttcttcagacccccagtaaaacttgtttaatcctaaacgagtcctgttaagaatccttcgttatcatgtcatgcttcaaggcccaggagaggcctgggcaaaaactcctgatgggcttttgttccattccagcctttgtatgaggacactggctctttcagcttttaatagtaacttcaccactcggtcagtgccgaaacagatgtcatgggaggcctgcgttagtgaggacctgggcctgccacaacccgactccaagacgttaagaggggagcttgtgcttaggatacttattatttggatttttaaaaaatatttttaggtacataacggaaagttcttggttttgcgccctctctatttttgttcttggggg

SEQ ID NO: 333040 - DNA, 476 bp, Homo Sapiens
  misc_feature (127)..(127): n is a, c, g, or t
  misc_feature (390)..(390): n is a, c, g, or t
acaacatctgtttgttatgtttggccaggtcatcactcccccacaaaattaaggacagtatccatctctgaggcccacctacagctgggggccaaaacacaagcgtgttacatttgtaaaagtcttnaatactcctacacattctttttccattatcatcgcaggaaatgggccacacagaacacaacagtctgcaagacataatgagcccaaacttcagcaaaggattttgaaagggagaagaggcagctgcatggggaggggtagacaaaggtgagggccaagctacacagtgggtggcaggtcatttctgggcttgggggttgggggtggccaaaaggaatggggaagggaagctgaaaagcagggaacatgccacaggaggccacnagagatgcaagcgaagacttccgctgccccagatcaagtggcagggtttaaggtcgccttcccaaaatgggaatgaagaggccagc

SEQ ID NO: 333041 - DNA, 424 bp, Homo Sapiens
  misc_feature (36)..(36): n is a, c, g, or t
  misc_feature (248)..(248): n is a, c, g, or t
  misc_feature (276)..(276): n is a, c, g, or t
  misc_feature (364)..(364): n is a, c, g, or t
  misc_feature (406)..(406): n is a, c, g, or t
ttcatttctctgaggaagccgagaaactttaattanggtgacggggttccgagcacttaagcagatggggtgcggtgaaggcccagggaggaggagggcagggaggtgcacgtcctctgtgccccacacactttcaaccactgcaacaaacaagcacccaagagaggctgtgcgggcagagcctggcacccacaggcctttgacagcacagtgaggggccttcgcacgtggccttcgggacgtttcanttcgacggcacacccggtgcattcacantgggcaccttaaagacagggccgtgcagtttaaaagggagcacgttttgggccaagggagagcatttcagcttgttccccgctttttntaaaagggcaggggccccaggcacagggccaggccccatttnacgttgcccttttttaaa

SEQ ID NO: 333042 - DNA, 398 bp, Homo Sapiens
  misc_feature (21)..(21): n is a, c, g, or t
  misc_feature (41)..(41): n is a, c, g, or t
  misc_feature (49)..(49): n is a, c, g, or t
  misc_feature (188)..(188): n is a, c, g, or t
tgaatggtaactaactttccnaatcccaacccaaccgccanaatacganttccccttttctcccccttcccttgccctgaactgggcctttctgatcatctgtcccccgtccccttgaaactcttgaatctggaactgagggaaagaatggtggcagaggcgagctggggagcagggaggaacccagntgtcgcaggagaaacagaatattgcgagccagccgtgtggaatggaaaggggaagccggtcttcctgccccacactcctgcctttcttccttaagggctccttggacagagactgcaggtttctcagaagcactgtccaggatctcaatattctagaagggtctgggacaaactaactaactattgagcccctccagtgcttttgttgtt

SEQ ID NO: 333043 - DNA, 276 bp, Homo Sapiens
  misc_feature (229)..(229): n is a, c, g, or t
  misc_feature (244)..(244): n is a, c, g, or t
aacagaaggggcagggtgtggccacaagcccagattcctgggtcaagtcaggccccagaagtgtagcatttcagggtgtatggggaaaggtgacagagcccaccaccagccctttaacttgctgggctgaccctaccccttgggccagtgtattggtttgatggaacagagctcccatttattccctttggttcagttgaacaaccttttacaacaggattgtggttgnttaggagcaggttanttacccttgagggggattggaggaaggaaggg

SEQ ID NO: 333044 - DNA, 350 bp, Homo Sapiens
tatcccaaccctataaaatgggcataaagtataatgcaaatattgatttaaaaaaaattcctatatgccccataaagtagaccgtaaaattaaatattcctatcctaaagtaaacacctagttatcctaatcagcccatgatttgttttccctcccataaaatttagaatttggcagaagcttcttcacttcctaggttataaataaatacataaaaggtgggagcttttagtgtccattggcagatgaatggataagcaaagtatgtacatacaaacaaccacaaacacacacacaataggaatatattcagtcatacaaaggaaggaacttctggcacatgatacaac

SEQ ID NO: 333045 - DNA, 355 bp, Homo Sapiens
  misc_feature (321)..(321): n is a, c, g, or t
gggcaaaatgaaaacgggaagccctttgttccaaaaattattataaaagttgaaagacagcaacagcatgggcttgtgtcactgcacacgttcccatgcctccgatggctatgacggctagccttctcctgaggccagcaaaaaggtgcccaagcagaactgattaaggggacgcaggaatttatagagcctcaggtgtctgggtgagacagaagtgcgcccctcacctccaatccctggaaagaatccgaggatagttgggtcttccctggcatgtgagacaagattcaagcccatttcgtttgaatttccaaaaataangatgaccccagctgacgtgggtcatgagcacttg

SEQ ID NO: 333046 - DNA, 431 bp, Homo Sapiens
  misc_feature (98)..(98): n is a, c, g, or t
  misc_feature (103)..(103): n is a, c, g, or t
gttctaacaatctaacactttcatagaatcatttggatctcgtatagagtgtaacttattggggataaacacttcaacttttggcagaaaatactttngattntccccaaggtcatttgtattcagagtaaatcagtggtccacccccataaaactgtaagacaagcctcctgtatgaagccagaagcacaagtgccttcagagggcagttgattccagtccagttgcctccctagcttgtgtgtggcctgcctccaccatagcagggactagggagggaggcagggaacgttttttcttttctacatctttcacaggttcggctggggggcagcttgataggcctaaggcattaaccttactattttaaggatactcttgatccgcacaacttgcagagacaggggttccctcacttgctaggtcaactt

SEQ ID NO: 333047 - DNA, 318 bp, Homo Sapiens
tttgccagacttcctagaaaaacctgcagtgggctcccttctttgtccgttcacgtaaattattatgttgtagactccgatatgcacaaagaaaatcaagagcagctttcccctcctcctggtcgatgccagcctgtctcattcacactgttggcagccaccctggtggagctgtaatacatcattttttaagagacaaacactaggtgtttacttgccaggtctgttactacaaactccatttcacagcttacaatagttaatttgtagtgcttttacaaaggaagttagatgccaacccagttctagtagcaaaca

SEQ ID NO: 333048 - DNA, 385 bp, Homo Sapiens
cggtgggtgggaattggaaaagtagtacaggtcacctatgggtgggagggtcccctcaaaaaacctacaaatagaacgggcccatatgatcccagcagtccccacgactgggcatttatcccaaaggaaagggaatcagtgcatcagagagacaccctgcaccccccatggtccctggcagcactgttcacaatagcccaagatatggaatcaacctcagtgtccaacaacagatgaatggctaaagaatgaaatactactcagccataaaacagaatgaaatcttgtcatttgcagcaacatgaatggaactggaagacgttaagtgaaataagccaggaacagaaagttaaacatggcatgttctcactcatatgggaaagct

SEQ ID NO: 333049 - DNA, 412 bp, Homo Sapiens
cccagctcaggcaaggaaggggagaaaagggaactcgtatatgcggtgggtgggaatggaaagtagtacagtcactatgggtggaggttcctcaaaaaactacaaatagaacggccatatgatccagcagtcccacgactgggcatttatccaaaggaaagggaatcagtgcatcagagagacacctgcacccccatggtcctggcagcactgttcacaatagccaagatatggaatcaacctcagtgtccaacaacagatgaatggctaaagaatgaaatactactcagccataaaacagaatgaaatcttgtcatttgcagcaacatgaatggaactggaagacgttaagtgaaataagccaggaacagaaagttaaacatggcatgttctcactcatatgggaaagcta

SEQ ID NO: 333050 - DNA, 424 bp, Homo Sapiens
ttttagctttcccatatgagtgagaacatgccatgtttaactttctgttcctggcttatttcacttaacgtcttccagttccattcatgttgctgcaaatgacaagatttcattctgttttatggctgagtagtatttcattgtgtagatgtaccaacatccacaatgaaatactatttcattctttagccattcatctgttgttggacactgaggttgattccatatcttggctattgtgaacagtgctgccaggaccatgggggtgcaggtgtctctctgatgcactgattccctttcctttggataaatgcccagtcgtgggactgctggatcatatggccattctatttgtagttttttgaggaacctccaccatagtgactgtactactttccattcccacccaccgcatatacgagtt

SEQ ID NO: 333051 - DNA, 497 bp, Homo Sapiens
  misc_feature (341)..(341): n is a, c, g, or t
  misc_feature (432)..(432): n is a, c, g, or t
  misc_feature (453)..(453): n is a, c, g, or t
  misc_feature (464)..(464): n is a, c, g, or t
  misc_feature (479)..(479): n is a, c, g, or t
ttgtggcctctttggcttcagcggtgtggccggttctgggcaatgaggagagggcggggctggaggaggggccggagaacagctgtcccttcttcccacccttgttaccagggctgctcagagggacctgggtagtttacctgcggccacaggaggctggagctggtagccggtgagctcacaccagccgacggggtagatgtctggggactcgcagtccacccactggtcgtacttcgctgtcccagccgtcaaagtggatgcttgaggagccgatgcaccacttcgttttcaccgtggccacacagatgagccggggttccattcaggtccacggcctncagcttcatgcccacctttgaagccatggttttgggcaatccatgtttaaagagttttcgatgggagcggcttttcgatttggtctttttncaagtagtttttcccagtttnaaagtctgtgnctcataacttggganggagcagaaagttcaaga

SEQ ID NO: 333052 - DNA, 372 bp, Homo Sapiens
  misc_feature (70)..(70): n is a, c, g, or t
  misc_feature (93)..(93): n is a, c, g, or t
ccttttggaacaagtgccatgtggggcccaaatcctggatgaaaatataactgtggccccaattaagaanggaaatgtgcaaatccccactantgtcctgggtgccagtgttttaatagcctccagtccagggacaaagtaagttaaataggcattaacttaacatccttcctatagctcctactaaatttcatttgctttttctattcgttaatgagagaagcgtgttaaaatctccaaatatgcctatttcgccttttagttctatcagttttcctttatattctctggggctatgttacctgatgcatatgaatttatgatgtgctctcagtgcctctaaagtcttactgggcagcatgaagtcttcca

SEQ ID NO: 333053 - DNA, 392 bp, Homo Sapiens
  misc_feature (41)..(41): n is a, c, g, or t
  misc_feature (51)..(51): n is a, c, g, or t
  misc_feature (83)..(83): n is a, c, g, or t
  misc_feature (110)..(110): n is a, c, g, or t
cccctaaccgaagtccccccaccctgtaccccccggtcccncctgtgcccnaagccctaagccctactgaaccacaagaacanggcccctagccgatgtgaaatttccanttagtaccctttcaggggaaaactgatgggtgaaacagttgggttccactgtccttgtagcctaatgttgtggtaggtaatatgcccttggtgcctagggtagcatgcagatggggccctgtgccaggccagacagggaaggggaaaagggatgagagaatccaagggttttatggaggtagtaacatctgaactgaacctttacgtttgagtaggtgttagctagagaaagcaggtggcagctggaaaggagggaatgtggagaacattccaggtagtaag

SEQ ID NO: 333054 - DNA, 474 bp, Homo Sapiens
  misc_feature (435)..(435): n is a, c, g, or t
tggaaacattttccccattgtcttggggattaacgtttggctcctccttccttatgcaaatttctgcagcccacttgaatttctcctcagaaaataggattttcatttctattacattgtcaggctgcaaatttcatgaacttttatgctctgcttcccttatgaaactgaatgcctttaacagcaccctaatcacctcttgaatgctttgctgcttagaaatttcctctcctaggataccctaaatcatctctctcaagttcaaagttccacaaattgttaggggtaggggggcaaaatgccgccagtctctttgctaaaacataacaagagtcatctttattccagttcccaacaagtacgtcatcctcagccggggaccttactgtccatatcgctatcaggcttttgggtgaaagccatttcaacaaggantctatggaaggttccaaacttttccccacattttcctac

SEQ ID NO: 333055 - DNA, 432 bp, Homo Sapiens
  misc_feature (17)..(17): n is a, c, g, or t
  misc_feature (22)..(22): n is a, c, g, or t
  misc_feature (40)..(40): n is a, c, g, or t
  misc_feature (65)..(65): n is a, c, g, or t
  misc_feature (90)..(90): n is a, c, g, or t
tgccgggaatgtgggtngccanagtagggccatcaaacancatggcggcaaacagaaagcagggncatttcctttggggacccactatgnacagagaaaaggtactggttgcttccaagattcaccacatgagtagtttttaatgtattgccatcaaatctgcataaactggagctctcttcaaagaaaatatcacattcttctaactcttgagcattgcaaggtggtttttctttatctggatttggattcagttcttcagaggtcaaatgcatcaaacgttcagctattgcagcacactgggctgaatctcttataagttccccttgtttatctccaattactagctctggccaggtcagtccttcattcttcttaatcaaggaaatctccaagctattactctctttaattatccatgtactgctttca

SEQ ID NO: 333056 - DNA, 346 bp, Homo Sapiens
aaaaaaggccatgtctgtccgaaaacttcatgctggtgggtggctggcggcggaagcaagtgatccgtctggtcttggggtagaggctcatcatagatggtggagatgagccccaagccatttctacggggcctcttcagttgcccaaatggctgtagcttctctccatggtaccccaatccacgcttgcatctggggtgttggccatcactatccagggcctcaggcacccctgagcacctgcagccacagccctgccctcagcccagccctgccgctccatcaccttccgcccaatgcccttggtgtggcgctcaaaggtgcccccctggcgttcgatcacaga

SEQ ID NO: 333057 - DNA, 846 bp, Homo Sapiens
  misc_feature (755)..(767): n is a, c, g, or t
gagagagagaaagacagcaattgtgtaagcaaaccggagaaaaactatgaacataatacatttagcattcactctgaattccacttggattttctttcgttctcatgttggtgcagatagataacataattgttatcctaaccaggaattcagaattcgcatctcattctgatttccttaaacatttttagaatttcatcagtcttttttagcaaagccagtcatgggaggagttgagtattgaccttttttcttctttttctttcctggttagcctgcattgaacctttggccttacccccaagtgtatgggtggtatatgtttttaaattgatatatcaatgttgaatttttattgtcacagtttctgttcatgctcccttcaaacctttcatttatttggtttctgaaccttggatatctcataaaaatgtcaccattgtggttgaacattaagcaccttcccattttgctctgggccgttgaaataaatttggaccaggtgctctgctcataatggagccccttgaagtgctctgataatgagccgggagcggaagctgtcagccttcagctggcttgaagaatgcaattagagcagttttaatactgcagagggaccccatcccaatcaaggccatttgagttaaaccaagtctagaatcctaaacatgcacttttaagcttgtcagctttgtctctgcactgagaatggggagaaggcattcttgtacaatggattcattttatgtccnnnnnnnnnnnnntgctctgaatacctgtagaagttctctatctcttgtctctcccattatgatgtcattatgaccatatttatgatctgat

SEQ ID NO: 333058 - DNA, 449 bp, Homo Sapiens
  misc_feature (11)..(11): n is a, c, g, or t
cctgctgcttngagttttggtccgctccctgacttgcagctgaaagaagccttatcttgcataagcaaactctcacaaggacacaccctttcatatgaaatgccttaaatagtttccaaggtctgaaaacttaaatttttctaaatgcttacagttttttggcattgcaatgaccatgaaaactacttgaataaatgccatctgtggaagttaatgctcagcctaatttgtggtaaaactgggataaaaactcatatccattgacttccaactcaatgccttttctgcccaatctcattgtcttgaacagaattaatgtataaatgggaatcttgcctgtgctaaaagatgtttgaagaagactgttcccatgaagcaatattttaagggaacgattttgtttggctcttgaaccaaaggattggcaagttcaatcttggtcaagttgt

SEQ ID NO: 333059 - DNA, 338 bp, Homo Sapiens
gtatacttttatttacctggggaaggagcttttagggttggggggtggtttgctatctctttagctagcagaatagtgtgcctttgatcctcacacatcctgtattatggacacagtagccatgcttcacggggaggtcagagctggctaccagcagtcttgccctttactgagcttagtgtcatctttggatgctgtcatatgctgctttgagtgaaccagagaaacagccatttgcagcatgaggaaagccccaaaagctctggggattttacctccactttagttaataatggaattattttttaggcattaggaatgtgtttatgtccatttgg

SEQ ID NO: 333060 - DNA, 420 bp, Homo Sapiens
  misc_feature (382)..(382): n is a, c, g, or t
ggcacgagggaaagcgaggcaaattattatctcagcccatttctcagcatggacagttggcaaattttttgcaagctcatgaacatctcagctggttacatgaaattaatagccaagaattagaaaaggctcatgcaacacttctgggtttggcaaatatgggaaactcgttactttgcaaagaaggaaaacccttcttgggcttgagtaaattgggctgcattagcttcagacttttcagaggatatgtcttacaagggaaaaatttgaaggaaatgggcttgaggcagggagcgcttttcttacttgcatcagggagaccccttaccctggaacagctgctgggccggagggaaaccagcttaaatcttccggttgccgnttggccagttttttgacttggcacccacaactttcttt

SEQ ID NO: 333061 - DNA, 380 bp, Homo Sapiens
  misc_feature (79)..(79): n is a, c, g, or t
  misc_feature (102)..(102): n is a, c, g, or t
  misc_feature (112)..(112): n is a, c, g, or t
cccccccaggctgggtcctaaaaaaacccccccgggcctcaagtgaatgaaaccccccgggccttaaagtgaccccacnccgccctctgtccttcccaaaantggtgggganttataaataggtggaagcccatgaacatcccagcccagctgtggctttcctgagctttaagggagctctgcctatagaaagaatgaataggtgaaggcccagtccttttcacactttacaagtcaaagtgatttccctgggataactatagctcatctgcattgctgcctgccttgcttatctgggtgctgagtgtgggagtggtgtgtccatcatatgttcttcagatgctacagtggctactgactatgcttcagtaggtaaatta

SEQ ID NO: 333062 - DNA, 395 bp, Homo Sapiens
  misc_feature (24)..(24): n is a, c, g, or t
  misc_feature (38)..(38): n is a, c, g, or t
  misc_feature (69)..(69): n is a, c, g, or t
aaaaaaatttttttcaaacaatgngggaacctgcaaancctcccaaagtaaactttaatctcagggtanttccaaagttctttttggttggggagaaaaagctgaagtgtcggggagagaaagctgaaggcagggcttgcatgcctgctagactgctggctccttacttctagcactcccattatctcaactagccatatgtttcaaagaaaatgctaaaccctcacagctgtagctcattcgcttgatacaccgcttccttttaacccccacatcctcaccacctgtttctttgtttgatcaccaataaatagcgtgggctcccagagctccaggccttcgcagcctccatactagcgttgccccctggtcccactttgtctcttgtcttttct

SEQ ID NO: 333063 - DNA, 347 bp, Homo Sapiens
  misc_feature (213)..(213): n is a, c, g, or t
  misc_feature (231)..(231): n is a, c, g, or t
  misc_feature (286)..(286): n is a, c, g, or t
  misc_feature (303)..(303): n is a, c, g, or t
ttttggcaatttttttaaaatttaataaaaatttctaccctcctgtttccaagcaagatttgaactgatatttagtattaaacacaggtaaaacaacaacattaaaaatcaaagacaagacaaaaccaagtaaaaggagtagatatttccaagcaattgtaacaggttaattgtcacagttgggccatgaatttgcctttcacaggcgtccgntttgctcaccagatgggnactactgaaactctgtgcctctttaacaggggtgtttctaggacctgtctcaccngcgggggcccggggggnttaattatactggttggtatttctcaggaagcgggtgaggtagg

SEQ ID NO: 333064 - DNA, 278 bp, Homo Sapiens
gccccagcccccacccccagccagcaggcaaaccctgaggtgctgggatgaaaaactgccccaggagaggtttgctgtcagctgggtcatgcagaccttctcacatagtggctgctaggagctgaattatgccccctcctaattgttgaagtcctaattcccaggacagaatgtggctgtggttagagacaggctctctaaagagataattaagttaaaataaggtcattaggatggccctaatccagcatgactggtccgtataggaagagatgata

SEQ ID NO: 333065 - DNA, 476 bp, Homo Sapiens
ccagtggagccaactgccaatatcaaccatgcatttggcccaggaactgctaatgaacgtacagtgcggtggtggttcaccgaagctttgcaaaggagacgagggacttgaagatgaggagccatagtggcctgacccattggaagttgacagcgacctcctcaagaacaataatcaaagctgattcctcttacaacctacacgagaagttgctgaagaattcaacattgaccattcctatggtctttcctacatttgaagcaaatcggaaaggtgaaaaaactcaataagtaggtgcctcatgagccaagcaaaaataaattgttgtttggaagcatcttctcttattctgtgcaacaacaatgaaccatttctcagtcggattgtgacgtgggacgaaaattggattttatatgacaaccactgacaaccagctcagctgttggactgagaagctccaaagccaaacttgcacc

SEQ ID NO: 333066 - DNA, 425 bp, Homo Sapiens
  misc_feature (22)..(22): n is a, c, g, or t
aggggaccccactcagtatcancaggtcaggaggcagccttcctccctatgtctgtttatggagtgcctgctgtttatcaggctgtatcctagtgagataaataagatgtgatctaaatttattccttagagaagaataaagaaaaacgggtattatacccagatatcctatttagggcacagttggaataaaaagcaagtggtcaagaaaggcttcgtggaagctatcgctcctgctgagtcttgaaagcatccataggtgtgtgtgccaggttgacgagaagagcagtgtgaacagaggctgtgaaagagcctgactaagctgagatgtgaggccaggaaggcccattggagaccggctattaagacttgatcctaaaggcattgaggaaaccttggtggctgtaattgaaaggtttaggaga

SEQ ID NO: 333067 - DNA, 225 bp, Homo Sapiens
cttatacataggggtagaaaatgcctcaatgttgacccgggaaagaaatccctgtaaatatgatgtcaaaacattgtcattggtagtcatctatcatctgtaggttgctctgactttgaagaatccctgcattgggaattgaaaatctgtgaaaactaatttcccctctatgtcactgtatctcttctaaatatgtaagtcccagccgggcacaggggctcacgt

SEQ ID NO: 333068 - DNA, 396 bp, Homo Sapiens
  misc_feature (201)..(260): n is a, c, g, or t
  misc_feature (272)..(272): n is a, c, g, or t
catttttttagagacaaagtctggctgttacccaatctggagggcggtggtgcaatcatggttaattgaaaccttgaactcctgccaagagatcctcccaccgctgcctccccagtagctaggactacaggtgcacacaactacacctggctaatttttgtttggggtgtacaaataggggtcttgctctgttgaccaggnnnnnnnnnnnnnnnnnnnnnnnnnnnnnnnnnnnnnnnnnnnnnnnnnnnnnnnnnnnngatttacaggtnaggagcaatagtgcccagctggcatctttgtttttaaaaacagttcagttgggagacttcccagcttcatgcatacccctttaaaagcataggaagtgacccatctaaggaagggtcattctct

SEQ ID NO: 333069 - DNA, 413 bp, Homo Sapiens
  misc_feature (48)..(48): n is a, c, g, or t
  misc_feature (340)..(340): n is a, c, g, or t
  misc_feature (349)..(349): n is a, c, g, or t
  misc_feature (391)..(391): n is a, c, g, or t
gcaaaatgtatgtccatcctcaaaatcctaaacaggttaaaaaatggntaaagcaaataccaaaacaatgtgttacctagccagcatcccagtcgttagaaatcctcctcacccctgccttcctcggtcctggatctgtgcaagcctccagtctcttcctgagcctgccagcctacctcccatcccctcatcgtagtgcaggcccaaaccaaattttataaaattaacaatttaaggttaaataagcttaaataaggggtgttaaatacaaggcacttcatcaaagcttctgtacaaagataaaccaaatctgggccattggtacaagtggggttcccgntgggcctcncaggcacacagggggaaggttcttggtgaggttaggccgggnttcacttctccctcggggcccg

SEQ ID NO: 333070 - DNA, 417 bp, Homo Sapiens
ctggatagtttgattctaaaacacagcaatgatagtgtgtctacagtgggatgactccggccccatcctgtccctcactctcagcactaggccaccgtgtgctgggcacctgcacgactgttcactcacctgcctggagatgtgcttgttgtgttctcaaggccttggtccccactggaccatgaactccccaagggcatgactctttcagggattaggcagaaaacagaggaggctttgcttctagatcaaaccctgacagtcctgtctgacagagaggctggggagtgctggccgccctgcttctttacagggttaactctgttgggcagcgctgcaggtgtaggggcgtctgctcatctcttatctctgacattttcaatacacggggcatacctgtgggcactcaataggata

SEQ ID NO: 333071 - DNA, 324 bp, Homo Sapiens
  misc_feature (156)..(156): n is a, c, g, or t
aataagttacaaataggataacatacagcttaaattactggaatttaaactagtcctgagatttgataattatgaattactgtacttaagtaaataattacacactgcatacaaaaggagtttggagaattacctttcatttcacttgctgaagantaattttgaaacttgatttctaaggatttcattataactaagcttgctgctctaaggatcacatgatctgggactaggtgataaggttcacattcagggttgaacttcatcacctcccaaaaaagggaatgtttttcataaacaggccagtggtctttccaacaaccc

SEQ ID NO: 333072 - DNA, 486 bp, Homo Sapiens
  misc_feature (89)..(144): n is a, c, g, or t
  misc_feature (357)..(357): n is a, c, g, or t
  misc_feature (413)..(413): n is a, c, g, or t
aattattaatgagttattttactttttttcatattaggcctttgaaattcagtgtgtattaaacacatctcaattcaaaccatcaccannnnnnnnnnnnnnnnnnnnnnnnnnnnnnnnnnnnnnnnnnnnnnnnnnnnnnnnatctatactcattccttcaaatacattactctgttaatctcaaagtgtggccaactcccatttacttagaggctgattatctagttttgtagttcctcaggcctctaatttattttttgctttctgctttattgatcttttgcatgtcccccaaagccagaatctgctcatgggagggaaggaaggctaaggaactgtccttgagggaacttncatcagtaactctgggtaaagcatcctgtgggaggggaggagggaggagcccagtncatttggcttaggatgggtgtttgtgggggatcacctggcaggattttaaaggcctacttctggcccacagga

SEQ ID NO: 333073 - DNA, 519 bp, Homo Sapiens
  misc_feature (14)..(14): n is a, c, g, or t
  misc_feature (24)..(24): n is a, c, g, or t
  misc_feature (99)..(99): n is a, c, g, or t
  misc_feature (153)..(153): n is a, c, g, or t
  misc_feature (214)..(214): n is a, c, g, or t
ccctcctaacctgntgatactgantggggtcccctcctcgcagcttcagatccaggctgtcaatactcaagtccagctggggcttagactggggctcanggctctttaaaagcatcaagttgccacctggaatttgcccaggtctcggaagcntgcttggtcttgcatgggcaaccttgagaaggagagggccagggggagagtgaagaaaagnctaaggcagcagtggcctaggaggagagggcaacaggggtcccagtggaaataggagtgaaggtgagtctgccagccaaattcttacctgtgcctccgaggtgcgcacctgggcagtaaggtggcggcaggtctgttcagcctccttggtcttcagcccagcctgctgtagctcatggcccagccgttcagcttcagctcgcagctctttgttttccttcatgcagctgctcgcaggtccgcgagtgctcctgcagctcttggttctgctgcttcttggcatcataatgtgttttggctttctct

SEQ ID NO: 333074 - DNA, 425 bp, Homo Sapiens
  misc_feature (80)..(80): n is a, c, g, or t
  misc_feature (365)..(365): n is a, c, g, or t
  misc_feature (379)..(379): n is a, c, g, or t
  misc_feature (412)..(412): n is a, c, g, or t
agtttgaaagcaattctgcattttcttaacattgtaactggtgttgagttgaaggcaggcccctgggagccctttgtggnaattcccttcactctggaggctgcctcgagcctggacaggcacttacacttggtcagtgattgcacagaaccggttgcaacagattctgtgcacctccctgtggctgcgtagatgttagcaggcacttggtcactatttgctgagtgagtctgttaccttaggcgtgtatttaccgtggacctgcctgggggatcattgctcattcactcattttgaacaacgccaaatattacaatgtccaggggtacgctcttattagtgttgaaaacacaaaaggtaaatgnattagttccccttnttcaaagggattttcttaagggtagttaggccntctttttgatggc

SEQ ID NO: 333075 - DNA, 640 bp, Homo Sapiens
  misc_feature (427)..(487): n is a, c, g, or t
tcagtcattctggtaggtgtgaagtgataatctcattttggttttaatttgcatttccctgatgactaatgaagttatgcatgctattcctgccattctttactatgtaacaaatcaacctccaacttagaagcttaaacaatgagcagtccatttactatctcacacagtttcaggagtctggattttaggaggttggctgggcagaaatggcttggggtctctcctgcacatgcagccagatggtggctgggagcagctgcaggtgtctatctctttctcttcatgtagccagggcccaaccctgtggtccctctgtttgggcttccttacagtacagtgccctcagaacagtcatacttgcttacatggtggctaaaggcttaaagagagagtattccagcaaataaagcacaggctttgtcannnnnnnnnnnnnnnnnnnnnnnnnnnnnnnnnnnnnnnnnnnnnnnnnnnnnnnnnnnnntgaatagccacaaaagtcccaccagtttcaagggaaggaagaataggctctacctctaattgtaaggatggtcaaagtgacactgtaagaggaacatgtaggatggaagatattgttgccactatctgtggaaaatacaatctgtcacacaga

SEQ ID NO: 333076 - DNA, 431 bp, Homo Sapiens
  misc_feature (62)..(62): n is a, c, g, or t
atagtcatctttattcccgaaacctttgttttccaaatatctttgtgttttggaaatcaganttttcttatcttgggaacctgctgtattttatcttagttttatattctatgagcttctctcttggtgagctccaggttgagctgctctgctggcttaggcttcatctggtagaattaaaagttacattgggtcacacgtcccaggtgttgcatcacaggccacagaattacctatataaaactgagtgcaaatgtagacactcttccactaaattgtttttagcaattaaaagtgtacctttggttttgcagattttacctcccaccctgtgacccctcagtgtggtttatgacattagcatttccaagagtgtgttcattataaagaattgtttgcatcagaaagtagagagggaagctgaggtgcag

SEQ ID NO: 333077 - DNA, 426 bp, Homo Sapiens
ctaatgtggccaccatagaaagctacctatgtgcctgcgttagattcctcttagacagggctggcttagaccctctcctgggccttcttccctctgacctcccattcaggcctggccctttggctttgcttcaaggttttgtccgctctttggagctgccatgtgctgggtcagaccagaaccgggggcagaggctaaaggtgagacccactccctcctgtcccagagcaaggggctgggggcgggggttgccctggcagccagggagttctggaagccggtgatatacctgggacagtggtggtcagggtgagcttaggctggggttatggtaatggttcaggacaacacccttctttgagatattgttaactggtgaggaagaggaggagctcagggctacaagacacagactaagtttctgta

SEQ ID NO: 333078 - DNA, 411 bp, Homo Sapiens
  misc_feature (334)..(334): n is a, c, g, or t
  misc_feature (378)..(378): n is a, c, g, or t
ggagagagctatgagcttcaataccctggtcctaactgcatacccatgaagaagtcctgggccttttattcttctgtcttcttcatcaccaatgtccacaaagattattctcctgacatttccagaacttgtcagcagctttggtgggagcactttcaaatactgcaacattccccaaatctgtacaatcttcagtgacacctggggttaccccttcttgcccccctgacctgcagatatcttttgggctgggactccgggggctcatggaagggcaaagctggagttaggccaggcctttgcaggccttcaatttcccaggaggaaggacctnttgttttaattcggagggtttttcagggggggtttcaaatgttnaaccacacattaacattttcaggcagggtgggg

SEQ ID NO: 333079 - DNA, 304 bp, Homo Sapiens
  misc_feature (27)..(27): n is a, c, g, or t
  misc_feature (244)..(257): n is a, c, g, or t
actcccaggggcagggaccatttcttnattttctgaaagcactttaatgattccccttcccccaaactcccagggaatggaggggggaccccgccagccaaaacattccccccattcccgacccccatctcctcttctagcccatgcccttccccggcggagggagggagcagggagccctcactctccacgccccttgcttgcatctgtatatagtgtgagcagcaagtaacccttctccctnnnnnnnnnnnnnncctcaatgtagtggccttggatatcctgtttgttaataaagacaatt

SEQ ID NO: 333080 - DNA, 500 bp, Homo Sapiens
ccatgtgaggtaacattcacaagtgccaaggattaggatatggaaaacttttggaggccattattcagtttactatacatgaatacttttctatactcttgctaatttggattttagttctgctattggatccttaaaacctttccttatggaatccatctccttgcttttccctttctgttgcttttccatgtcaaatatcctttcttcacgttttactgttcctggccctgggagaccatgtccttttgctgtatactgaggatgccacatattttcccaaaactatcttctggagtctgctgtaggatgggtttttcaaaataggaaactcccatctcagtctacagaagctcttgcttttacccttgttctgcagggacttttccacagcctttttttaggtctttatggcatcccttaaacagggaaacatttgtcccagctattatgagtgggactgactgtcggcccgttttctatccacctgtggtaagggt

SEQ ID NO: 333081 - DNA, 606 bp, Homo Sapiens
ttttggtgtgtgataatttttagttgagtgccagacatcaagcatagaagagcagtagagactgaggtaaatagtatttacggctggaaatcaacatgcctcttcttctgtgaagttgtcagcatggaggtgagaaggctgagtcaatctcaggggttgacctgagtttgagttttgttgttacttccagtgcaccacagccttcacattcttacaaaggtagactgcggttatcttgaactttgagttggagctggggtgccaggggctttttgtgtgagtgttcttgacctccctcaacttccagccatcctgcatgcctgggccttaaatgaggtaattctccatgctcctactcttctcccagcagtggcctgctcttccttattacaacatgttagggctggcaggaatgggcatgttctcttttgtcgtgctccagcttcagtattaggcaggctctgtacatctggccctctaaggtgggatttcttttccatgtttagcaatcctttcgtcttctctgtggcagcaaaacctgtctcacttgcactggtcttgggtgagtttcttgctcctcccccagcagtagtcgacccctgcttg

SEQ ID NO: 333082 - DNA, 552 bp, Homo Sapiens
  misc_feature (531)..(531): n is a, c, g, or t
agctctacgaggaagtgcggctgacgctcggaaggctgcagcatagacgccgacatcgacagtttcatccaggccaagagcacgggcacagagccccccggttctctggattgctgcacggaagtcccaagaccacttcgttggcagcttctgctcgcttccacagagaccctgacccccacccccgagcggaatgagggtgtctacacagccatcgcagtgcaggagatacagggaaacccggcctcaccagcccaggagtaccgggcgctctacgattatacagcgcagaacccagatgagctggacctgtccgcgggagacatcctggaggtgatcctggaaggggaggatggctggtggactgtggagaggaacgggcagcgtggcttcgtccctggttcctacctggagaagctttgaggaaggccaggagcccttcggacctgccctgccagtggagccagcagtgcccccagcactgtccccaccttgctagggcccagaaccaagcgtcccccagccccgagnaggagcctgtcgtctcccagg

SEQ ID NO: 333083 - DNA, 515 bp, Homo Sapiens
gccagggctggggtgtgagggcctacctctcacctgggggcacagaggctagagggtgtcacagatggccgggctgccagagctgcaaaggaacagccagcctgtgtgaccaagagcccgtgtggccaccagggccctcactgtgtggtctctggagctgaccaccagttggtcccagccctgaccttggcccagaatccaccagggcagggcctgtgaacagggccaacttggggccctcctccgccctctctggatgcctccccttcagcactgggcctgccaggcagacagatggacacgtgcttgaggaaacacgggttttatctgggcgaggggttcacgcctgtgctccgggcccctgcccaggttgtgccgggttcagagttgactggctgccagtggaacagagtgtactttgctaatgaagcccttgtcattggacagataggctcctccaggtcctccctgccctgtaataaacgttgccaccgtgaatggtgctgctggacatc

SEQ ID NO: 333084 - DNA, 390 bp, Homo Sapiens
  misc_feature (231)..(231): n is a, c, g, or t
  misc_feature (345)..(345): n is a, c, g, or t
gttgtcattgctgtttgtttttctttcaatagtcaggtccctcttttgcatggctgctgtttgctggggtttatttcaggccctattcatctggttcactcacacacctggaaatgtcacctgaggaggctggagaacagcaaagatgagtgtctgctccctcctttagggatctctgactccaagggtcaccaatctgttaccagtagggcatgcttctgtataggggtntctggacaacccctgttgggaagggtctcacccggttgggatgggcacaggggagcaggaactcatttaataatacactttgggctgtcccttgggtgggaggggggtttgctngcaactgggggggaaacccacttgactgggggttgccccgatttc

SEQ ID NO: 333085 - DNA, 359 bp, Homo Sapiens
caatggaaaaccctagggggaagaaaagggaaagcttcctggaaacctaccaagtgccctaagggcaaaggccctcaagaaagcgtgtgggtttaacatttggagaaacccaaccctcttttggttttaactggtattttaaaaatagcttccttactctgttttggttgtttaatacattgtatgtttggcttcttgaggtctctggctcctcagtttttccttggctcataacatagtatcctcattgatccaagcatgaccctgttttgcttatttttattttacttatactaataatataatgaatatccacaaattcagtgcccaatgaggcaggagaatcgctcgaacccagt

SEQ ID NO: 333086 - DNA, 285 bp, Homo Sapiens
  misc_feature (250)..(250): n is a, c, g, or t
tggcagaaatatttaaggacatgggatacgttgtagcactatacacacacgtataatacattttgtattaagacatattaccaaaggaaatgtatgtctagcaaatgttaatttaagtgctagagaaaataatcaaaagaaaatgtagcttgttgcaatatattattattttttttaaggagacagggtgtcactcttctctccagggctggagtgcagtgggtgtgatccatggctcactgtagcctcnaatatcctggggctccaaatgatccctccccggct

SEQ ID NO: 333087 - DNA, 498 bp, Homo Sapiens
  misc_feature (453)..(453): n is a, c, g, or t
  misc_feature (488)..(488): n is a, c, g, or t
ttattggtttggagtagagtatgattgatggtagaaaatagtggtgggttgttggtcacaaacactgtcattcaaaacaatcacctgcacaaaagcagagctgtacattcttcactggattttgacaggttcctcggttgttttattttgaccagttcaagtcagtccaaacagttcgtgcagttctaggaaacaagctgagtttggcctgtgcattttggcatcctgaaccacaggatcatggtggggagggggagaggagggaggatggaaaagtacccggcagtgcctcctgaatccaacttcctgctggcgaaatccacctctcgctgactctgagtcaccaacagcatgccttccctcccctgcggcccatccgcccattagggcccggcagcttccctcctaggctgacttccctcgcttgctcccacacgtgtgctcaaggtggangcaaccctaatgaggaaacacgaggcagttctgtnacaggctttt

SEQ ID NO: 333088 - DNA, 758 bp, Homo Sapiens
  misc_feature (386)..(438): n is a, c, g, or t
  misc_feature (556)..(634): n is a, c, g, or t
  misc_feature (652)..(713): n is a, c, g, or t
ttttgtttgactgcagcatactggagcatagtgaaagagtctattttgaagcttcaaacttagtgctgctgcagaccaggaacaagagagaaagagtggatttcagcctgcacggatggtcttgaaacacaaatggtttttggtaagtcatccaaaagacttgacatcttttagctttaaatgtcatcgggcatcacttcactggtgtaccaggaacttcttcttcaagcgtattgctatttctctacatcctaaataacagggacatttggaaaaaatgttgtcctagtgacagagcactgagagagcaaccgcatttactttatgtgtttgtttctgaaacttgcagaatagtatgatctgaatagaatgtatttgtggttagnnnnnnnnnnnnnnnnnnnnnnnnnnnnnnnnnnnnnnnnnnnnnnnnnnnnnagcaaataaactacatctaccagatactccattttagctgaaaacataagggattaatcgcacgagaggaagtagattcaatttaatggcaagttttttgcgtcttgtgatcaaatannnnnnnnnnnnnnnnnnnnnnnnnnnnnnnnnnnnnnnnnnnnnnnnnnnnnnnnnnnnnnnnnnnnnnnnnnnnnnnggctgggtgtggtgtcannnnnnnnnnnnnnnnnnnnnnnnnnnnnnnnnnnnnnnnnnnnnnnnnnnnnnnnnnnnnnatcatcctgcgtaacgcggtgaaaccctgtctctactaagaatac

SEQ ID NO: 333089 - DNA, 513 bp, Homo Sapiens
  misc_feature (155)..(155): n is a, c, g, or t
atgtctgtgttttgtcttgtgggccttgggtgcccctgcccctgataagaaggggtttcagagcagaaataaagcctcagacaggtgagcctctgtggcacatggcccctcgagccagccatgcatctgggttcagcccctgccaggacacttgncccaggccccttaccttctccgagctgggatcatgctgggaagactgaatgggacgcagccggtgaaaacgcctggaagagagtaaacgccattttctctaagcatatttatttctttaacaacagtgacgaccatttgtgagccatctctctgtctcaggcacggtgctacatgccaacgaaacctgctcccattgaaccctggccagccagtgaagaaagggttgggcctgggaggtgccactttacagacaggggcaccaaggggcagggtggcaggaggcccaccggacgttccccatgaagtagcagtaccagcatccacacccagcaggcaccacgccgagccctatgcagt

SEQ ID NO: 333090 - DNA, 204 bp, Homo Sapiens
  misc_feature (23)..(23): n is a, c, g, or t
  misc_feature (32)..(32): n is a, c, g, or t
  misc_feature (63)..(63): n is a, c, g, or t
  misc_feature (88)..(88): n is a, c, g, or t
cttgtaaaagtgtgaaaaaggantggcccttnacccctataattctttcctaataggaagagntccccctaaagctcaagaaaagccnacaagctgggctgggattgtcaatgggttccaaccctattataatccccacccactttgggaagacagaggcgggtggggtcacttaagcccccaggagttcatcacttgagcccc

SEQ ID NO: 333091 - DNA, 226 bp, Homo Sapiens
  misc_feature (91)..(91): n is a, c, g, or t
tatgttgccaaggatggtctcgaattctagacctcaagcgattcttccaccttgggacttctgggtgttggggattatagggcgtgccacnccacacccacccaagtcaggaacttatttaacaaatgaatacatgactgtgtagggaatgaggtgtgcaaatgtattagggagcgtcttattccaacatttcttaaggagtcattaaatgccagaggagggtttt

SEQ ID NO: 333092 - DNA, 619 bp, Homo Sapiens
  misc_feature (498)..(498): n is a, c, g, or t
  misc_feature (554)..(554): n is a, c, g, or t
  misc_feature (600)..(600): n is a, c, g, or t
ctagcattttgtgcagtgatagagaagtcaagcatatcgttagcgctctctcaacttgggcagttcacaagctccttcccagctcagaagccctctctatgctctcaggggaagcagatggggtggatcagtacatctgtgttacccttccagaatattatttgaaaattctacagtatgttctactttctccccttcctgcttccatggtttcactgtggaatcctataagatattctcctgagcattattatttcagtttccttcagcttttagttgaatcttcaatgtggttttaaccaactgttcagagaactgaaatggtttttaaatatggaaaaaggacctttgtaaaaaatgggagttaaaacagtgcccctttttttaaaaaaagttttgcttatggcttaatttacataggactcaggagagtttggaacatcctccaagtgggccatagagctgtcacaaagaagaggccatgatgtttagaagcanggggacactagcaggaaggggcagggtccactggcttagtggcaactgacaggcanccattcgaatactcagcactgaggttcctcaggcaggtctttaggnaaactgtcagatcatggga

SEQ ID NO: 333093 - DNA, 775 bp, Homo Sapiens
  misc_feature (68)..(68): n is a, c, g, or t
  misc_feature (268)..(268): n is a, c, g, or t
  misc_feature (298)..(298): n is a, c, g, or t
  misc_feature (493)..(493): n is a, c, g, or t
  misc_feature (605)..(605): n is a, c, g, or t
cttatccgcagaggacaccgcgaccacgcaactccccttaaccgctcctcgatcacaacagctagcantgtgatccagacaaagtaggcttgtcacacgctctgtaacagtgctgtcttgaagtatgagccggcatcttacacctaagctcttgccccagtagagtagcctcacacccacgctgctagctcaaggccaacctcatctgttcagaccatctatgtgattgctttcccttaagtgaaatcaagatgggtgcggctctccntcttcatccaggagccttcctggcccctcnctccttaccccaggggtcctgctggccagacacagctggcatctcctagggcttggtggatgccggtggatcctgttccctccaccccctctgctgaggcctcagtcctcccagacctgctagagtggaccccagactcccaggagaccccagggtgcaggagaggggagaaggctggaaaggttgcggggaggngagagggctgggcccaggagtcaccggggcaggctgggggtcctggcccacgcggacccgctgatcatctagttagtgggggaggggcccaccaggggtcggggcccggggncacgccctccagggccagacaatgtgtcttcctcaggagtcccagcaacagaggggcctaccagtgaggtcacagagctccgtggtgccgttggggaagagagccaggagactctgatgatgaattctgaccagaaggcagtgaaattcctggcaaatttttacatcaat

SEQ ID NO: 333094 - DNA, 408 bp, Homo Sapiens
  misc_feature (59)..(59): n is a, c, g, or t
  misc_feature (231)..(231): n is a, c, g, or t
  misc_feature (349)..(349): n is a, c, g, or t
  misc_feature (372)..(372): n is a, c, g, or t
gtatctaaaatataattgtttatcccaatgtcactccacccaggctgcagtgcatggcncaatcactgtaacctcgaacacctggcttcaagcaagcctcccctaagcttcccacactgttgggattgcaggcatgagcccactattgtctgagcagtggctcttcctgcaggctggcttaccctctgcatcccacccatcctgcaggtgaggctgaccatgcccctaggnttccaagagtcaagggtaatggaacacacccatcacctcttcaaaagtgacgggctctgtccttcatcaatatgagggggtttcctcactttcctggcattaatcagctcaggggggncacaatttcatgggggagccccngggggtttttttccaggactttttggggaagtgggg

SEQ ID NO: 333095 - DNA, 393 bp, Homo Sapiens
  misc_feature (263)..(263): n is a, c, g, or t
  misc_feature (376)..(376): n is a, c, g, or t
tttttccatttctttataaaacagtcatctcactagcagctctctcccctagagtaggggaagggggtggaggaggttgggcacctccaaaggagaaaaaggatagcagggaagggcccaaggttacctcctgaggttcttctgggcctgtttcaacaatgtgtcaaagtcaagagaatcaaatttgctctttacaggtgctggggtcaaagtcttccccggttgggagtcaagatccaggaatagctccctctttgcagganctgcccttcgggcccccaaagcagaggatccaaaggggctgctcatctgccctgcccgcagctttttgggccacttctcaatgggccttgcaaatgcctcctcagcatagggnttaggttacgaggccct

SEQ ID NO: 333096 - DNA, 388 bp, Homo Sapiens
ttttttgggagagaggcggacaggcctgcaccagctgtatttctgtagtgacatacacaggtgtatcacgcagggagcctgtccagtcacggagccctgggactgtaccatcaacacagtttttgtttgtttgttcttcaggtgacatcgagagctccccctgggggttggggttggggatgctccttaggaacctcactggaaagatgagtcaagcaggtatccaagtccaattacccggctcagggcttgacatcacagatgtgggacttgcctgagatggggctgatgagcaggaagctgattgggggcccttgcagggcaacacacaacaaaccaatcaaacctccttcctgaaatcactgtgcgcgctgtgggggtggcagcg

SEQ ID NO: 333097 - DNA, 374 bp, Homo Sapiens
  misc_feature (129)..(141): n is a, c, g, or t
  misc_feature (297)..(297): n is a, c, g, or t
  misc_feature (306)..(306): n is a, c, g, or t
  misc_feature (338)..(338): n is a, c, g, or t
gggccaatgagaagaaaactttaaaactcttcagagagacaaactatgacctttactaagaagaattatttttataaagatgtcatttctctcttgtcagtctaaaactaaatttaaatgctaactgannnnnnnnnnnnnaactaaataaactggctgtaaggttggtgttgaaaaatgaacacacaagaatattttggaaacttgtgtaaaaagaagagcagggcaggggaagttatctggagttcctgaacactaccagatattaaaatgtacccaggcactttggggaggttnaggcgggcnggatccatgagggtcagggagatccaaggccnatcctgggcttaccatgggtgaaacccccatctttt

SEQ ID NO: 333098 - DNA, 552 bp, Homo Sapiens
atatttagtcacattttaggttagaactttcaggaagtgagtttttacacagaaattagtgctataaacagcccttaaaatgggaatttaatcgtacttatttaaaatatatatgtatataatcttaccaacccagaaagacatgttctctggcattttataaactaagatgctactgggaagaaaaaagctaaatctgaaatacacaaacaacatatttacactggtgatatggtttaggatctggtatgccaaagctgaatctcatgtcatattgtaatctccaatgttggagatggggcctaggaggaggtgattggattggatcatgggggcggatttcctcctttggtgctattctggtgatggagttctcactaaatcttgttgtttaaaagtgtgtggtacctcccttccccagcttcctcctgttccagccaggtaagacatgtctgcttcccctttgccttctgccatgattgtaagtttcctgaggcctccccagccatgcttcctgtacagcctgcagaaccatgagccaattaaacctct

SEQ ID NO: 333099 - DNA, 395 bp, Homo Sapiens
taattgcagtcaatgtattagattctaccaggttttaatttggatcggtaatacgggtttgattagggttctaggcctaattataggtcactagtcttcctttaggattatgcaccatctgttattttaaattgaccagtgagggggttcccaagggttctccttcgttttgttatcaaacgttaggtttaggattcttgcgggtggtgggatccaaagccagagacggtttcaacaaaaatgcaagcgcgaatttgtcttgcgtctgaacgcacctgttcaaattaaacaatttagacatgccccaactatgacactaagaagtgaatggtatagtacacttttgtcacaaattcaagggtaatttaagtgcccgatgggtagaggtctggctt

SEQ ID NO: 333100 - DNA, 827 bp, Homo Sapiens
tggctcaacagttaacaggtttattttaaacctgggagggacttctgatcgagttaggtcagaagccacactctcttgcagactaagagtttttaaagattcagggtgggagagtttatcagaggcttggactgcttctgtgtctctctgttgtgcttatttgggagggagagttgtgtgtctgttcccatacatctttctgtagctgcaggcatatccccccaatctgcctttagccttcctatcttagtgcacctgaaaggaaaggaatgtgcttattaaggcccactgttttactggggcccattgtatgagggtgaagtttggcagttacccaagagacttttcccttacctccctctgtgccccaggagtcttatctgtgttttactgtctgctgtttctggctgcttgtagttggaagtgattttccttgaaatgcgtgaagctataaagggaggtggaacttgaagtggcggggtttgtccgagatgacggtgctcccgaaaacgtccaacaaaatgccggccacatttggtagatgttatcgagtctctctttccctctcttgctggtgagtcttctcaggcctgcagagggattgtggaatacgacaagatgttcgtactagccttgattgccatcttcaacaaacaaatgagatagaatggcatatgattccaaagaaataattcttcatttactaaacctgactgggaaatgaggagggagacaaaaaggaggaagtaaggtggcagggttgggctaataggaagattagcaaatttctccgatcctgaaaatgagagtttggggagtctcgtgcc

SEQ ID NO: 333101 - DNA, 507 bp, Homo Sapiens
caaatatagtctttagttcctttttcaacttcttctttacctccacggaggaaggcagcttggttttctcctcatacaccttgtggagaggttcgggagtgggaggagacactgacggagaagagatataaggaaagttggggggcatatttgaaggtgttcccagttttgctttacgtacaacctcatcaatggaggcatccattgtccatgagttattggaacttgaggttccaccgtaaagaggcagaggagtggatcctgactttgtgaaattgttcgcggaagtgggaagctttggggagtagtacactccgggcctgaaattctcttaggggctagtaaaaatgtctcccttcagattccgatccagaagaaaattcgaaaggatctggctctcgctcagcacaggctcgtgcaatcacagcatagatagaggcctcaatcgttttatctgctaccacagcctttttcggctgattctcactgttcagtttcccagcatca

SEQ ID NO: 333102 - DNA, 512 bp, Homo Sapiens
  misc_feature (197)..(197): n is a, c, g, or t
  misc_feature (252)..(252): n is a, c, g, or t
tttctcttttatgccttgaaaaatgtgtagcattcattagtgaattaggatttcattattcaaagaagacataaggtcttcgaagagcagatgactgaataaaataatacctaacagcagtagaatgaggggaggacatattcaaggaacattttatgcccattagattggcagaaatttttaaaaagtgaccaatncccgtataaaggtgaacctttccctatacctgatacctgggaacatgaatttgtncccattcgagggaagagaaacttgataatatctggtgtagtctgaaggggcacagtccctgtgacccagtgaggacattcctcattatttcccttgccaaacatttcacatgagtctataaggagctctatataagagaggtcactgcagcctcctttgtaagagcaagaaaaaaaagcaaataagtgtttaacaataggaacatagataaattaggttatgcagtgaatatttgcactctgactaaagtgagtgaatca

SEQ ID NO: 333103 - DNA, 389 bp, Homo Sapiens
gcagatgagacgcctacccccaggaccacccaaactgttccttggctgaggctgtcatagcccaaaggtcaccgtgtccttggagccaaggccccagtgggaggaatgagaaccgcttttgtttggaggggcagtcacgaggcgcatgaggcagccgcccagccctcaccgccctccgtctgtctgtccgtctgtctggcccagggctaacatgaacttttactacaaaagcactgagggctgggagcattggcaacgtgctcctgggactttcaccgggggcagctttcagccttccttgcagatgtttcctccagttcctaacaaacaacggaccagttgggacgtttgattttttcgggagacccaaccaattttggatttggggt

SEQ ID NO: 333104 - DNA, 292 bp, Homo Sapiens
  misc_feature (279)..(279): n is a, c, g, or t
cgagggataataggtccaaatatacttgaccataaattctttagtaagatgaagctgtctctagttgttatcctcacagtgtcaacattgaaccatgacttctgagattcatctttaatgctgaatacgtacttgacttgctttttttcttcagttgaatttctagcatcccttttaccaattcatttattggctcagcttgttaattctaatttgcctttgactgctcagacgtgggctggaaaggacttgaggcattgttccggatgttgaggggantatttggcctttt

SEQ ID NO: 333105 - DNA, 347 bp, Homo Sapiens
  misc_feature (17)..(17): n is a, c, g, or t
  misc_feature (157)..(157): n is a, c, g, or t
gcccaacagttccccangggtcccaaagtgaatccgtggtggaccatcctcccctttgcctttaaattggtttaaggccatgggccatgtgaccccagttcctggacaaggagttgtgaaaggaaaagtcgcctagaagactcctcagaaaactttnttccctttggcctatccataaggatatatgaattagggttgccttagagttgctgcaaccaacttgaaaccatgaggaactaaaggataaggcccataagctgtggttgacagagaaagatgaaaagaatatgggtcttcaatgatgtcactgagctagagaattagcaatcctggaatttttgttatgt

SEQ ID NO: 333106 - DNA, 526 bp, Homo Sapiens
  misc_feature (421)..(421): n is a, c, g, or t
  misc_feature (432)..(432): n is a, c, g, or t
  misc_feature (465)..(465): n is a, c, g, or t
  misc_feature (480)..(480): n is a, c, g, or t
  misc_feature (502)..(502): n is a, c, g, or t
aaatgaatgtagtttgaaattttctcatttccatagtagaggccctaactgccattgtattactaataatgcaacatgaaattgaaggtgcctaactctcaaaaaacaaaatcagccatcatactgtaactctgagaggaatgagaggtggcacaggcacgagtgggctcagccgtggtgagtgaggagaactgaggaatcctagggtgcgcatcctgcatcctggctgcacgtttgctgcagagtatgtttttctttcttgcctcccttcaagttttcttcagttgcgttcagtgtatcttcctggaaccaaatagtgccctgtggttctccaagtctctaaaaatgctaaagatcttgagccaaagtccaagcagcttacactagggcttttttacagctgtgcttgaggaaccatttnccgagtgggancccgggggcctttgagggagccccgtttttttncagccaaatttcaancaggtgttgtgccagttgattncccttccccgtttttgttattttg

SEQ ID NO: 333107 - DNA, 431 bp, Homo Sapiens
  misc_feature (301)..(301): n is a, c, g, or t
  misc_feature (335)..(335): n is a, c, g, or t
  misc_feature (355)..(355): n is a, c, g, or t
  misc_feature (369)..(369): n is a, c, g, or t
  misc_feature (374)..(374): n is a, c, g, or t
  misc_feature (403)..(403): n is a, c, g, or t
ttctgattaatggggtatttattgataccattctattttaacaaagaaaatatttcaaattacaaggtatacaagtcaatactgttttgaagtgaaaaattatttgctttgagagtgtatgcatgtatgtatatatatgataaatgattataacgtgtgtgtcagtgacaatatgtagtctttgggttgttaggttatatactgtctaccctgtgaggatgcaagggtaaggtggggtcacagactctcaaatttatggaaacacttagggtttttcagggggaggttacatgaggggacnggggggagtttccatggattagggatagggcgcntcggggtggggggccccccnccccggacaggccnctccnaaatccatcaggcaggtgtgaggcccggnggtttccaatttgggggggaaggtgagg

SEQ ID NO: 333108 - DNA, 440 bp, Homo Sapiens
tccagccagagcacgcacgcacggagccgggagcatgcagcctgcactgcgggggatgtgatgctcggctctaactcgcctggctggcccgccacggacgcctcagcttgcaaccatggtaacgtttctggcgggggacacccccgggagcccaccgcgatgggcagcctcctggtgactgatggacgagtgtccacctcccagaccgagagcgcttagtaggtcggaggaagtggagaggatgtaacacgcccccagccgggagtgaagccctgaggaggtaggagccgcatatgtccatccgtgcattcccaccgtcagcgcgcaggggtgctgtagatcaccggtaggaactttatttggctggtgcttcattatgctgattaaactgcagtggatttgatgggcatgattgcgctggggaacatgcataatgaact

SEQ ID NO: 333109 - DNA, 363 bp, Homo Sapiens
ttattttatatatgatgcttcttttaatgcagccaaaagtgatatttgcttttctcagaaccataatcgatacaagatgcagtgaccaattcattccttaaaacacctgggctccttaaggggctagaagacacaagttacatccagcccatcagggagccagaggcgggaggggtccccagccaagctctggcaggcctgccatggggcagggcctgaccgtgcagccagaggctggcagaggcctggggaagggtgggcagaggcagctgggctctcagtcctggaaccggagaccaagggctgctcatcaagctccgtcaggcaagggcggcctcatctgtgcctggtagattctaactg

SEQ ID NO: 333110 - DNA, 391 bp, Homo Sapiens
  misc_feature (21)..(21): n is a, c, g, or t
  misc_feature (76)..(76): n is a, c, g, or t
aaaataaaaagatggaaaaantgccattaaatccataatccatgtgggtaaatgccccccatcgggactcctgcantccttaatcttttaccctcctactgacagaagaggctttgcttttccagctgctgtgaacaagctgaagaggccttatcctcttatctgcaagagtggaagtaatcacagggggccctaaaggcaaatgtttacctgtgtattttatcgtgaaagtgcccaagggtccagacctcacctctcttgtcccactttatctccagtacctagaagggaggctggcacattgtaaccactcaaacatctgtggatgactggaataaatgggaggatgtaggaatgaatgaacgaatgaataatcctttagggaacaata

SEQ ID NO: 333111 - DNA, 438 bp, Homo Sapiens
  misc_feature (262)..(262): n is a, c, g, or t
cagcaatccccaccgtcatagttgcaaaaaggctcggttgttgatggcatcacaataattgtctcccatgaaggctcacagcctttgacacagtgaatcagagcagggtgaaggataccacttgaagaccagcagtgccagacaactctctctacccgtgtggggttcagccagtgggggatgtcacgcacggtcacgttcattggcaggatgatggactcgctgttgtggtccaggcacgaggtggcacactccggacccntatggcatagccatcagggcactgcagtttgaggttgctgttgagctcgtttggaaccgagcactggccttgcatctcctggcagacatggaaggagccgttccaggtgccatctttccggcaatgaatgacattgctcccaagtccctgggaggcatcactgtcttcacacttga

SEQ ID NO: 333112 - DNA, 473 bp, Homo Sapiens
  misc_feature (20)..(20): n is a, c, g, or t
  misc_feature (97)..(97): n is a, c, g, or t
  misc_feature (108)..(108): n is a, c, g, or t
  misc_feature (124)..(124): n is a, c, g, or t
  misc_feature (147)..(147): n is a, c, g, or t
aggatcccaacttccttccnaattccttttccccctggaaaaggccccttgcctgaaaaaggttgcctcaaggcctcgggcgggtgtaacatacgantcccatgctgnggggggcgcccgatgnagggacatcaatgccactggggnagaacagcttcagctcccaagtgccgcgccgtgggtgagtgatggagactgtcactgcccacatgctccccagggtcttcagccctgacatctcccaggtcccatcctgctgactgtagaaagtcaggctgggcagctgggaaaccagcccacaaacacgccttcacttcacccccacgtacacaaagacacacgctcactgaagccacatacaaacatctacggcaaccctaactgggacctcgcctatactagtaaatggaatggagctgctgctctcaagtttacaacgtagcttcgagtgcagttgggaagacgacacatac

SEQ ID NO: 333113 - DNA, 454 bp, Homo Sapiens
tttaaaataagacaatagttttaaaattttaaaatgggtaaagtttggcactagaaaatttaatctcaattgtatatttataggatcttcagattactaaaaagatttgagataatgctggaaaaattggattcacacaatttcactcaatgtttgtctgagagatgagacagttttgaaaagctactttattgtaatacattcatcaatattgggaaatataactttatttaataaaaagagccccaggactgggacattgggcaggtttgaaatgagttttttctcattaggcttttgaccttggatgggatggtaagttttagaaatcagagaacatgtacatttatacattgttgtatctacactgccttgcacattgtgactgcttcataaatatctagaattaacttttatttcttattttacaatacggaagtagtaaattttctct

SEQ ID NO: 333114 - DNA, 882 bp, Homo Sapiens
  misc_feature (731)..(731): n is a, c, g, or t
tcttgaaaacatgatttatcacataatatatacatttactttgcttgtcacttgaaatgcctaagaaaacacaaaatcaatcttaaactagaaacttctattgaatatgacatgaagagagcacatattccgacaatttcaagttcttttcatagccttccagtcctaataactcagcgttaacatcttattctgttcagcactatttgataatttctttcatcctcatgggctctagtattgatgtttcatcagtctcaattttataaaaccatcctttactttgtaataaagcaatgctgagagacattttccataatgcagggggaaaaatgtggatcaatcacaaactcaaagaacgttacagttataatgctttcgacatttttttctacttctgtgatgctttttcaagataagcttccccctccccctttttttcccctccacctgtgcactgtcttatcgcgatatactcttgacttctgaaaatcaagttgcaggattggtatgactggaatgcagaggttctcttgaagtagtgtcaccacataactattctctattgataaacttatcgcaaccaagttcttctatcagagggttgataacttcagaggcagtcagagctatcgtaaaggttaaaatatcgaggtccaccctgtgaaggatttcgcctgatattcggcatcaaacgctgcttccccttgctctgcaggcttcccacgcanactcgcggcgttcttcaagctcttgtattctgccgggagcaatcgggtaattttccagatagtggcggagaaactgctggtaattgatgcctaaaacgctaagtgggtggcggagacggagatagggcaacgcagccaggcctccgttccc

SEQ ID NO: 333115 - DNA, 412 bp, Homo Sapiens
  misc_feature (316)..(316): n is a, c, g, or t
  misc_feature (322)..(322): n is a, c, g, or t
  misc_feature (341)..(341): n is a, c, g, or t
  misc_feature (353)..(353): n is a, c, g, or t
gttttctctaggtaatttaacttaaagggacagtaagtatccacatcttccttgctgcttgtttaggattgaggttgacacatacctcttagaaggccggacgtttggtcactggagcagcagtgctcggcgactctccggagtgccccctctggctttccgctcggtcagctgagccgcacaagcaggcagtggcgctgccccttacatgggcattggctttgcaggggctgaggtttttgcagttcccaccatttgaggggctgttaacatttcttctatttctgggcttaggaatgtgtgtagggatggatantatttntttcaggcattcattccgntcacggtgtggntcccgacccacacaccaggggtcttgcgtggcgggtgctggggcacagttcttcaggga

SEQ ID NO: 333116 - DNA, 404 bp, Homo Sapiens
  misc_feature (91)..(91): n is a, c, g, or t
  misc_feature (155)..(155): n is a, c, g, or t
gagatgcggccgtggtcgagcatcaggatcgtctgcctgcgcccaccagtgtggtccgggagcagggaggtgcagagccgaggcgcgcccntccccgcgggtctcccgtctgctcgctggcggttggtttcatcagtgccctggcgagtgtcgcntggttgcgactgcactgcccacacagagcgaattcctcaggcaggcccccttcctctctctccccggaagctgcttcatggcactccctccctttcccttggccgtgggaacctctaggttgatcactgggtcattggatctgcttttagttagccttgatttttgtctgcattaaacaattaaatgagcttctaataatacggtgttttgaatgtcatacatggcttttcctgttgaaacatctgcag

SEQ ID NO: 333117 - DNA, 556 bp, Homo Sapiens
ggttaactggcgcatcttgtctttctctgagaacagcgatctggttatggggcatttctgtctctaatgtcactgtctgctgcattccctgcagagcgaccgtgagaagtcagaaggccttcctgtggccccgttcatggaccgagacaaagtgaccaaggccacagcccaggattgggtttcatcaagtttgtcctgatcccaatgtttgaaacagtgaccaagctcttccccatggttgaggaagatcatgctgcagcccactttgggaatccccgagatcgcctacgaggagctgaagcggatagatgacgcccatgaaagagttacagaagaagactgacagcttgacgtctggggccaccgagaagtccagagagagaagcagagatgtgaaaaacagtgaaggagactgtgcctgaggaaagcggggggcgtggctgcagttctggacgggctggccgactgcgcgggatccttgtgcagggaagagctccctgggcacctggcaccacaagaccatgttttctaagaaccattttgttcacttttttct

SEQ ID NO: 333118 - DNA, 463 bp, Homo Sapiens
  misc_feature (410)..(410): n is a, c, g, or t
ttacttgtttaagtagtctaagtagtggtgaggacaataattctactgagattttaaaaatcctcccccaaattaagaaaacgaattgtcacaagtgatggtcaaagatatcaatgacatatgatatagcactgttatgtcactgtgctagaacaaaatgcttaggaaatcatcacccatctggtgaaacatatttttatataaaatcaccactaaacaatgtgactcaactcatgagagaagaaagtttattgtcatttgacaaaaaggcaaatagaattgaagtgagaaaaagttgatgcctaagccagaaactgattcaaccatcctccacataggatcctaaaacagctatcttattaaaaataaactaagctgtgaacaaagagaaataaagaggtatctgggtntcctgggattgcatggggaccacaggggcttctgaccctggaacagaagagac

SEQ ID NO: 333119 - DNA, 454 bp, Homo Sapiens
  misc_feature (100)..(149): n is a, c, g, or t
  misc_feature (170)..(200): n is a, c, g, or t
tgggctcaagtgatctttccaaccacagcctctcaaagtagttggaaccatagacatgcaacaccatgattggctaatttttttgtagacacggtagttnnnnnnnnnnnnnnnnnnnnnnnnnnnnnnnnnnnnnnnnnnnnnnnnnnggacttaagcagatccattcnnnnnnnnnnnnnnnnnnnnnnnnnnnnnnngtgtgagctaccacgcccagacgcattttctaaattcttgtgtatctataataattcaactaattaaaactgttttgcactatgatacacaaaaggaggccaacagtgatttcctaaaaaacttaaggatatgcctaggtttgctgacccggaatggaatacacactgatgtggatccctatatttctcaattcttcacgttcacactagctgctaaggagtgaggcaggatgagggtacatgctgccagcagc

SEQ ID NO: 333120 - DNA, 322 bp, Homo Sapiens
  misc_feature (302)..(302): n is a, c, g, or t
gagtaaactcagaaccatttcaacacttcttttgggattttgtggcctaactcagacgagtgtctcccagcacgtccttgggaaggcaggactgctttcagactgcagctgaggggttggagctgacttacagggctatttcgggatctgcagtgggaaccaaggttggtgggcctgccttcaggggggatggactggggtatcttccagggagatccctgggcagatggttcctgtgtcaggagagccaaacaaggctgcccttgagtccatagggggatgaggccatttcttggatcttncaaagggaccccattttggc

SEQ ID NO: 333121 - DNA, 556 bp, Homo Sapiens
  misc_feature (348)..(348): n is a, c, g, or t
aggccaatgatgtttgcaagtacgtactcgtggagctgcgcagtgcactcacagctgactccaagtcgcatgccaagttctgtggttttgagagagccgcaggtcaccacctcccagtacaacaacatgcgcgtggagttcaagtccgacaacaacgtgtcccaaaaaggctttcaagccccacttcttctcagaaaagaggccagctctgccagcccctcgggacgcccccaccagctcaaattccgagtgcagaaaagaaaccggacccccccgagtgagctgccaggctcccggaccccttgttactcaggaacctcaccttggacggaatgggatgggggcttnggtgcccaccaaccccccacctccactctgccattggggcccacctccctctggccggacagaactggtgctctcttctccccactgtgcccgtccgcggaccggggacccttccccgtgccctaccccctgccattttgatggtgtctgtgacatttcctgttgtgaagtacaagagggacccctgcgtcctgctcctttctcttgc

SEQ ID NO: 333122 - DNA, 839 bp, Homo Sapiens
gtacatgtagaatcttttagtttttagtgtttatgtaatatattagacaataataaacatttacatttatgtttacatttatatttaatttttcaaatttaatttaaatttctaaatgcttctgtggatttaaattttggaataatcttttcttccccattgatactgggaatcttgggaagtttcttacttatatcacaatatgttttatttaaatgggatgcaggcttacattgcaggagtttatataaataatcacataacaaggcccaattccttagtcattttctgtatttaaaaaactcagagatctagagagcttttggattgaaatatttccttggtgattttggatgcaaacctgatttctgtgttcacaccatggccagagatgggactgttagcaccacctgcttctttaatgtcgtccatatgatcagcatcagcaccagaaactccaggtgtcccaaacttaaagtgaaagccatagagtcctttggtgactcccatgttctgtgctggttctagaacatgctggtaaatatcagagtttctatgcttatggctgataagtagacatttttaaaaatcataaaaactgtattttctatatagttcagctaagtttatgaaaaagatgcagactcagtatttggagcattcgtatcgctccatgatgtgtttaaaaattatttttaaattgacaaaattttatatctacatatatatatatcttgtaacacatgatgtttgaaatgcttaattctagccaattaaaaatgctttacctcaatagttatttttattgtgagaaaggtcaacatggtcttggcacttaa

SEQ ID NO: 333123 - DNA, 429 bp, Homo Sapiens
ttttttggatttccttcctgtttatttccttggtgacttggtcatacaagcaaacatggcaaaaccctctcagaacccaaaagaacagcacacggatgaaccaaatgtgaggaaagcagctgtgatattttgggtggagagaaacacaagggcaatttggcacaacgctgctagatactgtgggtttacaatcaaccttttcattcccaagctgtacacaaaactctctgtttcttgttacacgcctgcctgctccatgctgaaggagacttcggggtgcttgtagctgagcagaatgtctgtaatacacgtagatggatagcaagaggagtttaaatgctggctgccatcactcaggtctgggtgctcatgacctcccaggcttgccccacattcctcattttccccatcctgaaactgctggctgcc

SEQ ID NO: 333124 - DNA, 708 bp, Homo Sapiens
ctgctcggtgccattttatttaatgcaaacactagacagtttacaagtcacacctggacacaagcacgtgaacagatgtacagggaattctggaattttgagatcagtccccatttcttcctcagggccctggcactgaaccccagcccctgtcccagagcctcccctctgggtcccaccccagaagccacgcacacctccttccgcccagctttatctttccttgagctgtgacttcacccagcatgtgctcagagttgttacaaattttctctgccaaattaagctgacagagattggccactttcaaccagtcctttcagtccactgtgtctcccctctcgcttgggacaggcccatgctggccagtgcaaccttcagatagacacatggtgaccagagcccgccaggcttctgcaggtggcagtgtcgagcaagtgtaagatgtctgtgggaaggagaagctcctgaaatgaacgttctgcaaacagaaggctgaggggtcttccaggcatgtccagtcactaggagctgccaccggtgggcttgagtgccaggctctaggctttgtgcagaaagcacccggggcggggggcggtaagggagagcaaaatgggtctctctcaactgcagtcagtgctcctgggaacacggtctcacagacagcacatattctacgtcacagctctagggtttcaaggacttagc

SEQ ID NO: 333125 - DNA, 275 bp, Homo Sapiens
  misc_feature (165)..(165): n is a, c, g, or t
  misc_feature (250)..(250): n is a, c, g, or t
atgattacatgattaatttgaagttgtttcttggttggctgccagttttagctattttgtctctactaaaaaggggaaaaaaattagcacctgccagagattaaataaggaatgtatttcagcttattgatttattttattagggagggtgaaatttttcaggtnggttaggtaagggtgactttgggagtcactctttggattttgagtccctaggctttgtccattttacccagcttttgtggacccnggggccggactaacccaagtcttgt

SEQ ID NO: 333126 - DNA, 443 bp, Homo Sapiens
  misc_feature (212)..(212): n is a, c, g, or t
tgcactcatgcaaggataagccaggtctctaggcatgggcagaaggatccctgcttcccttctcttccctttcagagcaacactttcagccatttccatgagtctgggctcttgttacccagctgaaatactgtttcctgaaactcacaaatttgctctctaccaaagcccaccttatgccctgcctttcccatgaagcctgtcaagaaaanttccaagaaagaaaatttgatattcctatatcaaagcgtgtgtctttcctctcctaatccctcttagctgccacagtaggtgcaatgtcattttagcttttgcagatgcattacctggtggtttcctagtatttctttcacttgcctcgattgctagattagaaatttactggggacagacatctttttaatatctttctcctactacttaacatatagagcatcaaggga

SEQ ID NO: 333127 - DNA, 405 bp, Homo Sapiens
  misc_feature (128)..(128): n is a, c, g, or t
agcaagggaggggataaaacccaggaaggacttaaaaataaaagatcagggattccatccctaaatgaatggagagaagttgtatatttgctgatttaaaacctcaatgttgtaaaaatgtcacttcnttcccaaattgataaacagatttcatgcattcccaagtcagcacacccataatgtttttgtggaaatacacattattatagggaaatgcaaaatatcaaggcgcctatcaagacaatcttgaagtgggagggcttactatgaatatcaagatttgtaagctgggcatggtggcacacgcctgtagtcccagttactcaggaggctgaggtgcgaggatcctttgagcccaggagtttttgaggccactctgggcaacatagtgagatcctgtctcta

SEQ ID NO: 333128 - DNA, 378 bp, Homo Sapiens
tctgatgcaaatttgcttttatgaaaatttaaaatatggtccaatccactggcaaatgcatctgtaatacagatatgataggatgcaagttccacccccagggacagcaattatatgcacttagcttaggtggttggtatatttgcttcctttcttcccacttagttttttgccttaaaagctttcttgtgcgcgcctctcatcgcaaactgcccttgaatcctgcctttgatgtgaggaacagggactaactgggcgttaaatcgggcattttctacatcagggtctccagcctgctcttgacctggacttccaacacacaaaggcaggcgggcattttgttgtctggtccattttctgtaagtgttaccggggccc

SEQ ID NO: 333129 - DNA, 350 bp, Homo Sapiens
  misc_feature (273)..(273): n is a, c, g, or t
  misc_feature (314)..(314): n is a, c, g, or t
  misc_feature (331)..(331): n is a, c, g, or t
tgaatgaaagaatccagcagatatttattaagcaagatgaaagtgaaattacaaacacaggtcaacttttaaactcagcactctgttggagtggaggtgcacggtccttcatcataggcagcctatgcgagatgcatcttaggaagggagctttcgctgctcagaaatcaaagctccatcggaggtgtcctactgggaggcatcagacaacaagctaaatgacgttggggctacacaacacaagggggaaagtttgaccaccaattcaggggncttttaggtaggtcaagacaattaggccttaggtccttcanggggcaataaatgcctncaatttttgggggcattag

SEQ ID NO: 333130 - DNA, 444 bp, Homo Sapiens
  misc_feature (196)..(196): n is a, c, g, or t
  misc_feature (294)..(294): n is a, c, g, or t
  misc_feature (305)..(305): n is a, c, g, or t
  misc_feature (396)..(396): n is a, c, g, or t
aaggagcttgtggttctctataaatttttattatgttattaaatcaccgatataacagatgacagctgtgtatccgacttgacagcaagacctaaaaaacctacatacaaatgctttttaaaagggaggatatagaaaggtccatttcctgagactttagagccatcctctttcttgttcttgtttttcagatccngggaagtgcatgggaaagggagccttctccatatggagagaagcagtgaagtccctgaaggaagggaagcccgtaaccattcccttgaggtactcacnaagggcggccntgaccatctgggtcccacacttgggggggaaaagaggcccaccatcccccaccatggggaggatcctatttttttgccattcctgaggctncgggatgctttttgcctccggtaccaactttgccctttaccacacagg

SEQ ID NO: 333131 - DNA, 546 bp, Homo Sapiens
ttttttaatccagtggtgtttattcaagcagtattcacacttgctgttgaataacaagggaatcaaggctcccctagatggggctcccgcagttccagcttcacagcagccccaggtctttgagaactccagatgagttttgtggttgaaaagcctttcagttcttcctccatccctctgtcaggcagagcctattataccccgattaccagaacagactcagcagggtggcagaagcacacggcaaagccggtagaactacgtaagctcagaagaggccacactgttccatgttttcatacaaaaaaatttaataaatattacttttcaaaatttattgccaagaacaacacatcaaagatgcatttgtatgttcatataacactaataggacaatacaaagtatcttcacggtctcaatggttgaaccaacaagattactctgttttataagcctttttgatcttgaacttcgtaatagcactttgatttcctcacttaaggcaggcagtgtactctatggcaaatctaaacagtgatcttaca

SEQ ID NO: 333132 - DNA, 732 bp, Homo Sapiens
tgcctccgagatgtgtttacttattcttctgtgtccccaaaacccctttccaaaataacatttaaatgattgttctgtgctgtgtgttcaaatggagataatcagatgccagtggctttacaatgtgggttgcattccattttcccaggcgcccaggtcctgggtctctaggccaccgcccgccgtggccgcccctctgctcaccagggaggccagacaggaaccctgcagctgccagagcaagcacgtcccacagccttgggaggcctcccaaaatgtgtccagattcccacaggcagagagagagggactgaaaggctgaagtgaagtgaccgtgcctgcccagcctgggactgagagcctgaagaccagctttccagactctgtcccagaacccccttggccctcagcaaatcccctcctcctggcctgaaacagactccaggcttcttgcagagacgtcttctgtggagaaccagaaagattgagtccaccctgactgtcccgggacagagctgctgagcagggtgcaggagccacaaacaccggatctttcgaggcacatcagtgacagatctgggcacagctggaccagccaggacattgagccactgcagccccaaggctctaaatgcggtgcttcagctctagcttggccaccgtggcccggtgcacctcgtcagggccgtcggcaaaacgcaaggcttcggcccaggtgaagaactgagccag

SEQ ID NO: 333133 - DNA, 328 bp, Homo Sapiens
  misc_feature (115)..(115): n is a, c, g, or t
  misc_feature (269)..(269): n is a, c, g, or t
  misc_feature (279)..(279): n is a, c, g, or t
  misc_feature (310)..(310): n is a, c, g, or t
tacaacacattttatttgcaaaaactcagctaagagatagtgtggagctggcacgggcctggggggctgagctgaggtgggtcatgagagagcttagtcatgttggccctgggtngggcaggggtggtggggacagggagtccagtgtctacctcactctacccctaatactgatcagagtttggtcccagctgggccaagggcaagaagagagaacgaggccagggcaatttcttcaatcccagcggctaggaacccttcaccttggnagcaactttngcaaaaaggggtccgtgatgaggtctccacngtgggaagacagcttcgg

SEQ ID NO: 333134 - DNA, 416 bp, Homo Sapiens
ttgataacacaggtctttatttcctaagggtacatatgaattattcccttttgaatgagacagtttttaaaagttgatttataaatacaaaaatacattctccaaagatagtatttccaaactgttatatacccatctactcccaacatggatataagttttttaaaaaaatagttgtatataacatacatatctgccccagtgttacttcacaggcctatgccctacgggaactccactctcccagccccactttttctcttggttctcccacattcttattctcccacatccctacccacgtttgagctgggaaagggatgtccctaccctaggcatgagggtatattttattctggggcaccacacatttgccccataggataacaatacacgtgatgatgtcactagtacta

SEQ ID NO: 333135 - DNA, 420 bp, Homo Sapiens
caggtcaatacatagacatgtttattggctgcatctcgtcttggggtgtagcatagtctcttgctgatggagtgtggcctgggaaagggtggtggttggccgctgatctcacgtacagttgcacctgcacatggacacacagcaagatggtgctgtaacaagctcagcgctgtcaaggttttcggtgtcttcaggttaacaatagttattgagcccctcagtactgggacaggaagataggtaggtacctgccctgggcttagcagtctgatgggtttgtatacaagttggactgtgagaagagtttttgtggggagaagcacagtgactcccaactgcccacggaaaatgacgcccaacatcccgaggactattgctcagttctccttggctgtcaggtgcgtgttcctctgaagtgta

SEQ ID NO: 333136 - DNA, 428 bp, Homo Sapiens
agtttttatagttttatttcaggtaaaagtgcatttcttaaaaaaatgtttcaatatccagtttccattggcaagtgataacagttaaccctcaatgattcatgaaaagttttactgtgaatcaaacatagaattctgcccccctcaacagtcataaagaaccagaaatagtaactgtaagtgtgcctacttcaaacactgtataaagcagtggtcccctaaccttttttcaacagggaccggtttcgtggagacaatttccacagacacaggtgttggggtagatggtttcaggatgagactgttccacctcagatcatcgggtattagattctcataatgagcgcacaacctagatctcttgcatgtgcagttcacaatagggttcacgctcctgtaagaatctaatgccacccaggggtttgaga

SEQ ID NO: 333137 - DNA, 417 bp, Homo Sapiens
ttttgggagaccagtctgcctttattcctgattccctccatgggtatgtgctaaaacttcccaattctactaaaggtggtggtgtacattttgggaagcgcactacataggatcaagggcttaggtaacagctggtttaacagattgccacaaacttagtggctcttaaaaaaacagaaatctattcgaaagttctggatgcttaaagtctaaaatgggtccacagggctgcattcattacagaggctctcagagcagggaggatcagttcatttccttgctcttttcagcttctagggtgtggggaaggctccgtggctccttcctccatcctcagagcacataactccagtttctgcttccatcatcacattgccttctcctgtagtcaaatcttttgtctctctcttaaaaggg

SEQ ID NO: 333138 - DNA, 421 bp, Homo Sapiens
  misc_feature (410)..(410): n is a, c, g, or t
aaccactggcttgcgagattactctaatgagtacgggacccaggtcaggttccggaaagaagtagaacttgacccctgctgaaactttttgaaaactcaaagggtggtggtttttgcagaaggcttaggtggctcccttctgattgcccaagtattctgtccctcagattccagtggaaaacacagacacatgtaatcataatcataatccattgtgcattgaatacttccagacacactgaccacagttgcagggcggggggtacagccagaagcagggagtagggggaagtagacaaggtattcaggagctaacatccctactggggtcagaagtgggtcatttctctccttgttcccagtaggagtagcctgagcacaagccatgggggatgagagaggcagatggnccagagcacac

SEQ ID NO: 333139 - DNA, 311 bp, Homo Sapiens
caaatgactactgagagacttcaaggaaattaaccttataatttccttaattcttcattttactgttagtcatggtaacatttgctaatttgtacatgtacagatgcttcatgttgatcccatcttagcaaagcttcagatttccgcatactacagaaccatctatgccctttacttccaaaatctgccctccctcaaaattagttgcctaattaaataaattaagcaaaatgagaggcccggtgtagtggtgtgtacctgtagtcccagctactcagggaagacagctgcaggtttatcacttgagtcca

SEQ ID NO: 333140 - DNA, 461 bp, Homo Sapiens
  misc_feature (90)..(90): n is a, c, g, or t
  misc_feature (111)..(111): n is a, c, g, or t
  misc_feature (159)..(159): n is a, c, g, or t
ccaaccaaactagccacagaccagctgctgagcaattgaaatgaagctggcaacaactaagggaactgaagttcttattttaattcaacnttcaaaatggtcaccatgtcnactaggtgacctaccacactggaacagtgcaggtgtagacggagttcnagatcagactcctgaaacttaatggctcctaaccttaggcaaagttacgttaacatctaagcctcaatccctcccaagtagaatgggtgcacctaaatcatagggttgtcctgttgtcctgagcaacattatgtaaagcacttagcccagagcctagcacatagttatctagagttgggaacgtcactcctggtgtgcatgtccagagcctacccgggagaagggcctaacctatgactttagaaccctcagttgcaggtgtgcatgttccagccaacactccactctgagtgcaggctcat

SEQ ID NO: 333141 - DNA, 387 bp, Homo Sapiens
  misc_feature (47)..(47): n is a, c, g, or t
ggagtgtaaataaaagttcccataaaccagtatacatatgcttatgngccaataatctttaaaaagacaaaaaaagctgcatggatcctaaatgactatgtaaatagatccacttccaggtcaaaaatattgtaagcacaagtccttaaattccttaatagcaaggattagaatgaaagaagaagctgagcagtagcaatgcctgggaggaagtactgtgtattgaatattattccctaaaaggaatagaggaggggagaaaaagcacaattctgattgctcttttcacatttcagtatctcagaacttcatcgaaaataggaaaagctaatccagaaactctcatctgctcattatcattgctgaagggtgttttaggaatgacag

SEQ ID NO: 333142 - DNA, 533 bp, Homo Sapiens
cttaatgtgaaaaatcaagggcttactgacataggaacaacagaaatgctcctggaacttcaagttgctgaattataagtttattttttatcaataaatatttttatacttacattgagtgatgtgtttaacaacaaattgtgacagagctgagtgctcctatcttacagggtcaatgaactacttattaagccttactggtagcactgaatttagcagttctgagaacatgtgaaactatgttaaaactgaaggcactatatatttttacataaaagcttgaacatacagatgaattataacctatgtgaagaaatcttagatataaaactaacttttcaaagatacaaaagaaattaaacaggtttcctgaaaattttagttcttggtctgttcacctctgtggggaaaattcttagttccagtgataactgttctagttactacttttaagtatgtaaatactaggaaggtagtactagtgacatcatcacgtgtattgttatcttgggggccaatgtgtgggtgccccg

SEQ ID NO: 333143 - DNA, 414 bp, Homo Sapiens
  misc_feature (369)..(369): n is a, c, g, or t
attcggcacagggaatctttaatgttcatcccaaaccctaaaggtagacattacccccattttatggaaaaggacactgaggctcagaaaggtgctgtgacccggccaaggcccccttgctagtgagtgcaaagccaggactcgaactgtcccccagcttctgtctcctcctgggccaggcttcccctgagctcctccctgcccccagccctggcctgcagctgcaagggttattttcatctctcctgtcattccagcaaaaccactgggccagtgagtcagtcttgtggttaagggaggaagggtactgttggggagcccgcaatgggaaggacgtttttttcagcgggtgggcccccgggcccttgncagttacccctggcaccgaggagaagagccatgtttcctttaagg

SEQ ID NO: 333144 - DNA, 436 bp, Homo Sapiens
  misc_feature (421)..(421): n is a, c, g, or t
aacattaatctcaatgcgctgggattacaggtgtgagccaccgcgcctggccgacatttaacaatcttttgatttacatttttatagccactctatcaagatttgactcatgctgagtgtgggtcctgggaacctgcatgaccagcagtctgatgggagcacccatgaccataatggctacactctagtcatgaattaacatttcattaaacccaaacgtctgcttcaattcttcctccagtgtgatgtacagtttccttgcagtgcccaagggctctaggagctcatcccacccaaaccaaaggaatgctgggtcaagtgggggagggagtccctgttcttcagctgtaggaggggtgttgggggagcacttccgaggttcccgttatctcagggacatcttagggacagtctagggggnaaaccacacttcctt

SEQ ID NO: 333145 - DNA, 438 bp, Homo Sapiens
ggatatctacccttttcttttgaatcaaaacacggggttttactggaggagggaagtttcagaaacaacctagtctaacacaaaattaagctcctaaatagttatcccatttctgtctactacaaaactaattgcttacaggaagtagaagtacacatatctaatatttatatcctgtttgagtagtggtttctaattttagatttcctaacccctttttacattatctttttgcattgaaattatactgaaacattccatattattatgaatgcaagctgaattaaatagaccaagattctcggtttctcccttcatgttgtcatctactagagaatgaacagcttaaaataagtgcatcagttcctcatccaaagggaagctgaatattccaattcaagatcactttgcgtgcttactggaaataccatttttgaa

SEQ ID NO: 333146 - DNA, 334 bp, Homo Sapiens
  misc_feature (322)..(322): n is a, c, g, or t
ccctcattccagaggtccagcaaccctcaaagactgaagatagttagccccccaaaggatgagaaagaatcaatacaaaagcactggaaaactcaaaaagtcagagttcctcttctctaaatgactgcaacacccctccagcaagggcacagaacccaggctgaggtggagatggctgaattgacagaagtcggcttcagaaggtggataacaacaaactttggtgagctaaaggagcatgttgtaacccaatgcaaagaagctaagaatcatgatcaaacaatacaggagctgatagccacaacagccagtttagagaggnactgtgccgaat

SEQ ID NO: 333147 - DNA, 422 bp, Homo Sapiens
  misc_feature (22)..(22): n is a, c, g, or t
  misc_feature (68)..(68): n is a, c, g, or t
tgtgttgtagttcctccgagangtgaaatacccaaatccctaagggaatttaaatgttttccctttgnaaaaggaaaactaaaaaaattccccgtaaacaagtcccctcccccatcagcttggtctttcccacaaccctactcttgcttcccttagtgcccagacaacttgcatcatgttacaaaattggggtgggccacttacatcatacaaggagcaaatccttttaacttctctcctgcaaaaatctaaacaggaatatattgatgcagatggttctgctacattttatttaatatgatgtaacacttggtaatctagtaaactgtgatgccgggcaattaatcaaagggaggaagagacaaaggtccctatcaatgcactttttgttggtgacacactggaaaccttctgtgccgaat

SEQ ID NO: 333148 - DNA, 172 bp, Homo Sapiens
caggccctgaggaaaaaaaaggtggttggctctgcagaagccttttgtcaggttgcaaaattcctaacagactcctaaagaggtaaaaaggagcaatgacatggaaggagggagtacaaagtgagtcagctagaataaagctggttgcttgggaaacatttttcttccagtc

SEQ ID NO: 333149 - DNA, 473 bp, Homo Sapiens
  misc_feature (387)..(387): n is a, c, g, or t
  misc_feature (414)..(414): n is a, c, g, or t
  misc_feature (442)..(442): n is a, c, g, or t
  misc_feature (447)..(447): n is a, c, g, or t
  misc_feature (454)..(454): n is a, c, g, or t
atgagccactgtgcccagtcaagttggctttttaaaaataactttaaatttctgtggtttcaaagagccagagaccataaaccatcccacagttagtttctcactcattagctatagacagatccttctgcctcttgggcttggtgtttctctattccttacccgaagattatttaaaaacgaacacatgaacccttctgcgaacaggaaggaatcagtgtgtagactaaacttacatttgccacctgctttcatgttcaactaaacaacttaggaactcaaagaaccacctcctaaagtaccaaaaggaaatatcagagcaatctcacacttttaccattattttcagacttttccttatactcaaggaaaaggaatataccagancaattgggacatacaggaaaaaattgnctaaccagggtcccttttttaatttccnggtcngtagggngactcacttttttttcagg

SEQ ID NO: 333150 - DNA, 328 bp, Homo Sapiens
ttggtctgttgtataaaagatatttacttcaattatcacacctagggtgctagtgaataataatacatggtgtgagtctcatacagtgatattgcttctccgtattatatagggaccgttgtacagtgctgagaacaaacatcgtatggctaaccaaagacagagggacaacaccaaggggccgacgggtgcctcccccacccccacgccagccagggtcaactttgactcttaatgtaggaaaaacaaatagcaaggaaataaaatgttaccagagagatgtcacacagcaacacaccagagggcatctcaaagcgattttgttcca

SEQ ID NO: 333151 - DNA, 758 bp, Homo Sapiens
cagatccaattccccaccacacccctttacctttgctcattttctttgaagttctctgaagaccacgtgctcctgaattatggttttgtcatcatcacttgaaggttgctgatttagggtgaagagtggaagagcagagcaaaggtgtgggagaagagaaagggaagaggagcaaggagcaagatggagacttgtttcatcacttttctgtcgtatttccggccaaagtattaatcacactttgctttcccggctcactgggcagtcactcagtatacagacccccagggttcccagagaaatgtcattctcctcaaaatgtaatagccttcagccccagacaaaagcctgagtcagacaaatgataggctggtgagagagacttcgctggctctcagagcagacttggagcaaaggaggaggcagaaatgttacctggcaggcaagctcatgagtttttcccctttctctaggagtgggtcaggtcacaggccctagtcaatgtgttaggttgcacaaagtagactttcaaaggccactattggcatcacaaatgccctgacatgctgtttgtcattctgcattgatgcacagccaactgcccctgtctatttcgatcagtaaatctgagaggacaccctttacagcatatgcaggagtcctctccaactttctttgaggttgaaaatagaagttgaccaacacagagtccccctactcaagggactcaaggtcaagaggaagaggtcaagacgaga

SEQ ID NO: 333152 - DNA, 482 bp, Homo Sapiens
  misc_feature (58)..(58): n is a, c, g, or t
  misc_feature (452)..(452): n is a, c, g, or t
  misc_feature (468)..(468): n is a, c, g, or t
aaattcatgaacatgcatccccctcttggagccctcagtgtaacatctgtgcagacanattcccctcctatagtcctcagtgtaacaactctgcagatgtgtcctttcctggagccctcagtgtaacatctctgcagatgtgtccccttctggagccctcagtgtaacatctctgcagatgtgtccttttctggagctctcagtgtaacatctctgcagatgtgtccttttctggagccctcagtgtaacatctgtgcggatgtgtcccctcctggagctctcagtgtaacatttgtgtagatgtgttcccctgctgtaggcttcagtgtaatattcatgcacatgcatccccctcttggagccctcagtgtaacatctgtgcagacacattcccctcctattagtccttcagtgtaacaactctggcagatgtgttcctttcctggagccntcagtgttaacatcgntggcagatgtgggc

SEQ ID NO: 333153 - DNA, 598 bp, Homo Sapiens
  misc_feature (72)..(73): n is a, c, g, or t
  misc_feature (144)..(183): n is a, c, g, or t
  misc_feature (252)..(252): n is a, c, g, or t
agcgatgacctcctgggctcaagcggtcctcccacacctcagcctcctaagtagctggagtcacgcttggcnnaccacacccagctaatttttttcttattttctgtagagacagtgtctcaccatgttccccaggctggtctnnnnnnnnnnnnnnnnnnnnnnnnnnnnnnnnnnnnnnnnggggtgcttggatggaaattcagcttcgtgctcagaagagaaagactgaggcagggccctgagggctgngcttaaaatgtcaataggcaaaaagcagaggtgaaacagtaaccagaaaacttccctcaaacacataaatggggaatatacagcaccctagggatcggggggagtgaacactgcaagttaacaccaaggttttgtgcctgaggactgtcagtgatggcagcattaacaaaagtgaaagactggaggaaggaaaataatgtaattttatatatactgagtttgaggtgacagcaagacagggtttgggcattaacctcaagctctgaaaaaagttcacagccagagagatgtttgagaaacagctgaaaagggaagaatgaattccattatcccaacttcaatcaat

SEQ ID NO: 333154 - DNA, 168 bp, Homo Sapiens
tgcatcctcataggttaggtctcacaagatttggttttccattctagagttacttcacttaaaataatggcctccagctgcatccaagttgctgcaaaagacattatttcattcctttttatggctgagtagtattccatggtgtatatatgccacattttctttatc

SEQ ID NO: 333155 - DNA, 343 bp, Homo Sapiens
  misc_feature (25)..(25): n is a, c, g, or t
  misc_feature (99)..(99): n is a, c, g, or t
ccctccagccatattatgtaaaaangaaaaaagccagtgaaaaaccctgtttgggtcctcccccagtggcaaggataagttggaacaacctccaagaancctgaagagaaagtttgttcccccaatttacaagtattttggacatatagataaacaaaagcaaaacccagttaaaccttaaaagatcatctgaataagatcctgacaattataattttacatccatgtgaatttcaagcaattgttaatggggaccagcagggctgcattaagaaaaccacttttcactgatctctcccccacatatttttaatttgtcttgctttgtttattttggttatgc

SEQ ID NO: 333156 - DNA, 376 bp, Homo Sapiens
ttgtttgaacgtatgctttcatttctttaggatctatacctggaaatacatatacctaggaataactgctcagtcacatggtaattctatgtttattattttgagatactatcagactgtttttctagtggctgtaacattttacattcccaccagcaatgtctgaggaatagataattgaagctagaccacagaagggagactattaactagctgtctgttaggggaatggctaaactagctctgcagaatgacagcttgtgttactgacaacaggggatgaccaatgcttcacacccaagttttagaaaggagagattatcattgttggggcattttcctccttttctccccacttgcctaggcctggtccagg

SEQ ID NO: 333157 - DNA, 469 bp, Homo Sapiens
  misc_feature (315)..(315): n is a, c, g, or t
  misc_feature (318)..(318): n is a, c, g, or t
  misc_feature (337)..(337): n is a, c, g, or t
  misc_feature (419)..(419): n is a, c, g, or t
ccaatcagatgtctggtcaagattgttttcaggtgagattttactttaggaaaatctggttttggtatctttttcagtgatggcgaaccgacactaggaaacttcttccctcgaggcctgttaaaacccagcctctctaggagtgagctgttgccgcagaatggggctgctggctcctgccctgcttcctgtgatcgagccggccctgagggactctgtgggagatgcctgtaacccaccggaaatcagacgcatctgacatgaactcagacacgtcccccagctgcaggctccgagcctttcagcaggaggcgncangggaaggagtcgaagcagncagctcttcgctccagaagctttcactttgggatgatgagagcctgaagtacctcaccctggagggaaaaggatgttgttcngttttttgaagagacgttgattcctagacgaggatttgagggagccatgt

SEQ ID NO: 333158 - DNA, 436 bp, Homo Sapiens
  misc_feature (171)..(171): n is a, c, g, or t
cccatgaggaaaaggatgtgctcctgttttttgaagagacgattgactccctagccgaggactttgaggagccagtgctgtgcgatggaggagtgtgctgcctctgctccccgtctctggaggagagcacctccagtccctccgagcctgaagatgtcatcgacttagtgncagccagcaccctggcgccggggaagccgagggccttccagaggggacccaggcagcagggcctgcacctgctgggaaggagcacaggaaacaagatgctgagactcctccacctccagaccccccggctcccgagacccttcttgcgccaccacccctgcctagcacccccgatccccccaggagggactgcgcgccccctccccgccggtggagcaccccagactcctgcgctctgttcccacgccgagccctatgcagtctc

SEQ ID NO: 333159 - DNA, 441 bp, Homo Sapiens
  misc_feature (180)..(180): n is a, c, g, or t
  misc_feature (366)..(366): n is a, c, g, or t
acatccactgcagttttatttaagaggtgcaaatctggaggccatgtccagaagtccagcgatggccggggacagactgcagagtgcccctctgcagagtgtccccagggcacaaggggagtgaggagggggctgagctggtgcagaggcttctccgacaatgtggggggctgcctgcanttgcagcctgggggacatggtgcatccccacccatccagggcctgctcttcactggctcctgctctacctgcccactcactcactcactgatcaacagatgctgggcagaaatggctgtgtccctgggccttgagaagcagatgcagctccctgtccccagaggcctacagtcatatgggtacctncacaggctcgctttggctgcgctacaggagggcggcgtcaggggaagctttcttaacgtgatataacctcctggg

SEQ ID NO: 333160 - DNA, 409 bp, Homo Sapiens
  misc_feature (185)..(222): n is a, c, g, or t
  misc_feature (246)..(291): n is a, c, g, or t
gatagtagttattcatttgtctctctttaatatctcaacacagtttagaaatcaaaagatgaggagcaatattaaatttggtattcaaaattaaggtttacattaatgctatcaaatgacttttattaatttaatacttatatgcttggtttttcatagatcaacttccctcttattattttaannnnnnnnnnnnnnnnnnnnnnnnnnnnnnnnnnnnnntgtttctttggttggttggttggnnnnnnnnnnnnnnnnnnnnnnnnnnnnnnnnnnnnnnnnnnnnnnctggagtgcagggcttacagtaacttcgagctcccaggctcaagcaatcctctcaccttggcctcttgagtaggtgagaccacaagtgcacatcaccacacacagctaattgttaaaa

SEQ ID NO: 333161 - DNA, 428 bp, Homo Sapiens
ggtgagacggggtttcaccgtgttagccagaagctctgcatatctcttaaggcaacaggtgctatcttccaggtctttctgacagtccgtatgcccttccctcaaagcccttcaggccaactcatccacagattactgccctcagtgtcttaaggcataactaacttctgtagagcccttatcagtgtgggtcacatcattttgtttgacacattatgactgtatggtgtgcataatattcggactccagattcgttgattcattaatttgttcagggatcctacagccagacagtaggggagttgggacttagcccactaggaagaatcaacggcaggatggggaatctcagagacctggctctcagggtttcagctggtgcctcacaaataggaggcttccagggaatgtgattccactttccctt

SEQ ID NO: 333162 - DNA, 361 bp, Homo Sapiens
  misc_feature (327)..(327): n is a, c, g, or t
gcaagatgtctaccgctacctgaattctttttagaaagccaaagcaagcacattgccacatgtgcacaaaaattctgtaatatcaaaagctagacctatgatattgaaaattctatttcctcaggtatcttcctatattttccccaaaattcataaaatgtaagtgtcctcaactgacaaagatggttattagttagttattaagtttatttgggcattttacagtggaatctttaacaaggaaataactgcatcagggtgagggaagcccgggggcagaggctgggactttccccgctcagcatggcccgtattcggtaaccttcnggggacccttaaatacatcttatccccaggttcc

SEQ ID NO: 333163 - DNA, 536 bp, Homo Sapiens
tttcacagtaataatagctaacatttattgagtgcttacattttgctggaacctcaccatactgctaactcatgttaagcttgaagtcaacgaatctattgctctctctggtcgcccctgaccatctaccttgggctataaaagagttgtttgtccagaagccccagagggatccaagtaactggctgcccaggctagctacaattcagaggttcatacaggtccagtctgtcctgagcctctatctaaagtccttgcaccctcagattcagtgtaggatcaaggccaagagtactagaatgtacatgtgctggtgctgaaggcaagcacctggaaatattcatctcattcatcatctgccaaaggaagattccagagtcttgcacatatttgcaaggtcattttttcaattcttggagaatgggttaaaaaaatgacccaagaacttgatgtagttcttctgaattctgaagtcttgttcaattcatgtggcttttatgaaggagaagtactcacttttctcatccttctcatct

SEQ ID NO: 333164 - DNA, 754 bp, Homo Sapiens
  misc_feature (532)..(532): n is a, c, g, or t
taggaagaaatgatgagaatggtagcaagaacagtatagggtcttggaagggagcagagggtgggaagagcacaggccctggaagggaaagactgggttgtaggaatctactctgccatctaccagctgagtgtccctgaactgccctaagtctcatctgtcaaggggaagcctgcttgccctcccttcccaccttcacaaagaaggagaatttatatatgggcactttggaaacttcagaaattacatacatgaaacagaaattacataaatgatcatgaaagccatcagaaactctatccagcaggctcgtgggtgacaatgggaggaaccatagtagagggtggagagtgcatctgagctcattcatggccatcaaaggggcagcgctttactcaggcagggtgtgtgtgacatacttgccgaaagctttccccgagccccagaagctacctggtcacctttaaaggcgttgaggaggggcggctattgtctcagcatgttttaaaaccgcttttagctttctgggaancctaaaccctctctttgtaaaagtgccacatacatagatctcttctttttgatcaatggcaccgcacaactgacggcattaccgagagcaatatttgtaattacaaatggcacattctggaaatactcttgtaatcttatgtatgggtggtttgcaaaccaactgtaaacattttagaatctacatcctaaggtatagggactatcgtaacttaatttgtag

SEQ ID NO: 333165 - DNA, 462 bp, Homo Sapiens
ttgggagtccacggtgtttattgggccaccccacgcatggccgtggcccagctgggcacaaccctcaccctggtctgtcatgcctgtttttcctacactcagcggcaaagctgcaggagcagggctgagcctggaatagcccttcctagtcccctcttctcagcccactacccatccatcagtcaccagccgtcacctcccctcccgtgctcccaggctgggggagggagagcccagtggtggatccagcctgaagtcctgccctctctcatctgtctggaaaggaggtagcacctttttcgggaaacgggttagggagtaaagactgcaccctacatggtcctggtggtgggggggataacagtaaaggaatttgcaacgttttaatgccatgcctgatttttgggtcaggagtggtgacttgggtaaccacttggcgggggggcctgggattccctgctg

SEQ ID NO: 333166 - DNA, 439 bp, Homo Sapiens
  misc_feature (311)..(311): n is a, c, g, or t
  misc_feature (361)..(361): n is a, c, g, or t
  misc_feature (370)..(370): n is a, c, g, or t
  misc_feature (382)..(382): n is a, c, g, or t
  misc_feature (407)..(407): n is a, c, g, or t
  misc_feature (413)..(413): n is a, c, g, or t
  misc_feature (420)..(420): n is a, c, g, or t
atgtgtccactctcttctgccccccgccatatttggggaggatggacaactacaatcggtaagaaactgcagccggcagcctcagtccccagcagagcctgtgtctcaccccctcacaggacagagctgtatctgcatagagctggtctcactgtggcgcaggctccggggggagtgcctgtgctgtcaggaagagggggtgctggtttgagggccaccactgcagttctgctaggtctgcttcctgcccagggaaggtgcctgcacatgagaggagagaaatacacgtcttgattaagatttcatggaantaataattattaggcaaagaacagttttggtggtctttttctctttccantgatttttnttgtaattgacnttattaccttttatttacctttttntttttntttaccnttttaattaaattgatacc

SEQ ID NO: 333167 - DNA, 400 bp, Homo Sapiens
ggtttccaagactctgaaataccaggatttccacaaactcatcttgccctgactgggaatctttcggagattggatttcagagtattccccaacctgatcggatatcacctcctcaatggaagcttccctaataccctctgatgtttctaggaagcaggacacatgggcttgtgtcataagtcttgacctgattattcataggattgccttcaccaagtttaggcataccctgtctgagagtgatgctgggcaaattagtgaataagaggactgtgggaatttatttgattgctaatcttgtgtcagggacatgggttattttttaaaaaagaagtgtcctcttttgatcttaactgtttgatatctcagcccttgagtgagggcgttatatggcaaggg

SEQ ID NO: 333168 - DNA, 366 bp, Homo Sapiens
  misc_feature (354)..(354): n is a, c, g, or t
tttcctataaaacaaatctttcatttattccaacctgaactaatccaaaaaatgaagaattatgcattggctaaattacttcttcaaaggaatgcctaattttttcttccttagcaagtgacaggattgcatttaagtgatatcaatggtatcatgtccaactcagtcccaaaatgtttttgtatatccctacatacttacgctgtactcctttacatttatggtataatgccatcatttgggagtatgaatgggggaaggtatttgaggaaaaatgagttaggctcgttctctaaatctatgggaggctctttaatactacctctggcaagggcccaaggtaaatggactttnaaattcccactt

SEQ ID NO: 333169 - DNA, 227 bp, Homo Sapiens
gcaaattcacctttgaaatgcaaaatcatcagtacagagctcctaccccagcatctcctctgtggggctctcacactctgggctactatcctcctgccctgaccactcaagggctaggtaccagacatctagggacagccactgctccaaatgtgccctggagcagaccaaatgcgaccccagagcccacttgaaattattcaaaccacgccgaccctatgcagtct

SEQ ID NO: 333170 - DNA, 431 bp, Homo Sapiens
  misc_feature (406)..(406): n is a, c, g, or t
ttttttgccaaacatgacaaatttatttgaaagtgggcattgcaatgtagaatatggtgtcatagtaaactataggtgtattcagggaggtaaaggaagataaggggtttaaaaggaaaaacgaggaggattacgtaagttgttttgaaacaattatccttggctacaaagatcagtaacaaaggggatggccagtccaaggttggacaggcagttgctgcgcaaatgtccttgaagcatttttttgtgtagttttgtggcctttgtgcaaggttgtggttttggcagtcttttgtgctaattctttatatcaggcaattattagtgagaactttcccatcacggctttccctgactcccattctctgacagctttcacaatctaggagacagattcccggagggnagggagtacccaaatagcttaagat

SEQ ID NO: 333171 - DNA, 360 bp, Homo Sapiens
  misc_feature (280)..(280): n is a, c, g, or t
  misc_feature (292)..(292): n is a, c, g, or t
ttgctagtgtacattttttattttgcaaattatgcactgtcataaatatttcagtgatcatcctcatacatatttctgtcttcattacaagttagacccttaaggtgttaacaatagtaatattattaatggcacctactatgtgccaggcactcttttatgtgattcatacatatcatctcaatccacatgacaacgctttgaggtaggatactaggtaggtaacctcattatacagttgagggaaattgagccacagggttattaggcaatgttaggngccccagtttangtgactattctactccctttaatggaaaacccattcttgaagggggattgtggatttgggggccaggg

SEQ ID NO: 333172 - DNA, 415 bp, Homo Sapiens
  misc_feature (280)..(280): n is a, c, g, or t
  misc_feature (296)..(296): n is a, c, g, or t
taaaacagtgtctccaattttaataaatttttgcaatccatctggagtgtgtagtgtttacttaaaaaaggacagtgcttttcatctgttcattagctgtaagcataaatcacattcaaaagctattataactccatggtatttgcttcattaacactgcagccagttaaaattttatgggtattttacaaggtgtcttatgcattaaagtgcaatatttcctaattctccatatgaggcaaattgtcagggtttcatagggcccctgtgctaattgggntttgaggcttaaaggnattgagggaggctacttggggaggaaaggtcatggttgaggctgagggctgggggaaaataaggttatagggaaaatacctatagggaaataccccaactaggtggaagggggccatta

SEQ ID NO: 333173 - DNA, 144 bp, Homo Sapiens
tttttttagatgagttctcaccatgttgtccaggctggcgtcttaactcctgggctcaagctgtcctcccgcctcagcctcctaaagtgctaggattacaggcttgagcactgcgcctggccaggaaaatcttaagtgttagtg

SEQ ID NO: 333174 - DNA, 204 bp, Homo Sapiens
cccccgggcctggggaaggggggaagggaactttccttcctaaactcaaaagattttcacaggctacaaaatctggattcttgttagcaggattgagtggtaaaatggctgttgggtaatcccacccagtatcagtcacacgaagaaaacagctcggatcaataaaaccaaaggtggtagaggcccaggcatggtggctctcac

SEQ ID NO: 333175 - DNA, 698 bp, Homo Sapiens
  misc_feature (471)..(471): n is a, c, g, or t
ttaccattctctgaagtggtgaattttaatattgtataaaaaatccaacttgttccacaagtacatatgtcctatgattttatgcatacatccatatacatatatcaaggtaaagtccagtacaaaaaaacagcatttcctatggccagtgttctacagaagtaagactgtgcaaactttatcgtatagtcaaatgagattgcacactaaggcaggatgaggcagaagcaagttgtgtccacagtatattacaaaataccttgcatagcttattcattctcacctggtaaattcatcttagaattctgaaggatttttttcctagataaatttatacaagttagtgtatacttcttgtctttgttctgtggcaaaccaggtttctcagtactgattgttttacttcacaacattattgatttaacaatagcctgagctttggggctctgcactgcgttcattgtaatccgngatacaatgactacaaatgtgtcgcgaattctaatcttcatctgtatctcaagcgattttccagggctttcattctctgtgtcatttcttctaagcgctgtgttaattttcttacttctccgtttgcaagggtcttggaacattataaggttttcacatttgcatctgatcgtgttttctttccaaagggcttcctgaaggttttgttgaatggaaagcttttgtgt

SEQ ID NO: 333176 - DNA, 444 bp, Homo Sapiens
tttcacatttttaaaggggaatttatttgataaacataaaaacacaacagaacacttcataggccattgtatacaacaaaataggcattaataacatacatacatttgcaaacataagcactcagggtatactaacaacagttgcaagaggtataaaaattatgagcagacaaacccatactcataaagaagtatgtcaaaaagcaaaatgtataaatatatatcactgtggttggcaattgtgtgcacccagctttataacatctgaaattcactcatctgaaatgccatgacagacaagctaagtcttttgacaagattgatcaaaaaccatgataggtcaccactacatacgcagtctcccaaacagccaagatcttaagaaattttatattttacaaatggcagatggtataaaacgaacatctcttcatttatctcttc

SEQ ID NO: 333177 - DNA, 332 bp, Homo Sapiens
  misc_feature (141)..(150): n is a, c, g, or t
tttttaaaaagagagatgaagaatatatacccagaagaagccaagctttggcaagaaaacctttcgagtgtcatttaccatcacttgaaaaatatctaggaaattcctaggaaacaaagcttagggtgggatgaaaatggnnnnnnnnnnttaaagagtttaaaattgtagtataacagcaaatactatgctcgtatagaactctgtgagtctgtttattacatttataacattggctttgcagcctctagtggaaagtgagagagtcaaactatttacatgtcagctgtgcagttaacatattataatgttcccagttctctctctctcaa

SEQ ID NO: 333178 - DNA, 896 bp, Homo Sapiens
caaaatcagcagctagtatttgcaaatggtgtttgtatttactcttgaaatacatggttttgtgctggagatttggagtaaggaaacttaggcactatagtctacgccaggtacgtggggtgcctttctacactcagactcactcaccacaagtagttctaaatacctgtcttttgccccctttcttctgccttctgaattgtttgatctcagaaaaatctgatattgctggggatgaatatacttatgcatgttaagtaaccagggtttgtagttggtgcatcacggttcactttgtggttgattgcattagtgtgcctagcttgaccacccaccactcatgagcagcttgaaagaaatggactatataaagtctttgtcatctttagaacttgaatagcaattgtctggaatttaaaggcaatgagtgcagagacgcagttgttccctgaaatgtggcccactgggagggctcctttgtcagagtcagctgtctcctcaaaagctggaggaagcacctgaccatcccccccatcccaaaaaaccccatatacatcatactatgacactaaattgatatcctcctttacttttgatgggggccatgagctggggctccaccaccataaatactgaaaattgaccagagtttgggaatgtgtgtatgtttggggaaagggagagagacaggaagtttagaaggacttttcttgaaatcagttggtaagttgagtcctgttggaaagagttgatcattttgattattcctgtatggcttcttgggcctgagagccaaaagatgaggggaaggagaaaagtgattactgaacaaatttattcctgaaattatattaagaaccactattggtttgctttctctctgttcttctccccag

SEQ ID NO: 333179 - DNA, 504 bp, Homo Sapiens
cccagtggcagcccttttaagagtgtgactctggaagatggcaagaccttcattcctgggcagggaaacaatgcttacgtgttccccggggtggcactgggagtcattcgccggcgggatccggcacatcccagatgagatcttcctcctgacagcagagcaaattgcccaggaagtctctgagcagcatctgtcccaggggagactctacccaccactcagcaccatccgagacgtgtctttgagaattgccatcaaagttctcgactacgcgtacaaacacaacctggcttcctactacccagagcctaaggacaaggaggcttttgtaagatccctggtctacactccagactatgactcctttacactggacagctacacttggcccaaggaagccatgaatgttcagacggtctgaggcagtctcagaggctagtatggggctagatgaagcccagagtaacacccacaatataaatgggttccaaaatggcccaagtg

SEQ ID NO: 333180 - DNA, 420 bp, Homo Sapiens
  misc_feature (13)..(13): n is a, c, g, or t
  misc_feature (32)..(32): n is a, c, g, or t
  misc_feature (43)..(43): n is a, c, g, or t
  misc_feature (65)..(65): n is a, c, g, or t
  misc_feature (82)..(82): n is a, c, g, or t
  misc_feature (89)..(89): n is a, c, g, or t
acccacggggaancaaaaactcaatttaaaanaaatacacttnggcttgtccccttggttggaangggtttttccttcaaantgggggnaaaaccccacttgaactgggctgccccggaatccctcggaaattagccaggaggaaaagactaaagtctgctggtcccatggagactacaaccaagccctcccctaggggctcagtccccagggagatcagagttctgtccttgaacccctggctggagttgttggagttcctgcagggaggccccactcaatgaggagggaagggttacggtcaggcctaaagaggcactctggccgcaatctgccaaagccagtgtgttgggctgtggggaatacctctagggacccagccgtctgcctctgtggctctagcaggggaagccatggtct

SEQ ID NO: 333181 - DNA, 356 bp, Homo Sapiens
  misc_feature (46)..(46): n is a, c, g, or t
tttggtagaaaacccacatggggattactgctgggcctttaagtcnctaggggcccccaaaggtgacacacggctacagaacccaaaaagaactatccctaccctaaaatgcaaatagtgccttcccattgagaaaaatgagtcagtctccctgttcaactataaatacagtcatccatcccactacatatgttcaattcaccaaaaatattattgtgtgcttatgactgaaacctcaaatattaataagatatagacctaccttgacagagctgtggcctagtagaggatacagcctgactcctacactttataaccgaaaagactgaaggtgcttgagtgacttgcccaaagtc

SEQ ID NO: 333182 - DNA, 412 bp, Homo Sapiens
  misc_feature (381)..(381): n is a, c, g, or t
  misc_feature (387)..(387): n is a, c, g, or t
  misc_feature (394)..(394): n is a, c, g, or t
atcgggatggcatatttgatttttagtattagatttgatatttaatattttaaaaattaggtggcaaaggagaaactaaaaaagtaggaaaggggttcctgtgccttcagtgtgttaaaaagccagctaaaggggagtaaggggaagcaatggtgagatgccaagttgttcaccctgatatgacttgggcagggtctgaggtatcaaccccagacaacccagggcctgggacttattgcttctgttgggaaattgacagttcacactggcctttctcaggaatgttgggcactgccacttgacttaattcttgtggacccgggggcacctttttttaggcctttcatccagcctgttttccccagctgttaaaatgctggnaagtgnaaccctnggcttttaattggccttt

SEQ ID NO: 333183 - DNA, 188 bp, Homo Sapiens
tctaatatattttactgacaagcccttgagagctgctttgctacttgcatgcaggcctctgtgtgaccaggcacacagactacatgtgctccatcttgtctctccgctgctccaggggccttgctcaaaaaccccctatattactggaaactgctggttttacctatgtgcttcttcctaaggcatgc

SEQ ID NO: 333184 - DNA, 712 bp, Homo Sapiens
ttggctgtaacactttcggtttattggctgcggtgccctggtgtggctgaccggccactgggctgtagagaagccctgtcttgtttctccatcccctccccatcggctccccacggtggctcctgggggacatgcacagacacttgtgccccaggaaactgggttggtggaatgggggctcaaaataaaaccaaatcgaggctggagcaggggtgggaaatgaacattacaatgaaaataatgcccccggtgatacacaatacagcgtgtagagacacagggatggcgatggggtcctgctgacattccctcttgccaccaggcagggccccctaagagaggaatgatgacttcgaaatgtcttgtggaagctctgctccctggccccagccccttgctggtgggggtttgtggggaagtggcttaatgccggaagtccagttcccccacctcctaatggaacagtctcaacccaggccattggccctgacaggtcctggggcctgggggagagggatggtgcgttgccttccgcccacccccactatccagtctaggcgaccaagggtagcaggctccagttcccgtccctgctcaggcagtggttacttcctgctgtggagtgttgtctggaacttggtggtggtgtatcgcaggtggaaaccttttttggtgatggtgtcatccgagtggaacttcaccaggacagaat

SEQ ID NO: 333185 - DNA, 529 bp, Homo Sapiens
  misc_feature (307)..(307): n is a, c, g, or t
  misc_feature (346)..(346): n is a, c, g, or t
  misc_feature (362)..(362): n is a, c, g, or t
  misc_feature (368)..(368): n is a, c, g, or t
  misc_feature (400)..(400): n is a, c, g, or t
cagatactaaaggtttttgcaatatcagtttgtttgaggacttgcctctgcaagagcctcagtcacctcaaaagctcaacccaggttttgatctggctaagggaaatgctggtaaagtaaacctgcccaaggagctgcctgcagatgctgtgaacctaacaatacctgcctctctgggacctgtcccccctgttgggtcttctgggcagctgccccctcctgctacccaaaatacctttggggaataggcactcttgcccgtggggcctggggggaatcttttgccccacagggttaaggtgttctnggggcagcagcagcaaggaacccccatttgccatggggnactgtgaggctggggncagctncccctgccccccatccctcatgtgttcttagntgggcactgggctttgcattcctggcctcatttccatcatggcattcaagataattgaattttaaagtgtattttttcgtattttgggaggatgttttaaggaggcattttaaatgtcaagttacaatt

SEQ ID NO: 333186 - DNA, 499 bp, Homo Sapiens
aatgaacagaggccagagaattgcagaaacccacctgtaatatgcccacaggcgtcactcaaggagtctgcatagccaggaacatcaagttttggtgttactttcttgtctacaggccaaaatgcgcacagttgtttttcggtgtgttcctgtataacggcttgaaaggaaaggagaagatgctgtgtctctgcgcagttcgtgtgccaaggaaatgtgttttggcctctgaatatcttaagttgctaataaacgattcttgttggcaggttaatgggactataaatgctggagcccagcactcacacttaattatatttatgggcaaagtaaaaagaatcatgccttagactgattttggacctttgagacttttaccacatacagatggatgaaactacttactgatttaagatcttttgaattttagaaaaaacatatgaatcagatggaacaatctgaatgtgatatgctccatgatgctgtgtgttttggtagt

SEQ ID NO: 333187 - DNA, 564 bp, Homo Sapiens
  misc_feature (20)..(20): n is a, c, g, or t
ccctggcctacaatgccctncagcccggcggcaagtttgaagagtctggctgcagataggagctttccttatgtgtctctcctctgtgatgcccggcctcctgaaggcaagtgtgagacagagaaggcacttggctcaagtgtgctgaagcccgcggtggagagggtgccggcgtacatgggcagaccgatggaaatgagccaatctgacacagaccgaaatgcacccaggagagacgggctttcggcagatttccgtgagtccaccacttggaatctggataaattaagaaagaatatgatagaaacgctccatgtgtcatcgaggactacttcgcgtatgtctaaaaggaacagcactgaaatactgcattgctagactattatcagaaagcgacaatgcaatgagtgtcagagatcaagactagcaggaaaaattcttctctaagatgaaacaaatctttaaggaagagttccacaaggttctcgaaggtgttggaatgaggtcaaatcccatttatgtgtccgagtcttcaaactataagcatttacatattctgctatt

SEQ ID NO: 333188 - DNA, 569 bp, Homo Sapiens
tttttttaatgttcttacttggcaaaataaagaactggcaatcctatgctggccaccagcattctgaaggaaactttactacccagaaaaatcagaattctggtccagattgcctttctttgacttctcctgtattcaaatatacctattttggtatgtaaaaggcttaagacacttgaatttgaatgatggaatatatagattaaaaagcagttcttgtagcattattttaattcaaaaggcaagtgacaagtaatgacaggggcacacttaaagaaaatcagtttcactaataccataggataattatgtcactatcttcacagggctgtaacaaggaccaaattctaaaacgaggaaagggctccatcatgtctgacctttatgtgtgtgagccattagtattttcaacaaagcaaagtcaatctaaacctgaaagtaagctaaggaacagacagaaagatagttaaaaagaattcacttgcagcccttggccctgaccacttgctgagcagctgtgccacagcaggtaaatttctacctctctgagacttctcgtcctcatctgt

SEQ ID NO: 333189 - DNA, 429 bp, Homo Sapiens
ttatcctcccaagtcattgggattacaggcatgagcgactgtgcccaagcaacatttgagcaaatttctcctgactgtccctacgcttctgaaaatgcacttctttcccccagagtgctgaagttgcccaactgttaccaagctcccgctccaagctgacaagtggtacaagaccccagggtgatagaaataccaaggtgttcccacccaggcacctgcagaatccgagacgctctacgcctgacagtgctggctcaggctggaaaaggagggccactgggctgcgcatggtggcctcctcgctccctccagctcctatagtcatggctcctgaccagcaccggggttgacctgtgagatgtctgccttcgtgcccagcttacccctgtcttggtgaggtcctccagggcggtgcctcaattgtgtttg

SEQ ID NO: 333190 - DNA, 159 bp, Homo Sapiens
ggttttcattttctttttaattatcaagtggtaggagtctctcttacatgcttgttcagttaagcttttaaaaattaattccagttatgcttacttgcagccagagattagaacccgtacaatgtctgcttttttggaatgtattggtttggggtgggg

SEQ ID NO: 333191 - DNA, 337 bp, Homo Sapiens
  misc_feature (202)..(202): n is a, c, g, or t
  misc_feature (313)..(313): n is a, c, g, or t
taaatagaagcaattatttcttaagaacttctgatctactaccccaatgtaaaacctaagagttaacagctattcaatctgcacattaatacaatgtagttcttaagagttagatgacattatactgtttcttaatgcaaaaagccccagaataaggagatatctctgaataaaagtctggaatacattttataggaacagnacctgaaggaaaaatgacaatgtaaagggacccatggcaggaaaatgaggaaatttaaaggcatattcccaggtattaaaattttgtggggttgggggaggtggaatgtcncttggctggccttaggtattttcc

SEQ ID NO: 333192 - DNA, 392 bp, Homo Sapiens
ctcctggtatgtgccactgatgtttctttgcatgctttgtaattttctaattgaaaattgaagattttgaatatcataacctgggaatcagattctccctcctctccatggtttgctattattgctgttattttatttgttgtttattcacttttccgaattacttccataaaatctgtattctacggtcatgtgtagccactgaatgcttagttagcttagtggccaattaatatttgaatagaaatatccttcaacacttggaactaataaatcatccactcctagccaaggggctctgtgtccattgtgtgtgggggtgggaggataccttcaacactcaaccaggcagtttactactcagcctttgccttcacttcctgattatgcgt

SEQ ID NO: 333193 - DNA, 390 bp, Homo Sapiens
  misc_feature (18)..(18): n is a, c, g, or t
  misc_feature (58)..(58): n is a, c, g, or t
ccaagctccccaaaaatnaaggctccctgacccaagcaaccgggggttgaaccctgtngaagatgtcctgcccttccgtgccccaaccttaaccccctgtccttggtgaaggtccttccccaggcggtgccctcaaattgtgtttggttttcctaagcaccctagcagacatggccccatttgaacacacttggcaaatgttccctgaagtgaaaggacagacacacttctgaggaataaatgaagtgccacagctctgagagcctggctggacagggacacgtgtccacactgtccaatcacctggcaggctggaagggagggagtcacaacttggtggctgtattctaactgcaccccagcaagcaggtgtcctgaaagatggctgtg

SEQ ID NO: 333194 - DNA, 389 bp, Homo Sapiens
  misc_feature (19)..(19): n is a, c, g, or t
  misc_feature (29)..(29): n is a, c, g, or t
  misc_feature (88)..(88): n is a, c, g, or t
catagctttactggtgganccctcagacngaaaacccctcagagggagctctgttggtaagttcctatagaagcacctgatgcccttncccataagacaggatgtacagagaaagatcaaaatgggtgctgtttattctttttatttttaaggtctggcaagaatctcgcctcaaaggtgttttgctttataatatacaagcaaatttttagggaaagaagaaaagggcagttcactttactactaaattacatggcagagtgctcactattcagtccattaagtcatttaagaaaaggacttaacaggataaagaaaaaaatcttgcctttttgccatactaacagaatagattccatgtgttttgttttacttagattgaaattttc

SEQ ID NO: 333195 - DNA, 429 bp, Homo Sapiens
ccaggttttgttataccaaatcgtgctgccaagaatttacgtgcaagtgtttcctggtgctcatggttagagcttttccagggtagatcattaggaagtggaattgttggtttgaattgttacatagcttcaacttttccagattctgacgaattagtataaaggttgctgtgccaatttatacttatatgtctgagtgtcccagtttcctcattttctggccaattaatgcttggtgttatcagacttttttggcttatgccagtcggaaggctttgaaatagtcattatttgaattcaaaaaaaatttttttcctgggctgggtgcagtggctcatgggtgtactcccagtgctttgggaggccaagatgagaggattgaggacaggagttcaagactagcctggacaacatagtgagaccccatca

SEQ ID NO: 333196 - DNA, 417 bp, Homo Sapiens
  misc_feature (310)..(310): n is a, c, g, or t
  misc_feature (336)..(336): n is a, c, g, or t
  misc_feature (358)..(358): n is a, c, g, or t
  misc_feature (375)..(375): n is a, c, g, or t
  misc_feature (394)..(394): n is a, c, g, or t
gttcagactttattagataccttaaggctggccctggggaaaaccgtggctggcttcaccatcctcctaataggaagaggcagtgaggagaacagtagtctggggaaggtgggagccccaactgagggcctgcacccagcccctcagatccgcctcccctcccatgtcactccagctcttttgggatgatcacatggtgagaatctgctttgaagatatgaagggcttcatggaggcttccaaggcagactggtagtcctgcagcgggacctggggagcaggcaggggctttgagctaggcctcggcggnttgagatcgcacagtgtgaggatcanctccttgaactggtctggactntgatccttcttccactngggacaaccaaaagccttngaagttttgagatccttaaaaat

SEQ ID NO: 333197 - DNA, 783 bp, Homo Sapiens
  misc_feature (570)..(570): n is a, c, g, or t
  misc_feature (671)..(671): n is a, c, g, or t
  misc_feature (721)..(721): n is a, c, g, or t
  misc_feature (750)..(750): n is a, c, g, or t
  misc_feature (762)..(762): n is a, c, g, or t
ctaaacattcatcacctctggtcttggctgtcactatcatcttttccctggcttgatcaacagcttccaagagccccatcagctggacctaggggccctcaaatacctctccaggtagaacaagagttgataacctctctgctgttggttcctgcaggtctctcagccagggacactcccctgctatgatgtaagcccacatcctcctgttctgaccttcaccatcacctgaatcaattatttagcatgcagctgcatacagcactgtcttagtctgttttgtgttgttataaaggaatacctgaagctggatgattgatcagggaaaaggtttatttggctcacgattctgatgtctgagcatctgctgaggcctcaggctgcttctgctcatggtggaaggcagaagcgagttggcataggcagatatcacatggtgagagaggaagcaagacagtggggggaggtgccaggtgccaagctcttaaacaatcagctctcacaggaactattacagtgaggatgtactcactcgccagggaggacattaatctattcatgagggatccngtcctcatgacccaaacacctcccattaggccacacccccaacactggggatcaaatttcaacctgagggaggccagggcaggcaccatggctcatgcctngttaatccccaacactttcgggaaggcttgaagcggggaagatggctttnagcccccagcatttcaaggcttgcagttnagcttggagttncacccactgcattccagcctt

SEQ ID NO: 333198 - DNA, 235 bp, Homo Sapiens
tcttgtgtgaattgcctgctcatgttccagcaggaagccgggatggaggaggagccacccctgggggttccagggttgctgctgtgccctgtgcctgggaacagagtaggcgctccgctaatagctgtgaggcccaggcatatgccgggggttgccgtcaaaggcattgcaggtgctaacaggccggggcccgggcgctgaggtctccgacgtggggtggaggacagctcattcg

SEQ ID NO: 333199 - DNA, 504 bp, Homo Sapiens
  misc_feature (357)..(357): n is a, c, g, or t
  misc_feature (368)..(391): n is a, c, g, or t
cagaaattgaaccgtttattagcctaggtctgggtttcaggcattgcggaggcacgtctggggagctctatgaggggaaacaagcccctgactggctccttgccccccaaagacccgctcccccaggctttgcattcacaagaaattactctgaggcatgaggtttccttccccaaggtgagctgcaccccagctctccagtgggaggatgggccagcaattccaaaggggtctgggcaggaccagagctccccgactttggcagcttcaacacaaacatgagcagacaggacagcattcattctgggggaaatgtgacgaggagaggagggtcacagacatcacgcctatgtgcancacgcgcgcgnnnnnnnnnnnnnnnnnnnnnnnntaaatatacgtttgtaccgtaacatcccttccattatccacaggtttttgtgaagtccttctggggggttaggggagagtgtccccaggaaatgtccctagccactgccacct

SEQ ID NO: 333200 - DNA, 360 bp, Homo Sapiens
atgagatgctgcattttgactgaggcctcaggactcccgggtgaaaggtgggtatatacaaaagtgacattgcgtggtttgacaccttttgattccttcctgctttttctttattgcataattgatacattgcttgaatgctagattccccccatctacccccacatctcatttaacaaagaagtatagaaacatcctgggggagacagtgtgggagtgggacctggggagtctaggcatatgtgagttctagtccccgtttctgccacttcctagccttctgtgatgctggggctagctactttgacatctctctcctagcctctggttctgtaggaatggggggggaaaacaataggt

SEQ ID NO: 333201 - DNA, 609 bp, Homo Sapiens
  misc_feature (20)..(20): n is a, c, g, or t
  misc_feature (511)..(511): n is a, c, g, or t
  misc_feature (522)..(522): n is a, c, g, or t
  misc_feature (552)..(552): n is a, c, g, or t
  misc_feature (558)..(558): n is a, c, g, or t
  misc_feature (590)..(590): n is a, c, g, or t
atatgtaccagggacctagnatgtggagggagtgaggaggaaaggagcaacatatgcacctctggggaggccctaaggtctcctcagccaattcctagggaatttaattttaaaggacacagagagggtagtttttaacacaggttttacttttaagtcatgagggatgactttctaagccacagttccttctgatacggtcttaaaagagaagcaccatgaagtgataaacacatcagtccaggaagatttagagacagcctagtagaggaggattggaaacagtgtggctgtgtccctgagggtgctggtgctaaacccacggcacagtccatatcagtcaaagcttcattctccttgtgcccacactatgctgatctgccccagtgcaacagggagacgcatatggtcaagagaatgtgtctttcacgaatagattttctccttcgaccatggtgaggaagtccttgttaaagaagcatacatggaatatatgggatgtgttggggcntcagctgtgcntgtggccctcagccagggtgagttggaggnaagttnggagggctttcattgtttcacctccatgttgntttttccagagacataccc

SEQ ID NO: 333202 - DNA, 454 bp, Homo Sapiens
ttcttttttaattcatgttttaattgacaaatgaagccgtatatatttattgtgtacaacatgatgctttaaaatatgtatacatcgtggaacagcaacgtcgagctaatttaacacgcattacttcacatacttgtcatcttttgtggcgagaatgcttaaaatccactctcttagtattttttaagaatgcaatacattgttgtcaactgtggtcaccgtcatgcatagccaagctcccgacctcaccctcctgccagctcaggctgtgcatcctttcaccagcatcccccaccccggcccctggtcctggtaactaccactctatactctacgtatgagttcagctttttaagattccacagatgaatgagatcatacagtatttgctttctatgcctggcttattttagttaacacactgtcctccagatccatccgttgttgcaaatga

SEQ ID NO: 333203 - DNA, 448 bp, Homo Sapiens
  misc_feature (221)..(221): n is a, c, g, or t
  misc_feature (290)..(290): n is a, c, g, or t
  misc_feature (378)..(378): n is a, c, g, or t
  misc_feature (384)..(384): n is a, c, g, or t
  misc_feature (394)..(394): n is a, c, g, or t
  misc_feature (401)..(401): n is a, c, g, or t
  misc_feature (414)..(414): n is a, c, g, or t
  misc_feature (425)..(425): n is a, c, g, or t
  misc_feature (434)..(434): n is a, c, g, or t
ttttctggtgtgaatcctccccactcccacctcagcccaccccgcaacagtcaagctttgggtccaaaccaatctggcatctctaaaatggaagcactgtttggagacaaagtggccaggcactgctggccagagaaaagacaatgccccacacccacggcctgcccgcactgaaatgcctattcatctccatttttatcgacatctcttggcttccaggncctgtttgtgctttgtccttggtccttattgacctattggattcggaggggaagctcagccgcagaaantggggtattttaatccacaatgggaaaacatggggttcctctagcgccactggcagctcccagcatcttgaccctggaccttttcagnagcgtnttggccaaanactctanccaggggcaaagnacggaaagggncccaggggnacacacttggggct

SEQ ID NO: 333204 - DNA, 450 bp, Homo Sapiens
  misc_feature (16)..(16): n is a, c, g, or t
gtcccctccttctctntagttatttcaccactaagtcatgacttcctgttagaggcttccagttctggcagtatttggttcctatttcacaagaagccagtctgttacattgtggcttttagtgctaacaagaaatcagtggtttagggtctttggcccaggagaacagtgtaattagaagttaaactgaggtttaaacagtaatttaaccccacccaaattttcacaccaaatgagaattctaacatcaccttgccaaaaaaaaggtacactcttcaaagtgttagcccctaaaatgttagactgatcaacattgtaagtaaatataagagatgaaagttattgtcagataattacctccaggacagataactgactcggaaagtctttagatttgagatctcttgagctatgacccttataccaaattaggtaaagagcttacggtac

SEQ ID NO: 333205 - DNA, 461 bp, Homo Sapiens
  misc_feature (33)..(33): n is a, c, g, or t
  misc_feature (43)..(43): n is a, c, g, or t
  misc_feature (49)..(49): n is a, c, g, or t
  misc_feature (89)..(89): n is a, c, g, or t
  misc_feature (136)..(136): n is a, c, g, or t
  misc_feature (188)..(188): n is a, c, g, or t
gtccgaatgacccccaaaaaaactggtggtgtnggactggtgnatgtgnaagtcaaatccagccaagaaggggaaaaaaccacaatggnacccctatgaattgcggacccctaatgccccacgctccctaatccanccctgtgaagacactcctcagggaggcctcaaggaggcccaaagaactcctncccaagtcacagagctgatatttagcccaccctacattgttgcttccaaaatcttgctcttaacccaccagttaaggtgtgactgtaaagtaaaaatatttgtttttcacaagtggttcatttagcaccatctcgatcattgtatccacacacatgtgctccacagtgtctgtggaaggtacttagctttgatagtgtaggcagacagaaaggaggatcatggggtcatcctcaggagctatgattatttagttttgctatagtggttcctcc

SEQ ID NO: 333206 - DNA, 410 bp, Homo Sapiens
gcaagccttcaagcctcccaaggttcgaagtgatcctcccacctcaggtcctaaaggaagagtcgctacattggggactgtttggacaaggagatccacggggtagacttagcgggattgtccctggggcagcctggatcctgaggctgccccgcctccttcctcagcccctccctggtcaggcgctcctggtgggtggggggggtagtccaggcttgtcttgcaactgtatgttctcttcagacccctccctggcgatgccagattcactgggctggcagattctgcccccaaacctgtccaaccagttgtttgagaggagggggtagctgggaggggcagcaggagatgccaggaacagcttcccctagcacagcacagactacagacagggtattgaagctcaggtg

SEQ ID NO: 333207 - DNA, 546 bp, Homo Sapiens
  misc_feature (306)..(306): n is a, c, g, or t
  misc_feature (410)..(410): n is a, c, g, or t
  misc_feature (429)..(429): n is a, c, g, or t
  misc_feature (448)..(448): n is a, c, g, or t
  misc_feature (465)..(465): n is a, c, g, or t
  misc_feature (481)..(481): n is a, c, g, or t
  misc_feature (503)..(503): n is a, c, g, or t
  misc_feature (508)..(508): n is a, c, g, or t
  misc_feature (530)..(530): n is a, c, g, or t
ggcacgagctggaatatcatattttaggatgatgcacataaaatcagataacatcggacagttttaaggaactgtcagaagcacttgaacaagagcaactccatcttgaataggggctgagtaaaatgaggctgagacctactggactgcatccccagatggttagacattctaagtcacaggatgagataggaggtcggcacaagatacaggtcataaagaccttgctgataaaacagtttgcagtaaagaagctggctaaaacctgctgaaacacagatggtgacaagaccgacctctggtctnccttcaatgctatggacagcactcaatgctatgtcccaggcactagggacagtttacaaatgccatgttcaacattcagggaagtttaccctatatgggtcttnaaaagggggagggcttaantattccatcccttgttttnggcttattattccaggnattaccccttaaaatnggggccaccagccgccctcggnttttnctttggcccttaggggtttggnccttctttttatttcc

SEQ ID NO: 333208 - DNA, 629 bp, Homo Sapiens
gatttaacaaatatttattgaatacctactatgtctgaggcactgtgtacaatgaagaataatacaaacacattgtactcccctagagctacaggttagctctgggcacagtaatacattattacataaaataatgagactgattttcttgggtggcttatgaaacctaatcccattttatgtgagcatttggattttgttcagtgctcttgacatcttcataaaccacctgatcatgcattatatagagacattgtttatccttttttcacgtggtcccatcgagcaaaaaacttgacctagaactagttggggtcaaacaaaatttaattttgaagcaaacaatgggatagtaattgggtgtttcaggttttgcccctatgggaaacagctgttgttttttgcctgcccagcatagcttcttttggtaacagcaccctgatttcactttggggaatcttcttgctcacctttgcaagccttgtagagaaagtgcaggattgactcacctagctcctagctccaggagagggcacgcagtctctgcatctgcttggttgtaacagttgattcaggtatagacacgtgagtcacacagggcctatggaaagcctctacaggactttttc

SEQ ID NO: 333209 - DNA, 361 bp, Homo Sapiens
ccccccattgtttgccttcaaaattaaattttggtttgacccccccaacctagttcctagtcaagtttttgcctcgatgggccccacgtgaaaaaaggataaacaatgtctctatataatgcatgatcaggtggtttatgaagatgtcaagagcactgaacaaaatcccaaatgctcacataaaatgggattaggtttcataagccacccaagaaaatcagtctcattattttatgtaataatgtattactgtgcccagagctaacctgtagctctaggggagtacaatgtgtttgtattattcttcattgtacacagtgcctcagacatagtaggtattcaataaatatttgttaaatca

SEQ ID NO: 333210 - DNA, 298 bp, Homo Sapiens
  misc_feature (190)..(190): n is a, c, g, or t
  misc_feature (260)..(260): n is a, c, g, or t
tgaattgttctctgtttaggacattagcctgggtatagaatttaacaataaaaataacagtaatagtaataatagtagctagcattccttcagcacttcctatgtgctagatactgtgctaagcacttgggcaacctcctaatttaatactcatgacaaacctgggggagatacgtacttattacttatncaccattttacaggacaagaggaggagagaagctggagagggatttttaaaaacttggggcccaggatanttatggggggcaaaggaggaaattattaatagctatta

SEQ ID NO: 333211 - DNA, 410 bp, Homo Sapiens
acaaagagcaagtgttatgaacttcctccaggcacgacatcaaccaggatcccagtgtgttaactccccacctctgctcccccagtcacaggcactgggcttggtttcctctatctgtggacagatcttcctgttacagtgcaaagtagctgcagaaactccagccttctttccagcttcgtggtcagctggaagtcctaacagaagtctcgtattgaaccagccactgtggccagggagaagtaatcctctgatagttgaggttctttgctctcctctggagcagatagtggtgtctcctccccacaaagctcatgttctgctggaagaaatggagatggcgccctggaaggctattgtagggccattaagagaagcagggggaacggacgtgggcagccagagtagcc

SEQ ID NO: 333212 - DNA, 180 bp, Homo Sapiens
ttccccacctgtttttgactaatcctgcttccctctctgggcctggctgccgggatctggggtccctaagtccctctctttaaagaacttctgcgggtcagactctgaagccgagttgctgtgggcgtgcccggaagcagagggccacactcgctgcttaagctcccccagctctttcca

SEQ ID NO: 333213 - DNA, 491 bp, Homo Sapiens
  misc_feature (340)..(340): n is a, c, g, or t
  misc_feature (370)..(370): n is a, c, g, or t
  misc_feature (384)..(384): n is a, c, g, or t
  misc_feature (415)..(415): n is a, c, g, or t
actagaaatttattttcttcttctaacaggaaatctggcagtggcagcctagcacttggtcagtagcctctgggtaatgtgtctgggtggctaagaagaggcgagacagaaaactgctgggactttttaaagcctttaagtatgtgtgactgttttgccctctgaactcttgtattagtcactattgctctgtaacaaattacctcaaaccttagacacttatgatataaaacatttattatctcataatttccatgagtcaggaatccaagagtagcgtaggtgggtgggttctggttcaaggtttctcacagggctgctgtcaagctgtttggcctgngctgggggccattctaaagggctctacttntgggagggaagttntcatccaagctcgctctctctgactgtttgncaggaagccacagttctttcttggctgttggcagagaactcagttcctcacctcctgggcctttctataagtccac

SEQ ID NO: 333214 - DNA, 381 bp, Homo Sapiens
  misc_feature (12)..(12): n is a, c, g, or t
  misc_feature (67)..(67): n is a, c, g, or t
tggtcttgaagnccctgggctcaaagcaatgctcctggcctcagcctccccaaaagtactgggattnatgggcatgagcactgccctgcacccagtcagaaatgcttctcttgaataagcagttattagaggaattaaacattcaagaaccctaacatgcccccaaacatcgtttcaagacttttaacaacttcctaaaatccttcaaggacttttggagacaagatctcactctgttgcccaagctggagcacagtagtgcaatcatagttcactgcagcctcaatttcctgggctcaagctatcctctcacctcagccaccagagtatctgggactacaggcatacaccaccacacctggctaatttttttctcgtgcc

SEQ ID NO: 333215 - DNA, 411 bp, Homo Sapiens
  misc_feature (126)..(184): n is a, c, g, or t
atatgtttacgatgacatttttaatctatgattttttttaaagactaaaggaaatacatcaaaatgtgaggagctgtttaaatggttttaatgtattttttcaaatttcccttaaagacagtatgnnnnnnnnnnnnnnnnnnnnnnnnnnnnnnnnnnnnnnnnnnnnnnnnnnnnnnnnnnnatgacaatcacagaattaatgaaaatagaagaagtacttagaacagtgtcttggcacagagctaatgctaaataagtattatgttatggattaaattttaggagtatccatctcaccataccaatgggagtttaaggtgcccatgggcaggggttttattttttgggaggacagggtcagccccatctgggagtgcagtggccgtcccccatgggctcactggcact

SEQ ID NO: 333216 - DNA, 434 bp, Homo Sapiens
  misc_feature (22)..(22): n is a, c, g, or t
  misc_feature (27)..(27): n is a, c, g, or t
  misc_feature (48)..(48): n is a, c, g, or t
  misc_feature (59)..(59): n is a, c, g, or t
gccctgaaactcctggggctcnacccncagccctcccacaaagtgccngggattaacgngccaggagcccaccccgtcccagcctacatttggataataatctttcaaagactcccccgatacctatatttttccaaaggccacaggtaaatatgttgcctgcctacataaagcaagtttaaaataaaatatgctgcttggggaattttcactgtgattaggaaattgcttcaaaagtatacttgatttgggacttagagtctcatggtagacaaactatttcccagaaattagaaaggcagacttgagagcagtctgtcagcaagcattgccaactattctgtaagtattaatgaacacccatgagtgcagaactattaatttacatcacagtgccaccactgatgacactgaagcagtaatctgttaaatgc

SEQ ID NO: 333217 - DNA, 501 bp, Homo Sapiens
  misc_feature (153)..(153): n is a, c, g, or t
  misc_feature (196)..(196): n is a, c, g, or t
  misc_feature (272)..(272): n is a, c, g, or t
  misc_feature (327)..(329): n is a, c, g, or t
  misc_feature (332)..(332): n is a, c, g, or t
  misc_feature (337)..(377): n is a, c, g, or t
  misc_feature (384)..(384): n is a, c, g, or t
  misc_feature (386)..(387): n is a, c, g, or t
  misc_feature (390)..(390): n is a, c, g, or t
ttaaagcctgaaggtattatctgctttgtttcttccctggatctgttgggaatgagaatctgggctttgtctaggggagggaccccaactagtaatcaggagtcccaggttctagcccccaccatggagcctccacctcattttccccatctnagcacctgcagctcgtaccctgtactccagagagcactgtgtngggggagggatgatgggagctgcagggttgaggaacaaaggggctgtacttaattctgggtttcaagaggaacttnggcccttgtgactgccttagccagggcctgccctgggagttggaggactgccccnnntanaaggnnnnnnnnnnnnnnnnnnnnnnnnnnnnnnnnnnnnnnnnnggccaananntanttgggaggctgaggtgggaggatcacctgagcctcggagtttgacggaacagtgagctatgatcgcactcctgcactccagccatggagtgacggagtgagacccagtctc

SEQ ID NO: 333218 - DNA, 404 bp, Homo Sapiens
ccactttgtctttctaaggtaagaagccttcaccttccagcttttgtctggcctgtgctgcgtgggagccactggtctgtgcacatccacggtgggtgagtggccaagacaagcagtgtgatagagtccttggtgggtttagtcatctcggaagtcgtagggcagctatgggaaaccactgggttctgggaacgttccaagccaggcagtggttgttcctcataggtaggtggccttggccttcatcccagcctgggatgctccattgcatttgtcacctagtcactgtatatacgtgcacatttgaccttttgcacagcccaggttccaggtgcgtgacctgcccttttttctcattcccttaactgacattatttagtgtcagaggccgagcacagtggctc

SEQ ID NO: 333219 - DNA, 276 bp, Homo Sapiens
  misc_feature (36)..(36): n is a, c, g, or t
  misc_feature (69)..(69): n is a, c, g, or t
ttttttaaaaaaattaccatgggaaagggtagattnccgtatccagcaaaatgggaccttttcattttnaacaaccacagtcccacaagaaagggatcatttagccccccttagagatgatttccatagaaaggaaggttacctaaggaataaaatcacatgatgtgaaacatcctatattacttttggggccatagggaccattgcctgcattttgttggggaaatcataattattttgagtttctttgcttgagatagggtcttgctctgtcta

SEQ ID NO: 333220 - DNA, 631 bp, Homo Sapiens
  misc_feature (292)..(307): n is a, c, g, or t
  misc_feature (606)..(606): n is a, c, g, or t
aattttcaacattggcatttattaatttcctgcagctgctgtaacaagttaccacaaactggtaaaaatggcttaaaagaacagaaatttattttcctacagttcaggccggaaatcccaaatcaaagcatcagtggggttggttcctcttggaggctccgagggagttgttccatctcctctcccagcttcggatggttggcagcaatcctcagtattccttagctcgcagacatcattccaatctatccctccatcatctcacggcattctctctctgttcacatttccnnnnnnnnnnnnnnnnaacaaaaaaacctagttattggggcccactgtaatccagtatgatctaattctatcttgactgcatctaaaaagaccctatttccaaataaggtcacatgtacagtactgggggtttgaacgtgaacgtatctttcttgggagatgcgattcaagccacaagagcatttacttctactgtaagaagaaaacaaatcgagtttaaatcctatgtatcttttgtttccaaaccatgctgcagaaactaaaactgaactgcactatatatatttctagggtgtctggaaggttttgaaaggngcttcccaaaaactttaagggtagg

SEQ ID NO: 333221 - DNA, 466 bp, Homo Sapiens
aaggacccttccttcattcatcacacactggctccatctgcactgcacctactgccagccaggcactgagcttcacatccgcacaaaacacaaagacctctgatacggtttgggtctgtgttcccacctaaacctcgtggtgaattgtgattatgttgaagttgttttgggaggtagggccctggtgagaagtgactcgatgatggggtggatttctcatgaatggtttagcaccatctccttgatgctgttctcaagatagtgagttttcacgaaatctggttgtttaaaagtgtgcgccccaccccttgcttctgctctggccatgtgatctgcctgccttccccttcgccttccaccatgattgtaagattcctgatgcctccccagaggctgagcagatatcggtactacgcttgctatacagcctgcagaactatgagccaattaaacctcttttctttat

SEQ ID NO: 333222 - DNA, 268 bp, Homo Sapiens
  misc_feature (256)..(256): n is a, c, g, or t
gcccaagaaagtgctgattcgccctgaataaaagcaatcccttgggtaacaactccccgggaatatcctgcagttgcctcggtccagctgagcatcccttccactagagggccatgtgacacctaaggattgccttgatattctgggcatcaacattagctccagcttccagaagaaggctaatgactgtggtattccctgctagcactgcccaatgcagagcagttgtttttgtgatacttctcgtgccgaattnttgggcctcgag

SEQ ID NO: 333223 - DNA, 412 bp, Homo Sapiens
  misc_feature (35)..(35): n is a, c, g, or t
  misc_feature (45)..(45): n is a, c, g, or t
  misc_feature (140)..(140): n is a, c, g, or t
  misc_feature (150)..(150): n is a, c, g, or t
gctggtggggtccgggtctcaccaacctggtgtcncctcggggcntaacgggtgggaagtggcccagatggaggactcctcctgggttgtcgtgagaacacttgggccggcgcacgttcggtggcccagaggcagttccntaggtacacnttctttccagcgccatttccacaggtgctgtgcctcatccttctcactttaattcaggctaggtggagagaagccaggctttctcagtgtgaacttaacctgtcctctggagaggccggacattttaacagccaggcctgtgggtgcactggaaccttccactcagtgctatgctggcaggtttgtgttggccagatgggtgggaggacccctgagcgtctaagtgacgatttcatcccgggcctgatacagactgagcagg

SEQ ID NO: 333224 - DNA, 726 bp, Homo Sapiens
gacagtactgaaatatacttgggtgagtccacacagcttgcctcagtctaggtaactgctggtaagaaagtcagtccagttgcttttctctactcctggggtctacgaactttcaccaacatcactatcagacacagagggacatcaggtggggaggagggtgaaggcagaaggtctttggtgggtcagaacttcaaaaaggcattgagaatctgtccacagttctgcccctcccagccagaaggaggtggccttcaacgcggtcatcttttagctgccagaactttgttaaccacctgggaccgtggacatcttctctcgtgtcttgagccctcatccccacccctccaagccctcatgcccaccacaccgtgtcccacattccccatcctcccctgtctgctccccatctcaagtccaattccaaggccagagccctggcagcttttctgggagacagcatgaaaaggaggggagtggagatggcagagatggggtggagccagtgcgctgtgggtcctgttggcgtggtgatgtgggggccaatcctgaggcccagaggttcatcaccgtgatctggaagcccacggggccccttggtagaaacttgggaagaacaaagggggaaaagaaaccagaacaggaagaagacgagtaagcatccgagtgcacgagagtggagccggagccacgtggaggcagggccggcccgtctatctgttgttg

SEQ ID NO: 333225 - DNA, 519 bp, Homo Sapiens
  misc_feature (311)..(311): n is a, c, g, or t
  misc_feature (382)..(382): n is a, c, g, or t
  misc_feature (395)..(395): n is a, c, g, or t
  misc_feature (426)..(426): n is a, c, g, or t
  misc_feature (453)..(453): n is a, c, g, or t
  misc_feature (462)..(462): n is a, c, g, or t
caaatgctgcattatttttataaacagaagcaagctacaatattgtaacagaaatattgaagattatatttgaaaatattcaaggctaaacaaaagcaagttagatatcacctatgtgtccgcaatcagaaacctttgagactaaaatttagccttttgggaagcaccgtccatcttcccccagacccacccctgcctcttgggcaaaatcacagcaccatgctgtggactgagggggtcagtctaggaggaggcagaggcttgatttctctctaggggaagggcttcatgcaggagctctctggcttccnttggggtttccaggacttcaccaggccttcttggggcctggaggttccctttcttctggaggtcaggggcnggggcttctggcnagggggaatacttgggggacaggtggatccntggggggacttgggaaggagggccccntggcaattncctgcagtttaccggggggttactttaattaggctggggcatttagggggtctttag

SEQ ID NO: 333226 - DNA, 299 bp, Homo Sapiens
  misc_feature (199)..(218): n is a, c, g, or t
ttattttctgataaaaagaggatgcttttttggcaaatttctgcttcggagtgaaagatgctgcacctagatgggaaggagaagaggagaaatggaaagaagaaaagcatcccttcaaaagtaatgttcctgcagtctcgcagaaggccgaaggatgggagaatttctagtccagggccagggacactcagaagagagnnnnnnnnnnnnnnnnnnnngacccaagcagcttcacagggcctcatctggtccaatttcttctcatgatgcattcattcactcataaatatcttttgagc

SEQ ID NO: 333227 - DNA, 295 bp, Homo Sapiens
ttttccaatattcttctaaatggggccttgttgatgtgtcctgcggcgagtggccattggaagaatgtggagggctggggaactttcttttctgggctgttctctctgcagagccaggatctgaaagagatacaggaccacaggttttaaagcagtcagggaggcctgggcccacagggaggaggtgtggaggaaccaagtgtgggaacagagtgcattctgtcccccaactcccgaagccacttcagtgttcctcctcccagaatatacgtgcccccttcttcactgtctgctt

SEQ ID NO: 333228 - DNA, 421 bp, Homo Sapiens
  misc_feature (84)..(84): n is a, c, g, or t
ggtagagtgtttcacagagaagtggtggattgaataaggcagcagaaacacataccatccagcccctgaacctgaattttgccnaaaacagagatactttaagtccatttcttttcaaaggggttaatgctcaaagtgggaatagtgactagggtattcctagtggttgggaataataatttcctagaaaaggttcattgctgaggtacccaaaacagacatcatgcctaaggaattcttttactgtgcgcttccctgaatagatacgccgtcaaacaaggcagaagctacaaataaagcttacttctactgaactcatgaagctgttcctagtgtcagttttgagtttcaagtgaagactgaatgtcaactgcaggctttccgaattcctcgaccatgtccatccatggattctcttctt

SEQ ID NO: 333229 - DNA, 380 bp, Homo Sapiens
tttacaacagattcccatttattttaaaatgaaattagctaggcatcatatatatgaatgaaagatcagaatgaaacacatgaagatgttaacaatgattgttttgggccagagattcaggcacaagctcgggagagaagccaacaaaagctcttctgcacaatgggagggagacaccattgaaaaaggcatcgttccttcttcatgcaagcgaggcctgggctcccacaggcatgggtctccttgcagctgcaacagcagagggagggcgctggcagggctctgcgtccaggtgtgcctctttttctcttcatactctttctggaggttgactagtaccttctccactggtcatgctcatactgtctgcttcctggtcc

SEQ ID NO: 333230 - DNA, 375 bp, Homo Sapiens
ttttttttgccggagaaaaaaacaaggaaagtacccctaggatgaagaagaacagagtgaagtgctgaagagctaatgaagcagagtggaccatctgcacagatgagagaagacccaggggagtttcagaccctgatcttgagaaccgcagtccacccctaacctctggtctccagtctcaaacctggccctttgctccagagtcttctgagggagtgacagctgggagggaggctgatggggatttgggaattggtcctttgtagccgctgggggagcaaagtgagctttagaacaaagtcactaccagaaagcacacattgagggggctgcccgtgaaaacgttaattcagggcggctaatgcttagaggggg

SEQ ID NO: 333231 - DNA, 429 bp, Homo Sapiens
tttttcactcatccaacagttatttattgaacgccatggaccaggcaccgtgcccagcagctgggatgcagcactgaacacgagacaagcccctgccctggaggggcttacatcccggcaggtaaacagccagtaacttcagaaaccaaacatccagtacgtcagagtgccatgggaaaggtacgctgagcaagggcgggcagtgccagggctggggtgccactgtacagggtgatggggaggccctcctccctggagagggcggcatgatcctagtgggccgaggtcaaccgccagggtcaaacggaacacaacccactctcaggaagacatccctaacacaaatccagggactttgtttcttaaccttaaaattggaaacacttcttgctaccagggatggggggtggggctcagcgtttggggaac

SEQ ID NO: 333232 - DNA, 436 bp, Homo Sapiens
  misc_feature (236)..(236): n is a, c, g, or t
  misc_feature (421)..(421): n is a, c, g, or t
aaagggaagtgcttctctttggctttttcttggttacactgcagtttcaggattgggtgagacagagacaaatgaacccccctctaaagtcatttaactaatagccagcacatcccttccccaaactgtcaattgaaatcttaactgaaagttttactgaataataccaagctaattgctgttggggcacacctggatggctttgcacctggtgttgaacctgctgaagcagtggnatgctcaagattacgtgcaaggaatccctcccatctggtactaaaatttcagtgtgttctgagtgtcttttaaaccaaaatgggaaatacagatacaggggctgtagtatttcagtaatgtgtctggctccttgttggggcagacaccagcgggtttgccaggggaggaggacccaagttacccntcttttattcttaca

SEQ ID NO: 333233 - DNA, 425 bp, Homo Sapiens
ttttattgcaatgtctttattgcattactggagcaagttggccagactgtcccctcttgggaaaggtattaaacaaaaagaccaataagtatctcctctcgcctttccccctaccctccccaacaattgcacagcaatgtctgaacacatctggtgacaagaacaatttgtaaagtgggtctagcaactacattatgaactgtcccatcacaagacatacagttgggctttcttgtgaggtcaggatatttttacggtaaactacacggaattttcttggacacatcaaagacaacagaatagatttttcacaagtaacggcaccaaagtcacatgctggaatttgtaaggaaacgaggttgtttgccacaagtggctggagctaaagcaggtttgagcagttggcagcagagggcccaagcagg

SEQ ID NO: 333234 - DNA, 279 bp, Homo Sapiens
  misc_feature (173)..(177): n is a, c, g, or t
  misc_feature (185)..(185): n is a, c, g, or t
  misc_feature (201)..(201): n is a, c, g, or t
  misc_feature (204)..(204): n is a, c, g, or t
  misc_feature (212)..(212): n is a, c, g, or t
tgctgaaggcttttaaagaattcttatgattaataaaatctgatgtgctatatttacctgatgtcttacaacgtgtcttataacagcatcaaatctactataaagctgtttccaatctcccttcctgtcagcccacttgggagttggcaccctggtgtacgggatggcaattnnnnnagggaganggaaggaccgtccttnggnaacctganggagctcccagccaagctaagctgtgaggtggttggtatatcaggaagtgctaaatctgggccaggg

SEQ ID NO: 333235 - DNA, 470 bp, Homo Sapiens
  misc_feature (13)..(13): n is a, c, g, or t
  misc_feature (128)..(128): n is a, c, g, or t
  misc_feature (173)..(189): n is a, c, g, or t
  misc_feature (194)..(194): n is a, c, g, or t
  misc_feature (443)..(443): n is a, c, g, or t
aaatttgcccggnacatggtgggtccgtcccctgcagtcccccagcctacttgggaggcctgagggcagggggaatcgccttgaaccccggggaggatgggagggtccccagtgagcccgagatctcngtcactgcactcccagccctggtgacaagcaagactcccatctcnnnnnnnnnnnnnnnnnggttnccttataatcccagcaattcccatcacctagggtatacagccaagagaaataaaaacgtgtttatacaaaaacctgtacacaaatattcactgcagcattattcacaacagtcaaaaagtagaaaataatccaagtgcccatcaactgatgaatggataaacaaaatatggtacatccatcaaactgagtattatccagccatgaaaaggagtattgatgcaagtcacaacgtggatgaactctgcacntgtaatctaagcatcagaagcaagacc

SEQ ID NO: 333236 - DNA, 580 bp, Homo Sapiens
gtggggggtgtctttgacttcctgggtctcttccttcacccactggtgaatttgggaagaactccctgcatttcccattgtgtggctccaggattcgtttgggtggccggggaggtggggggatatgctcgggtgggggctccaggtcctcgtgggaaagctccttccactgatcctgcacggaagagtcccccatgatgaatttggcaccttcgatcacagccaggtaggagaagcgcagctggtcggctgtctggatcagccccatccgaaacttccctcatttctaacagcactttcttgatatcaacggaagaagggtctttcctcttgtccatccagcaagaggcaggtatcagccagacagaaggttccagacctgccgatgccctgcactgcagtgcaccacaacgggcccgtgctccgggctgagtgacccttgactcttggactttgaaaagaaagttcaagaatgaggctggtgattcagggactccaaagtcaggccatgtggtatagtggaaatgtaagatctctcgagtttgttgggttgtaaggtttccaattcttagtgtggcac

SEQ ID NO: 333237 - DNA, 494 bp, Homo Sapiens
ttttcctttttttggctatagagcatttattgcaaacaaaattgaggtaaaagaagctgacccagaacccacgcccgtccaggctggggaagtctctactcgccccacaccaggccccgagcaccgcgtgcccgaagcagcccccagaggacagacgggccctgcgcactgaggtagctgcatcctaagcccccatgagtacaactgcccaggggtgcccaattcccagagggaagggaggagagagaggcaggcagggggagccccggcttcaggtggggcacaccccacaccctcaacaaacctcccagcctctcgggctggggacttcctgcctggccacccagccagccatggggcagcggggtgggcaccagaggcgggcgtgctggggtgcgaggtcactgctgctccaggcagtcctcggtcaccccctgggcagccagctcagccagcacgttttgcaagtaattggggttcggatagccgtggcc

SEQ ID NO: 333238 - DNA, 272 bp, Homo Sapiens
  misc_feature (110)..(110): n is a, c, g, or t
  misc_feature (160)..(160): n is a, c, g, or t
cttttgtgggttcaatactatcaagaaagtgaaaagacagctcagagtgcaaggaaaatttttgcaaatctgggtaaggggacatatctaggaatatattaaaggtactncctacactttcaacggttttaaaggacaacccacttaaaaattgggggcnaagggttgttaatggggttaaagggttttaccaattggccccttaaatacggtggaaagggtggctccattttccttttaccgggggttccgccaattccaaaccccctggg

SEQ ID NO: 333239 - DNA, 384 bp, Homo Sapiens
  misc_feature (200)..(200): n is a, c, g, or t
  misc_feature (222)..(222): n is a, c, g, or t
ccactactgtttttacacagtttattcagaagtttaaaagttaaaatgtgggcattttcccctgaaacaaatcatcccctgccactccccaacacaaagactctcccaacaccgcagtttcttctctttacccagggttaccacacattcttgcaaaacacacaggagtcaacaccccaactatttgggtaatacaaagnggactacaaaggtcacacaaanggaatctcatttacttccttttcactagcaggctatgaatgaaagactgagaggcaaacacatcaccttcatccagagttgacacttccctaaccttttttcttcctctaagaggttaaaatccaaaatagtttcactgacaactgtaactctgatattcca

SEQ ID NO: 333240 - DNA, 472 bp, Homo Sapiens
  misc_feature (282)..(282): n is a, c, g, or t
ggttgtgcatattttatttttcttggactcgtgtgagttcaaagtaaacaccaccaccgtggacaactcttgaattaaatccactagagcgagctttaaaactaatctgagcataacccccaacgtggctctatgcttgtgtacctttgcacatattttgtttagcacagtttcatatttgagtttgcagaattatctaatagtctttttttggctaatatttttataacgtggttccttatttaactgtactagttttgatagaatttaaccaggtctggnctgaatgaagatgttggcacgtgtcattttagtggtttaaatcctcttatttatggttttaactctaagaaaattttaaaaggaagagatgtttggatgacaaaaaaatgccttattgaaaaactaaagcaaattctttataggaagaaaatatgggaatttgattacacatagatgatgatgtttattt

SEQ ID NO: 333241 - DNA, 534 bp, Homo Sapiens
ttccatttaaaaatcattttattattaacatcatcttcccatgtagccaagtgtctgtcatgtataaggaatgtcggtaaatattccatttgaagcttctttgtacatatttccctcgataaataaactctgaattcacataaaaaagttaaacttaaataactcatatttccttctcttgtaacagggcatatattgggtaaaatataaatattctcgggactcgggctttgttctaggtgagggacaggtaattgatcacagtggtacaattattggacaggtaaaaccagggaattgtcagctggtgtcctggcatggactagtgctgaggtgggagacaggaagttcacatttggtttctgggccaaagtggggcaggaggggtggtggggagaaaaggacagttgttttctttacagctctgataaaaataatctgtgctgccactgaattttaactttgaatatattcttctacatttgctgattaattccataatcattttactgaaaactcagatgtcaactaaca

SEQ ID NO: 333242 - DNA, 481 bp, Homo Sapiens
ccttagataaatacttttctttttccactcttattcatgagccagatctttgtcttagagagcccataatggttatgcagagtgggcaatagtattttcaaaaagcttagtaaatgtaggcagtttctttagggttaatcatctttcaaagggccttaggaatgtccttcaaacagaatataaatgtcaaagagaatatctctttctgtttgaaattatttgggcaggttgaaagaatttgataaagggaaattctatatttaatctttcattgtaaattatatgtgcaatgaaagagtttaaacatttttggagtttgctgtcttaaaggcctttctggaatgtaaggaaacccagcagtggtgtctgctaaatatgcgaatgtagttcttaacttctttgagactgctttttatctgaaaatgggagtgattcctcctaccacctcacatgtttattgtgagggttaaatgagattctg

SEQ ID NO: 333243 - DNA, 428 bp, Homo Sapiens
  misc_feature (361)..(361): n is a, c, g, or t
ttttcagtgttctggaattgtatttgaggaataaacattcacagtacagcaggagttttctggtatcctaagtaagggacaaacattcagacccacttagcagtgttgtgaaatcctatgtcaaggacaaacattcagaccccagcagcagtgctctggaatgccatgtgagggacaaacattcggaccacagcaggagtgttcaggaatcctatgtgatggtacaaacattcagattacatcaggagtattctggaatcctatatgaggggcaaacattcagaccacagcatcagcgttctggaatccaatgtgagggacaaactttccgaccacagcaggagtgttttggagtcctatngtgagggactgatattcagacccccgaagctctgttctggaatccaaagtgaggggagaaacactca

SEQ ID NO: 333244 - DNA, 447 bp, Homo Sapiens
ttttttttaattttattaaaaacaactttaatatgaataaaaagttacaaataagattcttcataaagagcagcaacagccaaagatcatcctcattccctttgtccctgaaaacaggcccttttaccagaccgattttgtctcaccctaacctgaggcagggattcatctttgcagagcaaataagatctgatctcaggggctgggggaggaagagggtgaccttgcagcacggagataactttggccttgaacaacaactgaggctcccaaggaatgccaaaagtagggctgaaaaggggcagattgaaaggactgtcacacagggggagttcccttcctctctactgtaacaatattcctagccccacctaggaagacattggctaaaatgctaaaccctagtatgtcctgcccactttaaactctcacacttccaaggagaag

SEQ ID NO: 333245 - DNA, 388 bp, Homo Sapiens
  misc_feature (43)..(43): n is a, c, g, or t
  misc_feature (49)..(49): n is a, c, g, or t
  misc_feature (56)..(56): n is a, c, g, or t
  misc_feature (341)..(341): n is a, c, g, or t
  misc_feature (347)..(347): n is a, c, g, or t
cagcaaaggagtaaaacgtagaggccactgctgctttgatganttttanggttcangtggaattagtttcttaaaataactatttatccatcgaccataccttcaggcctcataatctggtaagtaattaaatactcaggataagcctgttctcctctgtaaataacatattcagctaatgctaggccatttacactgggcctaccagtgactgaagtgatgacctggggggagaatgtgccattttcattgcactgaactgcaggaaagactttcccaagggttacccgggcaaaagagcagctgcctgtgggaaatgttacaaggtcttgtcttttgtngacctngggcaccccgtaccctcctccaattccatatacatatttga

SEQ ID NO: 333246 - DNA, 446 bp, Homo Sapiens
  misc_feature (385)..(385): n is a, c, g, or t
  misc_feature (427)..(427): n is a, c, g, or t
tttaacccaaggtcaccctgcttgtcgtatggccaagccaggcctagaatctgggtctccagactctgggtctgctactcagggcacaaaagaagaaaacattctgaagttacaccccttcttggccagtagttgagggtaaattaacgaaaagaattaatttgtctgtaactcttgtctgttgctctctgtttaggaagaactaaaaactccacaaattcaacagtctcccctctgtctccactgaactatccctccattttcaccacactttttgggctgccattcacaaaaaaagctgaagccagccatggggtaactatttaaaatccatgtggggttgcaggaggacaggcatccctatcacatgaggctttttgccctngtccccaggggcctctggtcatcttcacttcttgtggggggncaccacggcaggggtgact

SEQ ID NO: 333247 - DNA, 332 bp, Homo Sapiens
  misc_feature (56)..(56): n is a, c, g, or t
  misc_feature (71)..(71): n is a, c, g, or t
ttctttgtggtaaggatttaactctgtgtttaccactattgtcagtcacagctgcnaaactttcaagtganggaataaagtgcctcaagtggtaccttgctcaaggagccaatagaatcacaggtgccactgggaacttggcgcaactcatctgatctatcgggggggttctttagatttttttaaacatataattggaacacaccttagtattttaaagaatatgctctttgaaaagatgaaaagagtttctcccgggaggcggaggctgcagtgagcgcgcgatcgcatcactgcactccagactgggtgacagaaagagactctgtctc

SEQ ID NO: 333248 - DNA, 179 bp, Homo Sapiens
ttttttcccggtagtaaaacatttactagagagcaagcagaaaggaatgcacatcttaaagaaaccttcacaaagtcacaaaagtcaaagtttgtatatttcttttcctttttataaacgataaacaaaaatcatcaaaatcatttcagcaaaagacttttctatcattggggcaagtt

SEQ ID NO: 333249 - DNA, 417 bp, Homo Sapiens
  misc_feature (360)..(360): n is a, c, g, or t
  misc_feature (404)..(404): n is a, c, g, or t
tggagaatctccttctaattaaatggtgtgttttggaaaccattcgtttaaaagctcctggtgtcattactagaaaagtggtgaagcctgtggaaattttgaattacatcattccttctggtgacttgttgatgttgtctccattttggctgcatagaaatccaaagtattttcctgagcctggaattgttcaaacctgaacgttgggaaaaagggcaaatttaggaggaaggcactctttcttgggacttgctttcatgggcatttgggaaggcggggaagttcccagtgtccctggcaaggtgggtttgctctgttagaggttcagatgtgtatttattttaatacttttataaatanggaccgtagtcctcttggaccccttaccccaaacagagttatcncccatttgggggg

SEQ ID NO: 333250 - DNA, 452 bp, Homo Sapiens
  misc_feature (411)..(411): n is a, c, g, or t
ggctgcaagtgttacctttatttatttcatatatgtatatttccagaaggacaacggttgactggtattaagaccaaaccagtccatcagaatatcatcgaccaaaatgagaatttccctgttgggccattagggttggagtcttattaaccctcccctattcctcgggcccataatgcattatgagatagaggagaagaaaccaggcacagaagactctccctgtcatgctttaaccccataccctgtgctccacttatggaggacgtctccccagttcttgccactcccacaatcagagaagtttgaggttcataattattcagcctcatctccaaggaacctttaactggcaacagagattgttgggccatcatgagatgctactttctagctctatgaacataaatncacgtaagaaaaagcaaacaacacaaatacatgaaagccat

SEQ ID NO: 333251 - DNA, 581 bp, Homo Sapiens
  misc_feature (218)..(218): n is a, c, g, or t
  misc_feature (569)..(569): n is a, c, g, or t
tttaagactaaaaattattttatttttgaagttgatatttgtttagttacgttcttgcaatgccagcagaaaaagaaaaatccaaatctgaagcatgcgtgtgttatgagaagcctggaaaaggcgatttgggtccattatataactgccactttttgtttttattcaaggtgtcataaaaactgagttctgcagttgaaggtatgtttttacaaccnccaaaatcaataatgttttgcttaaaggttgcatagcgtggcttgtagctaaaaagcttctgtggcagtggtgtttgacgccatgtgcgaattgccagctattgccattgcatctgtgtttctccttgttctggtcattttatgctgcaaagtctcagccctcctcaagtggcatttgcactgacctgagagggcagcaccaacatggtctgtttctgtctcctgatgtgactgcctcggagccggtgctcgtcagcgagcctggggctcttctgtggcctatttgaggcggacatagtcctgtcaaggaactttgccccggatctttcagcagagcctggtctagagcgncctttatcccaa

SEQ ID NO: 333252 - DNA, 257 bp, Homo Sapiens
  misc_feature (17)..(17): n is a, c, g, or t
cggggctgccctccttncccacaagttttaatccctcagcacacacttcagatcacagaaaggagacaaataaggtggaggaaggaagatgggttgatggtaactaggtcacttggtaattcaatttcagacgtaaatttttctttgtttcagaattattgatctgtggaatatttcttgattcttcttggaaattacaaattaattcaaatgattgtaaagttctctgaaaggctctacagttttcttaagagaat

SEQ ID NO: 333253 - DNA, 393 bp, Homo Sapiens
  misc_feature (186)..(186): n is a, c, g, or t
taggtattttcaaattcagaaggagaaattcagtagagagctattaccaaagacttaaaaacttaagcacagtttttgttcttacaggagtaggtagacaaaaaaattagatttcaaggccagccaaatgggaatgacaaagggaaatattcgaggccttcggttgagacctcaaaagaattatgntcctacaaataaaggttgacccagaagttatcagctttaaatctaacttcaaaactttgattgaatgaggtgatcagcccttattctagttacctgccagaagaaacttagcctctatactatttgaaacatagtatcctgcattccatcaaaataccaggcatgaccaggcacagtggctcatacctgtaatcctagcactttggg

SEQ ID NO: 333254 - DNA, 417 bp, Homo Sapiens
  misc_feature (382)..(382): n is a, c, g, or t
  misc_feature (397)..(397): n is a, c, g, or t
aggagacatgttccattttggtctgtgggatctgcatttcttccttatagttatggctcatagagatgactgctctttcaaaggtggttgtggtctattagagcgtttccaatgtccccatacttctttctcgagtgctagtcaaaagcgacttgcagatggtatggaatgtctttgtgagatagaaagaacacagactaggatcagaaaaatctgcctcccaaccctccatgggccatcttctggctgtgtgactttaccgccctaactctttaaaatagccccacacctacctgccaggattgtcttcaggaattacataaaataacacataccaaagtctctaggaataggagcatgttcacataatggacttcaacangggtccggcttctcnttctttctttttgggggtgg

SEQ ID NO: 333255 - DNA, 350 bp, Homo Sapiens
  misc_feature (322)..(322): n is a, c, g, or t
ccttttttaaaaggtctcaattccaagtaactacttaaataccccctgtcagtctccttcaaaaagctgaaagccagcctctggactgaaagcgcagccgcaatgtttccctgtcctggtgcccagcacagcttgccctggacttctgaaaattgcaagcgcttgctccttgctagtcaccacactccccctttcttagttgcagactccctcttgctgtggtttacccaggtgcccttattgcccctcatgcttgtgtgccactttggacttaatctggcacacttaactcccttcatctacgcctgaagctggacaagcntgcatctgcgtcactttctcaattctgg

SEQ ID NO: 333256 - DNA, 484 bp, Homo Sapiens
  misc_feature (242)..(251): n is a, c, g, or t
  misc_feature (337)..(337): n is a, c, g, or t
tgactcactggattacactgtgactcagttcaatttcacacatgctgctgctaaattagggtcttggtgagcctttgggaggacagctctgaggaatgaattgtagcactgcagccctgcctgaggaacatgatagaaacaggtggtaggcccagctcttgccttccacctactaagcagtttttctgtggttagctgtgtgacataaactatcggtgtattaatttgctttcactagattnnnnnnnnnnaacaacttagtccaagaacatacctgaattctttgcatttccttgccttagttgcttttgtagggtggacagcaggactgcatgangaatagctgtgcttctggaccctatggtgaaagctctagtgaactgcaattaggcccagggtcccggaggaaggaaggggagagaaaaaggggggtagttttccaaaagataagtaggggacaaaaaagtccacggggcctattgag

SEQ ID NO: 333257 - DNA, 335 bp, Homo Sapiens
  misc_feature (279)..(288): n is a, c, g, or t
  misc_feature (292)..(292): n is a, c, g, or t
ttccccctttaaactaagatagcagtaatgcatctggacgtttgacttctaatagcttcctgccacgaaccaattgacacaaaacagaatagcttgttaaaggacagattttttcccccttcagggggcaaagcattaacatgtcatttcctgaccaggatattaaatagtttatttagaagaaatgagttgaagtgagcgattaagagacacaaactggacttttgttttcttttactgtagcacccagggtttcatgtcagtctgtgtgcaccgaannnnnnnnnnaagngaacctcattaattaccagctagggggttgggcttgttttaaa

SEQ ID NO: 333258 - DNA, 354 bp, Homo Sapiens
atatccatatgtataatgcttatactttttctagtaaaattataatgtatttgatggttaaaaaaccatctacttctccactgaaattaattcataaatttctcttttagttaaagaaagtggggaaggaggaagaaataggctggtagaaagatttccatgggtcttaggtttgtgcatttggtgagcagcagcactgaacagcttttgtttcagaccatcttttctattatttttgtataaaataccttctcctggggcaaaagttgagtgagttttcttacagacagggtttcccaagctcaaggtcccttagcagtgatgcacagcactcaccctagggctgttcccatg

SEQ ID NO: 333259 - DNA, 788 bp, Homo Sapiens
  misc_feature (482)..(515): n is a, c, g, or t
  misc_feature (542)..(542): n is a, c, g, or t
ttgtgttcaggcgtgtgatttgtgtagaactgaccctactccgaggctgggtgggtgaatgaggcctggcaatgaatacattcgagtcttttggctaccatggcagggttaggaatgcacatagcacccaatgctgggtacttgagagctggaaccatcgggagattctgctggctttgctacatgctagaatgtaagtatgaaggtattggtggctcttcttgccactccattggagaatcaagctaacatggcagagccaagaggcagaagtggagatctggtgatggtacctggtcccaggcctgggatcagtcatgcctggggagatcccatgggtatgagctaataaatgcatgagcttaatgaacccccttgactttcccttttcattaagctagtgtgaactgaggttttatggctttaaaccagagccctagttttaaatcacgattcctctactggattttatactcttctannnnnnnnnnnnnnnnnnnnnnnnnnnnnnnnnngcagatagcagacaattggatattccnaatgacaatatggcccatcttccctaaactcccactgttttccccactgtttctctcagaaagtttgttctgaatttgcctgagatgaactcgggctctgcactcccaagctttgttgccctgaggccgtcattcccttctcctagccttagtctccctcatctttaaaatgggacggctggaattcatcattggctggggcacatttgctcaagcctgtaatcccagcactttgggaggctctag

SEQ ID NO: 333260 - DNA, 593 bp, Homo Sapiens
  misc_feature (91)..(91): n is a, c, g, or t
  misc_feature (274)..(274): n is a, c, g, or t
  misc_feature (327)..(327): n is a, c, g, or t
caaaaagtcaaaggtaatataacataaaaaggaggaagcaggctgagaaaacgactacactgaaaatacaggctacttttcacagaaaagnaaggagaactcagagggcagaaccaagacagaaatcactcccaggctttgagtcccaattgaggaaatgccaccataaacctagcggatttcggaactggaatggatcagcgactcttgtacgctccctgtttctccctttttggatgggcatgtctgtaatggttatcctatggctgtcccnacatgtgccattgggtttgtggaagggagcagatagcctctctctcctagttnctcagatcttcagactgagaggacctatacttgaagaaactggacccccaggagcctcatctcacctcaatgatgagagccctggacttcaaactgatgctgtcatgggaccaaactgtcggggatttggtggcggtgagggtattctgcatgaggaaggaacacaaatttctgggggtcatggtgaactacatggcttgtctctgaatggctcccaataatccttgcttcccagttcatgccctctcacaatgagtaagactgac

SEQ ID NO: 333261 - DNA, 199 bp, Homo Sapiens
  misc_feature (103)..(103): n is a, c, g, or t
  misc_feature (106)..(106): n is a, c, g, or t
ggcagtgtctacaccacagtgatggtgctacaggggccatgtggtcacaggacaggtggtcaggaaatgcacacttgactgcggtcgatggtgccgggtcccntgnaatgccctggaggctcccaggccagcttgggagtcccagtccccagggttggtgtgacctgggcaggcctgcggtgtccatctgtgaatgact

SEQ ID NO: 333262 - DNA, 396 bp, Homo Sapiens
  misc_feature (71)..(71): n is a, c, g, or t
  misc_feature (115)..(115): n is a, c, g, or t
  misc_feature (123)..(123): n is a, c, g, or t
cagggctccagcagccggatagggaaggggccccagcccaccctacagctctactccctccatcctgctgnagaccccccgattcacacagtgagtcagtaacaggaaggagccncttggacntgcggcaatgccattagcggacgcatgggggaaaggggaagtggggagggaaaggaagaggcgaggcatcctagctccctcaaggccggaagctgcaacagttgcagccagcctcccactctgccctcaccccgtcccggccccaccactccactcactcagaggtcgggtgccaggagcctggccaatcagaagcaccaagggcatcttgagacctctccccagatctactgaataagaatgtctaagatttctagccattacattctacaa

SEQ ID NO: 333263 - DNA, 647 bp, Homo Sapiens
  misc_feature (61)..(61): n is a, c, g, or t
  misc_feature (119)..(119): n is a, c, g, or t
  misc_feature (187)..(187): n is a, c, g, or t
  misc_feature (265)..(265): n is a, c, g, or t
attgagccggcccctgatgatccccaccgactgtggctgtctcaggaacctgcatggcttncacttgcacactcatgccccgtcagacctgtgtgaattggttagtgttaaggccctangcaactcattgccgtaatgagagtctttcactttagaaactaagctcatccctgctgaccctctgggnccagcattttagcatctgtaccctggagcctcggctgtgggaaactctggccaccggtctaggcattatcatgagggnagccctgttagaacagaggattctcaaaggcttatttcttccctctgacagtcatgaagtgggttacattcatgtaagttggaggagatttattcagtgcttgctctgaatgacgaagttggcctgtctaagggaagcctcagatgcccatggaatgcagttccccagccccacttcagtccctgtgaaatctgtcagcggatgccttttaaggatgcagtctaatttgtggagagtaagatataaggcttaggggtgatgaagatcacagctctgaattgaagcagattttagagctattagaatcctatgcagtgcacctatcaaaacatacatttctgatgaaagaaattttattccgaagtcaaattatagttgtttc

SEQ ID NO: 333264 - DNA, 461 bp, Homo Sapiens
  misc_feature (318)..(318): n is a, c, g, or t
  misc_feature (363)..(363): n is a, c, g, or t
  misc_feature (421)..(421): n is a, c, g, or t
gacagagtcagagagattggcagtgataatctttacacgtgctttctccttatgtcattttacatttggagcaatcccttgaactcataggatgagtattgttagttccattttacagacaagaaaagaaggctcagagtagtgaaatgacttgccctttgagtagttgatgtctaactccaaatatttattccactattttctctactaatcatgggtatttctcatcaccattgctatgcctgtggggtaggaatttttatccctgttttcagggggggaaaacactaggggtttttagggaaactttttcccccnttggattaatccctccggttcagttggttgtggcccgggtacccnacccggggacctttttgtagggggtcacacttcatcccctaaccaggttctttaaggnacgggggccgggggttggtgggcttctggcccgttattcc

SEQ ID NO: 333265 - DNA, 395 bp, Homo Sapiens
  misc_feature (164)..(164): n is a, c, g, or t
aaaaatgcagtctcttctgtcttcccctttcctacaataagacacagtaacagtctggatctctcttttctttccccctacaggcaagagtgtgagtcacattcccaaatttcaaggacactgcctgcccatctccttgacccacaggctcatcccaggctccnaagacctttatgtacctttattccccaaagcctccctggtcaacacaggcactgggaataagttaacaaacaaaaacacaccttagtgctgcagtcccaaagacacagtctggccagggtgtatgtggggaatgtgctaattctttatgagaatggaaggtaagaaagacacatgcacaaacagttccatctactccagggtcacaccagtgcctcctggtctagttctcc

SEQ ID NO: 333266 - DNA, 606 bp, Homo Sapiens
  misc_feature (557)..(557): n is a, c, g, or t
ttttaattatcattgttaaccagtggttgaagatttttatgggattttgttttgtaacatttgctcctaatccatactgtttgaatatagtgggttcttgggccattgtttgggggttagctataattagcaatgaggggttacactgcagtggcttacagtttggtggggtgggaccatgaattagttggagtttctgttttagtccccataacttatttgaaaaagggggccctggctgtccaccctccatactgagtggtttcccaaacatctgtcccagtcaccacagggactttttaaggtttctatacttatacttggttgactttttatggtatggacataggtacttatctacatgagacagcttcctttgagcttgcttgtctccacacaggatgactgaacaagcatcaaactgaaggattaaaggatggttagcccaagttacattgatgacaagatgaccttctgttggaaagaaaagaaaaaataaacaagtgattattaagccctttttagaagttaattggttgggtgagcccttgatgacngttatgatcctgaggtggcacgcctctgccgattcttgcctcgaggcaa

SEQ ID NO: 333267 - DNA, 321 bp, Homo Sapiens
ttaaatatttttagttagtgcttttcatgagaggttgccaaagaaaaatatacactttaaaaatgctggcactttagtgatttttttacaaagtattttgtgtaaggttacttcagcagtagagataggactaaaatcctgtatattatcacaattgatctccatgcattcaattgacagtcacaatgggaagcaattatattcaaattatgaaggaaaatacatacccaaacttctataattactttaaccttgagggctagccctaggaggatattttaaaaccaaaaaatctgttaggggctggttatttaaccatat

SEQ ID NO: 333268 - DNA, 583 bp, Homo Sapiens
caaacctgccggcgcagcttcacactctgctctgagcggtactcggaatttgttaggtagaagagagcggcgctgcctgtcacttgaatgttcctgtcatatttgtggcacttgagggccgtgatgaccagcttcagggcccgcagcagctggttgcaacgctcgatgcgggcgatgtcaaaaagcaagttgatggcccgcgaggtgatctcaggccggtgctccgtgtaggcctcgatggcattcagcacctgctcttcgtttttgtcaccacttactttgtaggctggaatgtgcgtgaggcggcacagagagttctcaaagagcccgaggaactgcagcggcctcttcagagcccgggaaggtatgatgctgctcttgggaggctcaatgctggtctgccccgcttcctcttccatcttggagatgctgcagttctctaggatcatgtggccagagatgtccagggacattaggttccccagcttctgcacaaagaggctcagcacctcccgagtcagcttgaacttgtagtagctggagaggcggtctcgggagatgtccaggtgtcgagcttttgcag

SEQ ID NO: 333269 - DNA, 432 bp, Homo Sapiens
  misc_feature (74)..(95): n is a, c, g, or t
  misc_feature (109)..(170): n is a, c, g, or t
  misc_feature (277)..(332): n is a, c, g, or t
  misc_feature (373)..(392): n is a, c, g, or t
aaaaacaaaatttaagggcttctaggagaaatgtaggagggaaggtgttactgggaaatatgatagaaggttannnnnnnnnnnnnnnnnnnnnnagagaaagggtctnnnnnnnnnnnnnnnnnnnnnnnnnnnnnnnnnnnnnnnnnnnnnnnnnnnnnnnnnnnnnnagggcttgagcaatattcccatctaatttttattttgtttaagaaatgcagtcttgctcttagcaaagctaaagtgcaatgggtgtgatcataggcttactacagcnnnnnnnnnnnnnnnnnnnnnnnnnnnnnnnnnnnnnnnnnnnnnnnnnnnnnnnnggacttacagggtgtggcactggcaacgtgttaggcttcannnnnnnnnnnnnnnnnnnnagtaggagacaaagtgttcactatgttgaccggggtggtg

SEQ ID NO: 333270 - DNA, 449 bp, Homo Sapiens
  misc_feature (26)..(26): n is a, c, g, or t
taactgaattaacacgtcaaggggcnttagcactgggattggctcatggtcaggttccctaactcttggctgcgactctttcaacctgtgagtcctgggggattgaggatggcgatcagggaagccttcaactggcagagaggaccttgggagaactggcaaggggtgctgagccaagggagaggtgaacagcatgagaagaaggtaggaggtaggtgaggccattctgtatttggggacagtgaggtcaccttcccactcgtgtgtgtgggcggccgatgattgatttctgtcatacctgttaccatttggtgcagtatcgatgtatcgttggtgtctgtcattaactctgaagtaacttttacttgatcagtactgaatttcattcctaggcttctcagtcttcatagttgactgctcctgtagttttgccatttattactgcttaa

SEQ ID NO: 333271 - DNA, 514 bp, Homo Sapiens
atcactgccccttgctaggcgcccacaccccacctggggaaccattgccctacagcgccaggcacacacctggcctctctgcacctccattctggggcagagatgcaatggggaccaagtggggccgtgtgcacccagttctcagcggcacggtgccggcacgcagcagactccccttgagggtgagtgagtgtagcagagggacttcgatgcatgctctgcagggtcctccacacacccccagcacacatccatccactggacacctgcgccaggactgccctgggactccgaacccaagaactcactgcccctgcctcccagggaaggccagcaagtgaaggaacgaaggccaggatggaaaggaacaacagatgtttccagcaaatgctaccatggacagaaacccagcatgctacaggggagcaggaggctggggtgtgaatctgggtcatttctgggcagcccctggccacccaggcagaagcacaggaaacagactgcggtgctgacc

SEQ ID NO: 333272 - DNA, 648 bp, Homo Sapiens
  misc_feature (455)..(548): n is a, c, g, or t
cgtctactgacatggttttttgcacccttgtgaaaaatcattgaatatatttgtgtaaatctgtttctgggttctcttctgttccgttgttttgagtatctgttgctctgtcagtatcacactgtcttgattactgtagctacatagtctgacttaatgccaggtggagtctattcaccttatttttcaacagttttagatgttctaaggcttgttcctttccatgttaatttttaaaagaagcttgtctataactacaaaaactgttctaggattttgagaggaattgatttaatgaattagacttttgaaattgcatatgtaatgttaataaagttaaaaatggtaattctgttaaggaaaacaatttagttccttccaaagtctaacgctagttcttattttctgaagaaatgtgtatttttatgattttgaaattattgaatgaatattannnnnnnnnnnnnnnnnnnnnnnnnnnnnnnnnnnnnnnnnnnnnnnnnnnnnnnnnnnnnnnnnnnnnnnnnnnnnnnnnnnnnnnnnnnnnngaggccgaggtgataggatcacctgagcctgggggaggttcaggctgctgtaagctgtgattgcaccacggcactcagcctgagtgacagagggagacta

SEQ ID NO: 333273 - DNA, 469 bp, Homo Sapiens
ttttttttattgaaacttactttttattattttttccagttacccagcatgccacaatctgattgctgacctggatggaacagagtgaaataaatgatttacaaagagatatttacattcatctggtttagacttaatatgccacaacgcaccacgaccttcccagggtgacaccgcctcagcctgcagtggggctggtcctcatcaacgcgggcgctgtccccgcacgcagtcggtctgggagctgggagtctgactctagctgagcagagctcctgggtgtatgttttcagaaatggcttgaagttatgtgtttaaatctgctcattcgtatgctagggttatacatatggattttcaataaatgaactttttaaagacttgagttgtaatgtttccctttttatcttgtaggtgatggaaccaaaaccaaacacacccaaaagggcaccatattttaccaggggca

SEQ ID NO: 333274 - DNA, 225 bp, Homo Sapiens
aactagagcttttccagtccaattttaacctaattccatctcacacaaaacaagtgcacactatatcaaaatttgggggataactgctaaagcagtacttacagggaaatttatagcctaatattattatacaagaagagagttcacaaataaatgacagttcattttaagaaattaggaaaaccagccagcatgctggctcatgcctgtaatcccagtgctttg

SEQ ID NO: 333275 - DNA, 912 bp, Homo Sapiens
atgtgttctacgtagcttttatgtttgagaacccatagaaagaacagagttgagtgttaggttgtagacaagcattcacattgaacacaaaaggcttttcagacttgtactcttgtgaagtgtggttattcttagggatgggacacttcaaactgccttttttctccaggctctagagcagatgtgatattccagcaagggtgacccagctcatctttcacagattcagaaatgagacacatagatgagtttactctaaactgcacttaaactttcctgtagtcattgctttctctccctgcccctgccccttctgtggaagttgaagcagactaattgtatatcatcttttgttgaacagcgacatcgtgcttgggaagccagtgggtcatttgggtctagttttcattcttttctttggatctgcttcacagtttaaattaggcccaggacattgtatatggtggtttaagaaggtgactgtaacaggcagatgttgaaagatggaagcagtagtaggaggccaaactgtggaggacaggggtaataactggattggcaaatgggggttgaggagcatggaaggcagcccagtcagaataccttggcagaggctggagggttgtagttgtgtgattgtgatgaaatattaggggtgatggctgggtttggaagagttaagccgttacgaaatttcttcaaagaacattatcaaacaacacatatgtactgctgattaagcaatatcattaatgagcctgctttataatttaaaatgcaagcagatttactttcagtttcagtcatggaaccattgagacactttggggaggcaagtgaaccactgcagttctttctatactggaaggaaaaggaggaaagcaaagttattttgtggttttggagtagttt

SEQ ID NO: 333276 - DNA, 489 bp, Homo Sapiens
  misc_feature (226)..(226): n is a, c, g, or t
ggcttcctcctttccccagctccccacagacatccagtgactggcctacagcaccagaaccacagagcctcttcacatcagaaacaatcccagtatcatcctctacagactggcaagcagcttttggctttggttcttctaaacaaccagaggatgacttgggttttgatcccttcgatgtcactcgaaaaagccttagcagacctgattgagaaggaactgtccngttcaaagaccaaccttccctttcgccccacatctcttcagaactcctcttcacacactacaaccgccaaaggtcccaggctctggattcctgcatcctgctgcagctacaaatgccaattctctcaatagtaccttttcagtcttgccccagaggttccctcaatttcagcagcaccgagcggtttataattcattcagttttccaggccaggcagcccgctatccttggatggcctttccacgccgagcccatgcaatctc

SEQ ID NO: 333277 - DNA, 450 bp, Homo Sapiens
  misc_feature (17)..(17): n is a, c, g, or t
tccttccggggaaaacngccctttaattttaatttaaaatttttttaagaagaaccaggggggtcctcaacctaacattgccccccaggctggtcctcaaaaacctcctggccttcaaagcaaattcctccctgccctccagccctcccccaaagtgcctgggattaccaggcggtagcccactgtgccctggcccatgaaaattcattttaaaaaataagatacaactataagtttgagggtagaaaaagggaagagcattaatattttggggactcttggtggtaaatcccaggagccaagaatgcaggagacataactgctatgaacacttaaaattgatattgtggccaacagctcacctctaaaacttccccactgaaaataatggcatggaagggaaactcgggtccactgagaagtgagggtcaggtttgaagctcatggtgc

SEQ ID NO: 333278 - DNA, 516 bp, Homo Sapiens
  misc_feature (32)..(32): n is a, c, g, or t
  misc_feature (79)..(79): n is a, c, g, or t
  misc_feature (117)..(117): n is a, c, g, or t
  misc_feature (345)..(345): n is a, c, g, or t
  misc_feature (350)..(350): n is a, c, g, or t
agcacagccttgaacagacagttctggggccngcagtgctgggccctttagctcctttggcacttccaagctggcatcnttgcccccttgaccaacagaaataaaaaatttttagcntgccccaagttttgtgcctccaagcatatgaaaaaggactatttgaatccccaaaacatcaggagtcgggaaacttcggaagacagctgtgcctggctctgtggctgcatgcagtgcttcacttggccagcagaggtcagctgtgccgagctgccccagccatgagaagagaagcctgcccttgctggcaggtggctatggccggcccagagccttcctgcccagctnccttnagccctgctgcctgggatcaggctgggagatgggccttcctgaccgccagccttcctctccccgagcacacgcacatgtagattcggggggaagctgcctgctcttccttagaggagccggggcagctatctgctggtccctttctgaacaactgttgatatgaaa

SEQ ID NO: 333279 - DNA, 391 bp, Homo Sapiens
gtgagaatagcttttaatttaaaacaattgaagcaataaatcatccatctctctttccatctcaggcaaataatctcccaaaacatttgatacagtttaacaacaactgtgactagtgcaaaataaaataaatacaaactctttcaggagccaacatcaaaacctgctggacaggtgggcacaggaacagactcagcctctgccaaggctgagacaagcggcacatcaagagtggcaggatttgtgcagtgtttcaacacacccagctttgaacagactcaacaatacctggggaggggaaaccacaagagggttttgcctacaatgaaacaaatatgcccaacaccctcaagtggctaatatccttggtacctagaagatgctagaagag

SEQ ID NO: 333280 - DNA, 381 bp, Homo Sapiens
  misc_feature (67)..(67): n is a, c, g, or t
  misc_feature (364)..(364): n is a, c, g, or t
caaatcatttagccttcaattgtagtaaagaggtgcaatttagttctaataaaaaatgtctttaacnaaaatgtgactacgtgactaagatgggaaagtaggtagcagtaatataaatatggaacaatgtagactactaattggaatagtaaagggagccattttcccaaataaaattaaaatgtaagattctgcagtcagaaacaaaactttaaaaactccgaacagtggttaccctctgacagcatatggactgggaaggggcaaaaggaatgctttttgcatctcagcatagtgagcccttgtctcctacaaacaataaagcagcccaggagaatcaccctgaaccctgggcagggtgganggttgtagtgagctgag

SEQ ID NO: 333281 - DNA, 468 bp, Homo Sapiens
tgaaatttttactcctaattattttattgcttggatgatattataagtggaacttttagaaattttatttccagatggttcattgctaatgtatggaaaaaattattaatttttgtgtattgatcttgtatccacccattggctttcattgacagaaattacaaataacattcattcattcaaaaatacattatgagcacctactatgtctcagggcactgtgctgggctctgatatatgatggaggacacacccctcaaggggcttgaggtaaagtagggggggatgtagtcacatgaggtgcactcccaccactgagaagatgctgtaagcgctgtccctgtgattgcacagggcccctccctggggaccaaagcacaagcttctctccagtcccgggagcaggaaaagctgagtatccccctagcaaccattctattttcatctcgtgcccactgtgaattgtag

SEQ ID NO: 333282 - DNA, 439 bp, Homo Sapiens
  misc_feature (45)..(259): n is a, c, g, or t
tcaagagagacctcatcccattcagttgcttccatttatttattnnnnnnnnnnnnnnnnnnnnnnnnnnnnnnnnnnnnnnnnnnnnnnnnnnnnnnnnnnnnnnnnnnnnnnnnnnnnnnnnnnnnnnnnnnnnnnnnnnnnnnnnnnnnnnnnnnnnnnnnnnnnnnnnnnnnnnnnnnnnnnnnnnnnnnnnnnnnnnnnnnnnnnnnnnnnnnnnnnnnnnnnnnnnnnnnnnnnnnnnnnnnnnnnnnnnnnngcaagtacttttacacaaaatgcaaacaccattcttccatcataaaagtgataccacagcttccgtgaagttttgccaggtagtactcataattaccttgggtaaactttttgatgttaaactgtatcttcttattacgagtttttccattgtatttaactgctttttacaacaacacat

SEQ ID NO: 333283 - DNA, 461 bp, Homo Sapiens
  misc_feature (299)..(299): n is a, c, g, or t
  misc_feature (331)..(331): n is a, c, g, or t
  misc_feature (385)..(385): n is a, c, g, or t
gccctctctgggactgttgctccaacccaaggaaatgtgagtaggggccgagtaacagacccagaaggggcagcctgaaagcaatggggtctcaaaacaatagagaacgtgggcaggttgggctggggtgtgggcaagaaataagacgccagctcatccgaaactggcctaagagtcaaggtgctgaactccctggctccatcgaagcacaacgtcctcacttttgccagggctcagcgcactgtaagtctcattctgcagacatctcatgcggggacaccgaggaccttcaacgtccnaagtcctggtgcccagccaagggttcttcctnttggtgctcttagggccctcctctgttatccaccagctgcctaggagggccttnttccgccaggactggaggaatggaggagagcctgctggtggagcctctgccccagagatgcaagcaggaaccgctt

SEQ ID NO: 333284 - DNA, 880 bp, Homo Sapiens
  misc_feature (251)..(251): n is a, c, g, or t
cagcccgtttttccaaaggtgaaacccagagccggcccttttgcgaaaccagctttagcctcgaaaaacaccggggtttctcacaaaacccgcccgcaaggtcatccgtcccgcatagacgctcgggcttcctttcctgagagggtctcagcgtattggaccaagttccagcaacgttaacgccgcagccagtaattacccactagggatagtccgcccgtatatacgctttttcttcttctacttttctnttttctttacactataatatgcagttatttgggccatcagatcattcaccatcatatgtagcaatcccaaggagctataggtcctgacttactaactggtgatgcattaaacctttccaaatctacagtacagcatggtatggaaagaccaaacaatgagctgcctctgccatttgctgcctgcataacctggggaataattacatgactttgctgagcctcagtttccttatatgtaaaataaagataacaatcagtgacctgctgctatgatttgaatgtgtctcctccaaatttcaggtgttgaaacttaatggccagtgtaacagaattaagagacaagacccttaacaggtgatgattaggcaatgagggctcctcccttgtgaatgggattgaggtctttgtaaaagaggtttcacgcagcattcgactctcttgcctttatgccatccaccatgtgaagacatagcattcctcccctctggaagatgcagcccttgttagacaagcaaacttgttggcaccttgatcttggacttaccagcctccaaaactgtaagaaataaatttctgttctttatacattacctaatcttaggtattttgctatagtagcataaacagac

SEQ ID NO: 333285 - DNA, 407 bp, Homo Sapiens
ttttactcactcatccctcagtaaggcaagttatctccatttcacagctgaagaaatgaaggtttggcaagttgggtgacttgtctaaaggcgttcagtgggtaagcagagagccagggctgaccctcggtctgagcagttgaaacgtccagctgctttcctctgaccctgaccacctgggcatggggatggagactgaagcttgttaagcaggaaggtgacccaatctgaagttttaaggagatttccctgaggcagctcagaggatgggctgagggcagtgaggtaggagagggttggatgattccagagaaaccacccagaacactgacccgaggcaggaactgtgggatggacagaaggggctggactgcagacactgggaaggtgtattcagaattgctcgt

SEQ ID NO: 333286 - DNA, 686 bp, Homo Sapiens
tatgattgcttgagtacagttccttggaaaggacacaaggggtttcataaagcggtactaaaaatctgcttttctccctagcatttaccaacaaccttgcgatccgatggcttgaaataatggtcagagtgcatgttacccaacttctcctgggctgctcctactctgtcacactgcacacagatcatgcccgccaccaccctacactccccgacctcacccaccagtcaggacagtttaagtcctgctgacgcaccacggcgtgtgttggctcgtggttgtacttttcatgagtagcagggaagatacactccaggaaggcgggatacaaattattgaactgtgtgacttaaaagctccagtgagtttcgtcggaagtataggagtttgaaagtgctccccagtcaaacccagaactacatagggtcagccgtggttgagctaatttctgcttacacatgtgtggagggtgtcattttctgactacgcctaggcctgagtggacagccgattaaaagatgtaaattcgtggattgtatcaaggagagcgggttccatctttgtggtcaggagggggcccactcttttgttccgcaaagggtttatctggatgttccttgctggaagttgcttttccagtttggatcaaaccacttaagtggagctccagcctcagtccttgcaat

SEQ ID NO: 333287 - DNA, 679 bp, Homo Sapiens
  misc_feature (18)..(18): n is a, c, g, or t
  misc_feature (50)..(50): n is a, c, g, or t
  misc_feature (382)..(382): n is a, c, g, or t
  misc_feature (541)..(541): n is a, c, g, or t
tttttggggccccccctngtaaaggtcattttacctttggaaatataatngggaaaacaaaatccccacaaacaggaagcctatgttcctatggttatgtccttttaaaacaatgttcctgtatttacaaattgtttttttcccctaagtaaaagcacccagctgaaaagttataggctgctaaaaccgttacaaatattacaaacccattaaaagacattatgccaaacgtacttattaaaaaccttaacaaaacgaagagacaactgacaacgcaaccaaccaattgagccaccatgctgggctgggtggcagttccaatttccttgcctgtgtttctgataaacggggctgggagtgcttatcccagggagaggatccntcgcccaccggcaggtgacctacagggacagagctggggagagggcagctgtgtctcaaggaaacatggcagcctcacttcctgctgtaggtggcctcctggtcagaccccctcaacccacaggacaagggcagaggcatacaggagggtctggccagntttcggctgttcatctgtcaacagaatgcctttctgcgaccttgtcctcatccactgaagggtttggagtttttgttttttcctagacacttagctacaggacactgtgtgatgtgtcctcagggacttgctgtctgc

SEQ ID NO: 333288 - DNA, 831 bp, Homo Sapiens
  misc_feature (500)..(516): n is a, c, g, or t
caaataaggcgggaattttcaaatcagtagatatttcttaaagaaactgtcatgagatttgagaacaacatgtattgagccacagctgaaggactgagaatatgatttctgcaaagcgcagagaagaggcagggcccaggctatggcaggccagctggtaggcaggtgaagccagatgggaatcccagagtgcccatctaaagccagaatttggaggcccgacaggccccaacaacgcccaaagccctcccagagaggcagatgctcagcaggtgtggagggaaccccctggccctgcttccaaggcccctcactcacctccagtggggtattcgtctccaggacatgagtctcatctccttcctggtgatgacctgcaagatgggtctgcctccatttccttccattggggatcgagcaccgtgcctggcccagaaaaagaatcaggacatgctgctgtatgaattaatgaattatgggcagagggacgtggttaaacnnnnnnnnnnnnnnnnncatttggggacaataaaatcgaaatgcatttggaggctggagaatgggaaactcagtcttttcagagagaagcgtgaggaacaggaaatggaagctggaaactgtaggtggtgaaaagttctagtttcatgcgaaaagaacttcagctttatagtttaagtagagaagagcaatccaaagatttttaatgtaagaaataattggtccaattttcatttcatgctcaggcatttagattttatgttgaggacatgaaatttgacaggtttgaagctgggagtgccatgattaaaagtgggtgccttgctaaaatgg

SEQ ID NO: 333289 - DNA, 925 bp, Homo Sapiens
  misc_feature (566)..(566): n is a, c, g, or t
ttttaccaaagaaacaattgtatatgtgtttagagactcaatcacaatcaaatcttcaccgaagaagttctgtatacattaacttggctatacagcctttatccagctgtctcttttcaaatatacccagccaccccaccccccaaaaaagatgtaaactaaaaatatcataataactggaggctgacatctgaaatcctcttaaattaaagcatccaagtccatgcaacaaatatttacattaagcatagaaatgctgggaaatggctcaaaaaatctgatagggctagtcattaacagacatcttcaaactgcacaattcatactagataaaataccgtatctactaaatatctgctttctggatattcttcagagaatgtctgatgggtaatatccttatggccatggccaatcaacataaacctggcaggaatctgcgggacagagaagtagaagaggatgagagccattctggcactgtgtcctgacaagctctgggacacatactctctcagtaccatcatccccctcctgcctgtctcctggagagtttgggcgcaatnaagaggactgaagctgattcacattcctgaataaatatccaggggcccttagaacacagagcagtacagactaatggtgttaaagtagcagtagcacgtttaggggtaaattttaatttatcactttcattttaagatgataaaagactcttaagtccgttgaaatgtaggttgtactaatgttcaatctaggtaattatgggaaacataatgataacaatttaacataaacaataaaaacagaacacattgtctgaataatctgcactgtcagttgtgaacgagtgccaaatttactacttttgtgaaactgtatgatttgctttggcagggtgattttcgtttgcaacatttgttct

SEQ ID NO: 333290 - DNA, 420 bp, Homo Sapiens
  misc_feature (326)..(326): n is a, c, g, or t
  misc_feature (337)..(337): n is a, c, g, or t
  misc_feature (361)..(361): n is a, c, g, or t
  misc_feature (368)..(368): n is a, c, g, or t
  misc_feature (373)..(373): n is a, c, g, or t
  misc_feature (395)..(395): n is a, c, g, or t
  misc_feature (404)..(404): n is a, c, g, or t
tacaagaaagtgctgcttacattgttgttttgtgttatttagtgatttgttcaagcgctcatctcttcccaccagactgcgcttcctgaggacagggaccttaaagcacctcacatagggtgcgcgtctggtacactgtcgccgagtaccagacaaccagtgtctcacacgggggaagacgatgaagacagcaatggcatccttggggaagatggggcaggagaccccatgacacctgggcacctggggcctaagctggggaggccagcgcgttccccagggagctcgtgccgaattttttggcctcgaagggccaaatttccctntaagttaagtncgttttaaaattccggaattcaangtcaaangcctnttttccccgttgttgaaaattntttatcccnttcacaatttccacaa

SEQ ID NO: 333291 - DNA, 422 bp, Homo Sapiens
  misc_feature (275)..(275): n is a, c, g, or t
tttttgaaattgtttatgccttcattcatttattcatcaaatgttcaatgaagacccatcttctgcttttgcacggggaattcactttccatctatacaaaggagaattaccaatttaaacctctagattagacccacatttgcatcagccaacttgatgtctccactctgaggtatctcaaatttactgcgtgtaaaattgaacctgagatcttccctaatcaggactatcttggtggcaagtgcagaaccccaaccgaaactggcttaagcanttatggaaagttattggctcaattaaccagtaagtccagggtcagggtgacttcaggggtaaaatggatattggagaagactcgatgtctggtctttccatctcttgcttctggttttctctcttctgacttcactcttaggcctac

SEQ ID NO: 333292 - DNA, 462 bp, Homo Sapiens
  misc_feature (227)..(227): n is a, c, g, or t
  misc_feature (304)..(304): n is a, c, g, or t
  misc_feature (321)..(321): n is a, c, g, or t
  misc_feature (367)..(367): n is a, c, g, or t
atttaaaaagtgtgccagtctgaatataagcatttgattttgtaacattggacttttcttaaaagtacagaggttcaaagtataggtatgtccattggcataagaatagagtgggtgagggtctggaccaggttccaggttggtccagtcagatgccaagaaccaaagaagaacagtcaaactaaactggtctacttcaaaccataagtgggcctgtgtgaagagtngagaccacatgtggggtgtgcacacctcttgtccccaggtttccctccctttggagcttttctttccctccctaaanttctctgggcctattgncattgttgtttctttaaacttaaagggagagaaaaacaaaaatgangattcctacactttgcctaattgagccactaccaggttttctgggcagctgtggccacattaatttgtgagatggattttttttccttaaggttc

SEQ ID NO: 333293 - DNA, 389 bp, Homo Sapiens
ttagaagaaataaaaatttgtctttatttaaaatgtggcaattgggaagtacagtacatgcttccctgtggcttgggggtgtgtagttggggccctaattcttgagccagtcaagagacacttgggatttagccctcaattgcagcactgaggcactggtgcgaaggaaacaatcctgagggggtccccaacccacctagtcactccttagtttgcagaggcactatctgcagagtcctgtgaaaggctgcagtgaagtcttgcatgagactccccatccagcggagttctccaagctgcagggtagagcgttgtgccaggagggtgtttgggctcatgaaacagtggagaggcgcagaggctcactgggaaaccttggcctcaccggg

SEQ ID NO: 333294 - DNA, 589 bp, Homo Sapiens
ttcttccagagccttcaaattcactgtgctcttaggtttgccttcttctgacatatactgaaggcagctaaaatgcagttttccgcataaacagctcctcgttgtatatatgcacaggtacctgaagggtatgtctgggagacagcgcctcggactctaaataagtggggcatcaaaggagaaccgtcctcccagagccatgggtagctggggttcctccgagacagccccatccagaatggaaaactggagtaggaaattgcttgctggatgaagtccagatcagctgtgctattaattttcagcaacttggcatccaaagacaagcacttctcttggctcttttcccagttaaatgagcccgaggaaaataggtaacagttttctccatgccagatccagtcttgcggacaaggagctgaacaatttgctactctcttcagtgtttcttggagattcagattctggtggtgacgttccatttgctctttggatttctcattcagcttccgagcaagggtttctatcatttccttgagttcgttttctgactcctgtgaagcttcttctgcttgttgccgggctgaga

SEQ ID NO: 333295 - DNA, 418 bp, Homo Sapiens
gtttgtttttaacttttgttttaagttcaggggtacatgtctaggtttgttatataggtaaacttgtgtcatgggggtttatggtacaggttatttcatcccaaatttgcatttcttattatgcatttctttttataaatgagaagaaccaaggaaaactccaatgagaaacagagccaactgattaggtcagttcattttagataatgaaaaacaggaagttacccttttaatctaccaaaggttggaaatggtgggaggaaaagaaggaggctacctgagaacttcactttctagagcttgtatagtctttccttgaagagttgatgagattgtgtgttgcagggaatgtaagggaattgcagacagcgggttcaatttatttttaattcctgagcatcaccatttttagattaca

SEQ ID NO: 333296 - DNA, 414 bp, Homo Sapiens
agattctttccattttttaaattactaatgtgaatttgagtgtgtgtgcatgtgtataaaatttagcaggaaatcaactatggcaaaagtaaatctgcttttactaaaaatatctaatactgtactataataaagtgttatcttagccttatataagctcaactacttcctttactatgtgacatgagtatattacaaaggaagagagttttgaaaaacttgcatcattaaccattccaggagttattcttactgtatagggaacttgcctttgctgaaattgaacatagatgggcatttgtacaggcgctcaaacagagcctgaagagaaaggtcaaaccattaaagaaatccacaatattcagcaacttatctaaagcatggtatattttacttctaatttcctgttcttcc

SEQ ID NO: 333297 - DNA, 442 bp, Homo Sapiens
  misc_feature (95)..(95): n is a, c, g, or t
accttttggccttcccaaaaatgcaacaacctttttgggttttgcaaaaaaacggaactccccagaacccaaaaaactgaagctgctcctgctgnaggtggcggggaaattctgggaaagggctgactccttccccactgactctggaggcatcgggaggtgccggcctcggccagcatgcaggactgacttcacagtggggctgggggcccagagctgcagaccatgatgccccgggaccaccgaacaggtgccaggtgagtgggcgtgggcccttatcttcctcagaccgcctgcctgctccccagagttgaggttgtcaagctaactcatctgcacactcattttcttggagtcttcaggaaagaaaccctccttttaggagtctgtttgagcttttctatctccacattttcaattctgaacatccctgtgccgaaat

SEQ ID NO: 333298 - DNA, 388 bp, Homo Sapiens
aaaaaataaaagccaaaataacacttttaagatcccaggttttagacaaggcagctgtagtctctccatcatcctcactgtccatttgcttcttcctgggacagacactgtggcccagtgaagctgaggggaccctgggattcaaagctcggtggaatggaccctccctccccccacaagctgtaataacctgctggaatcccacacaacctgagggcttcacttgtcaacagctcccttccctcagaggctattttgaggcaggcattcggtgttttatgactgagctacccagggagaatgggtttgaggccacactcaactgttccaaggagcagcactgggaccaaaggctgcttggttccctgcggttcctgatgccacccct

SEQ ID NO: 333299 - DNA, 616 bp, Homo Sapiens
  misc_feature (150)..(250): n is a, c, g, or t
  misc_feature (312)..(312): n is a, c, g, or t
gaaaaaggatgcagtgtcacgattatggctcactgcaaccttgattgaactcctggtctcaaacaatccttccaccttggcctccagagtagctgggactagaggcatgtgccaccatacccagctaatttatttttttaattttgtctnnnnnnnnnnnnnnnnnnnnnnnnnnnnnnnnnnnnnnnnnnnnnnnnnnnnnnnnnnnnnnnnnnnnnnnnnnnnnnnnnnnnnnnnnnnnnnnnnnnnntatgagccattgcactcagccttaaacctgttttctattataacaaaacttaaatataaggnaaatattacagttttccataaagatcccacacagtactttgaggagtgcaaaaacaactagatttgaggttcctaaaggtccttatgaacttgggatatggcactaatgtgacaaaaagcttcctaagtatacgatcttgcaagctaatctgcatgtcatgaaacaggaagtttcacaaaccaaattgaaatgcttacatcacacagcttattgagtcaatcttaaacacacaacaaaaatcaacaggaaagagataggtaaattaatacactttgcacagggtataagcacttactgaatcct

SEQ ID NO: 333300 - DNA, 492 bp, Homo Sapiens
  misc_feature (23)..(23): n is a, c, g, or t
  misc_feature (74)..(74): n is a, c, g, or t
  misc_feature (100)..(100): n is a, c, g, or t
gcggcctattttaacccatccgnactgcagaatccatcatcaaagctgtagcccaaggatttaataaaatgggnaaggcaaccctcccctctgagctggnaggtgtggggcctaagggttaatgagggaaaatcccagtggacccaaatattggtattcatcccagcctcccctcaacccctctttccaggtggacagttcccaagctcccagagcatccctagaaggtagccccagaaagctgcatttagggctgatgacccccactactacccgtgttggcctatctggtcattgaaccaagggctttggcaaatctggttgaagaagtggcctcttgtgcctttaaagaggcttatctagctacatcctaccaccctggttatgttctcttggctcttgctggctgacacaaaaagaagttatggccaaaagtgggggttcacttaaagttccctctttaatattgttatattctataggaattttgtt

SEQ ID NO: 333301 - DNA, 485 bp, Homo Sapiens
  misc_feature (245)..(245): n is a, c, g, or t
gaagtcacttaaccttctctggggcatggtttcttcatctgttcccacctctgaagactatcgtaagacagaatgaaagttaagcaacttaacgcaacgcccaggataccagaattattctaaatggcagaatcctacttagtctgtcatcttgggagttctctaggcaggcaggttgccaggggtggggctgagatccagatgtgctctaggtccctgtctgctgcagaatcatgtggctagcntgcctgggggtcccccaggtccttgcaggagctgagggtaggagactccatttgccaaacaacttagaactttgggcctcagtttccttgtctttaaaaggaacaggtaaagaattcataaaaacaattgacaagggctgcctggaatttccctgtaatctcttccaggcagaggaggcctcagaggtgagagtaagagcaggaaaacagggacaggtttcactctgttgccccaggtgt

SEQ ID NO: 333302 - DNA, 410 bp, Homo Sapiens
  misc_feature (37)..(37): n is a, c, g, or t
  misc_feature (74)..(74): n is a, c, g, or t
gactccgaagaagtcctatccacaaaccacaaaaccngttattatggaagcggacagggccccctttaagagtnatatagtggttaacaaaataacaaaaactcaggccccaggtggcagttaatcctcataatgacccatgaaagtaatgcccaagtgtggttccatagacccagccagcatcccgcatcaccctgaatgcctaatagaattcctgacattacttttttcaagttttatcaatgtaatagtataaaatgctcattatgaaataaagcagttcttgccagcactcccgaatatctaatggcaatcactttaattttaacaacttgtttttaaaatctcagtattttaaaatattttcatactgtttcttgagttacaaattttagccatgtcgatttcct

SEQ ID NO: 333303 - DNA, 389 bp, Homo Sapiens
  misc_feature (244)..(244): n is a, c, g, or t
  misc_feature (366)..(366): n is a, c, g, or t
ggcacgagctggaagaaaaaaatgaataatcccctcaaaattccaatcaggttctgttactactttttaaagtccctttgatagcttttcatcatctttaaaaaagcctctcatcatccttcttaaatatatttctcagctcccgctccattatgggcctgattttcttctggttgctcctgcttttaccttttacccctccgtcagaggggccttggcacaggactggctgttccctcttttnttcctgtttcattttttcaggatcctggccttcatttttctaaaggtcctcagggggaaggcatttcccaggacttccttaaggggcagggggcccatttccaattggctgttcaggaggantttccaggaggttggcaggtaac

SEQ ID NO: 333304 - DNA, 397 bp, Homo Sapiens
  misc_feature (77)..(77): n is a, c, g, or t
tgtccctagggccccatatgccccagttagtgattgaccatggggcctgcaacctcagatccttaagcctagaggcnaagattttaaacagggctggaaaaagatccaggtttaccatatccttaaaagattgaactgagacaatggatgagggcaggaggggctgagactggcacctgcaggatcagtagggagacctatgtgagatccctgaaccccaggcgctagaaaggagggctgtcactaaatagccattatcaaataggtaggtttgataagacttggtcacctctagaagtgggaagaatatgggaggtcgaggcaggagaatcgcttgagcccaggagttcaagtccagccctggcaacttagtgagaccccgccgtctctacaatta

SEQ ID NO: 333305 - DNA, 705 bp, Homo Sapiens
acaatggcaagtaagacattttatttctgtaattgaacataagcaattccaaatgcttttctaggcaagacatgccagcgattagaaaatgagacagcttaaagacagaggtacatttaacagagaaaacacgcctggaagctcggccggccccgcccatgctggctcagttcctgcccctggagggaaggggccgaggggcttcccgtcccagggaactcccaccacaggagtctgcagacgggctggcctggcagtcagtcccaggaacactgaccatccccttagggaggcaccacgccctggggagcacagttccaggccagggccatgggtcttgccctgaagaccctccctcagggaccacgcgccctgaccctcattgcctcaccatattataaaacactaaaaccgcttaagttctttccccacagagttggggaactaattgtaaacagaatacacgtctacatatcagccctgagacagctggccccgctgcacacgcagcctgttggccccagcaagacacggtcagagctggtaagtgctctacagcattcagaaatcttgaccacagcgtacacacagctcacaagtcagtgcaaacagaagctaatgacatcctccaagaaaattccatacagttatgacaatggaaaacctgttatacattgtaaccatacatcattagcaatgtttaaa

SEQ ID NO: 333306 - DNA, 455 bp, Homo Sapiens
gcttaatgcattttttaatttaaattttttatgttgtacagtttattttaaatatagttgctattttttaacacagatgccaagtcggtgctgtgagattttctttctggtgatttggaccagtttgtctccctcttgatatatccatcccaaatggaaaggccctgtaaactgttacgatcatctccagaggttaactggaatatacaccaatgacagcttgcctgggtatgccaaaatacctgcaagaatgtccacatcatctggtgatgtccccaaataacagtttttaccatagaaagatcgttaacatgtttgctttaaaagtcattagcagtcataacgtacttacagattctgcctataaggaataatacataattttagatataaaggccccactagtccaggtttccttatgccactgtgcttcctactaagtgttgcgaccagct

SEQ ID NO: 333307 - DNA, 474 bp, Homo Sapiens
  misc_feature (383)..(383): n is a, c, g, or t
  misc_feature (420)..(420): n is a, c, g, or t
  misc_feature (459)..(459): n is a, c, g, or t
cagttcaaattttatttgtatacaaaaatatattataatgggaaagcttactgctatttccaactatatataattaattacaaatattttcataaaagcactttaaattacaggaaagctatgttttaagagaaaatacaatattagcatggatcgtctgttctaatatgctgcaagagggtaaacaaagtcagtttcactgtctaaattgcccagaaatggggatcaagggctgattttaaggtgagcctgagagtggcctggggtaggaaggttgaggtgcacgtctttgtcccctctggcagcagattctgtagctgattttagcaggtcctcgggaactttctgaagcttctcccttatggatgaaaagggcccaggancttcttgtttcacatacttggctaagttttgtcaggntccgccaatgaagggcttctagctcttttgtgtctcccnaatttaggctttctg

SEQ ID NO: 333308 - DNA, 454 bp, Homo Sapiens
caaggcctgtcttctgtgcaagtggttttggctttcacattcccaacaggacacagaaccccaagaggcaactggaggagcagtggagggtggtagctaagatcatggactctgggccagactgcctgggttcacatcactgcaccactcaccaactctgtgactttcgggcaggtttccttaatctttctgtgccccagttcctcatctgtcaaatgggggttatatagtatctaccttctaagattgtgctgaggatcaaatgtgtggtatatggaaaacatttgcagccatgcttagacctagtaagcattttacattttagctatcatataccctgactgcattaacccatgtgtcttaaaatttttcttccgggaaccaggatgttctaggtaggcacacgtgatttttctaaagacgtgtttaaattgtcaagtgttcacattgagaa

SEQ ID NO: 333309 - DNA, 340 bp, Homo Sapiens
  misc_feature (95)..(95): n is a, c, g, or t
  misc_feature (209)..(252): n is a, c, g, or t
  misc_feature (313)..(313): n is a, c, g, or t
  misc_feature (330)..(330): n is a, c, g, or t
aaattgggagtgtagcagaatgattggaggggttactagagactaattgctgcctccttccccccacctgctgcctgcaatttctgattcacttnggtctcggatgggacacaaggacttgtattttaaattccccagggcagatacccaatactgcagatctgggaaatcacactttgaggaatgactgctctaacatattaaatgcnnnnnnnnnnnnnnnnnnnnnnnnnnnnnnnnnnnnnnnnnnnncaatagggtttctagggggagcaggatggatgtttgggttacataaataagttctttagtngggtgatttctgaggantttgggtgcg

SEQ ID NO: 333310 - DNA, 596 bp, Homo Sapiens
  misc_feature (437)..(437): n is a, c, g, or t
  misc_feature (463)..(463): n is a, c, g, or t
  misc_feature (475)..(475): n is a, c, g, or t
  misc_feature (515)..(515): n is a, c, g, or t
  misc_feature (571)..(571): n is a, c, g, or t
  misc_feature (582)..(582): n is a, c, g, or t
tttgtcaagcacagagcctttattttacattttctcaaagaggacattgtttaagtgagcagctaacagaatttataagagagaaagtgacagcaaaggtaactggctcaagtccctctgtgtacggtacgccatgtacatttcatgtctgagcaccttgtgtgtgtggtttaagtgaaggtaaggcagtgtagattgtgcgaacaagagatctgtgttctgtcatcaggaaaggctactacatgcatcacacaaaatgcacaacctgaaatgcttcaatctgcaaccgaagtttcctcaagcaagaattcgcatgaacactgacgaacacatacagagcaacttgggcagagagaatgggatgatgccatgaggcagttgagggttaggcacacttgatccaggagcccccaaaagcagggagcccgtccccagtnggccagagcagggctagggaggggtnagcagcagcccntcttccagccacctttgagttcccttcctgcctttcactnttaggtttagccagcttccacggtcaaggtgagggttggcctttgggaggggttgnacccgggtggnccctgggttccctt

SEQ ID NO: 333311 - DNA, 632 bp, Homo Sapiens
  misc_feature (505)..(505): n is a, c, g, or t
cccccatggccagtgaaatctcccttttcttgccctgtaggatactgaggaaagccactgacatttcgtggcacggctgacccgaaactatctttgtaactatagcgcagacttccaggagatttgctaggctcagttctgctcgtaaaaccagggcccgctgcagagtggccactctggccatttccttctccattatggttggagttgttatcgccattcttgtttcttttgctccctccttctcctgggaggctctggcttgggaagtgatgcaatgactggtttccttttgcccaccatttgttaggtggcctttgagtggctgcaggatcatcctcttggggagcctttatcttgtccaccagggcttttctacccgacctgtcatggcttcccgggagacaatcaccccaacagtcttctcattaacctttggggttcccgtcggatgacaatggcatgtccttagcgcctggggaggtggcctcttctcttgcggcangactagcattgagtcttggggggtcattctgagcaccctgtgcccggggaggagccactttctcaaaagcttcaccctttgtaagtggggcagaactggggctctgggccactaattgcccgactct

SEQ ID NO: 333312 - DNA, 883 bp, Homo Sapiens
  misc_feature (267)..(267): n is a, c, g, or t
ctgaacggcccaaaggcccagggactcgaacccgacaagcgacattttttccttaaaaaacctgaactttcagggaagggttttacgccgcaaacggggtgtcacaaatcactcatcggatgtgcgtagcctaagcaccatcaatatttgtaagtgcccaaacaaagcttcttaacatctgagaggttaacagggcaggtgcctacccacgaggtgacacaagtagcttttctctcgtctgatcgtaagggacgcgatctctagtcntccaggtgatgctgagacaggctcagctcacacactgtcttgcagctctcccaatctcgagacttctcccagcctcctggtaaagtgtctctgtggggacttaacgataaaacggcttcctgctgtaaagctcattaggaaagagctagcggagactgaaaggttcgcaaaagagattaagaatcacacaaggcaataggatttttagtgaacatagaaataaatggccaagtggttttctatttggcatttgtcaacttgcacaacaactcttggtcatatccacattgctcattgcattaaaaccataagcgactcagccacctagcttaacaaggtatcactggagcaaacaacacggtctgcatatttgtaacattgtataataaacacaaaacaatgcatagtaaacacaactctactgaaacaaaagccgtcgctttatttacaaagtcacaaaatgaagtataaatacttctgtcattaatgtttaggaaaaccatttacaaaattttcaaatatgtacacgtagcttgaaaaatcaccagctttccattttgtcacaggtagagagagggataagcatgggctgacaacaccactcaaattgtaacgg

SEQ ID NO: 333313 - DNA, 472 bp, Homo Sapiens
gttctcctggctgtttattacagaacgaagaaaaaacacactggcttgaaacagacgccagatttcaaatgtagaggtgaaatacgaggtggcaattaaaatgtgattacagaaagtctggacactgagaaaagtttacaggacagtgggtgtgggttttctataacagacacttaaatatacatgacgataattgcagatagaaaccatcaaagacaaaccccaaatcaactaataatgtttacagatgttcccccccaaaccacagagccttacatcaaaacaaatactgaaaggctttaaaccaggaacagctcgccttaaccccacgagggtgcacacaagctgggctttttctctcggtctgaatggtaaagggaggaggatactctagctcctccaggtggattgctgagacagggctcggctcacacactgtctctgcgcctctcccaaatctggagaactctcc

SEQ ID NO: 333314 - DNA, 473 bp, Homo Sapiens
aatagatggttgattttaacactcctctaaataaagaaaatatataatatattcttggagttataaattttatttgcttttaagtaatatctgatcttactagtagtaacttgctatctgaaaacggcatcattcttttggatttttagggcagtcataaaagagaaatgacaaattagtttttatttctgtggagacatgatgtagcagatgatgggactgtcttacataactggatcttttagaactatcgaagattaagtagtaaaatggtataaaaagtttcttgacaatgttattttcccttcccttccctttttccgtctccccaccccaagctggttcctatgtagctctcactgttcagggacgcccacctgggtcgccccagattccacttgccgactctgaagtagagccgtcagtcattggacatatgtctcccatcatgtcatctcctcattcacctggag

SEQ ID NO: 333315 - DNA, 439 bp, Homo Sapiens
  misc_feature (344)..(364): n is a, c, g, or t
  misc_feature (375)..(375): n is a, c, g, or t
tttcagaacctttgcatatttatttattatccacaaagatggaggtgcggaaaagaagagggagacaggagggaaccgtactctcccactggaactctggggcccactgaggcaccattattggggatttcagggtggctgggcactgcaaactgctccctcctctgtggtccctgaaagagccccacacgcctgcttcagacgtgtccacgcacaccagtcctcacagacacacacacacatgcatggaggcaataaatatgttccgtaccagactgcccccagcctgacgcttcagggggccccctccaaaagggaggggtttaagtgctcaatttttttcnnnnnnnnnnnnnnnnnnnnncaaggagatgngggttgaaagccagactctgtatctcatttgctgactgaggccaatcggggtcttcccgggaag

SEQ ID NO: 333316 - DNA, 506 bp, Homo Sapiens
  misc_feature (281)..(281): n is a, c, g, or t
  misc_feature (360)..(360): n is a, c, g, or t
  misc_feature (376)..(376): n is a, c, g, or t
  misc_feature (390)..(400): n is a, c, g, or t
  misc_feature (407)..(407): n is a, c, g, or t
  misc_feature (440)..(440): n is a, c, g, or t
  misc_feature (464)..(464): n is a, c, g, or t
  misc_feature (470)..(470): n is a, c, g, or t
gagactgcatagggctcggggtggataatatattcaatgactggtcatagggtgtgtcagaccatttttgcattgctataaagaaatatctgagtttgggtaatttataagaaaagaggtttaattggctcacagttctgcaggctgtacaggaagcatggcactggcatctgtttctggtgaggtctcaggaagcttacaatcatggcagaaggctagcagggagcaggcctgtcacatgggcaggagtggggagcaagaggtggggggtccgaggggangcaccccacaccctttttaaaccacccagatttccctgaggagctcacttatccattgagggccagcacccaagagggncagcatccaaatccancccttaaggaattnnnnnnnnnnnaccattnccacccaccccttacccggggccccaccttttnaacacggggggacccccatttttnaccttnaggacttttggggggggaccaacacccccaaccctt

SEQ ID NO: 333317 - DNA, 405 bp, Homo Sapiens
gatttgatttatttttgctctgcaataaaaacaaacgtatttaacaaataccatatgttgcacatttccatatatgattaagatataattatgcccagtagaaggtgggagaagggaaaggaagaagatgaaatagaaaatataagttgaatctgatgcttaatatgatttttactccatgtatacttttactcaaatgatagctcgtgcacatgcaaggacggactgtgctatttcaaggtactttatatggggaaagaaaagcaggagaaggaaaaagggagggggagatggccatgcatctccacttcctgaaggaaaaagcactttggtccccataggtaggagaaaaaatatgttaaattaatgggagggaagtatgtgttttgcatggaggcctcattt

SEQ ID NO: 333318 - DNA, 418 bp, Homo Sapiens
ggcttatccaacaggtgtttattaagggcctacgctgtgctcaggctgccattcagggagccccacgaatgtgaggcctggccccttcctccaggcctccagcgccatctctggagactcccaggaactcacgtcgactcttgtcctccagttctactcagtccacttcatctcagcctttactgggccctcctgagtgcctgtcccctgctgggtgcgggggacaccacggaccagacctggctcaagtcatagatggggtgggcagggaaggcttcctgggggaagaggtgcctgagcacagggttaagggtggagaatgctgggccatggaaacagcagcagagagggttggaggggccatctgcaggcggatctgtgtcactagagctgatctgccgggtgggagtcctggaga

SEQ ID NO: 333319 - DNA, 264 bp, Homo Sapiens
tttttagaaaatctctttattagaaatcctctattcataaagtttctgtgtgactacagtactaagtagtatattcccacatttctgaggcagaataaactagaattaagggaagaagtgtaatgttatttttctatgaaatatagtattttggtttaaaaccattgggaaaccctacttcgattctaggttgctgatgaaaattgatggttatcctttttattaagcccaaatcttatcccccatttaaaagcgtggaaaaga

SEQ ID NO: 333320 - DNA, 442 bp, Homo Sapiens
gggttggctcaagtctttattaacaaagaacattctctttcatctataaagaaattcttaaagatgcattgacagtgttgaattaccaacagcctgtgaagatcagtttgaccggtgtggacacgtgctggttaagcactcaggcctacgtgggccgagcgggatcttgatcatggggctggtgtatggatccaccgtcggattccgtctgcagaggaggacgtagggggccgtcacacccaccaggcctccctgctgtgctttaacacaggcagaagaggttcatggcaatataatagtcaatgaactttcagtttaaattgtgtacatttttaaattgtaagatttttactgtatattgatgcatagtgtgattcaataaattgcttgtaatttaaaaactatttaatattcaaaataaatatagttatatatttataaa

SEQ ID NO: 333321 - DNA, 981 bp, Homo Sapiens
ctggtgttgggagactcaggtgttgggaaatcttcgttagtccatctcctatgccaaaatcaagtgctgggaaatccatcatggactgtgggctgctcagtggatgtcagagttcatgattacaaagaaggaaccccagaagagaagacctactacatagaattatgggatgttggaggctctgtgggcagtgccagcagcgtgaaaagcacaagagcagtattctacaactccgtaaatggtattattttcgtacacgacttaacaaataagaagtcctcccaaaacttgcgtcgttggtcattggaagctctcaacagggatttggtgccaactggagtcttggtgacaaatggggattatgatcaagaacagtttgctgataaccaaataccactgttggtaatagggactaaactggaccagattcatgaaacaaagcgccatgaagttttaactaggactgctttcctggctgaggatttcaatccagaagaaattaatttggactgcacaaatccacggtacttagctgcaggttcttccaatgctgtcaagctcagtaggttttttgataaggtcatagagaagagatactttttaagagaaggtaatcagattccaggctttcctgatcggaaaagatttggggcaggaacattaaagagccttcattatgactgaattacactcatcctttggaagagtgagcaagcagtggcagtttttcacagctcatcttgctgtgttcaattattaccatcacagccttttaacaaaatcatcttaaaatgctacccttcagccttaccctttaatggaaaaatgaaaggaagtgacaatacgggaggtctaaactttgtccctgttctctgtgttccttacctttctgtccctgtgtatagattatgtaaaagccttgtgtaaatatgagatgttgtcaaaatgatgcagtaaatgagcaatgacagtgtaaaaaaa

SEQ ID NO: 333322 - DNA, 545 bp, Homo Sapiens
aatattgacaccttcatcgagcacctatttgccctggctgtggatgatgacccggaggtgcggaagattgtgtgccgtgccctggtgatgcttctggaagtgcggattgacaggctcatcccccacatgcacagcatcatccagtacatgctgcagaggacccaggaccatgatgagaacgttgcccttgaggcctgtgagttctggctgacgctggccgagcagcccatctgcaaggaagtcctggcctcccatctggtccagttgatccccatcttggtgaatgggatgaagtactcggaaattgacatcatcctgctcaagggggatgtggaggaggatgaggctgtccccgacagtgagcaggacatcaagccacgcttccacaagtcacgcacggtcacactgccccacgaggctgagcggcctgatggctccgaggacgcggaggatgacgatgatgatgatgctctgtccgactggaatttgagtgtgtgcccctgcctgggggtggtggtggggtgcaagccctggactccctcaac

SEQ ID NO: 333323 - DNA, 460 bp, Homo Sapiens
cataactaaaaatttattaaggaaacaaaaccagtgctgcaaacgggacagaaaggagagctgggtctccctcccgaccacccagtcatcggccttccagctggggagagaatcttaaaggagaggccggggaccctgtactccaaagagcccagtcttctgagactctaggggactcctacccccaaactactggccttggctcccctacacgggtaccccatcgcttctgggcatagtcctgggggcctcagggaggggcagagcttgcgcacccatcctccaggcaggctgtgcagtcaggccatgggctctggggtatcccccactggtcccattaagatttgcccctggctccaccgaaaaccccgtcttcccctaagttgtccttgtctctggccctgggtttcaggaactcattcttggtaaggaagcctccccactgaggtaccagctaaag

SEQ ID NO: 333324 - DNA, 365 bp, Homo Sapiens
  misc_feature (17)..(17): n is a, c, g, or t
aatggagttttgggttngtattcctccactgttggttagccattgccaatgaaccaattgcacctaccaatttggatttttagttttagatagaggcgaatccccactgattaaaaactcccccattaaaataaagaatgggaattattgtgaaaccctgcaagggtgccttcaaaaagaaaacccagtgctgttgtatacctacctcgcctttctatttgctttttgaactttctaaaaaacacaaggaagctttttgctaagcatcagggcatttaaatttatattcatcagttgttcattttcttaatatgtaatgatgcataaaaaggctgcaaggaaatcacatctgttaatttttaggg

SEQ ID NO: 333325 - DNA, 396 bp, Homo Sapiens
  misc_feature (223)..(223): n is a, c, g, or t
gacataatgagtgaatttatagctttatttgcatacagaaaagtgcatgagaaaataagtatgtacaaaacagttgtgtggctgatcatgactttcaaaaattcaactacctagaaatagttacctccagtttagcacatttaggtatttggacatttaaagtactatttcaagtctgtgtttatagtgactgagtagggaagctgataggaaaattatgccnatatatgatcaactattaccattaaacataaaaccacaggactttctacttggggctaatcaatagagggtcatgtggcccctgtcttgtttagcttctgagcatcaccctcttcttccccctcaaggtaacattggatgtggctgattaactcccacaagaacctgagcatt

SEQ ID NO: 333326 - DNA, 285 bp, Homo Sapiens
  misc_feature (44)..(44): n is a, c, g, or t
cctttccaactttctgtttcagaggcagcagcagtgagctgcanattgcagccagccctttccccagccccactcccttctatgaactcctagccttcttcgcagacagcctagcatctggctaaagggcaccttgttagcaaacacaatttctatgaacggattacccatggactgaagctgttgttgccagcggctggaggaggggactccagacatgagtgttccatgagtgatgcagatgtggagtggaggtctcaggtgaggtgctgcagagccctgggg

SEQ ID NO: 333327 - DNA, 448 bp, Homo Sapiens
  misc_feature (266)..(266): n is a, c, g, or t
  misc_feature (332)..(332): n is a, c, g, or t
  misc_feature (364)..(364): n is a, c, g, or t
  misc_feature (369)..(369): n is a, c, g, or t
  misc_feature (381)..(381): n is a, c, g, or t
  misc_feature (404)..(404): n is a, c, g, or t
  misc_feature (409)..(409): n is a, c, g, or t
  misc_feature (416)..(416): n is a, c, g, or t
  misc_feature (430)..(430): n is a, c, g, or t
acgaggagccagaaggatctagtcagaacttctgagtgatggcagcagagactgtaaagccatttccagcattgtgcagaagtacaagctttagggtgtatctattcatctgttcctagtacataaaatttagccttacaaaaagatgacattgttttatgtattttttaatgtgtgcctttaaaaaggtttaaaaagtaggagataatttaagggtgtttattaattctgggggtgctgtctgggaggaagggacaaattcaatnaaatgcttattggaacacctatttggatgtttggatggacgttttgttatccttgtggggggtggncaggcatgctgggtgttgttttttgtggatcntgttnggggggtgcccnggaaatggatttttggaccagtnaaccntggaggntttgcccagagtcnggccttttccagtggaac

SEQ ID NO: 333328 - DNA, 549 bp, Homo Sapiens
  misc_feature (71)..(71): n is a, c, g, or t
  misc_feature (74)..(74): n is a, c, g, or t
  misc_feature (83)..(83): n is a, c, g, or t
  misc_feature (498)..(498): n is a, c, g, or t
tcaacttaatgaggatatagctcagagatgtgaaagccagagggttgtatgcccagcacaggccaagattnggntgccctggnctgggcttcacggaccacaagccagagctggtactttttaactatggccttaggacaaaccaggtgaaacagattaaccacatcctccttctttgggctagcaagtccagggctgcctggagtctgtctctaccatcaggatatagaatcttcctgcttggataaaaggagaggacaaactgtgtttctcatactttaaaaaacccatgtggcccgctacctttgtggataaaaaccccaggtaggatgcctgtttggaatgccagaaagtgctgggcaagaatggaactactggggctgctttctcaactcagccaaatttgaggtgtgtttggcccattgcagatgctgatggtaagcaaagtctggcctttcctcttctgaagtcttatccaccttcaaagagctacccagntgccaaaatatagccctatacattgatctaagcctgaggttggctgtctcc

SEQ ID NO: 333329 - DNA, 860 bp, Homo Sapiens
  misc_feature (278)..(278): n is a, c, g, or t
  misc_feature (398)..(447): n is a, c, g, or t
  misc_feature (470)..(480): n is a, c, g, or t
  misc_feature (665)..(674): n is a, c, g, or t
cgcgtgtttctcccggcaagctgcgaagtaggccaagctcggtcggacaattggggagaagccagcattattagcccacgaagagacaaccgggcaatacgtgccaaacaaaccccgtacgctaaggccatcgaccgcgatgtgaggacgtcgctccattccagtgggaggattctcagataagtggacgcaggttcatgcacgctttaacgacgcatgcagtaaattaccccacaacggatactgcggcgctaataagacttctcacatcttccttncttttgagtgaatctcatctgcatccaggtggagtcagtgcacgatctcggtcaccgcaacatccacctcccagattcaagcaattctctgccttggcctcccaagtagctgcttaaacnnnnnnnnnnnnnnnnnnnnnnnnnnnnnnnnnnnnnnnnnnnnnnnnnnacacagagcaagactcagtctcnnnnnnnnnnngatgagccacttatggactgttgagaatgactttcgcattcttccctttgcaagtataatcttatccacccaggatgttctcttccacaccagtgtttctctttcttccttcaaaatgtatacaactgattagccctttattaagtttatccttgacagtgtacttcctaactagtctaaacaannnnnnnnnnctgtataatttggctcccacatctgattgctaattttctttaggatagctccctatttcttttgtattcttaagacaatgggagtggaaatgaaaaatcccaaccaagggctttgtaagtagatcaactgaaactccgccaattatcacagggatgtaaggatcgatttaaggatgtaagcacaat

SEQ ID NO: 333330 - DNA, 413 bp, Homo Sapiens
  misc_feature (135)..(135): n is a, c, g, or t
  misc_feature (389)..(389): n is a, c, g, or t
ggtaaatcacctatgttttattataaaaaacatgtgacacttataataaacccagtaaggagcacatacaatttgccctgggttcccattttctgagcgatctgtgtttgcttggggtggaggcaccgggagttnggccacgtggcttcataaagctcagctgcggttctccgtggccacagtgactctgctccgggtacccagtccccgactccttggcctcccaggggccatcccgggggtctcggaaggcacagctcggttagctttgacttcttgggtgtggctgaaactcagcctgtacaggagagctgccattgctgccgcggggcctgcccagggtgtgagcacacaagctcacccgggcccaccctgtgccctgggagggnggctctgggcggctgcacccatgt

SEQ ID NO: 333331 - DNA, 408 bp, Homo Sapiens
  misc_feature (137)..(137): n is a, c, g, or t
ataagcaccacacctggcctatacctgggtattttaaaaaaccacattttcatcaaggcaaagttcctcagcattaaattttcctttggaacaatggaagttaagagtgcctataataaggggaataaatttagtanccctaaattaaacagactgtacaacctaagtttaataccctaaatgcaaaacagggcaaccaaaaagtatgccttcactttaaggcaaaccccaactttaaggatctctaggattttatattaattaattaaaattagggaaaattacagggcctttgttctaccaaattatcacaggatttctcttaacacacctggctaagatatttgaaattatacaactcacaaaagttgacttaaacttaagttttcagaagtacatctttgtaca

SEQ ID NO: 333332 - DNA, 362 bp, Homo Sapiens
tttttgctgtaacagtgtttattgatgatgagtccaggatgaacatggtgaggcgtttatacactccattctgcttctgctgcaggagggcgtcgcgaccaatgaaatccatgcccttctctaatttcacccgagactctcgtccacattccaggggcgtgggtgaggttatttatatcctgaccccagaaggcaaaaaacttctcaattcggagactgcgaagagcgtaatacccagcattccggattccgtatttctggccaacactcatcacttcattgtatacatgcagggcgtactctatggggatgtagagcatgaatcctggctctcctgtgtgcgtcatgctcatcacgcggat

SEQ ID NO: 333333 - DNA, 467 bp, Homo Sapiens
atcaggggcctgaggggcagctgtggctgcagggctgctctggactgaggggtcccagggcccgaggggtgcacgcctggctccccttggcacaggtgcgagtccgtttcttttcaagcagaagggggaagaggtgtccgctgtgtgggctgctgactcctctgtgtgtgaggcccttcatctaagtgattgtgtattcagtttaattctcattatatttcctatactgaaagaagatttttaacgaagggaaaaacaacagcaataacattcatatctctggagcagctaactcatacacgtaatgtctgcttttcgtacagaactagccaatgtaaaaacagttcacctgtaaatactttttcctttttcaccgttgtattatacatgtatatgctgggtcctttttcagaaactcttttcttacctgagagttgtcttgttttctgggctgtttttaactgagg

SEQ ID NO: 333334 - DNA, 904 bp, Homo Sapiens
tcagatataagaggtttattaaggaaaggctcccagagacaccagtaaataaatgggagggtagggaaagggattaagcccagcaagggtgtgatttcatgtaatgtcccagcctcaggccgatctagaggaaagggagtgctagagcataaattactcctcagagaatgtccttccttgaggcaagggagctgggcttttgactcgtagcccagtcagtcagcggccttggccaagaggacggagaactcccagaccctgctggctctccatatgggctgactggctccaataccaggtcacaggtgccagcctttaacctcaaagcacttaattgggattgggcacacagagctggccagagaccctaggggatctgggtggccaccaacactgctggtcatggcacagcacctccattactaccctgcacaccacccggcaccagttacaggtctttcattagattctgctgcaagaggaaatgagtaatatcctttgacagtcctgggtttggcttttcatcatccaaagatgtacttccttcctccagtgggtagaagtgggtgtccctggaatgcctctgtaagacggagcagccgtcccggttgaagatcacccgggcccatttgaaaactgcggagggcatacttttggctctccctggcctccttagttgagtgattttctgagacaggcacttgcagacagatgccagagagtgagtttgcagagcctggctgtggatggccaaacatttcatagaatctatccagggatttccgaaggccatcatcctcttccttctctgactggcctttcacagcagggtcaagccagaagttctcagcggtccaggagttattttgttctatatttaagttactggtgtctggatccacat

SEQ ID NO: 333335 - DNA, 536 bp, Homo Sapiens
  misc_feature (102)..(102): n is a, c, g, or t
gcaagataagagctcagcctttattgtgggctcagaagggcacaagagcagaacatgcagaggactggcagcactctggcctggccatcaggcaagggcagngcagcagcaggcacccatgcagctgcagcagcctcacttgctgcacttcctgtggggagcatttgcactccatggcattgagaacctcatggtacacaacagagccattggtgcagtgcagggccacctgcattggggctacgtccgtgtcggagagcagcaggagcactggtcctggcacatcgttgatgtcaatggagtacatggctttgctggcacatttgccctggcagtagtggatatccacctctacttcagacttacagcttcccaccttgacatactgcagcctggcagtgatgtcgttgcactcaggctcctcacaatgtgtcacagcaggtgcctggaattttcataagttttacctccctgagccagacacttgtgttcatcaaagggtgggcagcctgtgaccctcttctcccagaagtact

SEQ ID NO: 333336 - DNA, 466 bp, Homo Sapiens
  misc_feature (427)..(427): n is a, c, g, or t
ttatgattaagtatagagtttatttgagcacaaagcttgagggtaaccactcaggaaatacagacacctaatgactggagtcagcattccaaaatggggaagttaagatttcacttacataggcagtaaacagggttgcagcattttccacataaggtcagtacacacgttatagcaatttgatcggttactacttgctatgttccaagaaagattgctttaccattccatcaggaggggatgatactttcaggggggtcttatgtctggtgccacaaggcctttcctgatcatttacaggaaaaagcagaagttgcagttgcatgctacataactcaggccacacagccacattcctctcaaggctcaaaataaggtaaatttccaacagctttaagtttgcattatttaatttcatagtcattcnatttagttataagaccattaaatgggataatgggtgacc

SEQ ID NO: 333337 - DNA, 395 bp, Homo Sapiens
ttatgttatgctgctttaattcttgagagaatgaacagttttatattctgatctttggagttggaaaatgcccttaatttctgttccctgcagtaatttgtgtactcctacctcagccttctccacccctatttcccatttaatggtaaaatgctgatggaagaggctcagcagaaagacaggtatatgttcacagctcattacagaatatcattaaggaatagggaaatgaaggtgattgattcctcagagttatgtacattctcagagttatgtatttattttttctgtctcagatagaagggaaaatgtttaaattattcaacatcagcttgggaaatgtttaaattgaatgtcttttatcaaatgtatttttaaagtataattgaagtttg

SEQ ID NO: 333338 - DNA, 404 bp, Homo Sapiens
  misc_feature (337)..(337): n is a, c, g, or t
cagagttcattcacttgttcagtttattttcattcatcaaatatggatcaaacaccatgtcagatactgttctaggtgtcaaggatactgtactgaacaagacagtattactgcttacacacagcttatattccagtgacataataagtaaacaagaacatgtagccataagttccatagggatcggccataagctatcaacagggtgctaagaggaaaaaatggggtctttgggtcaaggtaagtttggggaaaatgctagggttttacagggtttctgtttgtttattttttaaatctaattacaggacttctcagagcctttcttaggcctttntgcatacaaattcatcaaggaggctgtataatagtccacatttacctcttttttaaatttatttttg

SEQ ID NO: 333339 - DNA, 495 bp, Homo Sapiens
gttgtgcaagccacacatgtcaacaggcttgtaagcagctccatttatttgagtaaatatcttgtaaataaatcattggtaaacaatacaaaattaaatacattttcaaaagcttgccagtatacgcaaaattcacaaacatagtttttttaaaaaataaaatatgttcagagcacccttgatataaaatgcctgacccccatccttgggacaaggccacctgaaggacatcttatggtaggtgggtttctgtgggaggcagcgggggcctcctggagggaagggtttctactctcacctattacccatcccacattccatctgaattttgatccttctccaaagagctggtaactgagagggctagagcacgccaccaggcctagctccaagcacggggatcagggtgcacaattagggccaggagcacccagagtcctcaacacaagccattgagagaagccagaaatgcaatctccacacttccaaaccagc

SEQ ID NO: 333340 - DNA, 271 bp, Homo Sapiens
gctcaagtactatttattctgtttaccagacatatagcagccgggcagggagtcttcatagcctgttgcgtcatgtgattccattccagatttttccttttattcctgtctccaaggccccattgtgcaggtgctactaattttcatgaaatgatactagggaggtaaagaaagttcgctggctctcagatatccatctgtgtgcaaacagacagggtacaggaaaataagtagaataacaaagttcctagttttgtgtgggctgagagtg

SEQ ID NO: 333341 - DNA, 503 bp, Homo Sapiens
  misc_feature (120)..(131): n is a, c, g, or t
gatggaacatagagaaatagcaagagtaagaataagagccagaatccaggtggctcatcagtaattatgtaaatgcaggccagtcacacctttcttaggctttatttcccccattacagnnnnnnnnnnnntgagataatgaagggggaaaggattctgaaatgtataggaagcaatagacataaactacccttatattcagcccaggtccctgtaaggccacaccctctccatggaattgtcctcatacccctaatccaccggcagcctcccacatgaaccccctacttcctgaattttactgagtagagctgtggttcatctaattctttgtatactagtgactctcttcagggatatgtgtcaatttgataagatgtccatcctcaggctcagggctcctttcaggatttacaaatgtgaaggagacagtcttctcatatttgatttaacactagggaaacagaaaactatacctgctcaatgtgtcccccatgtcctgc

SEQ ID NO: 333342 - DNA, 416 bp, Homo Sapiens
  misc_feature (18)..(18): n is a, c, g, or t
  misc_feature (279)..(305): n is a, c, g, or t
  misc_feature (363)..(363): n is a, c, g, or t
ccttgattttttaatttncccctgccatcaagatccaccccaaatatgccctgttaaaaaaatgccaggttcccctgggccctgtgcctcaagactttcctttaagcaaatcctggaaaccccggggtggaaggcaagggccataccccaggtgagccttcctgtacattgggaggctgaggcaggagaattgcttgaacccaggaggtgaaggttgcagtgagcccaagattgtgccactgcactcgtctgggcaaaagagtgagactccatctcagnnnnnnnnnnnnnnnnnnnnnnnnnnntgatccatacaatggaatattatttggctataagaaggaatagctgggtgtggtgcanatgcctatagccccagctacttgggaggctgagatgggactaacagcacgcgc

SEQ ID NO: 333343 - DNA, 422 bp, Homo Sapiens
  misc_feature (300)..(300): n is a, c, g, or t
ggagttactactccccacctccccttttaatgttcctcaatcccagtgaaaagccaatggataattatcccccatggaccagtggaaaaagtgaggctttgtactaattacttatcctaagatcacaaaagcaaagtcactgttagagcccaggattccaaagcaggtcctgaagtctgtggccccttgttcctttcctactgaacctaagtaaatgaattcgattgataacaggagagctcacaaagcccatgagaatgaactgaaaaatgtctgctgagttatggtatggggaaattncctaaggcagtgtgcacttaggaaaaagaccatgaaactgcttttcggatgatcatcctcaagagtctcagttttgtatcagaaaacagactgtagattgtttcttcacttgatcttagccc

SEQ ID NO: 333344 - DNA, 671 bp, Homo Sapiens
  misc_feature (414)..(414): n is a, c, g, or t
  misc_feature (417)..(430): n is a, c, g, or t
  misc_feature (580)..(580): n is a, c, g, or t
  misc_feature (614)..(614): n is a, c, g, or t
  misc_feature (623)..(623): n is a, c, g, or t
  misc_feature (653)..(653): n is a, c, g, or t
cagacccctttttcctttatttgcattagaaatgtccagaaggaagaccgcactcctatggctgaagaatacagtgaatataagcacataaaggcgaaactgaggctcctggaggtgctcatcagcaagagagacactgattccaagtccatgtgaggggcatggccaagcacagggggccggcagctgcggtgagagtttactgtccccagagaaagtgcagctctggaaggcagccttggggctggccctgcaaagcatgcagcccttctgcctctagaccatttggcatcggctcctgtttccattgcctgccttagaaactggctggaagaagacaatgtgacctgacttaggcattttgtaattggaaagtcaagactgcagtatgtgcacatgcgcacgcgcatgcancgnnnnnnnnnnnnnngtagtggagctttcctaacactagcagagattaatcactacattagacaacactcatctacagagaatatacactgttcttccctgggataactgaggaaacaagagaccattctctgtctaactgtggattaaaaacaagctcaggganttattctattggggcaacttgctgttggagggcntgctcttcnttgggccccgtttaacttgccaacgtggcnttgggagcccttttttgc

SEQ ID NO: 333345 - DNA, 540 bp, Homo Sapiens
agcatgagccagcacgctgagccaactgaagtctttttagttgagccacctgagtacaattctgcttctttcagaccctgaccaacacggtgtaagaccccacatgacacccccacataatcacttccttcttatgagaagcagataagaggaacagagtgtgaacattgtctacgtctcttatgcaaattatgctgaggcctgtgtgctcttctaacagccaccaagatagaggacaatagctgcatctgcaaattctctgtcaaaatgtccaaagtcttatctgctgtgcatgtgtgcgtgtgccacataggtatcactgaaatgaggggaaattggccctgcagtgttttaaagagggaaaacgtagactgtaattgaatgctgtgatgagccctcctctaactgtcctagagaaattgtaacagtgatgagaactgtcacggtctgctgctcccacagtgtctagcacaggccacatgtgcacttcccttctatgtgcctccagctctaagtgaattaccccactgttgagacctg

SEQ ID NO: 333346 - DNA, 441 bp, Homo Sapiens
aggttgcccccggctggtcctcaaaaccccctggccctcaatggacccccccctaggtctcctaaagtgcctaggattaacaggcatgaagcccacccacaaacagctgcaaaagatcttaaagatcactggattcctaacacttcctgcaagggaatccagcaaaggttttactcctacctcagtgacttgaactgcctttgtcctagtgtgatcccccaaacatctgggattaatttgggaagcagagtcaatactcaactgcaatataagtgttttgggttttcaaacatccccaggaaaataaagcttctagaagatgactgtggcagaatgagtatgtcattgcaaacagaagctctataatgtgaccccattcttaaatctgaggaacaggaatataatctgactgtactcactatacagttgctgtaaactttc

SEQ ID NO: 333347 - DNA, 383 bp, Homo Sapiens
  misc_feature (18)..(18): n is a, c, g, or t
  misc_feature (48)..(48): n is a, c, g, or t
  misc_feature (52)..(52): n is a, c, g, or t
  misc_feature (82)..(82): n is a, c, g, or t
  misc_feature (157)..(268): n is a, c, g, or t
  misc_feature (282)..(282): n is a, c, g, or t
  misc_feature (294)..(308): n is a, c, g, or t
  misc_feature (347)..(347): n is a, c, g, or t
ttttttttgagacaaggnctggctctgtcacccaggctggagtgcagnggcngttcacagcttactgcaagcttgtcttccngggcttaagcaatcctcccatctcagcctcctgagtgtccgggactacaggcgtgcaccaacacgccagttaatnnnnnnnnnnnnnnnnnnnnnnnnnnnnnnnnnnnnnnnnnnnnnnnnnnnnnnnnnnnnnnnnnnnnnnnnnnnnnnnnnnnnnnnnnnnnnnnnnnnnnnnnnnnnnnnngtgcacagcccatngcctggggtaannnnnnnnnnnnnnnatagagacagagtttcgctatgtttgcccaggggtgggnctcaaactcctggggcctcaaatgatcctcctaggg

SEQ ID NO: 333348 - DNA, 439 bp, Homo Sapiens
ctcctgtttctttcttaaatattatttttacccctttccttccattgtcctctcttgagatgggttgcaaatgggaagtaaaagcaaaaagggagatgagaaatactgatgcctttttgtctggcttacttccattcgcatgtcaagtccatccatgttgtagcatgtaccaaaagttcattacttttgcattaacttttgtatatcatattgtgaaaatttttcccttgacaacaaaactgacattttatatgaattaaaattactatgaccactagctgattattatcaaatgcttactttgtacaaggaaattccttttttttcttccaatttctattttagttgcagggggtacatgcacaggtttgctccatggggtaaattgtgtgtgccactggtttgggtgtacagatcattttgtaacccaagtaatggg

SEQ ID NO: 333349 - DNA, 350 bp, Homo Sapiens
  misc_feature (132)..(132): n is a, c, g, or t
  misc_feature (136)..(136): n is a, c, g, or t
  misc_feature (145)..(145): n is a, c, g, or t
  misc_feature (154)..(154): n is a, c, g, or t
  misc_feature (158)..(253): n is a, c, g, or t
tagcaccatgcaataccctgactggatgggaaaagaggctataaaaatacttcagtgacaatatgtaaatacagaaaccccgactggatgggaaagaggctataaaaatacattttgtgggcctacagcagnctcncacgcctanaatcccaanactnnnnnnnnnnnnnnnnnnnnnnnnnnnnnnnnnnnnnnnnnnnnnnnnnnnnnnnnnnnnnnnnnnnnnnnnnnnnnnnnnnnnnnnnnnnnnnnnttagctaggcacggtggcacaaatctgtagtcccaggtacccaagaggctaaggtggatcatctgagcacggggagttcaaggctgcaatgagctag

SEQ ID NO: 333350 - DNA, 418 bp, Homo Sapiens
  misc_feature (384)..(384): n is a, c, g, or t
  misc_feature (406)..(406): n is a, c, g, or t
aactgcatcggggcctggaacatcaggtacttcctcatctacgtcttgaccttgacggcctcggctgccaccgtcgccattgtgagcaccacttttctggtccacttggtggtgatgtcagatttataccaggagacttacatcgatgaccttggacacctccatgttatggacacggtctttcttattcagtacctgttcctgacttttccacggattgtcttcatgctgggctttgtcgtggttctgagcttcctcctggggtggctacctgttgtttgtcctgtatctgggcggccaccaaccagacttactaacgagtgggtacagaggtgactggggcctgggtgccagcgtttgtcccctttgtgggcctggggcttncgtcaagcagagccccaagttncaccggaacatt

SEQ ID NO: 333351 - DNA, 591 bp, Homo Sapiens
gtgcaccgtttcgaccatcactgtgtttgggtgaacaactgcatcggggcctggaacatcaagtacttcctcatctacgtcttgaccttgacggcctctgctgccaccgtcgccattgtgagcaccacttttctggtccacttggtggtgatgtcagatttataccaggagacttacatcgatgaccttggacacctccatgttatggacacggtctttcttattcagtacctgttcctgacttttccacggattgtcttcatgctgggctttgtcgtggttctgagcttcctcctgggtggctacctgttgtttgtcctgtatctggcggccaccaaccagactactaacgagtggtacagaggtgactgggcctggtgccagcgttgtccccttgtggcctggcctccgtcagcagagccccaagtccaccggaacattcactcccatgggcttcggagcaaccttcaagagatctttctacctgcctttccatgtcatgagaggaagaaacaagaatgacaagtgtatgactgcctttgagctgtagttcccgtttatttacacatgtggatcctcgttttccaagca

SEQ ID NO: 333352 - DNA, 466 bp, Homo Sapiens
  misc_feature (339)..(339): n is a, c, g, or t
agtaattgtttttagcagattgatctatttagtcaagtccagccacaaactcttgaatttatgtggagatgcagtgaggagggcgggaagagaagaggtagaaataggtagagaatgccaataaaatgctgtgaaggaatgggaaagaggcagtggggaaagcctcagcctgtgattgtgagcctcaaagggccacagaaaactgacaaaaccaaactaccaaggggaaaggacgacccaggcgctcaccaccagggagctgggcaatggggaccgatcagaagcagtggacttgccaccagatttcactttttgatgggtaactctggcagggacgtnttaagacatgctgggagggttggtgggctggataatgagatccatttaggcttcttccagatcttcagaagagagaacacaggcctgcacaaggagagagggcaggttccagtgacactctgtaaac

SEQ ID NO: 333353 - DNA, 576 bp, Homo Sapiens
  misc_feature (37)..(37): n is a, c, g, or t
  misc_feature (63)..(63): n is a, c, g, or t
  misc_feature (83)..(83): n is a, c, g, or t
  misc_feature (104)..(104): n is a, c, g, or t
  misc_feature (134)..(134): n is a, c, g, or t
  misc_feature (524)..(524): n is a, c, g, or t
ggtaagggggttggctggatcaatgggaaagaaggcntggctgggaaaaactggggaaggggnaccgcttccctgccctcacngccggcaacctcctgctaacnactgagtgtcgcttgtggttgccctccctnaacccatggggggatctactcggaagtcttcaagacgtcggaatttgccgaggtattcttgcagtttggggtcaatgtcccaatttttggctttggaatatttcaagaaggcccagaacttctccagcccatacagttggccagcttcatagtccttcaccgtttcctcctgaaaatccttgaatatgtccagccggaacttcttttccaggccataactgtagtatcgaaaaaggcactccaaaccatatctgtagccttctttggcgtcctccagagccagctgcttgaactcctcatacatctttttgttgaagtgatctcggaggaagaaggaccagaagcggaagagtgtgttcatctcctgagactgccaatgcccaaacgttnccgctcattaagcagcgcctacgatacttatggtagacgtgttgtgtgaagc

SEQ ID NO: 333354 - DNA, 438 bp, Homo Sapiens
  misc_feature (28)..(28): n is a, c, g, or t
  misc_feature (55)..(55): n is a, c, g, or t
caacacctcaagctctggcaaaggtcangcagcacctatgccggaagaaataacnctcctaccttgaagaaaaggcctttccaactcgttccacgtaatatccttcctgtccaagttcctgtaactgcctgtggggtgcctaggcatctcccattttcaatacttcattagcaactgcttcaatgctgtccaaatcagcactatcctctgtgaaaagcaaagatgtccccaaaaagaggtgaaaagaatagatggttcattcattcaaccacttactggtcatctactatggactagcatggtggggttacacaccaagagacactaacttcctgtttaagagtttataatctatctgggattttgaggggagatgagacctacacacacaaaaaagtaactgcagacaattgagtactactagaatttgctcgtgcc

SEQ ID NO: 333355 - DNA, 305 bp, Homo Sapiens
  misc_feature (237)..(237): n is a, c, g, or t
  misc_feature (245)..(245): n is a, c, g, or t
  misc_feature (257)..(257): n is a, c, g, or t
  misc_feature (268)..(268): n is a, c, g, or t
  misc_feature (289)..(289): n is a, c, g, or t
tgagttttgcaagtacttattctagggactagtcctttcattttgggcaatttttgcataaagtgtgagacacagatcaaggtgttttgttttttcttctgcctactaatgttcagtagcagcactgtttttaggaaaacaaaacaaaaccccaaatgttcatcatcagaacagatatataaattgtgggtatattcatcaatgggaatgtcaaataaaaatgaaagaactaaaggntacatagngccaatataggntgaggcccggntacatgatactgaggtgaggngagggcaaattgctgg

SEQ ID NO: 333356 - DNA, 437 bp, Homo Sapiens
agttttggtttcaatcaaatcaaaataaagggagcaggagtcctccctacagagagggcagctgagaaggaaggaagctcctgatgatgccggcttcttactaagcacctactgtgtgccaggcatattatttcactgaaccctcccaactatcccacagaatgggtactattattacttttttacaatgaagaaaccaagactacagaggttgtagaacttgcccaatgtcccacagctagccaggattcagtcagttctgactactacactatacaattgtttcagacaaatccaaaacgtgaaagaacggtaaagatggactttaggttgacatgtaacttcttttacctgagcccatacttcagcttctgctttcgcaatgtgttctctgagtatatcttcttgaaactgctcttcttttttcagaatatttg

SEQ ID NO: 333357 - DNA, 348 bp, Homo Sapiens
  misc_feature (12)..(12): n is a, c, g, or t
  misc_feature (22)..(22): n is a, c, g, or t
  misc_feature (36)..(36): n is a, c, g, or t
  misc_feature (63)..(63): n is a, c, g, or t
  misc_feature (99)..(99): n is a, c, g, or t
  misc_feature (188)..(188): n is a, c, g, or t
gtcaaaaaattnggaacagctnaaatgctccagggnatcgtcccaacaacttaaaggaggctnaacacctgttgcacgcctgctcatggcagcgcttgnagaaatgactgggggagtccagcgaggtcggggacgcagcggtctccaggctccagaaacctccttagccttttgtggtaactttggtnccggcggcggggggccggtgagcaggaactggagggaggcggtggggaaaccgtggatccgtccggctgagggtgcgtggatcagactgggctgagcaggcaagtcatcgtcgggtcacagcgaggcgacccaggagcgaacttcccagggcagcctccc

SEQ ID NO: 333358 - DNA, 491 bp, Homo Sapiens
  misc_feature (273)..(273): n is a, c, g, or t
ttttcaactttccaaatctttaattacatgttttacagcagtaaaccttgagtggacaaagatactataatctcaaatgacttaccactggcatgcagaaagttaacatatcaggctacttcctccaagaggctttcattgacacccccagcctgagctgtctctcatataattgtttagcatccagtacttcctctcatcataactattatattgtaactaagttacttgtttgtatctccctctgaactgtttcttgactgaaataaatantgtcaactgtttgaatactttcttcacccgtaagtcagtacttcatttttctaaaccaaagcatagaagagctgggaagcaattaaggtgcagtaatctagaggtcatattatgcaagggatatgctgtggctattagcaacagattccattggcttatgaggcactgcctgaagcttccagggaaacatacaggggaaacagtccagaggattcagg

SEQ ID NO: 333359 - DNA, 369 bp, Homo Sapiens
  misc_feature (278)..(278): n is a, c, g, or t
  misc_feature (308)..(308): n is a, c, g, or t
  misc_feature (330)..(330): n is a, c, g, or t
  misc_feature (346)..(346): n is a, c, g, or t
agagttcttactgtcccatgtcaaaaaatcggcacacagggaaatgttaattttggaggccgtccacaacttccaggttcccatcctgcgacttggtcagcgggtggaataatctcaagaatcaaatcatactccttcccaaagcctggccacagaaagtcctcccctgcccaagggaaccggcaagagagtactgtgtcattcaatccgtatgaggccaggaacttgcacccggggcttgcaggacaaagggcccccagaggaggaagccctacccntgggacacagaggtgttacggaggagcccntacggcgggaccccgagggagnttcagggcccaagggngtttttacttgggggaccgaaag

SEQ ID NO: 333360 - DNA, 259 bp, Homo Sapiens
aattgctgtcaaatagaacaagagtgaggacgtggaacagccaggcagagccagcctgcagcggatggggcccaagcaagtgaggactcaaaggccccaggaagtggggctggatttcaggcttttgggatgaagccagctgagagaggctgagcctgtgtccccagaagctccaggagaggatttgaggtgctggagggggcatcgcaatggagggggcacctgagcaggtggaaaggagctgggctcccaggtacct

SEQ ID NO: 333361 - DNA, 446 bp, Homo Sapiens
ttaagtagttttaagtacttcatatgtacattattggttttcttctgtctgccgagcagttagatgagaaagagaaattcttttgcacattttctatagaacactgagctgctagtttgacaagccgatgccttttgggacaggccgacttggaaaatttttccctgggcctgtgcctctgctaccagcaatgggtgttgtccccgttaaagggacaggcctgtcccaggagttggaaggcctgcagcacacacatcttctcacctggcacaatccaggactggctcgggtggctccaccttgccccagccggcccagcacagctactccagggcaaaggattccttgggataaaaccgtttgcccaggccctcactagctagaattgcatttgatcctgcaggaactttttatccttttaccacatggcttggggagcaggaaga

SEQ ID NO: 333362 - DNA, 579 bp, Homo Sapiens
  misc_feature (227)..(236): n is a, c, g, or t
gtgtgaaccaccatggccggccttctttgactttttatcagcaccaaagatcactcccattttcctaacaatcttctgccatacttagattgtcaatcattgtgaacacattttcctaactgccctttagttctgcttccagtagcttcttccacctacaactgagaacattccctaaggactcagacagatctcagttctctctactcttctattttacatatccnnnnnnnnnnttaaatctgacgaagtctctcttacttaaaaactttcaggtagttgccattcgcagttttaaccttttctcatcattgcccgctacggagcctttttaggctattttcctaatcatcccctcgtaaaatcttaatacccacagatatgctatttaactgtttatgtgctatatgtccacatatgctttattaataaaaagctgtttttagtgcctcaagcatgacattccaacctcttcatgattgagctctagcttacacttcctaccacccactgcactgcacattcagcatctccagccctgtagtctcctgcatataggcccttccacctagactgccc

SEQ ID NO: 333363 - DNA, 463 bp, Homo Sapiens
ttaacaacaatcagccttggatctcagaagtcaaacaaaactcttttagcaaaaggcttactgctgactgcatatagcaaaggcagagaaagacgctgcccacaacataatgaaagatcatctacattttgcccagcatcaatcttagtcatgcatatctagcaccgagagccactgcggggtcacactggggcagttacagaacacatctttctcggagtgcagatgctccttcttggttggacaccgtgggccaattcaatttagaagtgcacaggtgagctctgagaaggtgtggccaggagctgccagggcagaaactggggcgcactcgtccacaggcggcaaacgacgcagctggaggacttcttgcttcagccggagctctggcatgaacccccggggaactgtgctcactgagcgagggagccccagaggctcacacagagcgggctggtcttaa

SEQ ID NO: 333364 - DNA, 280 bp, Homo Sapiens
  misc_feature (141)..(141): n is a, c, g, or t
  misc_feature (154)..(154): n is a, c, g, or t
tgtgaacagtgatgtctcaccgggggcgggagcacagcagcagacatttgtcaaaactcacccaactctataatttaaatgtgtacattttatggtatataaatgattcctcaataaagttgattaatccaaatatagtgngccttcagagatnggcaggggtgagtgagaagcccactttttattgtttgattttgtttaaatatggatttttactttaacaatgttttttaaatttatatttaaaacgatattaaaaaacagagtttaggcctggcat

SEQ ID NO: 333365 - DNA, 404 bp, Homo Sapiens
gaatttcattactttttattatacaccaactagtttatattgtagttctttacaaagaaaatgctaagaaaaattataatcacatgttatatggttttaaaataataattccagatttctttacatataagatggaatggtccagcagctatatccactgtcacagactttagttccgttcaatgatatgggcacatcctgcaaaattaactaggtcacacacaaaaaatgtctcaaatacaggtaaaaatggtacacacaaaggtaatttacaatgacaaggaatgtaatttttcttggctgtgcttcagaaatttagggtcagtagccttaatcaaggcacaaagcaggaaaaggtgagcacagctgtctctaggagtgggcagggtatgtacaatcactga

SEQ ID NO: 333366 - DNA, 628 bp, Homo Sapiens
taggttttatcaacaaagttcactttatttcttgtaacgtaatgttaccaatagtctctaagatgattccaagaagcacaaatatagagaatcctatatctcataagtacaatggatcacctcctgagttcaagctatgaatttcttaaggtttatatcacttaaaactctgacagagccaggattctaaataaaaggaatgtcagaaagccagtcaggctccaaggtacacctgaaacatacctatcacactcttggcaaaagaagcccgcttcagggttgccagaccgaggtctccaatcttgactgagccagtagggccggtgataaagatgttgtcacatttaaagatcgcggtgaatgaataggttgagttcgagtatgaagaaactgaagaccttttaggatctgacggcaccagcttcttagaactttgatcttcatcactttaaaccttttcagatacgtttttagtgttcccgacgtcataagttcagtcaccaaaacaatgcacttctttccttttactgtggattcccaggaatcataaaatctaacaatattgggatgctgaagaccttttaacatttcagcttcttctttaaatctctgcctctcagactttgtt

SEQ ID NO: 333367 - DNA, 361 bp, Homo Sapiens
  misc_feature (298)..(298): n is a, c, g, or t
  misc_feature (334)..(334): n is a, c, g, or t
aagtaatgaaaaacaaggttaaataactcaccaatggatgacatttcccggtttgttccaagcatgaagttattggttcacagtcaatcccatttcctcgaaatcctttcctgcactcacactcattctataattttaagaacagagtcaagtggattattgaaagcaagtgccttccatgtctttccctcacacagcactgaggaaacgtactatgggaaactgaagctgcttgggctgtcccagaggaacagtgtttaatgcctttttgcttggatacactttcaggattctaggngttattaggtctcccatattcttacattacattttncccaatatggataggtttctttggggg

SEQ ID NO: 333368 - DNA, 466 bp, Homo Sapiens
gcgaaattatgtgtgcgtttgtgcatgtgtgtttttttctccccaggggcgggggggtcagggaggaaagatgcatagctttaatcagagtctttggttatgtgaactcttcttacttaataagtttaaccactgagttaaacaagttaaatgacctccagtatgtttttcctagggctggggagcagaataccaccgccaggatgttactagcaccccctgctggattgagatacatctgcacggccccctccagtggctggataaagttcttactcaaatgggttcacctcataatcctatttcatctgtatcttaaatggccccaggcatctgcctctggaaaactattgagccttgcatgtacttgaaggatggatgagtcagacacgattgagaactgacaaaggagccttgataatacttgacctctgtgaccaactgttggattcagaaatttggacaa

SEQ ID NO: 333369 - DNA, 194 bp, Homo Sapiens
aaatattttggaaagattaaccaggaggaaaggccaacactgaaagcttttccatttatcaagagggcacctaagattcccttcccaattgaatgggcacagatttttatggccagttgataaccaaaatgagacatcacatgcaatatgttctccggggctttttaaaatcaatcgatcaatcaatcaatcaa

SEQ ID NO: 333370 - DNA, 652 bp, Homo Sapiens
  misc_feature (282)..(332): n is a, c, g, or t
  misc_feature (431)..(586): n is a, c, g, or t
  misc_feature (588)..(588): n is a, c, g, or t
tacccagggtaggccaaatccagagagaccgaaagcagctttagtggttgccaggagcttgcagaaggggaagtggggagtgattgctacctgggtatggggtttctcgtgggggggtgctgaaaatgttctggaattgactgtgcagatggtcgcacaactctgtgaatacactaaaaactactggattgaactgtatatgtggatgtgtcaatgaagctgttaagtgccactgaattattcactttacaatggttaattttatatgtgaatttcacatcnnnnnnnnnnnnnnnnnnnnnnnnnnnnnnnnnnnnnnnnnnnnnnnnnnncactttattttgtagcacctttttaaaaacagtctttttaaaaattttcccagctgacccttttcaatcttcaatcaaccaatccttattaaccacttnnnnnnnnnnnnnnnnnnnnnnnnnnnnnnnnnnnnnnnnnnnnnnnnnnnnnnnnnnnnnnnnnnnnnnnnnnnnnnnnnnnnnnnnnnnnnnnnnnnnnnnnnnnnnnnnnnnnnnnnnnnnnnnnnnnnnnnnnnnnnnnnnnnnnnnnnnnngntttcagtcatgggttgcccaactctttaattttgcccaactaaaactattttgttaggttatct

SEQ ID NO: 333371 - DNA, 393 bp, Homo Sapiens
  misc_feature (25)..(25): n is a, c, g, or t
agttcaccttgaaacctcattgaantccagagaccctgaaagtagatccttcactattttcctttcccataaatttttttaaaagacagattgggagtggggcatagggttttgtctctttggagaactgtttttactgccatgtacacaggaagaaagttcttgataatcttatggaaatgtcagaagtcactacctttctggtacctacaggcagctcttgctcccaccagcatccaggctgggaatctgattgtttcaggacattttaaacaactgcaggcaaggctttgtcctcaagtaaagcttgcagttccttctaaaatcaatcaggtttatagaatatgatacattaaatttggctaattacatagaactctgaagtattctgtt

SEQ ID NO: 333372 - DNA, 313 bp, Homo Sapiens
ttttttgagactgcatagggctcggcgtgggaactactctaaagctgctcaataacgtcagacacgtccagagtggagaactctgaaagagcctctggtgacctgacactggcactacccatcagcagagaaaagatggcctcctgtgcctgaatgtgacagccaggcaactatgtaaggcagtatcagagaatctttatgacatcacagtaggaaagaattttttcaacacgataaaaaatatggtgactctaataaatatctgactgtattaaaacaaagagtttctattaattattaaagacatctctaa

SEQ ID NO: 333373 - DNA, 355 bp, Homo Sapiens
ttcctttccagggcagaaattccagctgctggtctcagggaaaagcctgtcttgtgtggggcatccccaaacacaccacattttaagcagaaataaaaattatttgctggcaaagtgggggtcagagaaagcgatgagagcacatctctaaaaaagaaaggcacagcaccccaggttctagttcttgactttaatgcccttggagtgtactgaggctcaatacaccaaagcactcacagacaggtacatgaactcacacaggaagtgttatagtgtgtacataaacccaacaccataccagaaggaagacgacggacccaggtgacctcccacactcgaggtgactgcctgttcc

SEQ ID NO: 333374 - DNA, 436 bp, Homo Sapiens
  misc_feature (16)..(16): n is a, c, g, or t
  misc_feature (26)..(26): n is a, c, g, or t
  misc_feature (32)..(32): n is a, c, g, or t
  misc_feature (68)..(68): n is a, c, g, or t
  misc_feature (119)..(119): n is a, c, g, or t
  misc_feature (149)..(161): n is a, c, g, or t
  misc_feature (166)..(167): n is a, c, g, or t
cttggaaaggaagaancaggttttgnggaaancagggcaaagttttgacgttgacttattagacatgncgtcttggagaaataaagccaggtgtcctgaattacagatcctgagctcangagcttgaaaacatgaattagtgaaataannnnnnnnnnnnncggtnntggggcacagggatatttaaagccaagaattcagcaaagaccataggaagagcgtagatagggaatgagaatcgccattacttggaggatgccaaccttgaaggtaaagcagagaaagtggcaccagcagaagaaaacttgatgtggagcggcaggtaaagtggaggagaaaccaggagtcgctgtcacacacgaacacccatctttcgttgtcaactgcaaaactcactgagaccaactttttattcacgacaattaatggtaactta

SEQ ID NO: 333375 - DNA, 391 bp, Homo Sapiens
  misc_feature (16)..(16): n is a, c, g, or t
  misc_feature (79)..(79): n is a, c, g, or t
  misc_feature (114)..(114): n is a, c, g, or t
cgcaggcacacaacanaccccaggactaactccctggctcccagacaagcccattttccaggccttgcagaagcaggancaggaggcggccaaggaccacactctgggtggcgncggggacgcccatcttcaaggatcacactgagcagaaaagctgcccagaaacacatggatacttcaactggaagtgaacacactggacactgcccagggacacaggcactaaaccagtacaagccagcagcgaaggagaatttaataagtttttccctcctttgtttacattatctgtggacaagtaagggagctagatgtgatactgatgcagtgaatattaggtataataaaatgtgtcactccaggccattttttataaaccctgcaggcatat

SEQ ID NO: 333376 - DNA, 356 bp, Homo Sapiens
  misc_feature (16)..(16): n is a, c, g, or t
  misc_feature (61)..(61): n is a, c, g, or t
aggaccggttcaaacnatgatgtttaggctcctcttctcaagcaggctttccacacctggnttccatgatctcttctggcacagtagctggtatttggcaaacataggtttcatcctgggatctcagggattgaaatctgtcctaggtgtgcaccagaaagtggtggcaagagatgaagcttcggaggaggctgacctcggccaggattcttaagtctcaaagtttcagctttctcacccctcaacggacatgaaatctacctatttgtaactccagggaagtaaatgagataatgtttggaagatatctagtctaccagctgctcaggcggggggcgaaggttctgttccctgtc

SEQ ID NO: 333377 - DNA, 395 bp, Homo Sapiens
  misc_feature (370)..(370): n is a, c, g, or t
tggaagtgtagatggaagaatgataagtatgccatgatcctggcctttaataagttagaggtattaacacataaagacttcagaagcagtagtgtgtgaggagtattacctcctctgatcctgttggactgtcctgaaaccaaggttgacgggccattataaatccatactatctgacctcagtgaggttctccctgttcgtcttctcagtcactaattcttcctgtatacgtgttgggatccgtgtttgtctcattctttccagtcccaccactgtttaggttttcttacaacagactttagtcttcaatttttctacgtccagcagtccccaacctttttggacatcaggggaccagttttgtggganggacagtttttccacaggacaggag

SEQ ID NO: 333378 - DNA, 388 bp, Homo Sapiens
  misc_feature (129)..(129): n is a, c, g, or t
  misc_feature (132)..(132): n is a, c, g, or t
  misc_feature (134)..(134): n is a, c, g, or t
  misc_feature (141)..(141): n is a, c, g, or t
  misc_feature (167)..(167): n is a, c, g, or t
  misc_feature (305)..(305): n is a, c, g, or t
ttttccttgttgatccttttagtgcaggagagagagaccagtcagctgggccagtcccccacgcagcctgacaaggcgggactcactcaacagaggccgaccccgtggcagaggacttgaggcccggcngangncgccggncactcgacagggagaccatgacgcgnggcggcggcggccaagtgggcagcatcccccgaccctcaacacctgcgggaactgctggcccaagggagagcccagcctggccctggtctccaccaccccggaccctgctcaactccctgcactgtggggctgggaancaaaggccagggtccttgaggctctcactggccagagggcgacatgggacaccagagagcacacagacagttcaggtcgtttc

SEQ ID NO: 333379 - DNA, 319 bp, Homo Sapiens
  misc_feature (15)..(15): n is a, c, g, or t
  misc_feature (49)..(49): n is a, c, g, or t
  misc_feature (65)..(65): n is a, c, g, or t
gtaagttccgggaancctatatagtttgtaaccaggaacccccattccngtaagggtccctaaanaaaacatttttaagccccaaaggaaaaataaatctttcccctggacattcaggagccgacgggatgggacaggtgtaatcccctggcagaaggtggcagaacgcatgggcaaagctcctgaaacagaagaagtctgaatcatggatgaactgggaagaaaatcaaagttgagccacagtgataaaggggttgaaatggccttttgagcaagtcattttggttggtgcaggctgaagcgagtgtgtttcctagta

SEQ ID NO: 333380 - DNA, 702 bp, Homo Sapiens
  misc_feature (113)..(113): n is a, c, g, or t
tactctagtgaaacacaattgatgaagcacccaaaccagtttattcgtgatgccgagaaggttggatcgcgtggatgaaagatcaacctgctgcaaacattcccttagccaangcttaatccagagcatgaccctaactcttttcaattatctcaaggctgagagaagtgaagaagctgcacagaacagctggaagccagcagaagtttaaggaaagatgttgtctccataacataaaagtggaaggtgaggcagcaagtgctgatggagaagctatggcaagttatctggaagatctagctaaggtatatgacaagactacactaaaaagcagattttcaatgttgaaaaaattgccttctattgaaagaagatgccatccatgacttcatagatagaaaggaatcaatgcctggcttcaaagcttcaaagggcaagctgactctcttgttacggattaatgcagctggggccttgaaatcaatacttatcattcctaaaatcctggagcccttaagaattatatgaaatctactctgtgctctattaatggaacaacaaagcctggattacagcacatctgtttacagcatggtttactgaatattttaagctcacagttgaagacctactgctcagaaaatattcctttcaaaatattactgtttattgacaatgcccctggttacccaagatttctga

SEQ ID NO: 333381 - DNA, 336 bp, Homo Sapiens
  misc_feature (59)..(59): n is a, c, g, or t
tatttttgccccaaaaagccccaaacatgtccgtgggttctcggggcaactcccctcantcctcccctggctggaactagggtaggatggagatacatggaaggttggtcaggctctgttttagaaatgaagtcacgactaggaattgggagcggagggggcagagacccctgctgcaatcacatgctgaatcattgtccttctgagagcaggctcctacggttccttcagtccacggaagtgctcagagcagggcagctcactgcggccaatggagtgctgccccctcactgcatgccgaaccactgctcctggtcaccactgggtcgcctcact

SEQ ID NO: 333382 - DNA, 298 bp, Homo Sapiens
gaagctgtttgggggtgacccatagtgagtctggccttgactcacttttctggcttgtctcacagtagcaggggatctgctgttctccaccctttaaaaatgggagcctttcatcttccaagaccaaagaaggaaggaaggtggacggtgagagggtcttaaatccccagcctgtgagtctcagcctctttccagggaagcctcattctactgcttggggcttgcttgaggttgagatatgagttatttcttgagtaagtgaaggctgaaggcagtgctgagtcctttctgcttagct

SEQ ID NO: 333383 - DNA, 388 bp, Homo Sapiens
aactttcaaaaactgctaaaacaggtgccatgaatcaggtacaattactgtagaaactaacattagctattatacactaaccaggcatttttcccaaattaattacaatctggttgtttagcctatgctaattaagccctcttagtagtagtattcactttacattgaagacctcattcacaaatacagggtgctctgtgcttatatccttccacccttgactgccaaaaatgtgtggaaatgggaaagttgatgggcaggcagggccgacggtgtcacctggggtgcctcgcggggcttcagtgagttaggggagttcaggcaggccgggggagggcagctttgcatgcctgtcccccgggcacattgtgttgggaggttggaaaca

SEQ ID NO: 333384 - DNA, 510 bp, Homo Sapiens
ttgcgtggttggtttttattaattatctggataacagcaaaaaaactgaaaataaagagagagagagatctgggtgttggtggttgcatttgttaaggaattgaagaagcagttcttgcccaggcaacctgcccccagccagaagactcaggggcaggccaagaacacaggcctccccctttcttcagctctctgaagtttccattgttcattgctctttggtggctgatagccttatctgcagctcacagtcggccaatcccagaggattagtgggtccggtttctgtataaattagggggcaggggtgctgtagaggcttcttatcgatgattgacgccgaggcccaggctgttgtcctcacaggagcaggcacctagcctctcctccagcagcagcacctggtcgctgagagattcgatccggtcaccccggccccacagctcagccacctgttctggctgcagctcttcaggcggcacgggcagcaccgctctgacccagccccag

SEQ ID NO: 333385 - DNA, 330 bp, Homo Sapiens
  misc_feature (304)..(304): n is a, c, g, or t
ttttgcaatttttttggcatcttcatcatgaaatctttgcctgtgcctgtgtcctgaaaggtactgcctaggttgtcttccagggtttttatagttttaggttttatatttaagtctttaatccatcttgagttaatttttgtatatggttaaggaaaaggtccagtttcaattttctgtaaatggctactcagttatcccagcagcatttattcaatagggaatatttccccattgcttgtttttgtcaggtttgttgaaggatcagctagctctctccctcgtgcccgaattcttggggccncgagggggccaaaattcccctataag

SEQ ID NO: 333386 - DNA, 341 bp, Homo Sapiens
  misc_feature (63)..(63): n is a, c, g, or t
  misc_feature (328)..(328): n is a, c, g, or t
gcgggaccccaactgcataacccaaaatctagaaaaagagcatttctggggccaagatggcanactagaaacagctatggttggagactcccaccaagcagaataaaaacagcgagtgaatcctgcgccacatctgaggtgtccaggttctcactgggactgactaggcggttggcgtgacccacgaagggcgagaaaaagcagggtggagtgacagcctacccaggagccacccaaggcaaggggacctcccacccccagccaagggaagtggcagagtgattgtgctaccccatccgggaaaccacacttttcccacttgatattnttgcaacccatgg

SEQ ID NO: 333387 - DNA, 440 bp, Homo Sapiens
  misc_feature (30)..(30): n is a, c, g, or t
  misc_feature (35)..(35): n is a, c, g, or t
  misc_feature (58)..(58): n is a, c, g, or t
  misc_feature (109)..(109): n is a, c, g, or t
aagacagcccccagagtccggggacgagcngtgtngggtagcaggggatggaaacccnaggggccccctattttttcccccctaaattaattaattaatattccctgangttaaaccttaagaagaaacaacctatcaagcctacaacttttccctgcccattttccctgtggttgcagcctgtcttccctttgaaattgttttactctctgagttttatatgctggaatcccaatgcagagttggtttgggactgtgatcaagacaccttttattaataaagaagagacacaggtgtagatatgtatatacaaaaagatgtacggtctggccaaaccaccttcccagcctttatgcaaaaaaaggggagaatcaaagctttcatttcagaaatgttgcgtggaaaagtatctgtaattaaagtttcgaagtaatttaac

SEQ ID NO: 333388 - DNA, 303 bp, Homo Sapiens
  misc_feature (260)..(260): n is a, c, g, or t
  misc_feature (286)..(286): n is a, c, g, or t
agatgacttatactaattgactgttgaatgtcaaaccaaacttaacattcttgtaatagaaaccagcagggtgtgtacacttttgtgtgtgtgtgcaggtttatacacataaacacaataatacttggacttatttatttaaaatttagatttattagagggagcatggccataaaataaaataaaataaaatttaggatttaagtcgagctcagtgggctcacatctattatccccgcactttggggagggcccaggcngggtaggattgtctaggctccggggntttgaggcccacgtggg

SEQ ID NO: 333389 - DNA, 792 bp, Homo Sapiens
  misc_feature (437)..(462): n is a, c, g, or t
  misc_feature (472)..(503): n is a, c, g, or t
tactccaaaaaacttcctccaaagcctagaaaacactttcagaaacatttgctggctgtaggctggcttgcagaacactctgtagcaacctaagtcaggaaaacaggctgaacaatgtagtttcaagtgcagaagctctgtagaataagagaagaccgtgtacagacaccaccacccacctaggccccaggacctagactctccttagcactgctctgctgagggcacaattcttttgcaaacacgctcctctcttgtcaaaacttatccagccttcccagaacctctttggagaggcaaacttgcctgctctgctgtctgccatgagctctccttggagaggagcctgtttgcttaccttccattttcttcccccagcagggcatgtggcaaaagagaagacaatagtgcaggggtgggagggggggaactgctcnnnnnnnnnnnnnnnnnnnnnnnnnnggaagagggnnnnnnnnnnnnnnnnnnnnnnnnnnnnnnnngcttcttttttggcataccaggatctagcttcaaactcttcccagaaacacccatgcccctggtggaaggaaaggtgtgcccaggcccttgcccagtttgcaaaatcaagctatggctaatggctactgagccatgtgacccaagaaagcaaaaaaattctctctaaacagttccaagttaacataagtgctctgggggtgagtgtggcacggccagccacagagaaatcacactgctcgcccacaattcggatgtctcagagggagggggaaaaaagaggttaaaaag

SEQ ID NO: 333390 - DNA, 508 bp, Homo Sapiens
  misc_feature (38)..(38): n is a, c, g, or t
  misc_feature (78)..(78): n is a, c, g, or t
  misc_feature (356)..(356): n is a, c, g, or t
ttttcacaataaactctttattgtttagctagccccangtgactttatgcatcttataaccaaagaagccttcagtangggcaagtctgagccagaggttttatcacactttgtcctcagggtccaccaggaaccaggtcttggctcacagccaggctggaaacagtcttcacagttctgagcctggagtttgagatctgcctcccctttcaaggaagatccagaggtcacctgcgcttgtatgagacatggctgaagctgcaaggcctgaaagcttgagccttgggccctaccaggagggggccaggtcttttggaaatcaaacaagaagaaatggctgttgggtcaggtccttnggagacaatctttgaagcctagcttgggtcacagcccgcagaaaggttcgaacatcctcaaagcggctgctgacctcagccactttcaggagatcccctggcttcagtactctatgttgctcctctaggaagtacctgatgttgggttccat

SEQ ID NO: 333391 - DNA, 305 bp, Homo Sapiens
  misc_feature (279)..(279): n is a, c, g, or t
  misc_feature (285)..(285): n is a, c, g, or t
gttacctggactgggcttggagctcctgggctcaagggattctattgccacaaccttccaagtagctgggactacaggtgcttgccactgtgcctggcttgttagttgtggctttaattcaaagaaagacaacatcctccaaggtaccggttttagaaggattttgttctgtgttctaaacagtcaaataatagtatctggttgtagctaaataagatatttcatattgttatagatataatgtaaattttactttgagaggtagtaatttatatttantaaaanatttcctcccaggctaagga

SEQ ID NO: 333392 - DNA, 321 bp, Homo Sapiens
ttttaaatcaatattatcgccaatgcatatcctcctctatttcccaaccttgagaatgtaaaattgtttcttttttcaatcatggctcattttaagggaaaatgagtaccatatgtatttcatatatatatttcacgtgctaaagagtttgaatgaatgtgtttgtcaggttaacacttctggttctaataaggaattttgtttttcagccttcttttcattactcacctaggacctaatctaccatccttacgatgaaaaaattccctctatttctcaaaattgggccactgaggtacctgcatgttccctgtgccgaat

SEQ ID NO: 333393 - DNA, 122 bp, Homo Sapiens
agtttatccaacaaatatttattgagtatgtatgatgtacagccattgttttaaatgctgagggtatagcagtgatatacagttcctgcttacatgaaacttacattccaataaaaagagac

SEQ ID NO: 333394 - DNA, 486 bp, Homo Sapiens
attaaaaatagaccttgtctttaatgtttatttcacattatctaagtacatccagttatgcaaatttacagttttatttcacatccttgtattcctgatatacatataacaggacaaagaacacatttgcaacactcagcctgtaaaactctcttgggggaaacaagattctcagctgccttattcttctgcacatgtacaaataaagttctaaataattggagtggaaataaaaactggtaaaagagaaaactgactacatttttatgccacttgaggatatttgtacctgacttttcaaatggtcttctacttgctgagttacaatttaataggtaacacattttgggagctccttaaaatatgccaagaagcttcattgtttctagagtgcttaaaatccacatgaagctgacatcagctacccatcactaatgcttagatgtggtgctgtggtgctgtgatttatctataatatttacaagg

SEQ ID NO: 333395 - DNA, 585 bp, Homo Sapiens
  misc_feature (53)..(53): n is a, c, g, or t
aattttgagacagggtcttgctctgttgcccaggctggcacgcagtgtgtacntatcatagctcactgcagcctcaaacagaagtctgaggctgggcttaagcgatcctcctgcctcagcctctgaaagcactgggaccacaggcatgagccactgttcccagccagcaaaactcttaagtacatgtattagaaattctgtagcagaaactaagtattaccttatgtttaaatgtaagtaaaatgccccatgctgtggcctgacaatagtcattattctacatcattcccctcctcctcccttgctaatagaagccagcttttgcagaattatcaggcagctaactacttagaggcagggcctccccaatcccaggagagtgactcctaattggttcaagccaatcataatggtctcattccccttgccagatggtttaagaaaggcaagtgaccccaatcctaatcaataggacctgagggaaaaactggagggtttccatgaaattgttgtcttgctaacaaaaagagatgtacaggaggaaatattccatttcttcataagacactgttgagtctgcattca

SEQ ID NO: 333396 - DNA, 319 bp, Homo Sapiens
  misc_feature (288)..(288): n is a, c, g, or t
caaatccagttggttgaacccacagatacagagggctgactgttaaatctattgtagtctgtagataccattcatcaagttaaagaagtccccttctgttcctaacttgctaagtgttttatcataaaacagatattcagtgttatttattttcctgcatcaatttagataatccaataacttgacttccctcatctgttaatgtggtaaattatatgaacagattttctaatgaaccgactttgccctcctgtaacagactcaagctggctagggatgttattaccntttttatacacttgtgggcttcaatttgcta

SEQ ID NO: 333397 - DNA, 424 bp, Homo Sapiens
  misc_feature (48)..(48): n is a, c, g, or t
  misc_feature (373)..(373): n is a, c, g, or t
acaatttgcaatttcagagagaaattgcaaaaggtctatgagaccganatttttttagtggtgtgtttataaacttagagcactgcgtgggactgagcaggggccagggaagaaaatgacgttggtaggcgttctttggcctgaacatttctaggtatttgttacatggactgttttactttcacacccgtctgtgagaggggaattattgcctcctctcttagaggaaaccgaagctgagactaagtgatgatacgaaaggccttccttcagtaaggggtagagccagggcttccacaaattggttctgtgacagaatggactacgctggtgctggttttaggctgccttttcatttgttgaagatcacatnaacttgacgcccttcctgagagtttaaataggtcttagtttaagctgttct

SEQ ID NO: 333398 - DNA, 367 bp, Homo Sapiens
  misc_feature (21)..(21): n is a, c, g, or t
  misc_feature (321)..(321): n is a, c, g, or t
  misc_feature (325)..(326): n is a, c, g, or t
  misc_feature (338)..(338): n is a, c, g, or t
gagcggcccccggaggctttnctggtagaagttgatgcgaggaaagggcggcggggaccaggtttgcgagtcctaggcgagggtcatgggagttgggggtatttctggcaagtagaatggcctgcgtcgtgactaaactagccctgtgaccttgggcaagttcctgaaatccatgggagcttttgtttcattgtcagtaaactgaagataacaccaacttggcagcgggagtttgtgtcttctgtatgaaatctccctgcctctgtacctggttgagttgctgtcattattttaggggacggtattcagaattcgagcgcnaggnnccgcttctccancacatgtcccggggagctattgggatcca

SEQ ID NO: 333399 - DNA, 411 bp, Homo Sapiens
  misc_feature (312)..(312): n is a, c, g, or t
  misc_feature (344)..(344): n is a, c, g, or t
  misc_feature (361)..(361): n is a, c, g, or t
  misc_feature (369)..(369): n is a, c, g, or t
  misc_feature (383)..(383): n is a, c, g, or t
tttttgtctatgttttttctgatgtttactttaaaagctgtggatcctctctcttaaaactgattatacattacagcatgctctataaaggtgattcaatgatacatttgtgagagatatatgaagaaaatttttataaatataagcacagcctaacactgacagtatcgttttgaagtgctaaggtaaaggcaggggcttgggactaggatgatcttcactgtctctagcctataatacccgtgtggattcaacaccatatttactgaggtgccctacactgtgctagggtggggaggggccatataggtnaattaccaaacccataccataatctctgcccnggggggacaggccaggncagggggnccataccaatgtcnggactgtcggcagcctggggggccaggt

SEQ ID NO: 333400 - DNA, 914 bp, Homo Sapiens
  misc_feature (667)..(667): n is a, c, g, or t
  misc_feature (766)..(766): n is a, c, g, or t
ggacaactgctaccatccccctttggaacaccttcgcccgaaaaccgggatcccgcatcccaggaggctctacagatggagcggctcatcccgcgatggccacgaagggcaagccacgcataacgcggacaaaacccccacaagggaagtcggccaaaagcattatttccaaatcttcgcccacggcaaggtacggcgcaatagccccctggatgattctccagtggaacaaatcgtccaggaatgtcttaagcgagtggcagacagaacccagtacccgttcatatgatatgacctagactatatgtacaactactatcagcctaggatagccatctgtaaacgcacacaataacaataccctccttgagaggctttatgagaagtagtacactacttgtataactgcttgcaatttcacctgtctgatacaggcagaaaccaagtgttgctaggttttcatttgatcctgtgttacttgatatgtagaagttacctgtgaaaacttccactcttgagtagatacagcaggttccagcaggcaaaatattcttctgcagcagctcatatggatagatggagtctattcccctccacatccaaactagccttcatgatgtgttaagtaaatgttctgtcaacagaactgaacacagaagaacttccnaatgtttaaacaagtggcgccttcttgtcacatgttcccttggggccttgagccaaatgctggagaacctcgtacggcgtcttctgcaaggggctctcnccgcaccctgctcgccttcttcgagctggcctggcactgcgcatgaacttcccgtacttctacgtcgcgggctcggtgatcctcaacatccgattgcaggtacatatttagagccatgactaagctaacggctccggggccagcatga

SEQ ID NO: 333401 - DNA, 406 bp, Homo Sapiens
  misc_feature (14)..(14): n is a, c, g, or t
  misc_feature (22)..(22): n is a, c, g, or t
  misc_feature (46)..(46): n is a, c, g, or t
gcaggagacgagcntgagaccnacttcttgcctgtgcccgttctcnagctcttgcccttcccttgtgttccacattcaaaagtccaagtgcccggaagggcagcccaggactgtctgctagggtgtgctcaaaaccgaagcagcagaacccaaactctacttccttcactgggctgagtgggaggacacaaaggagattacatcctccttggacatgaaggaagagcgagcttcaggaagagactgaaggatatggatggttccagacacaactcctagccttgagttactctggatgccaaggctgcagctctggtagacggcattctccaaagcatggggtgtatttcatgaatgtgcattaacaggtacatagacttcaggttaaatcacactgaatcttatc

SEQ ID NO: 333402 - DNA, 435 bp, Homo Sapiens
  misc_feature (300)..(300): n is a, c, g, or t
  misc_feature (337)..(337): n is a, c, g, or t
  misc_feature (374)..(374): n is a, c, g, or t
  misc_feature (387)..(387): n is a, c, g, or t
  misc_feature (396)..(396): n is a, c, g, or t
  misc_feature (419)..(419): n is a, c, g, or t
taacattataatttctaaagtggagaagaagtaggaaactctgcaaatattttagagggggtaaagttcccatgacagtacattttagcatctgtttgaaaggaacctaaaacaacaaagtataattgggctggctgacagcggaatttctgtgacctaacagtttagatgtaataattgtgaaataactgctctattaggaatctttagagagagatttcaaggaatcatagtaaacaggttattaaaggctatgtcctaaggtaatgggtactggaaagatttttccattaggaaccnttggggcataattttaaggaccaaaggggacgggtantgggtagggaaaaggggattaaaaggattttggaaanttgttgaccttgntgtttaggncagccctttggattgtgcccccnaatggcccccaggggt

SEQ ID NO: 333403 - DNA, 315 bp, Homo Sapiens
  misc_feature (277)..(277): n is a, c, g, or t
  misc_feature (300)..(300): n is a, c, g, or t
agcatctccttcccatttctcttaccacactgcagcctctgtgagagcaaggatggcgtcttagtcgtgagttcccaaaaccttgtacaatgccccgggtagatgtttaatgagtccaacacagaggctttatccaaggccatgagaaaaatgcccttgcacctcagttacctctgtgacattctgacaactacacagtgaaggcagcctcagtgccctcaggccctggcagtatagtccacccctttcccggtgctgccggggtggggtttggtgnaaaggaagacccttcctcccaangaagcatccccgtac

SEQ ID NO: 333404 - DNA, 404 bp, Homo Sapiens
tggagtttatcattggtagaattttgttgcacaatgtacaaggcatattccaaattgtgaatgtccccatcatgcactttgtaataatttttcctgacccggatccattccagcaccgtgcagtgaggacttctgtctgtttttgttttgttttaccttcctccaggggaaggtgtacttttctgtccacaggtgtcccggtgaggcggctcaccttaattctctcagggcttgagggtgatttaaggctgggctttcagtccccacaaagacaattctgttgctggtttacctttgcttttgggggatagaactttgggggtccccaggaaaaacccaaaagtctttaccaggccccccgcctgagcctcgacttctgtcctgtggccacagtgtgaggaacg

SEQ ID NO: 333405 - DNA, 704 bp, Homo Sapiens
  misc_feature (588)..(588): n is a, c, g, or t
  misc_feature (599)..(599): n is a, c, g, or t
  misc_feature (670)..(670): n is a, c, g, or t
  misc_feature (681)..(681): n is a, c, g, or t
  misc_feature (692)..(692): n is a, c, g, or t
gaaatgttatattcttgtttaattggcatttaagtggcactatcaaactatggaaataaacatcattttttagattgttgagataataaagattctacaagcattaccatacccttgtaccctctaaattaagattcagcattattatagtaggaaaaaatggcagataattttcttctttattaatatgggaattctcaggaagcaattagggcagtgtctgcactcctgggcttgtgttttcagctcttccatcagtggaagtctggcttctcaggaaaggtgcagccagtccgtctaattatgatgcttgctgcatagtggccagcacggatacattcagtcagaggcttgtcagagaccagttgagacagaaaacctccaacaaatgcatctccagctccattgggtatcaataatttctttctggtcttgatcccaagacagcaaaagcagtgacttcactttctgtagccattataggtgtcatctctccccttggggtgaagatcacggattcgctgcccctttgagttcatctttgggcaggggcttgtgtctttttgggctatctctttaatgtctttnggtctcaaagnccttgctctctaggcaaagtgggccagcttctgtctccatttcccaaaagctcgtgcccgaattcttgggncctcgaggggnccaaattcccnatagggaggccg

SEQ ID NO: 333406 - DNA, 321 bp, Homo Sapiens
  misc_feature (295)..(295): n is a, c, g, or t
  misc_feature (310)..(310): n is a, c, g, or t
ggatgaaggggtggaaagtaatagagtaaaactttacttttatttgtatacacttgtgtacatataaatgtctttcctgagtcagatttatgggtatggccaaagacaataaaatgagaccaacaatcttttccacacagaatttgcatcaagtttgctcttttgtaagcggcttcacctgctatttaaatagtctgttttctttgtggtcctgctttttagactcaagagctagccagagccctctgctcacccaacagcaatccccatccctcccagctgggatgccaggggntctttgccccatggnttgggggtttc

SEQ ID NO: 333407 - DNA, 453 bp, Homo Sapiens
ttgcaaagtaactgtgttttttatttctatgaacaataaaatactttcataatttcacatcccattgcttttaagagcacatatattacaaataaaggaactccacaaactttaaagattagtatttatcaacgcttttgtacacatacacaaatattttaatataatggtatctgaaatgttattcatatatttttagtactgtcatagtattaactaaaaaggatcttttaaatttggtaaaaaccgtatattttacaatcttttatttacatctgaaatatgcttaaatgttacaaaaacattcactttaacctttaaaatatgtgtactaggactggggtactggaccatacaataactgacagcaaacttagggtttgcatttgagctacacattcactggaatttcatggcaaatattcaacctggcttgatcaacactgctcaaag

SEQ ID NO: 333408 - DNA, 258 bp, Homo Sapiens
  misc_feature (133)..(141): n is a, c, g, or t
actttcagtacggaatctgtgtatctgttaaaatatcatcaaatagaaacaaaatctattttactgcccagtgagcttctgtagttgcacaatttttcattctgcttcctatgtaaagaagacatctgacagnnnnnnnnntcattttcattttaatgttatttgtaatctttagataacaatgtgattacaatctatattttcttgtgccttttatgtatagtgataatgttgaaccaggctaggtgcagtggctca

SEQ ID NO: 333409 - DNA, 835 bp, Homo Sapiens
  misc_feature (437)..(437): n is a, c, g, or t
ctatagtattttaatgtcctggaataaaaactgcaactaatgcttctggttggtttgtgttttctagttgaaaatattcaatatgcagctaagttttacaaaagcgagtcctttgaagtcagagaggaaagtaggcgtggctggcctcccgtttattctgtgctgctaccttggggaggacatggcaggccctcacggggcagaggtcggcgtgcaggtgcctcttctccacatggctccatgtggatctaaatgtcaagactttgagagcatctgaagaggtttcaccatgccacatgtttagggtttgactcctttcttgttattcactaatgatgagaatgagcagagccaagaaggtctgttgttaacgaaaacagtgccggagacttagacaagtggccaagcaaaggcatccaggagagtcctgcgcaggnctggtctggcccttgcaccacaaaccaaaaccactccccagggcaggcctatagacaggcccaggggaagccacacggcccactatgggcagaaggtccctcctgtaccgaggtgactgagggcaggctacgcacagccctgccatccccagcctgagtgccaaggactgctgatgaattctaaaccagagacaagaaataaatattgagagggtgtgctctacaggtgtccatcacagaggacccacagggcagcccagaggtatgtggaggaggccttcgggctgtcacagccaccagctgtaagaagcggctagactccaggagagcaggctcaccactgaggggagcttaggctccttacgtcacgttcccaggtaaattcgtgctcatgtgat

SEQ ID NO: 333410 - DNA, 568 bp, Homo Sapiens
tcaaatctctgggcctggggctgtttttacctgcagaaggtacaggccccggtgtcggtgttgtttccccagagcacctacagggcagcggaaggcagacactcattgaacaagcaagccctccctcaaaagcacagtgggagggtgggaggaggtgcatgtgtgatgtgcccagttccgttccaggcaccaccaggcacccagcacacatgtgcatctttccctccctctcctgctggcccctgagcatccaaacagggcctgcacatggctgctcctgagtggatgccacggaactgaaatgatggcaaaccccagggaacagaaactgcgacttcagtcacttatgttccttggtacatagtaggtgcttaataaagattttgaatgaataaacaagagccaagccctgagcttgaggctgggaaaaaataggacctgggccaagaagcggcagccttgccatctggatgagcaccatggatgcgcagtcttggcgggaacccattagctatagggcactcctgacacaagacaggccattattttcccagcggaaagattttat

SEQ ID NO: 333411 - DNA, 106 bp, Homo Sapiens
aatgactaatttcttgactctggagagagttccaattttatggtaaataaaataccacagcagtgaaagtaacacattattctacttggaaaataatgtaagaagt

SEQ ID NO: 333412 - DNA, 382 bp, Homo Sapiens
atcttaaccatttttaagtgcacagttcagtggcattaggtgcattcacactactgtgcaaccatcaccatcaaccatccccagaacgttattcattttgcaaaatgggaactgtacccattaaatagcaactccacgtcccctgcttctccccatcccccagcaaccacccttccactgcctgtctttttggattagactcctcgaggtatcccttctaagtggaatcctacagtatttgccttttgtggctggctaatttcacttggcatagtgtcttcaagtgtcatccgtgctggagcctgtgtcagaatttccttccttttcaaagctgagtcatgatattccactgtatggatggacacgttctgttgatggaatt

SEQ ID NO: 333413 - DNA, 469 bp, Homo Sapiens
aggtttgaggggggatgctggagattctaacaaactatttttagttttttcacttacaagataaaaatatacttttctagcttggatattatacatataccagtgggttttaaagagaaacacgtatttaatctaatttaaaatcaaaaggctatgtagaggcagcaaataacttaagataaaattgcactaggctgatcaaatttggcttccagtaatgaaatacaacgatgtgggggtttgtagttgcatcatttaaactgtcttacgtggaatcagattcagcattgcactggagaaagaatcctacgcttttttggtgtggtctgtctggataaaagcgtggcatcaccataatcttccatggcagatttcgcacaaaacacggagggctaaggaccgactcactcagtctgctgaagcgctccacagtgaactgaaaggttgcctcggagcgccaactggtgtc

SEQ ID NO: 333414 - DNA, 414 bp, Homo Sapiens
ttagcagtccataatgagcaacttttattggcattagggtgtcagtcctgtaaggatcatcacttaagtgtgtctcagtggagaaaagatcaagaatcatgtcaagaagaccatggggttttattccacttgagcaagagcaaatcagagccccatcaagcaggaatggtggcctttcccaggttccatccttaactaaactgactgttcccccttctgatttctccacggtcttctgtctcttgctctgccaaacttgttttcttatctctgtagagatgagtggcttgtttgatgttctttccatggcaaaaatttattcaatgcaaagttcacttcagacacttggttgagacttgaagtttagaccaatcctgagatgcgtggtgatcctgagagagagcagactgcctg

SEQ ID NO: 333415 - DNA, 692 bp, Homo Sapiens
agcgctgatggcgggaaagcaagtcaacagcacgcccatcccacctgcagcatagggaccgcacctccccttgatttcatcggtgatattctatttataggacttcactcattactgtgaacacccaaacaactaatgctgtgtgtaagggggtctgcaccctgccactgatggtggagactgtgcttaggattagagtcttcgggggctccacttacaggtgaaataggcaggtctgggagcctggggccagggcgatgcctcttctcttctcactggaagtttgggagccttgctcaagtgggggccttgggttttctggattcttgctaaagtgcttccttaagccctgagtcctctcttctccaaacaccacagaaacagccagtgccattgttatgcacattctcacaaagcaaggagctagagagagcaggtgccaggagaggactgagtggggcaggcacatggcaggcactggctggggcggatgggagctgccagcctgtaccctcccagggaaccccctccccatgtcacagggaacagctttgccatctactggagagctgtggcccatgacggtgggtgagatggctggtgctcatctctgccaccctggaagggggtaaagaacggcattgccttatattcattgttcagcaacatcttttgtctttaatgaccttcag

SEQ ID NO: 333416 - DNA, 434 bp, Homo Sapiens
aagggttggttagtattctaatttaattcaatttaatgaatgacccaagtctatcatctgtaaaaagcagtattaaagcacagtttaccaggatgtttaaagcatttcaaatgctaagaactacataagtttattactcactggtgtgtatactattaaacatttgagcaaaaaacctacataaggcaaataccgtgaccataaatctccagttatgttcaggttactcagctatcctagaacaggggctggcaaaaaaggggtcacatctggcctgccatctattttcgtatataaagttttgtttgaacacagccacatccatttgttcatttactgtccatggctattttcctgtcacaacagaagagctcaatatttgtgacagagatcacatgccccacaaaggatagaatattgactatatggtcctt

SEQ ID NO: 333417 - DNA, 212 bp, Homo Sapiens
gcaagtatcgttaagttctcattaaattttaataaacctaaaactaaaaatcctggataatgcattttggatatgatttataccaaaaggatgacatgacacacaagtcagcacatccaaattcaaaaagagggtgtggcacatgtcaaatgattggcaaataaagttacatggacatggttaaaaacaaaatgtttgtggtacatttgcag

SEQ ID NO: 333418 - DNA, 444 bp, Homo Sapiens
ttttagatcgctgcatgctgccgcgttgggttaaccatggtagcattttaccatgagaagccatagcaagatgtgccaggtgcatgctgctggaacacctggctgaggctccaacagcattttcctatgactgagggtagggtaggtagatgactcattacaatttataaaatggggggcttagcttgggtatcatcgtggttattccaagcagtcttccagctggactagcttttcgggaacacgtgtgtgtttgtgctggaagccccagtaatatcatttaattcgaaagcttttttctatgatgaattattcaggcagtgtttaccaaaattgtcattgatcagtacagacccagagagcatgtacaacagcgcctgtgctgggcctgctaggagtcgatattttctggctcaaagaagttccaaaagaattcaaagccag

SEQ ID NO: 333419 - DNA, 488 bp, Homo Sapiens
aggtgtccccaggaaggatgtgggaaacacttggcatcacccagcaagttgaaacgaccttcaaaggccaccgagggtttgtacggtaagcctgggtttgctcgggggggattcccaaatcctgggcgcctttgaatctgttctgtgaatcacgctgaaaaggatgggacccctttgaacaggggacacccatcctgcttatttggggtcttacactcttttcccaaagaggcacctgtatatgtctgtttttccactaccgtatcattgctgttcacatgtaatgtgttgtttgttcacaacaagcgcctggttacacattacactgacgaatgtgctgatgctccagccatggctttgatgcttctgtcatttttaacctcttctattaatatttactgcctgtgccattcttttccttgttggccattcacaaggcttggataatcgtgtgacattttgagagccatcagatgttacgtttctca

SEQ ID NO: 333420 - DNA, 474 bp, Homo Sapiens
  misc_feature (464)..(464): n is a, c, g, or t
ctcttgggtagaagggaatgagcagacagctatgcttctgggtttgttttgtttgtttttagcttatgtacaaaagcaagctctgtttttcattgaaatatcttttttcttgtatcagagatgtgttgtaaaagactcattgtgggttcagggaagaatgttttaacatgcaaggaaatgttgcaaaattagaaagaggacataattccacaaaactaaataaaactgggggaatttttaggatactctgaataaatcttattatttgcatcccactaaccccaatcaaataataatttagatttgttttatttactaaactgctaatacacacattcagaggtggtccaatgcagtcccaccatagaaacccttcccatgcttagccactgttgtcattaatctctccaaacccaaacgatggtttaaacacagtcgtcccttggtatccagaggattagttncaggacccac

SEQ ID NO: 333421 - DNA, 489 bp, Homo Sapiens
  misc_feature (50)..(80): n is a, c, g, or t
ctatgttgcccaggctggttttgaacaactgggctcaagcaatcctctgnnnnnnnnnnnnnnnnnnnnnnnnnnnnnnngaatgagccactgagcctggccaaaatttaccatcttaaccactgagtgtacagttcagtagtgttaagtacattcacattattgtgcaaccaatctccagaacttttcatcttgcaaactgcaactctatacccattaaacaacaattctattttctgcttttatgaatttgactactttagatacctcatgtaaggggaaccatattgtatgggtctttttattataactggcttatttcactcagcataatgtcctcaagattcatccatgttatagcatgtgtcagaatttccttttttaaggcttagtaatatttcattctatgtagatactgtattttgcttatccattaatccatagatgcacacataggttgtttctacctcttgattatcacgagtagtg

SEQ ID NO: 333422 - DNA, 365 bp, Homo Sapiens
ttttttgtttctttgagctgtctcctacaggaagaggctgttagggtgcagcctcgatctttgtccagagaagactgacagtttatttctctaggacttcattgaaagccaaagttatgctcttggtttgaagaagtgtgttagctcttgccttctgggtttctggctacaaactctgggcggcatcaagaggtaccagagctgagatttcagatggatataaagtcaaagttggatgtcctgcaggaagggaggggctgcccgagggtttggtgctgcggagtggaaagggcctgagtccctagggtagcactgaggggtctgtgccagaggctgataccagggtattgaagctatggtgctag

SEQ ID NO: 333423 - DNA, 521 bp, Homo Sapiens
aagaatctttcatttatattggtgttattgtagtgaagagaatgtgataggctgatctgtaatggtttctgtcaggagcttagcaaatgcctctgcccctcttcccctacccctgtccttcctcagttcccagctgggattgctatgcactgggcagacccgtcactgtctcccctgaacccccacacagtggcttcccttagaaccagtctttgtactctccctaaacagcagcaggcttaggatttttgtcaggctggttcttgcgtgctctgtgcccccaccagtttgctcacctcttggggcattttgtaatgtgttttctctgtcttgtaaaaccttttgattgtaccgaaatggtatctgcagtcgcctttggaaataaatggtcattaatttgtgtacttagcattttgaattttagtctcaggtgtttctgttgttgaagatccttgaatgaaaaggaaccctcaccatggggcttactgttataatgtttcttcatttactgttattcaacc

SEQ ID NO: 333424 - DNA, 122 bp, Homo Sapiens
tagtggtaataacattgcattgtttcaaggcaccacagtttcttcatccatttacctacttgaagaacatcttggttgtttctaaacttttagcaattatgactataaatgtaaaaggagta

SEQ ID NO: 333425 - DNA, 546 bp, Homo Sapiens
tttaacacttatgcatttattttcatgtgtaagaagaaaaacgtaactagcacgtgaacatgactgcatggatacacggctcagcacgaggctaaagtcagaagtgagtgaaaacaaaatagcatgttgatttaagtgaaataacagaacaggaggcctttggttataacaattgtggaggtggtctgtgaatgcagaagttcgggactccctgctctaggctcagggcaagacgctgtggtctgggccgaagcccctggggttctacagagaagcctgcccagtgcacggcccctgtggcattctcgtgggagcgtgtgagaccccagggagggaagcacattctgtttaacttgtccgtgccgtacaaaatgtcttagaagtgataaagcaacaatgatgattctccttcaaagggaagaagaatcttccaggtgtggtcttgaggacgcagaggttacaacacaggctgggctgcagggcccaagtaggacttgaggtcataaccagaggactgaagggacacctgtcctggcaccatactgg

SEQ ID NO: 333426 - DNA, 312 bp, Homo Sapiens
ccagtttctatagaatttcccatatcctttttgcaatataagccagtggttgttattctgtttgtggctaaagactctttaacaaaccacaattttgtcccggtgaggtacaggcagtcataagcgaatcatcactaaatatgccttctactggttaatcaaggtgttgattagttaaaagccattctcatagacttgagaagatgtctgtttcttcttctcatacaacaagaggtacagcatttcattggttagttgatattagggattagtgtctatcagtggtgttcaacaaggggtgagtttgcaatt

SEQ ID NO: 333427 - DNA, 335 bp, Homo Sapiens
agccggccagagctgctgcctttgacagtccctatgagctgggaaagtcaggatggggagacagaagacttctgtgctatggagacttggaaagtgacataacatgtttggctcagactccccgcctataaaatggaactaaaacactcttgttttaggttaagaaactagaacagatctttgacatctctaatgagccctagattattcctggtgtcagggagattaggaaacaccttcatataccgtactctattcttgccaaaaacctcaatgaatgcttaaagtaagatctattcatgaaactgacttcacattacttcctaaataaaaga

SEQ ID NO: 333428 - DNA, 495 bp, Homo Sapiens
tttttttattccggcattaagtgggttgaatataaattccataaatttacttttatagtccatataaagttttgactacaactaataatgtcaccttagctaacacttgtatagcacttcagaatgcattatcccagggtttctcaacctcagcactgctgactttgggacaaataattgggcccaccagggaggaagaaggggacggaatactgtcctgtatattgtgacgacatcaagcagatattagcatcccccgcctctacctacaacatgccagtagcacacataaacacacagccccaatactgacaaacaacagtgtctctagacattcccaaatgtcccctgggttagatataatcaccctcaagagaagttttaagcaatatgccccacgtggcggcagtcaggcaacttaaaactggtgaattcagattctcaactcattccatttaaatcacactacttttacatcagtatttctgtcccact

SEQ ID NO: 333429 - DNA, 998 bp, Homo Sapiens
ctgcaatggaaatattttttagtactacttccataattcagaaattccccgagtcactctgggtcacatgttttgggaaacgtgctgaggaaacacagggacagagtcctttacagaaatgaaacgggttgggctaggatttcaaggtgggggtgttttcattccctccacaatttacttcaccattgctctgacatcatcttttaaatcatttttttaaacgtaaaaagagtagcagcgtgtggagagactggccggccaggtggtgctggccccttgagggcaggcagtgaagggtgctgtggccatgccccatcaggtcactagcacctcctttccagagcatgactgggaatgacaactcttttgctagcagagtccacccaacaagacgttttagggattaggggacggtccctgcttttccagccctctcaatcagcacactgaatgcgtggtagggtggggcagctgtgtgctgtgaaactgaggccactgctacagaattgaaggttcctggacagaacaaaccttcaagaatttccttgtggagtatgtgagtgaagtccggtctaatggtctgcaacaatagagtgactcagcagtcaggaaaggaatcaaaaggtacctgcatgttatcttaagtttagtactactgggtgacatgccatcactcaaggcgctgtctgtggtgcgcttagtatgcgctgagcccctcaaggaccctggaggccctggggtcactaccttgtaccagcggaggacagatgccacgcacgcctggagttgaacatgatctacttgtcttccaaggtgggctctccctgctctgactcaggcgcaccaggactgctgatcagacctgctcagggctgtggctgccaggaggggacaggatagcggtgggaggccgagtggcacccggggcaggaccagccccaatctagtgagctcactgacaccctacctttcctgtcagtctcagtagcatggaccag

SEQ ID NO: 333430 - DNA, 903 bp, Homo Sapiens
  misc_feature (589)..(589): n is a, c, g, or t
aaacttagaaagtgagttgcagcaaattttctcctgaaagaattgcaaagatgaaccgtggcctctttctatattcataatttttgtcttagggttaaaaagactcccccaaggacagaaaattgtacctaatgatacagcctagagcgcatgttgttccttttgtctccagtaccttctacctctggctcaaatgcactctggtcactgatgcacctccagttctcacagcttagtaaattatggtgtagtgatcacgtctatgtccctacttccccaaccaaattttctgagctatgccagggtgaggatgtggcccttttcatcttgtaattcccaaaagtctgtggtggagtgcagagatgaccactaaatgaaagaatcactcgtactggttgaaacaataccaataaataccttaggttctgtggtgaacacagatcagtaaataaatgttgggcaatcttccagtctctcagtgtcccacggtatatctgttcaccccataagggagcacagctagagctcctttacctacgctgcggggacactgatttgcatggggaggcctggtgcaaggccatctgcntgggtatgagcagcagtacaagcctttgaaggctgtgtgctgttcagaacttggagctggttgggggcctccgatgccctgtgctgacaagctggcctggggcttctccccactagagtcttctctatatctcaaggtatgcacatctcttcctgggcacacaggcaatgggctagacaagcatctctctcctctaaggcttgtcaccaagcattccttccttccagggggtggggtttggaaattcccacttaatatagcccaccttctgtcatttgacattttctaacactggagtggtggttcccaatcat

SEQ ID NO: 333431 - DNA, 584 bp, Homo Sapiens
  misc_feature (210)..(220): n is a, c, g, or t
ttttttttactcaaatttttctttggtaaagacaaaggatttaacaatttttgcgcaactatacttaactgacaaagatgatttgtttaggatcttaaggatagcaaagatatatgctaagagggtaccaccaggaaaaaagacaaatacattctatcactagaaaatgcttcaagacaaaaatattaattcaataagaaaatatttcannnnnnnnnnnatcacagagacaattaactcatttctgtaatccagttacgtggcatacattcctttttctagtttctcatgcaaaagtttggaaagtttttctcaaaacagagcaagttagcgctaatggtttcaagtcagggctgggagtcagcctagaagagcatgctcagaaggccatttacacttacctgaccccagcctgatgctctcccccatccaaaaggggtcagttaattcctattactaatgaattatctcttatacttactctatagacatataaattaccacaaatgtgcctataaattaacaagatatcattcaatgtggaggagagcagctggaacccaatgacacccctgaggtatctt

SEQ ID NO: 333432 - DNA, 532 bp, Homo Sapiens
ttgtattattatctgcaacttttcagaagagccataccagaccctcatatgcccagcacaggatccactcatgcacacctgtctagggccttggttttatgattttctgtcacctggcttctcagccatgcctccaaccaagctatcctcaaataaagactaaccatgcacaaaaagtgaaaaattacacaagacctactcaaggtctgaaatggaaagtgcagctggtgattctgagtagtatattttatgaattgatgagcagggaatttctaggtatcacagagcaatcagcagctgaggagagagcgacaaaaccaggactctgacagggctttttggaaacttaatttttggagcaatcagcagctgaggagagagctaccaaaccaggaccctgacagggctttttggaaacttaattttttattgtcaaattatacagacaaaaatgaaggtaaaggtagtgaggagtaccacacacctttacttagaaggataaataaaggacacctttgtagggagaaaaaaa

SEQ ID NO: 333433 - DNA, 274 bp, Homo Sapiens
catgctgcgcacagctcactctgccttttctaaagttaggactcctggggctaggtggtggtggtgttggctacccttcttattttggtttggaaggttttcataatgactgcagtagggtcagagtcctctgcatgtggtgctatcagtgatggatgtgggtctgaagccctgctcatcaacacacactgaaccaaatgaggaggtggggtaaaaagactatcatctgaacagatttcttggaaatcaaagaacagaaaataaaattgaggct

SEQ ID NO: 333434 - DNA, 462 bp, Homo Sapiens
ttggatgcatgggaaatttatttttaaccctcttacattttcctatagattctatcctcaagaggaaccaaaaagctcttgcttttctctccctgcctccagcttgacaaccctacactgtgaataggcagctcctctctcagatatacaacatgccagctttggcacagggtggtgccccttttcattcttatctccatcacccttgattgccaagccttcccttggcagctggaccctgggctgaacgccaagatgaaggactctattgggcatcgaccccttaatcaaccccagggaggacacaggacacattgaatgccacctctcctcttagctttcagcccagcctttagcagggcacccttgaggactgaataggtccagagggaggcaggagctaaggtgctggaaggaggtgttctgcggacggttgaggaagggatggaggccaacaggaga

SEQ ID NO: 333435 - DNA, 426 bp, Homo Sapiens
ttttgttcctcacaatcgctcttcacacttttattgttaattctcttcacatggcagatacagagctgtcgtcttgaagaccaccactgaccaggaaatgccacttttacaaaatcatccccccttttcatgattggaacagttttcctgaccgtctgggagcgttgaagggtgaccagcacatttgcacatgcaaaaaaggagtgaccccaaggcctcaaccacacttcccagagctcaccatgggctgcaggtgacttgccaggtttggggttcgtgagctttccttgctgctgcggtggggaggccctcaagaactgagaggccggggtatgcttcatgagtgttaacatttacgggacaaaagcgcatcattaggataaggaacagccacagcacttcatgcttgtgagggttagctgtagg

SEQ ID NO: 333436 - DNA, 409 bp, Homo Sapiens
tttgattgttactattaatagccagagtcagcagaaaaatcccttcccccaacgaaatgcatttccgcaagcataggaagctctgtttgttcagtgctgactccggcacctcacggagcctgggatacagcaggcaccaagacacaccttgtttggtgggaacacttctagtattctcacttcaaactatctcagatttgccatttctatatcctaaggcatgttcccattctctaacgcaagggttccttctttcccagctggcctccaaccctacaaaagcactgcagggcatcactcagccttctgtgccttagtcacgctgttcttctcaccgttccacaaagcctccctcaagcccagcctcacctgaagaccgaagggcacgggcctctgaaaatgtcagcag

SEQ ID NO: 333437 - DNA, 431 bp, Homo Sapiens
tgtttgttttttaatgggggagggattgagttgttggtggattaaacacaaattaacttgaaaatttggcccaattccatcccttatccaggagaacacaacaaacacctaacggcttttccctctcttttgcggggggatccttccagtgatacctggcaaaggatatgccagggttattcgagcaagggagtaaaccacatttgcctcagatcctcagggaagatgtcatcgcggccccagggggcgcctaattggtaataccctgcagaagggctcaaaatgaggttttggaaatctaaaggcccaagagttgccagcatctcacttggggcagcctgattttttacttcccttttcccaaacccaagcccgccatggaaaacgcggggaggtcagggaagcctccagagaacagagaagaaaaagcc

SEQ ID NO: 333438 - DNA, 463 bp, Homo Sapiens
aaaaaaggggggttttaatccttcctagaggaatacagatttgaatgaaatacattcattccataaatacattagcagcaaaaccttcccaccagagtcctctactccagcccagaggttgtgccttgagcaggagagcatgttccatcaatcctgtcaacttaagggtgggtctgcttctgagaaacgctggatgtgcatgggagacacaatgaccaggtgcatgggtgacttaactaagctgggaccctgaaaacaggcccatgtggtcactattcagccttctttaccttccaaaaatcctttggcatcttccatgcttctctgatgaggttcctcagcactgagacaactgggaagacctaactttgcacatgcattaaataatgttattttgagttggcaatgttttaacacttttcataaggtaaatgaaacattaaaggattatttcccttccgtt

SEQ ID NO: 333439 - DNA, 444 bp, Homo Sapiens
  misc_feature (246)..(272): n is a, c, g, or t
ttttctcttgtcatatctatatgattatagataatatacttacatctctactgctgcttttggtaacaggatttagtatcttgactcctttccatgaaaggacaaaagactgaggaaattaccccataaattaaacttaaatgaaaggagccaattccttaagagacacaaaccgccaaaactcacttaaaaattgataagctgaatagtgctgtatctattaaagaaatatcattcctacttatnnnnnnnnnnnnnnnnnnnnnnnnnnnctcccaactctgtctctacaaaaaattagccaggttggtggcacttacctgtagtcccagctattcaggaggctgagatgggaggatcacctaaacccagaaggtcaagactagtgagccatgattacactactgcattccagcccaggcaagggagcaagaccctgtctca

SEQ ID NO: 333440 - DNA, 574 bp, Homo Sapiens
gcttaaaatttttcttaaatttaatataaaaaaatgtggctttatgttaaaactttaggaaaaatatgcatatatttcatcaggttaaaagtttacgagaatatgaatatatatgaaaatgatattaaaatttggaatataaactgtgtttttcataaccaaatcatagaaaatttatggtagtatatgtataaactgtaatacgaagcaagataaatggaactataaaatgtagttttaaatttattaacggagtatgttttgttaacatactacagaatcacaaacgtttaaatagtttcattataatgccagaaaatgaaggctaactggcacaatttggctactatccttattgatgttttatgttactacaaacaacagcatcaactaaatgaatacatataacaacacattcacaataatgcttcaagctatcttaaataatagcaccacagaaaagatcaacaccagtgcataacacctgtctaaaataaatgttaatatccatgggctgaaacagtccatctcaaagaaaaccagttagactctcattctctcattgtttataaat

SEQ ID NO: 333441 - DNA, 513 bp, Homo Sapiens
  misc_feature (497)..(497): n is a, c, g, or t
gtttttacttttcagttcaagtaggagagcatgttttggaaataaaagaactgactagcacaaacatctcctctctgatttgacaacctcttctgaagagtgaaccacatttggtacaaatccactcttcaccccttcccagccctcctggattgtaatctccccccttttaaccagctcatatatgtctcttgtcaggtctgtgaaggctttctccacattaatggcatctcgggctgacgtttcaatgtacttcatgccgtatgcagcagccagtttctcggcctcgtggcgagtcacttgcctctgtgtatccaggtcacacttgtgacccaccagaacaaatacaatttggtagggctgaacgtgtactttggtctcttctaaccactcatggacattctggaaggacctgcggttggtaatgtcaaataagagaagaccacctactgagttcctgtagtaggcgcgagtgatggatctgaacctctcttganccgcggttatccagat

SEQ ID NO: 333442 - DNA, 478 bp, Homo Sapiens
ttctgaatactgaaggttggagttgagcaactgcaggtcagtgattttcagaagaggggctcttgagcctgaggaatcaggtctcacgggtagcatgatggtctagcggagaatacttgtgttttccaggggctctcttgaccctcaggcctcaggcccctcttgaccctcatttagatggccgagttagtgtaatatggagaagccctcctctcagccccagcttcacaccacatgcagctcaatgatgataatgccttgatggacaaaatgcaggaggtctaaaagtgtccaggaaaacctaaatttgcttttgtctcctatgtttcatggcttagcttgtgccacttttgttcttcctttttcttgggcccattcttggggttcgctgctaggtggcatgcctgtattgatacaggaaggaaggaagtggttagatcagcctattcatttctttatttaacctttatatcatcac

SEQ ID NO: 333443 - DNA, 672 bp, Homo Sapiens
aggtcaaacaagaaaagggcggagggtgtccacgggagcaatttcagtcacctgtaaatggggacaagcagattcagattgtggggaggcaagccaggttgtagcgaagcagtgtggagtaaacagagccaaggaagttgtgggcttttctctaagatagcttgtttgaggagccggaaagggcaatggaggcagcagagggttcactttttgttctggtttatattaaattaggaaagctagatttgctaattgtcatatgactttgattacctctccaacatttgctttttaccatgtttaaaatccttttattggtgatttgtttttggacacagtatactctgtccaagcttcaaatgaaagcactgctctttaagctcctagcatcttaccttaagttctgttggaactgggtgagacctcatgtttgcgtatgcggtctcactgagttttagtaagactcagtttttaagcttcagcaactaatatttggaattgcactttttaaattatagaatatgatttgtgtccttgaagtttgatcattacctgaagaattggctgaaaacaataaatgtttaaatgttgcaatttagagaatgtctttattgtgttgccaaatgctgaatgacagagagctttaattctaactgctttaattagaaagag

SEQ ID NO: 333444 - DNA, 232 bp, Homo Sapiens
ttttaaaaagttttaaactcacataaccaaaacagaggagcaaaaaggagaaaatagatgcagcatatgatgtagacaaggggcaagtataagaaaaagctagattaataaaattggctattggatctcagaagattaggccaaacagacaccatcataaggaaatgcaaatattaaacacaagttatggaaaaatttcaccctaattagtaatcagaggcatgcaaatcaa

SEQ ID NO: 333445 - DNA, 471 bp, Homo Sapiens
aaacaacaagggccagtcagaacacgtataataaacacggcccaggtggtccctggtttgcatgtctgacatggtgcttcccaactcacatgtgccttggcagccaatcaagctcctgccccagaacatgtttcaaaggaaatggtctcagagaggaacgcatattgttcctctccagcagcatcttgcctgcctttcctaggaacaggtccctggctccctgccagactcttctttaaagcagacctgcaggataaggacagcagctaccaatcttttccaattgatttaattcaattcactgttactaaaaccatctggctttaggtatagtcctgtgcggtcactttattccagcaactggcccactgcagtacttcccctaacagcctggggaagagacatagcaaaggccctaacaacctgggttgcaacctttccctgcccaggacaaccaactatcaagtaatg

SEQ ID NO: 333446 - DNA, 433 bp, Homo Sapiens
ttcaggttacgatggttacttttgttatgtattttaccacaatttttaaaaagcaaaccaaaaccaaccaagagtgcttcccccacacctcaaaatcatcctgcagcagctccctggcccagctctctctcaccctgaccctgggcccctctcccaccacccagggctagccctgtggaccaaccatctctgccagcccctccccgaccctccagccagggaggtggggcgctggccggtgaatggggcaggccaggcccaaaggctggcccagggctcaccagctctggactgggcgtcccgtctgaggtggggatgaccaacatgccagctctgggttttagctgaggatgggcacatcaagcactgacagccagcaagctgggcacaggcgatgctcaacctctaacacatcggctgagaacctcacctg

SEQ ID NO: 333447 - DNA, 428 bp, Homo Sapiens
cagccactgttatgacagtagtatatataggcttttatatttataagcaatctataaatatgactacttgtttaaacaaagctgtcatgattttttagtgtttttagatgtaaaaaattcaacagatatgaacttagaattggtctttttgaagtcctttaaaagggctatgcgtgagccaccgcgcccggccggtgcctagactgtttcatcaggacagcatttacgttttttggggggtaagaacaggttttatcctgctgaccaaccttaagcacaagaattaatccctaactccatttagtgataaggaagttggatgaacaagtgatagctctggtaaaatgttatttctttttgccatcttggatgagtaatgtgtcagcagtaaggtaggaatcttggggcaaatgtactatacatatatt

SEQ ID NO: 333448 - DNA, 385 bp, Homo Sapiens
ttctgtgttctcctttcccagttatattttatttatctattcattattgttccacgtaatggagaaaaacatgataccaggatcttgattagaagtagcactcgaaccctaaaagggcttataaaatcacagaccctcactcagggttagaatgagctgtaaaagtcaacctgtctaagctcccatcagatgcttaattctggaaactcctttgcttgcctattataaatttaacttattgagtgaaaatgttgaaaagctgtgttattatttcgcttatcatcattcatcatgtttagtaattatcaaaatagctgccacttatgatgcacattccatacacaccaccctgtgctgagggtcatttatgcctcccaacagttct

SEQ ID NO: 333449 - DNA, 346 bp, Homo Sapiens
  misc_feature (12)..(12): n is a, c, g, or t
  misc_feature (48)..(48): n is a, c, g, or t
  misc_feature (85)..(85): n is a, c, g, or t
gaatctgggtanggtaacagtctgaataattgaagcagaagggaaagntaaatttgtttggagtcttccagccttgtaattggcnaggaattttcatttttatccagtgccatttcaaactgaaaacagttccgtctttctccctaaaatttataatgtgttcgttcagtatttcttttgtgctgttcaaatatttgcttattctttttctagagtgttgtccagtagaactttctgctatggtggaaatgttcatactctttaccatctacatggtacccattggccacacgtggctaccaagcacttgaaatatggcttatgagtcttcaggaacagaattttt

SEQ ID NO: 333450 - DNA, 558 bp, Homo Sapiens
ctgaattaagttagcctcaatattcatttatattctttgtatatatgtcagcttgaaaacaggaagaggtagccaagaatttgctgaaagctgaagtcctgtatgctgacggtcaataactcctgaactgatgataatgttctcacttacacgacatggagatggaggtggggcaggagaaaatgaatgaatgggaccccattggcctcaggattttagtgagaggactgtccccataataggttgggtgactttcaaagacagatgccagctctttaggatctccagttgtttggcaatggcttaactgacataaaacatgagggtgcccccatctcagcttgtggtcttaaaaatattttcactccccaccaccccagcataagtggtatagttacattccaaagagaccctctgacggcaccacaccaatcacagcctaagagagggacagaaaagtgttggtagctgaggagggagcccccagatgcagcatctatgttaaaactctcttcacaagactacacttaaacagcctgcgctgaagccggcacgtga

SEQ ID NO: 333451 - DNA, 607 bp, Homo Sapiens
  misc_feature (79)..(198): n is a, c, g, or t
ttggggagaagagtaactatctttattgaagtataaataatatacaataagctgtacatatttaaaatggacagttggnnnnnnnnnnnnnnnnnnnnnnnnnnnnnnnnnnnnnnnnnnnnnnnnnnnnnnnnnnnnnnnnnnnnnnnnnnnnnnnnnnnnnnnnnnnnnnnnnnnnnnnnnnnnnnnnnnnnnnnngtaacagctcatcacgggagatcttttcatctttatccaaatcatatagtcgaaaagcaaagtgcagtttgttgcttcggctgttgagtggttcgggtccattcacatctttgctcttttcattatcctcaatggggcggaaatgagccaaagttcgcatgaatccacggaagtttacctggtcctctccctctggaaagaaggcattgatgatccggtcccccagtgggttgatggcaagttctggaatcctctggaaatcttcccggctcctggaatttacttctgtggcaaattataccaaataactgcaaagaatagcactttaatagctgccaagtgtttcttgcaccaactcagaagtggaaggagccagatttgattacgccacattcccgcgtgccgaatt

SEQ ID NO: 333452 - DNA, 236 bp, Homo Sapiens
ctgcacagacacaatacattatttctaaaagaaaataagtacaaattttaaattgaatcaaagacgtaagatatctctggaatctgaaagaattccaaaaaatagcacagagaaaccatttgaaagccaaatactttacattaaattggtttcacttgtcagactcccaattccataaaactggaaaatcaatttactcaggagtcagtgtattttactgtgggggaaattacttt

SEQ ID NO: 333453 - DNA, 400 bp, Homo Sapiens
  misc_feature (307)..(307): n is a, c, g, or t
ccctatccaaggctgtcacattttaagttgttccaactgctttgaataaaagactataaacctttgagggtgagtgctcgccgccgtgacggtcgggatggtttcatgagtgtgcgcgtggggtgagtgctcgccgccgtgacgttcggggtggtttcatgagtgtgtgcgtggggtgagtgctcgctgccgtgacgttcggggtggtttcatgagtgtgtgcgtggggtgagtgctcgctgccgtgacgtttggggtggtttcatgagtgtgtgcgtggggtgagtgctcgctgccgtgacgttcnggggtggtttcatgagtgtgcgcgtggggtgagtgctcgccgccgtgacgttcgggatggtttcatgagtgtgcgcgtggtgtgagtgctctc

SEQ ID NO: 333454 - DNA, 1051 bp, Homo Sapiens
tacatttaaatccttgctttatcgggattttgacagagtaattaaatccaatttggtttcccatatatttgtccagttgtccaacactatttatttgagtacatcatcatctctctactaatttcaactgctacctttatcatatttcaaactctcatttaatttgtgtccatttctagactctattctggactgctgatgggcctgttgataggccagagctcagttattttaattatgtaactttatgatgcacttatctgtgtagcaggactccccctcatctccattacttaagagccaataatgggaagctcattttcacaaatgcagtcaaccaggggaattcatggcatggcctaagatctaaacactcttaagatttaaacacaggattagctcttgagttagacaggaagctggggtgtttgggactgaggcttcatcgtggcaggctaataatgtcagggagcatgagcacttgtttcttccaaggctcacttcaaggaaggcagaatccaggtcgggggtgcacaggagttgccagctggacccaaggaccatttcgtatacatgtatgatcatactttcagggcatcttggaaaaactgaatttgctaactcaatagagaacaaaagagcaaataggcctaattcaagaatttttaaaaacctgcaataagaaacataatctaaaacttgtagcccagcccctcctccataccaaccaccaaaaaaacccactaacaccataaagtgtcatagctagagctagagtgctgttataagctgtgcaggccaaaatggtttcatggcatgagttaagcagcagcgactcagtttccatgtctgagttaggccacctgtaacaatgcagccccatccatgtgaagctggtccagaggactacagctgcctgtcccacccttggctgtgctctcctttactaatgcatagccaaagacaggggctaataacagggtctggagtctgaactcatatcctaattccactactttctacctgctacaccttgagtgagtcacttagt

SEQ ID NO: 333455 - DNA, 326 bp, Homo Sapiens
gttgttgtttccttactatggagttgtaagagttctttacacacactagatacaatttctttgttagacagatgtttttgcaaatgttttctcccagtctgtgcttgccttttcatctacttgaaaatatctttttttctcttatgggatacttgtacatgtcctagcaaacatattaccgaagagcaagatcaagtacagtttcaaaagagtaaaccctgagaaagtatttcatcttagacctgggaagtatttgctcttaagggaagacctgggaagagttaactacaaattaatcaaattttaagataccaaattagattctg

SEQ ID NO: 333456 - DNA, 299 bp, Homo Sapiens
ttttcccccttaaatgatggtcggtgaaactaatgtgaaatgttataaaggcagagatactggaattgaaggaaaaagaataattatctatgtgttagtttgggtcatccaaaaaacagatgccaagataggattaaaagtacaagagatttactgggggaaacacctgcaagggaaaatggggctgggagctggaggctgttggcagagttggcagacccctgtggaggaggaaaggcctggggaggggggccgttttccactggagtgtggtgctgagaaagtttcagcaaagccat

SEQ ID NO: 333457 - DNA, 479 bp, Homo Sapiens
tttctttttagtttcacttctcttgagccaacttttattatatacctttcgttcttgacaaaaaacaaaagtaatgatgcaatggaaagttctgcacagccactaacacaacccctcaagcagatggcgtgtgccagcccttgccccaatcatcctaattctctgatatcaactttctgagttttagccctcagttcaacaaagcatgaatagcctagtattgtgccaggtactggttatacaaagaaaaataaatttttagtctttagctctctgagagtttgtatgttagaaaactaaagccttcctgatttaatattgtttagaatattgcccatatcccatcaaatcactctgaggacaagaaaggtataaatgctaataataatatctttacaaatcagtggcgtattttagctaagtgttaatacagacattttttctaaatagttcttaaatctgatcccaggacatgcgct

SEQ ID NO: 333458 - DNA, 635 bp, Homo Sapiens
ttttttattcaaacacaaacaggaggaaaaaataaatacgccaatatgttaatgttaactttattcacacaaaagtcaatggcatttttagctgtgcacacactactcctgtttctacctcctttataatacttagcacattctagagtccccacactatgtgagttgtgtatacatctgcctttcccactagtagtcaagctttaagtcaagaataataaatccctttcttatttttacaactctcacattacccaattcctaaatatgggctcagtaaatcctattgaactcaaatgttacctgtctaccattgtgtacaggctcatccatatttgaccaaaccaaaccatcaccaccaacaacaaaaggttactcaccaagcagtggacaacacagacatttttgggattctgcagtagccagttatacatattccgacacacagcaaaaaggttgtgcagactgggagcctgcctaatgggccaactgcattctgagacccggctgtgaaacttggcagttcgataagacttaggtgacagattgtatactgtgtagtggtcaagatgtctggaatccaaaaagcttcgaatgtcatcaacctgattcctgaatcctatgtcaacattgtc

SEQ ID NO: 333459 - DNA, 462 bp, Homo Sapiens
aattactatcctcaagggtttgtgactaaactggaattactattgtaaagcagtggataagatggaatgagaagctcagtcctatagataagttatcatgcgatttactatcccaggcaagagatcagtggggctttgaataaggcctaggaggagaccgaaaaggggcggccactgagagatatggagactatagaacaggtcagactgtggtaaagggaaggcgatagggggattctaaggggctctgaggtttctggaatggctaacagcctgaatactggtgtcattaagcatgtaggaatacggtgggaagatcatatggttaaggacatgtcaactttgaggtacccagggggatatctgtgtgaagatgtctgtaaggctgctggaaatttaaaagtggaatctaggagtgagttggaatttaggaatatagatttggaaaccacagatacatga

SEQ ID NO: 333460 - DNA, 472 bp, Homo Sapiens
  misc_feature (103)..(112): n is a, c, g, or t
tcaaacaataacttgttattttatacttctctatactttgtagcaaatctttttttgctgaatttaatttataataaactttttaaattacatctctctctcnnnnnnnnnnaaaatcaaggctcttttatgtcaaaatctttttttagctatattttagattaacatttaacatcccccccttgtgatctataccgttggatattcaggtattactgtgtgtgtaacagctaaaacaaggacgggaggagggaaaataaatggcagtgaacttggacggatgcatcaacaacagcagataaagctaacccctcagtgaccatagcagcatgtcttctggaagcctttactcttaccccagagatttcctcagccccttccctctctccctcctatcctccaaacacaaagccaacagtctgtcctttcgcttttcttgaggagaaatgtgcagtggaaatgatcaaaacaa

SEQ ID NO: 333461 - DNA, 645 bp, Homo Sapiens
acgcaaaggcctttattttacaaaagaagggtcgtcggtttcagacttttccagaatgaaaaacctttgaaatacatacatttctagattatataaaaagatacacatgtggataccagagcacaaggatgtcttctagttccttctttctctatttgtttgtttctagctatcctgctatatcttacttgtgtcaagagatataaaacagagggcttttcagagcaacgagccctggccctacaagtaactgcaggatgcttcccaatccaaagtcccagggaccagcctcccccattcagccctggccccagaggcccactggcttctggcttcaggctccaggtaaggggagggcttcagggcagtggccactttgggcctctggcttacttagccagccactcatttgccagatgaactgctaacccttcctggcctcttactacctttgtgacattgaggaatgaggtcaccagtctgagccctggtttccttatctgtaatgtggggccaatgccagtacaccttccttccagggttgcagtggtatcaaaaaagacacactgcatgaggaagatgtttagagaagggtagtgactataattacaggagtccagaaagtcttgctacaacccacctgag

SEQ ID NO: 333462 - DNA, 465 bp, Homo Sapiens
cctattgaggtgccttcatgacaccttttacattcatgataggtctcaggaagacagcagtgtacttggtggaaactcatgtaaaaagtgggttgtagggagctaaacagtgagtacacatggtatatggatacggaatggaataatagacattggagacttcaaaaggtgggagatgaaagggggatgaggtatgaaatcctacctgttgagtacaatgtacactacttacgtgcacagtacactgtttgggttagaggcacactaaaagcccggacctcaccgctacccagtatgttcatgtaacacagctgcacttgtaccccctaaatgtatacaaataatctaaaaatagcccggacctcaccgctacacaatatattcatgtaacacagctgcatttgtaccccctaaatgtatacaaataatctaaaaataaagtggatatggtggctgtcgtgtcaa

SEQ ID NO: 333463 - DNA, 354 bp, Homo Sapiens
ttttaacgtctataaataaatttaggaatgttttcctgcttctctgtcatggaggagaaaaaaacaaacggatggcatcgctatccacatgccatcacgtaagcagccttccaccgccttctgtgaagaggtgccttaagatgcattaagtattgagtgagtactagctgccttagagaagtcccctcactaactcccacaaggctctgacgaggcacgtatctgccctttcacaggatgacatgcggttgcacagtcactgtggagccagcctcggaagcaggtctgaccacccagcgcctgtgtgctgcagccaagaggcagagagaacctctccacaacactagcattctt

SEQ ID NO: 333464 - DNA, 529 bp, Homo Sapiens
gggaacaagcgcaccaggaccccaatggggtcctcattggcatcctcagtccggtaggcagggttgattcctggggaaaagaagggccctgatcctggggaagagggggaagccgcactcctgagctaaaccatgatctgccagcagagggcaaccctggccttcttaagggccctgagcatgtgcatttaggtgacaagcctcccagagccctgcaaatgtgggatccaggctcagagaagcccatatcaccttcatgattcaacaccagtgctttctgcacccaacagcccgggtgcatagaggctttagggccacgtgaactccagtcattgaattgggcgggcgagggggcggtgcgtcagcgtcttctgggtctgcactgtctcctcctcagcctcaaggagctgtgggctgccaccctacccagaactccccaaatctacagcaaactgctattccatggcctctctactgtgccctatgtaacaatttaactgagtgcccctagtcagctttgggcccaaat

SEQ ID NO: 333465 - DNA, 557 bp, Homo Sapiens
  misc_feature (417)..(417): n is a, c, g, or t
ttcgctctagaatccaactggactttatttgacacagaatacaatgtggctgcgagaacagcaaatggcaaagacaaagcagaaaagacacagttctatctaatttataattaagtgacagaagggcaagtcattaaatgaatcacaaaacagttaagcttgatggaagaattctttttctggtgtccatactttgggaattcctattgtctgttgtccaacaggcacagctgttgtgttttgagccagtgagagagacagtgaagtgaaaagcacggttacaggctccccgtgcaacggtacacacttctgaagtggcagactcttggttagcttgacattcaatgcagatccatgctgtgattcctgcagatggcacagttattaaccacaacatcccaagcccagagggctagnctactgcatttcacttttttacttcaaagcactgctgttggtacttcttggggtatccgcatccattgccactgccattttggaccagctttttttgtttgtctgtttgaaagccagttataagcacaggacactttacc

SEQ ID NO: 333466 - DNA, 401 bp, Homo Sapiens
actcaaaccatcctctggcctcagcctcctgagcagctgaactacaggtatacaccaacatacctggcaaatttttttattgttttgtagagataagctctcactatgttgcccaggctggttttaaacttctcagacttaagcaatcctcccatctccacctcccaaaatgatgggattacaggcataagacaccgtgcccagcctatctttattttttctatcatgtattccattttaacatcaattcatattttaaaccaatgatctataattaccaccagtttatcccatgaaattataaaagcctctctccccactgtgatgacaacaggctacgaggtaaagtagagagcagacgctcaagctctgctattagtcttgtaactgaggctcatctg

SEQ ID NO: 333467 - DNA, 478 bp, Homo Sapiens
  misc_feature (20)..(20): n is a, c, g, or t
cagcctttttgccgaggtgnggatgctcatctgcattcttttagggccatgcagaaaaagcaataaagggaacttccttcccccaaactgccctgtctcccaccatgggcagcccaagaccgcatccttggactgacgttcagctcacaggggagcaggaagtgggaaaagtcaggccactgaagcctctacttcgatgcagcggctacttctactttccagactgttctcttgaatggggggaggccacaggtcggagctgtgcccacatcattagtcaagggcatatagattgttacaggtgatggtttcccatcaaggggatgcagcagagctgaggacccagttcataaatggaaaactggatttgttatccctgttttctctacagtgggtaatgcttctggcaagtgtgaagggaaagggaatgttcaagattatctgggaaagtcaaccgacaaggaaggcagccaggaaa

SEQ ID NO: 333468 - DNA, 1091 bp, Homo Sapiens
tgtgataagcaccagacttagattcagaagacccaagttcaaggtctggctctgctatgtaactgggttatctttatagtaagcaaatttcccagttgcagctttctcatttgcaaaaggagcacccctaccacatagtgctctataagaaccaaaataaaattaaatagtaaatttccatttgtgccaccagatctactcttaatccttttttccctactccctagaggttgaccattaagggctgcatcagtgggccttcttgccctttgtcttcaagtgaggttgaaccaatgaagagcacctgcaggggatcagaaagagggaagagagtgggtggtgatatgtatttccccatccccttcctacatgtcaccctaggatgagagagtcccttgactgaaggacacagctgctgcaagtgggtcctctctacagtcttcatatctccaggttctgctggagcaattacctccctcatctggctccttaggacctagaggtagtaaaggccccagagtaactggcccctgtggtctccctgtactctacccacaccttaataaacagtccctttattaaaggctccttaaattaccagagtcaggtttgccatctgttccctgccacgactctaaatgataaaactgcttttgaaattttaagttgctgtctaaatgcaaggtatttctcgtttatctctgtgtagcactttacacaaagcagattgctgctattaataataaatggtgaaatgaatatatgcaagaatgaatgagtgaatgatcctgcccccttccactttagttacagtcttatgctggggatatatccttgtcaccttgattagattttgtaatgccctgatttgatttgggaggtccccttttcccttggaactcaccgtctcttagagtatctgcagaaatgtcagcccttgtatatttctagtggtttaacttgaaagggccaactttgtttccaatttctagaattatcccccttctgtaggctgcacatttacttgataccaaaaataggttacttatttgtttattcatattttttcttccccaacataaaaactggca

SEQ ID NO: 333469 - DNA, 534 bp, Homo Sapiens
  misc_feature (432)..(432): n is a, c, g, or t
tttttcagaagcctgagggggtaaggtttatcctggaacttgttgcctcacaggaagtgcctctgccatttatctttctccacactgtcatagcaaaaggcaggagagatggtgaagagccagtcatttgctgctgcctcaaagttccaagccatctttctggccaagatgttccatcagtcctctaactcttcttcccatataaatgaaaggagattttcaccaatttatctcatctccagcctcttgacccagttaatatgacccaattttatccatgtaaaattgataatgccaactgccaattcattcaatgtttacttcaatagttctgttgtggtcttatgattacccccgttttacagacacagaaactgaggttttggaaaatttacttattcaagatggcatactcatgaatggaagacctgngatttgaaacacaactcactgaatcccaaaatctggactctttctgataagtcagactatcagaaagagtatggcatatactctggactcccagaaagtcat

SEQ ID NO: 333470 - DNA, 499 bp, Homo Sapiens
tatgtttcataaaatattggttttatttttttaattagtaaataaggtcatgacagattttactcagagtgaaggcctactatgctgacaattatccctaaccatctttctctgccaaattctttactttccttaacccaaaaacaagctcctcccttttccaaccagctgctataagatttggttgtggaaaggaggaaacagaaagcaaaaaggggagtggggtaaaggatgctggggaaagggggagcagacagaaccctttgtgccagctcagaactgggaaaggacattacattcaccaatggcagattctcagcctcacccccccgttcatcctcctgaactctaggttttgaggagacacagaattgggtcttctttaacatcacctcttctctaataggtctttttcatcagacatcagaaggagacttggacgatttggctcaggatttaaaggacttgtaccataccccatcttttctgaacttttatc

SEQ ID NO: 333471 - DNA, 312 bp, Homo Sapiens
ttatgagccaccatgcccggccaggttttttaatgttaatttcaacttgctcagagttgttaatatatgtgcggcaggttttattaactgcacagactccaccttgttcaactagtaaataatccaatgctagtttgtgattgaggactacattttccaaagagtctaaggactcttaaattccctttaatgcctgacctgtgttggtggcaaaggtttccagggtttgagtcaattttcttagggctgagtcactgaagacaaagctaccccagggtgctgtttgtgctatcatggtcccaattcctgcca

SEQ ID NO: 333472 - DNA, 920 bp, Homo Sapiens
caaacagtggagtaatgtgtcagggacagctaatgctatattttggtatgttcttatcaaatcaaaatgcctctggcaagctatttgcctttgataaaaagaatcctggtcttcctggcagaactcaatagtaattgaaccaggccacacccttaggacttaggcccctgtgggtgtcctgaatccagccccttggccacacagtagggtttgggtcaatgcccttagcattaacaaggctcagtagtctgaattcttttcagatattgactgctccccacgtctctgagaaggactcgcttttggggcctcagtttcaccatttggacagtgaacttccatgctttgccagccgattccttaaataatctcaccaaccatctgcagataattgctttgtgggtagcttatgaacagcagctgggagctgcccagtccccatcatttttgtctcaaaagcagggtttgggggccatactgtcagtagagaaatgtgtgctataatcattattacttatgacatttctacttaactacgaaggcatttccaggaaatatcttttaaatcagtaactttaagaagctgacgctcaaaggggatttagaatctggattatttttctgattcaaattatcttttcttttggcctttgaagaagcaaatagatatttatttctcttgttccctcctctgcaaatgcttaattgattttattcctgtcagctgactgcaatagaaatcgctgtttccacttcttcctgttaacaccttttctgcaggggtggagggctagggggaagctgggacaggtgaatgtcttcttgcgttcggctgtgttgtgcatggagaagatttggagaattttcattcttccaaaattatccacaacactttgaaatgaggtgacctcctgttcggc

SEQ ID NO: 333473 - DNA, 508 bp, Homo Sapiens
gcactaaagatacatgagaagtgcatgaagacaggatgcaggatttcctatgattctatgttgttcttaattaggaagcatattggcagcaaatgctaacatgtgttaggatgtttagctgaagccaaataaatgttttctattacaactctgaattccatgcctggtcggaacccgtgcttttctgctcatggcttacaaaatcccgttaaaagtcatctcaagggccaattttctgttggctcacagagcaaaatgactttcaccacatgttttcctgaagggttatctacaactccgggtggaagtcaaagattggaagaggatgacctctgatcctggaactgcattgcttggtggtcaggaggggttcttagtaagcaaactcagtttaatcccagagtcggaagtgggtgtcaacaagccaaagcaacatcctttcagctctgctgcttttttgtcttggtggaggaatagccaatggaagaagatggagagtccggaccaa

SEQ ID NO: 333474 - DNA, 474 bp, Homo Sapiens
  misc_feature (43)..(43): n is a, c, g, or t
  misc_feature (104)..(104): n is a, c, g, or t
  misc_feature (351)..(351): n is a, c, g, or t
gagaagacagcatcgtgaagcttctgtggcagcctcctaaggnaggggctgcaatctgtagttggcagatgctataggaattgcttacaaatgtcgtctttaanaaaaatgttcttatatttttcctatgggcaaaatgaaggcttgggtgctcatctaaagctcagccaactcctgaagcactctctcagagcatactgctgctgtaatgggctggcttaattatcggcagagtgcttgaaaaggctttgcagacctcccctgcccccaagactgggtgactttatatgtacttcattcaagggtaaatcaggagacgttctccatttatctcttcgtccttcctgcctnggaaagtgatagcactaaatattcccagcagatgggtagtgttctcaaaggaatcaccctttccctaccttcagactctattctttacccttccattgctccagtgctgatggaggccaaaga

SEQ ID NO: 333475 - DNA, 417 bp, Homo Sapiens
  misc_feature (12)..(12): n is a, c, g, or t
cttttttgtcanagtcggctgtatcaggatttgtcatcttatgcatactgattaggtataacatgattgcttggtgggaacttggatttcttgcccccctgtcccactgacaaagaaccagtaaggagcctactgtggtgggggagtgggagaggacatgcagaagtggtggcagagtgggaactgccagctcctggtattgtttttgacactcagatgctctcctgattcaaaggtggactgtgatccttttgtgtttgcgtgggagcagggactacctggaggcggggatgtttttgactcatctttaaatgtttcaaattcctaaggccttatattgctaagccttttagtcatggaagtgaagataaccagcctcccttcagactgggcaccacatgttggattgattgattg

SEQ ID NO: 333476 - DNA, 485 bp, Homo Sapiens
gctttgctatgatggccagtatgccatccctccaagtagctctgacattcattcatttattcatccattcattcattctacagatatttcttgatagtccactatatatgtggctctgtgctaagcactgggatacagagttgaagaagatagacattgtccccatcctcatgctattgggaacatagactttagataaaaaattgcactgaggtgtgatgaattttttattatggaaagttaaaaggagacaaggaacatacagcagagggtcctatcacagtctttggtcagagaaggtcccaactctgatctagggagtggagggaggattctgggcagaggaaagagcagaaagtcccatgagagagaaagtgcccagtgcatttgaaaaactgagagccagccaagatagaggggagcgggtacgaggcagtgaggagtgatgaggctgcaaaggtgggaatgggccggattacggaggc

SEQ ID NO: 333477 - DNA, 445 bp, Homo Sapiens
gtgaggcgtgtccttacatttaaaacagctgagttaggaattatctccacagcctcgtgatcgtgaagggatgtgaagcagcactcaggataacgaagagtgcttgtgctgctcaccagtcggtaccaccatggcatacatggcaattgggacaatggagtttacaatttcagacaaaaactggaaaattacttgaaaacgagaaatgcattatttgcagatattctgctaactccagcatgaaccacagtgcactcagatagggtcccataagtgccctggctctgcgtgtgtgctctatcttgccttgccttggcttctctcgtaaagagcaggggccactttactctcttcctggccccatctagagggacttctgtttagatttattttagcagcttctatttagatttattttggcttgggtctccctttatctttctag

SEQ ID NO: 333478 - DNA, 584 bp, Homo Sapiens
  misc_feature (363)..(363): n is a, c, g, or t
gtctgaaagtatgctttttattgcagccataaaccttaatacagatctttttgttattatcaatattatttaatattagtggcagccacatgagcgtactaccatatttctatattttttcaaaatgacattggagctgtcatcaaagtacagaacagagatggcatttaatttggttggagcacaacaaggctttggtacgtggtcaggaaacatcagatgaaccagagtctgaactatagcgtggttggtggcattcatatgggcgttaagtggaaaagaacattctccatcacaataaaatgcagcgtatccttctggtgctataatccagtcctgccatcccagatcccggaagctcancatagagttcgtgcttcttacaggcttgtttttgctcacttgtgttataatctccaacactggacattctggaggagtcctgatgagagctggatttattgcggttttgattttttcgtttgttggctgctctcacggatcgaagaagtacctcactcgctttgaagaaggcaccatgaatggttgttatgactgatgtccttgtcgtaccacaagaccag

SEQ ID NO: 333479 - DNA, 367 bp, Homo Sapiens
aaatgatgtatctttattatactgaggttaaatcaaaaggaaatgtttcatataaaacactggggaaaatcactttaaaagagttatcctaaggattaaatctaaccttggaggtagaacagttatgaggcttctagcatcaataagacagctccatggggttaccgcagagagacaggcaagccataggtattaggtgcagccccaataagatacttgagtcggggagcttggcgggcctggtttacatagtagagaaggggggccctggcgtgcatccaagccagccttgcagcagagcttccgtgtagcggtcaatgtcgcggtcagtcacatcccagagattacccagaaacaaggggcaacc

SEQ ID NO: 333480 - DNA, 916 bp, Homo Sapiens
  misc_feature (488)..(541): n is a, c, g, or t
gaacagtgataggtttattggtgggaccaaactattcagagaagtatgtgaagacaacttaaaagtcttattactatatataatggataaaatatgtgataagtgcacacgtatacccactcccctccccaacaaacacacacatcaagctaagctgaaaaggtaggtaggaaatgcctcacgtaccagaaatgaagaatctggaggacagagctgagagtgcactgattaatatgggtaacatgctgtgttacccatgtattaaaaccaacttgggttttaatacatatgcaggggcagaagggccttaagaaatgaaactgagactctcgcataaaggctaagaccctagaccttactcaaaagtgtggtccactgacctgcaatatcagcatcgggcagcttgttccacagaaatgtaaattcttatacctcaacccagacctaatcaatcagaatatctggaaatggtattcaagaatcttagnnnnnnnnnnnnnnnnnnnnnnnnnnnnnnnnnnnnnnnnnnnnnnnnnnnnnntcctagagacactgcacccccaggtgcagaaaggattgactggggaggggggatatccaaacactggcaaaggaagttcttctcttccgaggtacagagaaaggatgacagtcttgctggacaaagtgaaccccttgcttatgccaatctaaaggtcttctttttctgcctgctggccacctccaacttttaccaatttgtctgtcgaaaatcaccagacctttacttaatccatttgctggtgcttcagaaacctcagagtaacatgcttttttggaggggggttaaatatatgagttaagcccttatggtcccgccggccgccgcacagagggaaacgggacctacacagtgaatgagcttgtggcgccacga

SEQ ID NO: 333481 - DNA, 517 bp, Homo Sapiens
gctgcaggggttaaatatctgggagaatccagggctgtgttaccctttaagatagaaaacaggttttgcagcttataagtaggaatgcccaaggtggggtgaagccagttaaaattacctagtaatttctgataatcatttaaggtgtgtaagttgctagtatttaatttaaccttttgaggtcttactgaccaggaagtatgtacccaagatacttccaaggagaggacatttgtgctttttcaggtgcaatgattaaaccacttagctgtgcattctttatgacagaggtatataaacttaaaagcactggctcccctgggggtggtggtagaatatcatccataaaatgaataaccttgcaatgaggaaattcttttctactggggaacaaagcttgatttacatgatactgacacatggcagcactgtttagcattccttgaggaagcacgttccaatgaaatcggcaagctgacctttcaatattgatagctggtattgtaaatgcaatttt

SEQ ID NO: 333482 - DNA, 986 bp, Homo Sapiens
  misc_feature (731)..(743): n is a, c, g, or t
acctctgaggtaagcaaatcaattctcaataattatcgtaggttcttttttacagatgagggaattaaaaccggagagcgtcagtcgaagtgaaaacaagtcctggttatttagttttcaaagttcatcgttctccaggaaatcctgatgctcagcctctcctcttacaaggcttgtgatctaaaagaggagataaaatatgtactttgttggtgcagaccatggtaaatgctcccgggatggtgcggaatgcttttgcatacaaggcatttttgacaggagaaatcagaagtatcatggtgaaagtagttttagctagatgttgaagaaaggtataactctaacaggtggagatggagaagggaggagtcaaaagagctgatagggtttgactctgtgttcctgctcaaatctcgtgtcaaatcataaccccaatgttggaggtggggcctggtgggaggtggttggatggtgggggtggatccttcatgaatggtttagcaccgtccccttggtgctatccccgcaatagagttctcatgagctctggttgtttaaaagtgtgtagcacttcccctctctctttctcgtgctctggacatgtgaattgcctagctcccccttcaccttccgccatgattgtaagcttcctgaggcctccccagcagctgagcagatgctagcatcatgcttcctgtacagcctgcagtgcatgagccaattaaacctcnnnnnnnnnnnnnataaattacccagtatgaggtatttctttatagcagtatgagaactaatagagaatttttgatggagtcaaaaactgcaagagaagtttaggaaaacagctagaaatggaaactcatctgaacattgtgaccttctatggtgttagtggagataagactggatcagggagaaccttagatagtaggattaggaatccgaacttggaaaaggggaagcactgatagtcttcgagcagggtattg

SEQ ID NO: 333483 - DNA, 391 bp, Homo Sapiens
ttaaaacatgattaattgtgaaaaaaatcagaaattgggaagttgattgttctagaattttctagtgaaccaaggattaatccatttatgaagtgaaactcccagggcaagaaaccttgtacacccttcctggaatagtattctttcagggggcctcaactgggttggttgatctcttaattatgtatttttttcatcatcagtaacaggactgtgcaaacaactaatctttaaaatccagaaaccacagtgttagcacagtttgaaaggcagctgataaaaatataaagtaaaaaatgccccgattatgtggcttatgctgcataaatctctctcttaaggaggaggtgggatggaagaaaaatgtttctcctataagtcaaatgatttg

SEQ ID NO: 333484 - DNA, 197 bp, Homo Sapiens
cattccttccctgtggtttcagactagctgataaattacctaaaatgttaccacacattgcacaatgtgaccctcacccagtatcttcatgttcctggaatttgtgatagaaagaacaatgtacagccaattgatagactgttattttttaaattcttggtaaacaacttagggactgctccctccttttttttcct

SEQ ID NO: 333485 - DNA, 448 bp, Homo Sapiens
  misc_feature (19)..(19): n is a, c, g, or t
  misc_feature (50)..(50): n is a, c, g, or t
  misc_feature (60)..(60): n is a, c, g, or t
cgccctacgctccccttgntgagtcccctgccaagcgctcggagcccccncaggacactntgcaccccctcaccccggtcctcctcattagggtgcagggcctaggtctcttccaggtgggggaggggggagagtcaggaataaggggatccccagaagtgcagagctgagcaggcttgggcctgtcatggctggccggaagtgtccccagctccctacagacgctgtagccatcactgcctctccagggaccctcctctcctgcccaggacagacccaagccagaaccactgctaggatgggccgcacccaggggtctggcctccagggacctagagaatgggagggagaacggggccccaggagacccggccgccaccccacccgctacccttgggtgccacagggctgtgctgttgccaacagtaaacctgctcctcccgtccag

SEQ ID NO: 333486 - DNA, 364 bp, Homo Sapiens
  misc_feature (254)..(306): n is a, c, g, or t
catctttatatctttcacagttcctagtatatagtatgacttaatgagtgtttgtttaacttagtttgaagctgtcaccttagggtagactgcaagacaatgtactgattagatttggcacaatttgttagtatacacggcctacttgttgtcttcatttaacttgattttccccatcttctgtcttatgaaattccagtgtcttaagtgactaaaattttgaatttcttataaagaaatatctgtgaggcagnnnnnnnnnnnnnnnnnnnnnnnnnnnnnnnnnnnnnnnnnnnnnnnnnnnnngcttgcatgagcccaggtgtttgaggttacagtgagcttatgatcatgccactgcact

SEQ ID NO: 333487 - DNA, 490 bp, Homo Sapiens
ttaaataagatttggagctcaaggagaggctaaagaacatctttgttagaagtgaaaaaatctcattagaaaactgccctgtaggaactttataccatgactcaagttctacttatcttataaattttaagctgggttctagaaatcttggcccaggtcacaggagcagatccttccttctcttctcatgtgccatgaactctgtaaggcagagcagagatgggcttggttttcaggatctcaatgagctttaacaaatggcttatcatggacccaagtctctgattctacagccaatgcaagagatggaatcctggcctgtattcagtgactgcaggcccaccctgacagccaaacacatgattcagaagacgatttttctctttggggtgatgttttacgttgcttaagagtattaatataccatgacaaaactctctgcttcatttaaggtggatgaatgcaacttacaccttcacaatacaaatca

SEQ ID NO: 333488 - DNA, 786 bp, Homo Sapiens
aagtttaacatgtacttttattaacaacttaatacaagactgtacactgtaggtgctgaaatcaacccactcctgaaaactgaaaaaccagcatttctataccactttgggctttggttataagtgccatcttctacagcaaaatcacgtcttaagaacaggaaaaacgttccacgggaatggagagattatctatgcataaacagctggggatcatttctagctttacgtgattcactacacgctctggaatgttcagttcccttttctccagtcctaccacgagacatacagcaactaagaacttggccacaggtcctgcctagacacacatcaatatgaaacaaaagaaatttatataaataagtcaattaaacttcacaaaaactaaagaaacacaagacaaaaatccaacaagcaataaaaactgtacaatattggtcagtcttgtatatgctgaaaaatgtgtaacttaaaaaaagttatttatcgtataacaaaaagtcttttacatctgtgttagctggagtgaagacttgaagactcagactcagtgtgaacagatggatgtccacctcgctttcctttggagaggatcttgaggctggaccctctgctcacagaggtgagtgcgtgcttggcagaggttgtaaatattggccccaagatagcatataggatggtggtctgacaactagtggaggaaagctcgggcctcgatgattggaatcctgtggtgcacggggtgttcaatgccacctctgggtggattttttcaggaggatg

SEQ ID NO: 333489 - DNA, 520 bp, Homo Sapiens
ttgtgtgacttctgcctctcttgaatccactgatcccctcaattgcacgatcaggtctactctagtcttgagcaactcagaccaaagctggacgtgttgggagacaatatgtgtatgtggtttttacaagcctgctgggaggagtgagacagacctgggccaagacccaggtgtgtgctgtgctagccgtgtgaccttaggtaaattcattaatccctcagttcagctaccatgggctggatccaattaaaagaggacaaatcactgaaattcagccccatcagccacttgttgagctttcctgacgttacctcccatacctgtctggcttcttccttcccttttccctgtctccctgctcccactattcttgtactgccctctggctgccccatccaggcactgaggctggggtttctaccttattcccaccttgccctggtgctctcagagacttcacttttcaccaacccatcattccttgccctcccttccctaaactcaccttctcctttctgcc

SEQ ID NO: 333490 - DNA, 915 bp, Homo Sapiens
ttgaggcggagttttgctccagcctggcgacacgaggctcctgtctcaaaaatatgttcttccatgagacagcgggcatttggatgcctgatacaaaaagaggagggactatgtgctagtcagctttagactgagaagcagcagcaaccatggcaaaggggaagcaaactttcctgagtggccttaataatgttattcgtcaggcagtggctcttaaacaggggcttcaagcagtgatttttgacatgctcttctcctccccaaccactggacatttggcaatgtctggagacatttttggttgtcaccactgggagagggtgctactggtatctagtgaatagagccagggatgctgctaaacatcctacagtgcaaagggcagctctccacacaaagaatcatctggcccaaaaatctctattgctgaggttgaaaaatactggtgtaaggagacaagagttgtggttagtcagaaaggatgacctggcttgccgtggattgtcttataataatcagttatctctttccttgccttattcctggtcccaacagagtgaggattggcaagggggtttgggaatatagtgggaatgctgtgtagtgagagtgcaggcacggcactccagactaccagtcacgagcttagcctgtgtccttggggtaggagctgtagaataagacctattttgatatgtggaccagaataagttctttaaataatcaaaggtaataaacattcttaaaatatactatcactaaggtagtctgtcatccagcagaatgagggagtagtcagaagattacacatatttggcagcaattactagaaaaaacaaacaagttgagagttttcaaaatagatgttacttcatatttcagatagttttccagggtattgaagctcatctctct

SEQ ID NO: 333491 - DNA, 587 bp, Homo Sapiens
  misc_feature (108)..(121): n is a, c, g, or t
  misc_feature (460)..(460): n is a, c, g, or t
  misc_feature (486)..(486): n is a, c, g, or t
  misc_feature (501)..(501): n is a, c, g, or t
  misc_feature (517)..(517): n is a, c, g, or t
  misc_feature (561)..(561): n is a, c, g, or t
cgcaaaataatggaagatccttttgaaacttagtatcttcagttatcaatattactgcattatggagctagtgcaatcctgcatagccttggtcaaaatgacaaggcnnnnnnnnnnnnnnttaaagtattatatgaacaagagaagtcattgaagataatttaaggccttgaagtgaattaatcagtctaatttaaagctgaagaataaaccataaattatccacctgaaatgcaagcaatatgctttttcagcttctgttctgtggacaaaataacagaaacaactcttgcttatggtttgtgtattagaatccttctggacctggaggagtgaaagtcaattccatttttcaactgttcatggaagatttcaggactggttttagccgtttgcgtggaatgcccaactggtggacactggtgcagatgctagtgctcgaaaaggccttctggctacnaaatggaggggtggagcctggaatcntgggacttccacccnggatggtttcccaatnaggtccggttgcctggggtgccggttccagtttttcccccaccnttacaccccagttggtccgaagtacc

SEQ ID NO: 333492 - DNA, 328 bp, Homo Sapiens
tttttaagtggaagcaaaaggaaggagaaaacaagagacataaacaaagttaaacaaatattccattctaatgtataaaagtcctgtctatacttgaagtcacagggaaggtgctaatgaagttaaagaaactctgtcacaagcactgtgctttatgtatttattttatgtaatcttcacaaccctgaattcctattttctgacagtgaaacactctgaaaaggttaaatactggcaagtaagtgataaaggggaaatttgaaatcagaactaactaacccaagtcaatattcttccctttcctactaaagagagctacttaaagggc

SEQ ID NO: 333493 - DNA, 858 bp, Homo Sapiens
  misc_feature (601)..(614): n is a, c, g, or t
agaacaacaatccttcaagtctcgtctctttcttctaactctgtagatttgcgtatccatgccatcattccctcaaaaacaatccagaacgctgctaaggagaaagtgaaactttgaattaaagaagaaaatgccatctgagagaaagatgccctaacagccagtcacaaacccaattaggacggtgaatgatgcaaacacgactccatctgctctcctgtcccccagggagccggggagggggttagggctgtggcctcttgagaggcttatatggcaaacagtctcatcacatcacatcgataactcctgaggcgctttgaaatacaactttaaaggcttctgcctgctgaaactgtccatacgcaaaatagcaccaaagctagttgaagttttttcaagttttgtctgggaactactataaagcagacaataaaaaataattcattttcaagacagatggcaccataatgttgcactattttctagtgtgcattttttcctaaacactagaggcagcgtctccatacaaaagaaagtccatccagctgcagccagttagctttcagattgctgtttctgtagaacatcacacacattnnnnnnnnnnnnnngtcccttttttcccccaccatagtcagctcaaccctttcttctaaaactctacaggagctattatttcatgcattattattgtcagtgtttctgatctctttcccgcttgcatctgattgttcacacctgagaacacctagaagtggtttgtacttgtaaggttaaagtttagttagatcttcctacatgctgtctgcaattcagaagggtgcctggtgcacacaggtaatgatacagtaagtt

SEQ ID NO: 333494 - DNA, 421 bp, Homo Sapiens
atgtttactataaattttactaatctaaaagatgtggaatacacaatttacaaataataataaaatacacaatacactttcctacaaattccatatagtcaattcattctcagagaatgcttttgttgatgtttaccaagctctcgcatctgcagccaacctatggttgcaattgatcaacaagtatagttcacacatatcgacattttgtttacattcatgagcaatgcaaatatgaaacaacttctttgtatgccaatacttcacttggataagttgaataatagttttcaaataatggaagactattcaagtgttcaagtgtttgtgaaaatcacagtgtaatggctacagaaacaacttatgtactgtgttattaacgtttttcccatcactttcttaagtctaaataatcaacgac

SEQ ID NO: 333495 - DNA, 121 bp, Homo Sapiens
ttttacaaaggtgttccagggatgaaatatttttaaagtactatacctttcctaattttacctttaaagttgtcctggaaatatctgggttgacaaaggcgatgaaactgaactgagactt

SEQ ID NO: 333496 - DNA, 352 bp, Homo Sapiens
tgtttttctgatcataaaatatttattaaggtatactttagggaatatagtgaatataaaatttaggatcacaatatgaagcaatttcaaatcctctcaaaggtcagcacagccctcaaaactctgcagatgtaaaaccactggtgagacactaaaagcagttcgactagtagagaagtggattttcatgaacatttacaactagagcatatgaatacctcttttaagtgcaaaaccacaccacattacactaatgcagcaacaatgcattcattattgttctcattagtcattagtagtcaacttgcataaaacaccagaaaaaagcacaatggagttcacaaagtgggct

SEQ ID NO: 333497 - DNA, 693 bp, Homo Sapiens
  misc_feature (67)..(76): n is a, c, g, or t
tggtctgtgatgtttttagtggaatcaaccagggttcccagcccccactattaaaaagaaaaaagannnnnnnnnnccttgaacttgaccaacatgcacaattatagtcacacatcagagttacacaggattacaaaatgtcttttggatataaatctcaaataaattcaaacttgaagaaaaagaaattggtaaataatcctccctactggcagttccccagggttttcttcacagactataaatatcacataaatattccctgacctgtaagctataacttttggatggatgtcaatggttttttaccagggaataccaatgaactgtaattgtcgttcagaagtgatcagttaaacaattagaaaggcaacagctttcaactaagatccaggaatagcctctatatagactgactcaagcagtctgagaaacgtaagaaaatcactttgtgccaccaaataaatcaagaatgacatttttaaaagaaaatgctagatactccttttttccttctttcaaacccacctgcttcctctttttcccccttagtttcagtccatcaaggattttatatagctgcaatttcaacacatttcttccttctaggattaaactggaacaaaaagagcctgtgtatgatacagaactttaacagtctttaaatagctttggcaagccttcattctagac

SEQ ID NO: 333498 - DNA, 333 bp, Homo Sapiens
aaggtctcactatgttgcccaggctagtcttgaactcctggtcttaagctatcctcatgcctcagcctcccagtgctaggattacaggcatgagccactgtgtctggctaagttatcttttcttattgattaattttgccaggcgagtgataacctctaccctgattctatcaccacaaattagtttaaaatgttcctttatgctttatgtcctttaaatagttgcctaccccaaaacatgaagacactctcctgtttcattatttcctttcgcatttaaaccatattccacatggaattgatttttctatagatatggtatcaaggaagggg

SEQ ID NO: 333499 - DNA, 477 bp, Homo Sapiens
taagggacttctagatagacgcactcttataatataaggtaatgttataacagacaagggctagaatcagggtacgtgggtgaataggtagttatgtccctcggctgctccactgacatttcattttttagctcttctcttaaaataatatttgctgaagggagcactgggaaggccccatacttcctatatgactggagcacggaattctgcctcccaggggctctggggtgaggggtatcctccctgcaccgctccgggggttagggtgcccctgagttgtgccttactgagtctgcacatcctgcacagagctcctgcctggagccattctaaaactcagccgctcctattccccaaggatctgtgtctttaggcctccagccatgcctgaaatttcaccattataagcctgcttttgggtgaaggcttcacaggcacccaggaatcactttcacagtgaacacaggaaaaaaa

SEQ ID NO: 333500 - DNA, 441 bp, Homo Sapiens
gaaagaaacagtgcagttttgttgctcacagggacccgtccccacacactggagagacttgaaggtgggggctctgcccatccactggggaatatctgggccagcctaaaagtctgtggggcctaggcctgggcaggctctgggggctgtggagccgaggagccaggcagagcggggtccttgggggccaagcccatgcgtcggatgctgtcctggtacttgcggcggccgagctccaagactgcgcgcacctcttcagccacgtcctgccggtcactctgctccagggcctgcaccaggagccccacagcccctggctgcccagcctggcgctcagcccatgagaagagcatgtgacggatctgctcatccagatcatcccggaactcgtgccggatgcgctgcacctcccggtaggacacccccaggtgcagggccacg

SEQ ID NO: 333501 - DNA, 469 bp, Homo Sapiens
gactcaacctgtgaaattattcttgacaaggagagggtgagtcagaatcatgtgttatcagctttcatttatatgcatcctttggtacaggtgagaggtagatgatttgtttttctgacattttattatgaaaaattataagcatttagaaaattataagaattttacattgaacacccatagttttcttccattaacattttctgtgcttacagtaccacatatgtgctcattcgtttatccatcagtgcagacgtgtgtatacttcccctaaatactggtttgtttttgaaagtttgttcctggcttataccctcctgtattctcagttgacagatctttacataaagagtctgcttttttctcatttttgtgcatcttagcactttagtggtattgtaatggaatattacatctagtatgtacagtgagagaggagctcttgaatttttggtattttctgaagttt

SEQ ID NO: 333502 - DNA, 538 bp, Homo Sapiens
atgagccacagcacttggccactaataaaatgttctgagggagtgaatgaatgtttctcttattaactaagcatggtctaaaatgaaactgtctgttacatgggtacacactaggcagctttgagcaccccatggcactttttataccaatcaatgaatggaatttacttgcttcatttcaggatgcttggtgttggcaggctacctctgcaatgggcacaatgcccctaacagatggactaaagctcaggacatgccagaagatcagcacgtgcattaagatggaatcctgggcagacttctctccaagtcaaaacaacagtctgtgcagagccactcatttattactaagagagccaaattatttacgaatttgccttaagcagtccccagaaactctagattgacatcctcgagcagaaagcagatttatacatgaaatcacctgccaaacacaagtggtgagcagaaggttctgtggcaaagctgtgaggcagtctgtggaacagtttcccgaactgggggaaccagttcttga

SEQ ID NO: 333503 - DNA, 275 bp, Homo Sapiens
attggatagtgagattggtaatatcaaccacagattatattaacagccatttcaagttattcttttaatatttgtattttttcttttaaaaacgattttagtgtttgcattttgttttataaccaaatgtttaacaactatttggatgtatctttatgttgaatttactcctgtgttactagataatcttttattatcatggcttaccaatttatgacccattaatcacagttatatcttaatatgttgaaataaatcttctagtaatttttttc

SEQ ID NO: 333504 - DNA, 164 bp, Homo Sapiens
ttactaccagcgtggacaaccagcatttttattgcatttgagaatgcttataatgtcagtaattagtactgactacacaacatttttttattgtctgtatccgcagacatggaatgatggaattacagttgatgtcaaggaatgagtttcttttatgccttatc

SEQ ID NO: 333505 - DNA, 472 bp, Homo Sapiens
  misc_feature (434)..(434): n is a, c, g, or t
acgtacaattttatagaagcttggttgaataatatttgcatatgatttacatttgatttcctcatactcatttttgcatatagtttgcaggcatttcaatgtatagtaatttcatatatttggagtaagactgatagatggaagggagtcgttcaactaaattgttgaaaggggaaggccctgagagagctcaactgttcttggtccttggtggcctcactgggcagtaacaagggcaagtctattgaagggcaagttcaccttgatcagataagctgagtctcgcactctggaagagacttgaagttctgttggtcaggtactttccctgaacacagtccctgccccccaaaaaagtgtccctctccccaaacaaaaagcatggagaaatggtcaaaacaaccgtggctccatatatacttctttctcaattntgaaatctataaatatttatagatgttctttatttgac

SEQ ID NO: 333506 - DNA, 467 bp, Homo Sapiens
aataatagcacaatggttttattgacggcagaagaaaaattcttcctttcacttgtaaaaggtatttgcttaatttaactcagtatttttttccattctttgtgtgagttgactgttttttccaccctaaaatctgttttttctttcttcaaataataatatccaccacagctacttattctgaagagaaagtggaaggtctgtcaacaggtttccaccagggtgtttcagtcactggctcgtttcttcacaaagagtctacttttcctattagttccgagcccggggtggttggtaaaactgttgggttggccgagtggatcgtcttggctggccatcacctcccctacggaactccagagtttgatcgtaggtgccttcttcctcccatgcctctgtttgaatgggcttgatattgctcagtagcacctcttcatagtttccgtagtcaatgaatttaacaactg

SEQ ID NO: 333507 - DNA, 561 bp, Homo Sapiens
  misc_feature (69)..(69): n is a, c, g, or t
  misc_feature (97)..(97): n is a, c, g, or t
  misc_feature (123)..(123): n is a, c, g, or t
  misc_feature (151)..(186): n is a, c, g, or t
aataagcaaagcgtggtgatgtgtacctgaggtcccagctacttgtaaggctgaggtgggaggaaggcntgagcctaggaggttgaactcagtgagnctgtgattgcccaccacatttccagncctgggcaacagagtgggaccctcctcnnnnnnnnnnnnnnnnnnnnnnnnnnnnnnnnnnnntactataactattaaagaaattcacttacttgtaagaacggctgaaataaaaaatagcccccaaatgctgcttaaggatgaagaaaagacaaatcactcatacattgctggtggaaagtaaaatgggacagccactctgacagtttggcaatttctttaaaagctaaacatgtgactaccatacaacccagcaattgcacccctgggcatttatctcagacaaatgaagacttacattcacacaaaaatctgtacatgaatatttatagcagctttatttgtaataccaaaaactggaagcaatccagatatacttcaatgagtgaatagtttaaaaattgagtacatctatattgtggaatattactcaacaat

SEQ ID NO: 333508 - DNA, 612 bp, Homo Sapiens
ttttcatgtgataatggaaagctttattttatgggacatcctatgatccacgcagattacaggcgtaagccaccgacgccccaggaattgtcgcattcattattccataatcacaggaaaggatggaacaacaaactaccgctattatgtttttcttgtgagatatctgacatatcagtcacctcacacaaacccacttagaagggattcatttcctcactccttcctcctgtgaatttccagatgtcagaatggagaggatccagaattagggcagctactgaaagggagacactttattaagcagtgggaagaggctagaggaggatgcttgcccttttcccccatgtaatgaaggatatttgaggatggacaattcatagaactgagttctaccataagcacagccctgagccaggtactgccctgccagtaggaaagaaaggaggagaaacaacttttctggacaaacacacaagccaggacacaacacacgaaacaagcaagcccattcattcaaactactgagggactggagacagataagccatgtgaacagttgatcaaacctacaccaataaaaactctggacagcctgggtgcggtggctca

SEQ ID NO: 333509 - DNA, 787 bp, Homo Sapiens
  misc_feature (90)..(90): n is a, c, g, or t
gtatcttcacttttgtggatcaccgctgtgtggctactgttggctaccagccacaggtgaggagctggagctccattaggcctccatttncctttggctatgttgacattatgtaatcatgtagttcctaagacagccaaaacatatcaacctcagttaagaaaaagagatcatcatattctgttagtacctaacattattttcagcttcctattaggactgtcatctcatgtagagaaatatggcttgtcaaaccaggtgggagcagcaggtacaaatatgtatttattttttgttgttgatattaatacagatgattcaaaggtactcatattaattagttataccagtatagctacatttagataattcatgtaattacctaaatgaataatggcccataaaacatgcagatttagcaccagttattataatttactcatgcaacagaccagttagccatctctgaattgacgcatcatataaacttttaaaactgttgtgggtcggaaggacttctggctgtggctatgtgaaagaggttggtgaaaaagaggtcttgaaaacaaagaacaaagagaatttacactacctgattcaacactaactataaagctattaccaagacactgtggtgttggtgtaaggatagatatatagatcaatagaccagaataaggtctattcttatacttgtcaactaattttcagcaaaggtgacaagacaattcaatggataaaataaatatttctaacaaatggaaaaattggctctctgtatgcaaaa

SEQ ID NO: 333510 - DNA, 590 bp, Homo Sapiens
cagcgaccctcttggccaatctttagaaacacttcctgaagtatttaagttgttaagaggtggaagctccaccctcacttcttcctccccaactcccttccccccagacacaaactcttcatcccccagggtaataattttcttttctccaataccttgctcccatacaaaagctaaatactctccagaatattggactgcctcgggactaggaggactaacgacaaggggaaaatttgtcttgcttggtgccccgagcgacttttccaaggtaggctaggaggagagtgcttagggcttccactaaacatagctactaccagcttcacaggctccgcaatgaaaacactcggccatttaggcaagggagatgattctggcattttcgggagcttacacttaggctcccagggcgtgcagagggggttaaagagcaacaggaagtacagtggagttttctcagagctagggattgttctgagaatgggtagggaaaggttttcaggtaccagcccggcgtccagaaaggcagagactcacatgcccctttcctgagagcgctaggaagggagataaaagacaaagccaat

SEQ ID NO: 333511 - DNA, 451 bp, Homo Sapiens
gattgccaaagttaagtattttttagtccttcttcaggcttctccctttcccctttgctctggagggagggtttcagggcttcttttatcatagccctcagactacccacatttacttttagtagagagaattccctcgcatcaaagcacacatgtccaatggggattcattcaaggcctgttccaaaagattctctgcaggtcacagaagaggttcttcctcaatatcttgtcatatttccaaggttctcagcaccaggcacatgttcccacgtgttggctgcaccaagaccacatcttacagccaagttaagctccctcagctgatggggattcctattccctccctctaaccatccactcctggagatggcaaagatcactcacgtggcttcccatgacttagacgaaaggcaactagaatcaaagtttgaatatacgcttttgaagg

SEQ ID NO: 333512 - DNA, 412 bp, Homo Sapiens
aatttcgagtttattcaaagtttcttactgcagagtgagactggtgagctttcaggactggttcagcatccaccgcttttttagcaaccattaactgtaacatctgtttccgatatttgctcatgataagttccaaagcatcctggtgttcctccaaggaaatccatagctctcgctctccacccttcagtgcccagaatccgagagcactggactcctaccctctgcctgacctggtccggaagcgctgtccccgcctcccgcatagctgctacccgccggtgcagcgccgccgactgatccaccagcgactcggcggccgcatcgtgctcccgtagcctctccagcagcgtcttggcgtctgtcaggatcttctcgatggtgcagctcatagcagcagcaccaccccagc

SEQ ID NO: 333513 - DNA, 471 bp, Homo Sapiens
cagtagttcccgccaagtcctcccaccaccgcggcctcggaggcctgggccgtggccagataggagtttgcatcatccacgtggctccgttgcctctgcattgcgccctgtcctgtcatgtgtcctcaccggggtatcggccgtcactcagctctcctgtgcccctgcgtctcaccctaggcgggctgggcggggcaggcctcctttgttctccacaatctactgtctccgagtgtacacgttgcgctgtttgtgtttgatccccctgacttgtagccagcttgtgtaagatcccttgcagaacgagaaagttaaaaacaagcccacccagtactcacaccatcaagtctgttatagagtgtacgactgtattaacacggaggcctgcctggctacttttttaacatattgttaagtaatattaaaatcatgtctttctttttgaaagatggaatacattagtacagcagg

SEQ ID NO: 333514 - DNA, 183 bp, Homo Sapiens
ggggaggtagggatgggggataaaatctcccttggttgaaaaccattcatttaaaatactggagtatgcagggcacagtttcgtgttcctgtagtcccagctactctggaagctgaggctgaggtaggaggcttgagttcaggaggtcaagggtgcagtgtgagatgattatgcctgtgcata

SEQ ID NO: 333515 - DNA, 177 bp, Homo Sapiens
taaagagatggggtctcactatgttgcctaggctgcagtgaagtggctgttcacaggtgcaataatcacactctaaagcctcaaactcctggactcaaataatactcctgccttatcagaatgtaagctcatcataactcaagaagcatctgtacttaagattaaaaaggtagaaat

SEQ ID NO: 333516 - DNA, 431 bp, Homo Sapiens
gcgccggtgtgcgagccgcggcagagtgaggcaggcaacccgaggtgcggagcgacctgcggaggctgagccccgctttctcccagggtttcttatcagccagccgccgctgtccccgggggagtaggaggctcctgacaggccgcggctgtctgtgtgtccttctgagtgtcagaggaacggccagaccccgcgggccggagcagaacgcggccagggcagaaagcggcggcaggagaagcaggcagggggccggaggacgcagaccgagacccgaggcggaggcggaccgcgagccggccatgtcggtggtggggttggacgtgggctcgcagagctgctacatcgcggtagcccgggccgggggcatcgagaccatcgccaatgagttcagcgaccggtgcaccccgtcagtcatatcatttggatca

SEQ ID NO: 333517 - DNA, 582 bp, Homo Sapiens
ctggttgacagttacattttattgtgactgattagataaaaggtggagaaaaagagaacatttgtgaaccaacaaggaactcaaaacagaaagcaaaaatactacggtaaaacaatgtcacccaatgctgtctcggagactaatcttggccctagagcactgcacatctccattatgacatttctacagtggagcctagggcctctaactacttccctcccttagaagagaaagtgcctgtcagaatatacaaatatacaaatatccctccattttggggggagaatggtaaaccaaacaaagaactgtcttttatttttagttaattcactgtatctttttaaattcttttttctgtctcaagcatcatttttactagaacttcatgtttttttagatagtgttcttattcttttctggacagaacattttaaaagtctgtgtctcctttttgcattctttcaccgtgatcacaagtcagatataaaatccagctggatctggctaacaactgttgagaaacggacttaaatgaagacatttcaatggtaaattcggtgatgtctttctggttacagctca

SEQ ID NO: 333518 - DNA, 532 bp, Homo Sapiens
  misc_feature (487)..(487): n is a, c, g, or t
ttttctcccaggaatttcctatacaatcctgtaataactttcattcttagttctaagcctagatataacagacccctctgtcatcgcaatggtgttttccccaagatgagacattctttttaaggtatgtgactctaagaatgggaaagtgaggggaacaggtacagtcatgtgccacataatgacgttttggtcaataagagaccacatatacaacagtagtcccataacattaataacacaaagctgaaaaatttctatcacctagtaatgtcacagtggaagcattactcacgtttgtagtgatgctggtgtaaacaaacctgcacagccagttgtataaaagtattgcacatacaatacatgaaatacataatacttgaaaatgataacaaatgaatatgttagtggtttattgtccacgaagacctttcagtgggacggcatggggaggggaaagccagtgataatgacgatcctaaccctncacaggcctagactaacatgtgtttttgtgtcttaatgtttaaca

SEQ ID NO: 333519 - DNA, 781 bp, Homo Sapiens
ctgtataagaaagtgtttatttatggtggggcagagggtcacacatacaggccctggatagtgtgcagggactgcttccagctgtccttccagcgctgagcctcctttatctgagatgtacagtcatcctggatcctctttagctcctcctcaaatgatgctaaatatttcaggtacacagcatctcgggcttccacggccgccaggtggcccagggtggttttggtggtggaaatcgatgatgttggctggagaagaatcttgttttggatggtgacttcggtgggtttgatccctggccacttcctgcttccacgttcaatcaggggtttctcactctcttccttcagggagagcccagcgagtttccttcgtatgagcattgataatttctgtttggggggctccatccttgcaacctggacatcgtcaatggtgaccacctcatccaactgcagtaggaacttctcggtgaaaggtggccaagttggttatgaaaacctggccattccttctggtacattccctggaaaaaacatggtgagcacagtgctgctaggagaggatcatccctccaaggccagctgaagaggggatgggtgaactctgcagggagatctggggacccaagccattatatccactgtgtccaagtaaccagcatctggccctcagccaggaggcctctcccaagatgtgatctggtttaaacataataaatgattcagaaacggccaagggacacacacagacaattcacagaagaggaaataaaactaga

SEQ ID NO: 333520 - DNA, 507 bp, Homo Sapiens
gcaagtattttattctgcagttgaatctgtattatcttggtagtcctagatttcacccatttcctttttcacgttgtctttgtcttgcatctccagcctagcctcccaatttggctttctcttcctgttttataaagacatgtcttctggcattgaagcgatcatacaattttctacaaatttcaagccgtatcttaggaagcagagataatatttgattgtctactgtgtgccagaaaattcatattacatttttaaacttaataactatggtatatcatatttttctgattttacaggtaaggctcagagtcacatagtgcagttgggattttgtgtggctcttccagttagagcaaaggttcctaacattcccactgcctccacgttgctcatattctcattatattcatcattctctataatgactatacgcactggaatacatatattctctgtgatgaatgtgtgcactggaatcttctgggctagggccgaatgtagttt

SEQ ID NO: 333521 - DNA, 478 bp, Homo Sapiens
  misc_feature (416)..(416): n is a, c, g, or t
gtggttattattttacccattttataaaggaagaaagtaaggcacagagagatgaagtaacttgccccaaggtggcacagcttctaagtgtcagagtcaacatttgaacctagtcagtcatatttcaggggcagtggacctgatggctacactggcgacagatgcttcatctcatagagacagctgcagtggagggggacgcagtgcaccctgctgaaggatggacctctgggcaggggtccctgttgctcaggtccaaatgcagaccgaacagtagccttaatcattaaaatcactacagagctaaggggtgagagcacactctgcctgttctctctccacccctaagacactcaccctattccacacccagaggaggacatggggtgctcccttccagagcctggagaccctgngatggctccagccccttctcccaacatccccccaacgaagagcaccaagtacccttgctctg

SEQ ID NO: 333522 - DNA, 464 bp, Homo Sapiens
aataactggggatttggatggacaaagaaaagaatggcatagggacggcatttcagcctgggggagcagcagacccagtagctcagagatagaaaagccactggcatttgcaggagtgcagaaggccaggcctgctcagagcagaaggttcactgggaaggttagtgtgtgacatggtcagagaagtcacagaggatctaggaataatcccagcagccaggcctcctgtaccaggggttaataagtatttgaggcacatttccccattggctttcatcccattgcatccttagttcagctcagcagtcaccggttgtggtacctcggatgtgtcggtgctggggacccagtggaggttgttggtccagtggggatctctgctgtaataccatgcctggtgggcattctgcagacatttaactctggttgaaggaaacgatcggttatcactgatttggtgttgc

SEQ ID NO: 333523 - DNA, 379 bp, Homo Sapiens
ctgtgaaacaccagttctgtccattaacactgacaggtgacagggaactgaaactcctggaccattcttataagattttggtcaaaacttggcacttaaccctctttttcctgggacaagcagagcacaccccacagcctcttccccagagcctctaaagcaatggttggtttctgtgcgatgctcattgccctggcagctgaagacagggccgctggtgacaccatggcaggccggcctgcacactcagttctgtccagcagataaaacagttgtataacacgcaggcaggtgagtgcaggagcactgctaattctactttatgcaaagcaataattaacatgtgagtcagcagcagagaaagactttaagcccgggg

SEQ ID NO: 333524 - DNA, 838 bp, Homo Sapiens
ccagtgaagaaatgtttaatctagttagtgggtgggctttggttgtcatggaaactcagctctgtcatcctgtgttgttactaggcaggagcagccaggtcattccataaatcatttctgtcatagctgacggtgatgcattccatctgctccatcactgcatgccatagtctgcacatttcaaatcccttccttcaatccatctgcttccccacttcccagccggacacctccccaaatacattctttttccaactttccttacagactcgcattcactttaatatatgtttagtgcactcaaaacgtactgaaaaagaaaaacattacattatctggggataggaaggattagaagagatgaggagaaggaaattaatgaggattacttttgagagtctgacatgcatatcataattttatgtcaggtattatagatattttgaaatggtgactgactcttttgaaattttaagttctttagaatgtgacgcttttaatatagcctctggttttagatggagaaacactatgctattgtcattaaaaattaattctatttccccaattgtctaatatatgtcttaaaagatctttcatattgtgaaacatcagagggtacaacctttgttcttcagtttaggtattaaagagcacacagaatactgtgtgattaaacatgtaaggccagataatgcatttgcaaaggttcctttattttaggtttaagcctgcataattgtggtcttaatctcaggatagcaagaaagagaattgtacatgaaagtatttacacaaagttcccaaagccctgtggattatgccttagtttagataa

SEQ ID NO: 333525 - DNA, 650 bp, Homo Sapiens
tttctaatcactgctttcaactatgcataggggaactccagagtctcatcattgaaacattttggacacattctataatattctgattactttcagtttttgaagtatagtccagtttaaaacttcaatctcatttctgattcaacctcttttccttccgccacacagtagaagccagaacggactaatgttggggagcagtctctggcggagggagagggaattgatccagcttcttacgcgatggcccttgggtcaggggtagggaggcaacacgggcctcactccagttcagcatgttcaggtcagatgccagcgcatcaaggcttcatgtggcctccagacaggtcaagtgtggtgggtgaccttgggcaacgctcagctttacccagcacccctctgtcactgtgaggaaaagaaaggcttccctcaggtctaccagtagtgtacctcccagcttcatctctgggttgtgctctttactacccagcagctccttggggtggatcatgctcctctgcttctccccaactcatggaaccacaaaacctcagtggtccttgccatgtcctttaaggtcataggagaacagactgtggacagtctggttcttatcctcttctcaggcatactatgtctttaagccttag

SEQ ID NO: 333526 - DNA, 842 bp, Homo Sapiens
  misc_feature (661)..(661): n is a, c, g, or t
  misc_feature (819)..(819): n is a, c, g, or t
tgtttgcttgtttttgggggtggtgaagaaaactaatctgggcaaatagctcatgatgaaatttgaccagaaaatttctgaaagtgtccagtagtgtttttgtctctctgatcccactgagccactccttcacaatcttgggggctgcatgcccacctccaaggtatgagagcatcacctggcacttctgagaagcctcacacaggactcctagaggcctacctccagttgcttcctaagctgccactgtccacaggaccctctccccagaagctaaacaacttgccaaactaagaactaaaatctgtattttcaaaatatccgtgaagtaaagagagagaaaacaatcataaacttctttagtggttaatttttgaaaaagaaagattctttacttttcaacagctctgagggacaatgctctccccagatctccatcactgaaaatctattcaatctccagcacagataacttcaagtgccctaacatccacatccccaactgactgacggtttcttccttttcttagcactcaagcctctcacaggcctcccttgattccaccttgaatacatctgctgtcttgtgctcattaaccattgttagactctggctgccactcatctcattgtaatcacctttccgtcccctgaagtaccnacggtatgataccttatgatggaaggcaacccaaaactactttattcactggaacatatatttttgcatagaactttccaaaaacacaaactgaacaaactcttttctttcttaagttcaggggggtaaaataaaaaatacttttatgcattttaccnttgaagtgctaaaatcttacctc

SEQ ID NO: 333527 - DNA, 745 bp, Homo Sapiens
  misc_feature (446)..(446): n is a, c, g, or t
tatcttctgtttgaaaaatctcatatgcctggcaatactcgtcaccctgtgaataatgttgatgcattcacctaaccagtattataagcccctgctgtgtgtcagacactatgcttggtgctgaaatagacaaggaggggactgcctgtcttggaaggcaaatcccagtctcctaagagacactagaaccacaggcaaccatgctgatctatgcaatgacatgtaatgcaactttgtcctgcaaccaccttgagatctttgaaagttctcctacctccaaaactcaaacaagtcctctctcttgccaagtgcctaaagcaaggatatgtttatagaggcagctggggcatctggccaatttatttcccagcagacctgctgcttcccctgattccaatactttcttccccaacccaaaccaaggcgttctggcaatggttaaaaancatcaagaattgatcaaacaaagcattttaatgaagatatattgatgtattcattggctgtttctttaaatgggtagagaactaataaaggatctaccccaaataaccaaaaatatcagcctcagcaccagcagaaattggaagcgttctggtatttatatgtgtttttctcagctggcagatttgttttaggaaactatttgcaaagcctgggaaaaatgtgctctctctgtctgttaaaggaacatgcaggttggttggtgctggttctccatctgacagttctgtctggtggcctc

SEQ ID NO: 333528 - DNA, 345 bp, Homo Sapiens
ttttgtttctacatgtactttatttttctaaaagcagatgacagagaatgcttgggaaaggggtacaccccacctttcccacagtgttccaccagtgtggtccatcaaccagatacatcagaacttcctgggagtctgttcaaaaatccagtcattctgggggcagagctgagggggtgccactctcttaaacccccatggtgatttctaggcatgctggagtcagtgtcatggtgtccactgcaggacacctgaatgtgtgcaatactccgcaatcctcaattcactggctttatctttcctgaggtgcagtccacgagtgaggaaacatctccatcttcctct

SEQ ID NO: 333529 - DNA, 362 bp, Homo Sapiens
ttagtgatgtctttaaaaaatattctgttacactacagataccaaaacactgacaaagatttaggcactccaagagagtatgacttcgtgtttaattggggagcttgttttcaacattgcttatatttgaatagtagaaaacccgacattgatgtttcttcctgttgcaaggtggggctttaaactttcaaggtacaaaagtatgtcttttaaaatggaagtaacgtttgtttagctagtgaatgtgacaatatattttatgtatataatgagtctaatgtaattttgatcaacttggtaatgatgttattaaatagcaaaacaagtgcagtgtattaaagctaaacactacattgaaacgc

SEQ ID NO: 333530 - DNA, 401 bp, Homo Sapiens
ggccccaccccaactaccacctcttttcaggcacagaccttgtgggactgggccccaggcctgcccaggatgtggttttccaagtcctgacccttggagccagaagtggcccctctgcccctccaggcccagggcatggtcctgctgcttcacccctcccctagcctgccgtgtggcactgcccacaggctggggacaagcagcccttgtgttgagtcaggttggccctgtctagggtggaacagaaggacagatggacccaggagggagggcagctgagtaactgggtaacttattggggctgggcatgcactggggggctggaggagctgggctggacccttcccacctgagcatgctgacccccttcctacctccagaataaagaatttcaccctggc

SEQ ID NO: 333531 - DNA, 614 bp, Homo Sapiens
  misc_feature (150)..(150): n is a, c, g, or t
  misc_feature (192)..(192): n is a, c, g, or t
atcattgctagaagctgactaattatgagaagagaagtgaaggccttgaaatgcctctctctgcacatctggcctcactgtcaaataaagtacttatttctgataagctctttggcttctgtgaaccgcctggcccgtgtctggcgtggnggtgctgataatgaaccgaacagagaacacagacttggcggngaaggtggggacccagtgggtagaaagaatgggctttttagaccatttcaaagtaacaagaaagctttgagagtgcttagtgatgtctgctaccacattcatttcctctgtttccattgaaattgaagttctagatggactgaacctgactaagaaaagggaatgtggacaggaaagctaatgacaaatgcaactggcttatttctggagtgctttgtactctcagagtcttgtgccctgaactttcttcatctggactctaggggcacttaagcaattagcatgccacaagctgggtgctgtggaaagatcatagactttagaaactgtccaagaaactagtgggactccacaccttgtgagttgtgtatccttgtcaagtttaatttaccatgttgagcctcagtttcctcacctaagag

SEQ ID NO: 333532 - DNA, 563 bp, Homo Sapiens
  misc_feature (488)..(500): n is a, c, g, or t
gcaggcaaggcaaggcactttcgtaagtggtcaggttctgcatggagcagctccagttctgagaccatcttctgtttctggctcctcaactccggcacgctgtgtgagagctgctctgccgtcaggctgaggctgtagtgccgtgcctccagtcgtctacattgtgtctgtaacacctgccgctccagattttgctctgaaaagacaggagacggtgatgtattttccgtatgcaggagcccgaaggcccgctttgtgctctcctcttcacaccctgcccagcagagcccaaaacctctctccagtgcagccagcgaaggcctctcctgtggaccacaatgctcctagccctttgaattgtaccgataaatacataaacgtcactaaattaagcccaatacacaggaataaagacaaaggatccaggacctaaaggcaatttgatacagattaggaagaaatttgatggccttaaaatgcagctttcnnnnnnnnnnnnntaggctttcagtttagcctgctggaaaaagcccagagtacacctaaagcacagatttaattaa

SEQ ID NO: 333533 - DNA, 408 bp, Homo Sapiens
gctgattgaacaaacaagctttgcacaggctctcctgccctcctgatggaaaataagttagaaaacgccctaagacaagcactcaaagagtctagatagctatccccctctcctccctccctcattttaaaaaacagcgagaagaataatcaggcttccacgttttgggttagcctgttacagatgacccaagtatgcagaaataaaataaaccagtgaaactccaaggccaactgctgcaaaccttggctatcaatgaaagttgtatccaaagtactagaacgaacagtccccactagagacataatggcggttagcttcctgccaggcaccttctagctagtatctctctccagccaccaaatatcttaagaccaagcggcccttaccttctttcgtctgcgcatt

SEQ ID NO: 333534 - DNA, 640 bp, Homo Sapiens
  misc_feature (296)..(352): n is a, c, g, or t
attaggaaaatatttggattaagaaaatatgaaatctgcacctctagccctctgactaaatacaaggcagattatccctcaaaagtttgataaacttggattaatatgaaataaatatgattaagaaatccatcacatttacatgatatttatacactattgcctatcttagattataaaccatggcatgcaatggtaaagtcttcttactgttcttgcaagttttcctttgattattcttgctaggattcaaatataccccaaagcaaaacttttatttgaataaaaagtgatcnnnnnnnnnnnnnnnnnnnnnnnnnnnnnnnnnnnnnnnnnnnnnnnnnnnnnnnnnttatatcacatgtaggcataacacaacacaataaaaaagataactgtattgtgggtagggagaaaatagaaaatcaagtcattagaaattcaggtcttttttccaacacaaaacagaagtgctcaactgccatctgtatttaactgtaaacatctcattataaaccaaagaagcatgtctcatgatgtcaccggatgtggtactccctgaagcatttggcatggacaccctttctggcacttctcacaccgggtgttggtctgtgagtggcagagggcacaccgggtc

SEQ ID NO: 333535 - DNA, 162 bp, Homo Sapiens
ctgtaacagtctcaccagacttctcataatgctcttaatatattgcacttttctaatcaaagtgcgagtttatgagggtaaagctctactttcctactgcagccttcagattctcatcattttgcatctattttgtagccaatacaactccgcactagcaaa

SEQ ID NO: 333536 - DNA, 527 bp, Homo Sapiens
ccagtctggttaacatttgcccttgggaatactcctgcacaaggtctcctaccaccttctgctggacctgtgcttgggcatcagcaatgagtatgccttctattgtgctttgtttttgctgacttttctgcaccctgtttcctttggatattcagttctctcaacctcaagattgagacggtggtgggtatgcttctccacttccatatgaccttcatgctgttctggaatatcacatgctacgaggtcatccttcacactacttgtaagccaagcaaatgatactgtagattgtactgcctttatctgcactgcttggaccctgtttattcccagggcctctgaactggttgctgtcacttggatttctagctttgggagcctgttccacctactcagctctgcattgagcagtatgggcacatgccctgtggacagttactggacgttaatgaactcagaggagaaaagcagtgagccacttgttctgtgtgatttatggtacttcattgctcttcctccacaac

SEQ ID NO: 333537 - DNA, 1002 bp, Homo Sapiens
  misc_feature (792)..(860): n is a, c, g, or t
agcttttaacaatctaactaatgccctctccagggtcaccctagaatcagatctgctccccagcatcttctgtttcctggtgagtgattcctgctactttggatggccatgacgggctggagctgccttgtgacaggagcaggagggtttctgggacagaggatcatccgcctcttggtgaaggagaaggagctgaaggagatcagggtcttggacaaggccttcggaccagaattgagagaggaattttctagtaagtaaacttgggtcatgggtgtgtggttccatcttaaacactgcatgtatgtggggggagatggaccttgtctagcaagttattgaaatttgtagccaaatctaagccaatctcacatccaaagtcatcaagaaataaatattaaatagtataaaatggcatagtatgaaagatactgggtgggatttccagagactagattctggccctgacccggaacttgagaagcagccacctcagcctccaggcctcttttcttctcatctagaaaatcccacatcagttctttgtcttgtctgcaactcttttatgttctgaagcttttgtcttggcaattgctgtacaacattcataaaggacactattaccctggagacctcaccaatgggtcattgtctctctagaacgtgccaggctgtgttttgttttgcagcttccttagtatcctttgtgagggcaaaataaaaggaagttaaggtaaagatgagtgtataagtgggtgtgtgtgacagagagagaggaaaacaataaggggnnnnnnnnnnnnnnnnnnnnnnnnnnnnnnnnnnnnnnnnnnnnnnnnnnnnnnnnnnnnnnnnnnnnnataatgaaaaatatatagtgagagagagagcatcagtgagagaatgtgtgtgcacagtgcacagcacagagcagagacagagtaagaggcagtataaggccagacatgcctcatttagattttgcatatatggctttttttt

SEQ ID NO: 333538 - DNA, 120 bp, Homo Sapiens
acttaagtaatctccgttttattattttataacaatgacttcaaatttacattattttaagtaccattgtaatagcttagtgtataatacagatatttgcgaatatcccatccaaaaatt

SEQ ID NO: 333539 - DNA, 379 bp, Homo Sapiens
aggctccctactcccattgcacctgtacctggaccttgtggaccctccagaagatgaagtccaatccagaaagccgtgatcatggttggatcacaatcctgtgattttcttcttccccacaccatttctgttgctttcggagagctgagcagatcctaagcacacgactcccacacagacatgcacggccatccattaatcagtattgagtatctacggacagcacagccctacgctgggctctcaccaggcagacaaatatttagtcatgaaaatgatttccaaatccagcagcacttaagcagaaatagcatttcttagaacaggaaaaaataataataaattaacaaacccgaggactgtctagagaatcagacat

SEQ ID NO: 333540 - DNA, 519 bp, Homo Sapiens
atccttccttttcctcccactttgttcccctttcctcaccctcgtgacctccgatcttagggcagttgttagcagcaggaagtggcccagatcataaaccactccttccttgcaagctactttggcagttcattagtgacctgaaaactcaaagcgtaaatgcttcagagccgaggtaattttttataaaataagtaattcttataaggataaaaatttctcctaatttatctgatttgtaaatttggatatacattttaaatgtttgaaggcacttatttataactgttgggagatctagccctaatttggatttatcttctatttcgttaggatgttatagaatgataatagatgcaaatgagatagttgttgaatgcagcaactatctacgatctatgatctctgatctgggctaggtccagagagaggggtgggtaaacggtttacatctgggccatagagtttggaaggcctagtgataagatatttaagtaacttggcaatgaaaggaacatc

SEQ ID NO: 333541 - DNA, 412 bp, Homo Sapiens
tttgttcttgctttttaagaatagctttctgatttgggcttagtttggctttataattatgtaaagcaatacatgattcaaagtaaaaaactataaaacaaggtacattcagagaagagaagtcaggcttcagatctgaccctttgtatctcatcttccccatatagactataaccctttttcattggtttctggtttattctttaattttgtttggtttgtaatataagcaaataggaaagtttgtgtgcatgcgcgtatgcgtgtacgctcatactctgccaaccaatcaacaggtaagtgatgggatatgacacacacagttctgcaccttgcacctccagtaaacagtgaggcaaccaagagctcactagctgcagacggagcacccacattcctttcagccccgtgc

SEQ ID NO: 333542 - DNA, 570 bp, Homo Sapiens
  misc_feature (24)..(24): n is a, c, g, or t
actcttccttttttgatttatccncaagaaagatgaaagaatagcagtgtattaactgatcatccctcaaagagcttttctttctcaataaagacctgttacctctaaattcacttatcttcaatagcgccttagggaggtgatggagagagttctggcttgggcaccttccttgctccccctgagtagcactaagtaatctcacaggaccggcaaggcctttctgaagaggtcttagagtgcagggaattgcatgacaggtgctgttagccaccttggaagaactgcaggccttgcgtggtgccaccttatttgcgggaagcccagccctgtccattcccctggccctagcatctgtttatctaatagcagtaccaatttttattgttaggataagttgtaggagaaattagcaaaggttaactgactgctgtgggtagacagtacaattcttcttcagtttctgacttgggagtgtttccgaaaagttaagtgaaaacaaaggtttgaagtgtttcccttttagttacataacagacactcattacggaattgaactgttttagaccc

SEQ ID NO: 333543 - DNA, 463 bp, Homo Sapiens
tctgatggaaagccattttatttttctctaaattttaaaatagaagactttaatggaaaacatttagtaccatcatgtcaccctgaatgccagcaatacctcgacttttacacacgcaggaagcctagtaaaagccccgtcagtagtacacatttctctatggtccttcaacagttttgcatatacaaaattttctgctattttgctttagcaaacagcaataacttttgtgtttcctatatgacacctaatatccagtcctacactaatatagttagaaaaataaaaggcttaaaaatttcatagtacgagttcatggtgctaataacagaatctctttaaacataagatcattttaagcctcttacataaccaccttctggtttcatttgaaatccttaagaattaaaatctagtaagattgttaaatcaacgtacgtcaatcattcattttcacttgcct

SEQ ID NO: 333544 - DNA, 441 bp, Homo Sapiens
aaggagcaacagtcaaggaaacttttagggattcgagaagaaaatacatgtgggatcttgccaaggtgctgcctttaggatgctgacccctgcactaccttagaacatgttgatctgtgagtgcccgaacgcctgagggctcgatctcatggggcagatgaaattctcttccttagaggaaagggaaaggtgaggccccagaggacttatctcagctgtacatgctctgcctgtggagacatggcttttctttgtgctgtggcagactggggctttggaagtggtgtatgtttaacttacctgagagtgagagatgtgtaggaagaatagctggaagaaagtgaaagatgagtgccagtacttttggcctgttatccagtagagagaaagtgacagtgaaagtaacgtgagagagaaagagtgtgtgtgtatatgtgagag

SEQ ID NO: 333545 - DNA, 891 bp, Homo Sapiens
cttgccacttcatgcctgttttccctgaggacccactgactgagaaggactgttatagaaactctgttttcctctaggaacgtgctctcagacagtgtccctgagcctggaagtgctccccacatgtctctggaagtggggcggggaggagagccaaaggtttcctccaccttcgctttggtggttggtcaccaggaagtaggtgcacactctaaagtgaaacaaacaaaaagtgatgtctgccaacagccaccaccaagacaagcgtctgggttctcgtttctcctctggtggctcctcaggccaaatgataccttcttgtcacccacggggtctgagtcagaggtgaaactcaacccccacaccgtactcctggtatctgccaggggatttggaattccagaatgtttatttctggttcattgacctaagattcaagcacacatagcctgaaattacagtactgtatatccagagcccagaactgcaagcccattattaacagtaatacattttgtggcctgaggatttttcccaaattgctctcagttgcatgttttacccgatatcattttgtctgttctgattttataagtgccacatattacagaaattttgaaaaagcatgtaatggagaacaaaatcccatactctcccttatccccatacccagacaggaggtatgcgaggaaagagatggaagtttcgcccaggactagacttgtgctgggaatcgccctctcttgcctatgtatacagagatttggagggggatgtggagagactggtggagttatggagggaaagataaggcagtatgtttaaaggagatttggagaaaagttttctgaaggaggggcaaatgaccctttgctatatctcctcatcaaa

SEQ ID NO: 333546 - DNA, 378 bp, Homo Sapiens
tttttaagaggcatatagctatttattaaagaaccagactccgactgtcctgttgggaaggagagacaccttgaaaattagcccaatgtctgatgccacctgaaatcataggcaaggtttcttcagtattccttgtggttctgagcaccatccaaggggtgagcctcatagcccttggtggaccagagaacagctgtggaagagtaggtttgattagtggacttcagagtaaggatgtagatagggaaatgggtttactctaatgtttagacattttaaccgatgaaattaaatgcaaaatatttgtatatttttaaacaaatagattgatctcatttcaacttgtcatcagctctgcactcactctactagaactat

SEQ ID NO: 333547 - DNA, 593 bp, Homo Sapiens
  misc_feature (71)..(71): n is a, c, g, or t
  misc_feature (107)..(107): n is a, c, g, or t
  misc_feature (125)..(125): n is a, c, g, or t
  misc_feature (131)..(131): n is a, c, g, or t
ccgtctggattcaagcagaggtagatggagtgtccccactcatgggtgattgttcctgcttctctggagtncccaggggaggagtcctcccgctggggacacaccantggctcccattgagaccnggaatngagactatccagtcatttcagcactgacccaacgggctggaggttactgttttggctggtgcaagtgatcctggcaacaaaggggcatttatgtcgttcctacaccagtggatggtgagaaaggcatctggaacccaaaggattctctagggcatttttagcacttcccatgtatgccactaacttctaagggacagctataacagtctcaaagaggggaatgattgaggtcctttagggaatgatgttttggtacaccccaccccgtataaatcctgagaagctgagctactggctgagggaagaggaaccatgggatgtgtaaggaaagaaggggatttattatttcagccttatgactagccagttacagaaacaagttactgcaactgttacatggagggttggcactccatatcagtgagttccagatatcgacttgactaaccacagaaagtactc

SEQ ID NO: 333548 - DNA, 401 bp, Homo Sapiens
caacacggggaacgttgctggtctggctgaggtttctgtcgtgccacccctcctgccctgcttatggagctactgtatgtgtcagggccgtttgcatcctgttactagtcagtctatcttaatgcactttaggaaactcttccctttccttgcacgtgctttgcgtatactagttccccataaagaatgtcactgcctgaaacagaacattctgtgaaatgcagggctgttggattcacatgttaaattgtttcatctcaatcacgaggtttgtgtaggatccagggaagaatttatcccggggggtcaagagatatcgatgccctcccagaaggagttgccagcccactgagcagggtggttctgccctcttgcctggcactggatctcaagtatttaag

SEQ ID NO: 333549 - DNA, 559 bp, Homo Sapiens
atataaaaaggtcactttattttgccttttgtttggtatgctatcaatgccctttaaaatcctactattcaagtacaaatgctgatgtttacaaagtatttacaattttagtcttgttcctttctatcttaaaacacaacagctaactggttacaacagttaacaaaataataataataaaggtcacaaaaagagaaacccctgtcttatcaggcaccaaatctgaacaagggcttggatccaaccttctgcttcccgccagttgctttaaaaacagtctggctaactgtttttatcatcagaataaacgtctttctttaaagaatagcagggcaactgtttcccagggtcgccaattagagtctgacagtgttcgggctgctgcctttatagtctgtgttctcaaagtttccaactcttacttgccgtattggaatgaacccagattcacaaggggaaggcctagacaacagcttcctgaacgcgtacttaattcttaggttagaaactttaacctttaaaagggaaggccaagaaaataacacactaaaaggagagt

SEQ ID NO: 333550 - DNA, 471 bp, Homo Sapiens
cattaagaaaatatctttatttattctgaaatgttccaataatcaatgtaaaaactgtggtagtggctctttcacaactttacaaattatagaaaaatgatttttcctcttctttacagaaatgtcactcccaaatcgtaccgggccctattatggctaaaacccagcaggaagaagggagcagagaatacagcaagcagggctccggctctctgggtggccagaaggcttttcctacacattaaagcccaggctgagtctcaaagacctgtgacccctctgaaggaggctccatccacatggatctgtggcacactggggcaggcctctgtcttgaaggccagtaggctacagaagacctgaaagcatggcactcgtggttgcaggccacagtcaaggcagctttgtgagaatgagaacaggaggcgagcctatagctcaaatccctttctctaaaacacagccagaaaa

SEQ ID NO: 333551 - DNA, 452 bp, Homo Sapiens
gagactgcatagggctcggcgtggttttaggtttgggatgtggacgacgggttctttttgttgttgttgttggagctgaagatgtcccaggagtaataggtccaaagtctagtttggtctgcagtgtctctgggcgtggcgtggttttatgtttgggacgtggacgacgtgttcttgttcgttgcgatgtttttggagctaatgttgtcactgtagcctcagttctcacagttacaggctcaatgtctgtggtgggaactatggtcattgagggagcttcagtttcaaatggaacaggctcagagacggatttagttggtggcatgtctggttctgctgtggtttggggtttaggaagtaattgttttggtggttttgaaccaggctgaatttgaggtgcatctggtctgtgtgtggttttaggtctctcagatggttttgaggcagttgtg

SEQ ID NO: 333552 - DNA, 835 bp, Homo Sapiens
ttgttctttcatttacttttctctaccctattcctccttccccactttgccatactcagtacgaagaaaaatctagagatgactcaaaccccttaaagaacacagaacaaaggcaccactcaccccatttgggggtgttctgttttctttgtggagtttcaagagtcatgggcagattcttcttaggtctaaagttctgctttcctgtattacattacctcacctctttggcttttgtgagtagcagagattaccttgtactgtgagaggattttaccttgatgtgtgtactggcggatgagagctacaaagttaaagctgactgaggacagtctacaggaagcagtcttcactgttttgttttttccacctaggaagttgtttaggatcctaattctaattcagaggtgcattctacagagtcttctccattgccttttctctcaaaattaatcttgattggcttctctgggcatttgcgtgaggaactgaaactcattttcatagataaatgagagaatgagtttcctcagctccctaaagggcattttgcttctcccagctgaaaggctcccctggattactaggggctaagtgggagtgtctagtgggttgacccccagcaacgtgcagcagccctacagggaatccccaacaaaattagttttaaaaggcttgtccaagaaatgaatataggagctggtcattccatgctttgagccctcctggaggtgctagacctctggagacaaaaatgactcagtggataacacgctatggagtcctgccaataaccagcacacttcaacccattccactaaaccctaggccttta

SEQ ID NO: 333553 - DNA, 824 bp, Homo Sapiens
  misc_feature (737)..(771): n is a, c, g, or t
ggaaggaaatcttatgaggaaaacttttagttttttttataagcccatttttgtaggcaagaattaagtattgatgtgaagattgtttatgtttcagtgatacggtctccttcaccccaattatatggcctttttgagagagattagaaaaattgtggcttagttcaacaaagattgagttaactcgtgtgccaggttactagaattatggattagcatctaccttcaagactcttacagtctagtgcaattaaagagaaagaaacagattatttaatacaatttaagagctaaattagagataatcacagggtttacacaggtttgaggctatagaggtggttacttatacatgatacttgggctgagttttaaacaatgaagataatagttaattgaaagaatgaggtaaaaagagcagaagcatgtatagagcacagtgtgagccaccgcgcctggccaggagagttaagtttttatgcactggctgtgattagaaggggtgtagaatataggagcattgtctcggaaagatgacaggcatggtggggatagaattgtggtgggaagctttggctgcttggagtcctttgggatcctgacagtaaggaatagtgagactgagtgtggccccaagaagaattgtaagaccttaaagacaaatattttaatgaaggtcacaataggccagttgactgtactagggactatgtattttgtgatatccatatgttccnnnnnnnnnnnnnnnnnnnnnnnnnnnnnnnnnnntgagatgaagtcttccagcctgggtaacagagcaagaccctgtctcaaagaaa

SEQ ID NO: 333554 - DNA, 440 bp, Homo Sapiens
actttcaaagagcagaggaacattttatatagtgaacacatacacactgtggcaatgtaaaactacttaaggaaggaaaaatatccccctccccagccaggtactgagacctggggctaaaattttttgtcagtcagcccccatccccatcccttatcttcgagtgaccttaccaggaaacctggctttggtggaaaggagagctgtggggcttggggagcctgatgccttttcttttgggaggaaaggccacctgcacaatccacaggacaggagtggccagcagctatcctgagctgaggctccagaagagttcagatccaagagagcaagggatgaatggaaggaaagtcccacccaccttcatgtgtaaagtgattggcatttactcaaatctaaatctactcctctcctccctgcaatataccattgagcatgtg

SEQ ID NO: 333555 - DNA, 428 bp, Homo Sapiens
caaaagcaaacgcttctaaactttattcacactcgagttgcatctctgcgccaccactgccaatgttttgtcatgtcacgggcagtcaaccaggagcagggaaggagagaccaggctgatttctgccttgttgggaacactgtcatggtgcctgtagatagtcactgaagaaacataaaagatgaaaacccaggctatgctctcaacagggcagaagctcccccattaagcccaagtctaggcagctgcttctctccacagggatggacctggccttgctgggaggaacgccacaccaggacctctggaagcagtcccaagggcttcagctcacattatgttctttccatttggtgataaattcctaacgccttaccccatttgctaactggaatgcagagagcaaatgccacggttgaaacgctctc

SEQ ID NO: 333556 - DNA, 778 bp, Homo Sapiens
gcacctttaaactctgtgtagacttgattttcgttttttcttgaagtttgtgtgtatctcttaatatgtgtgctaacttaatttagggtctaggttcatgctgatgttggaagcatgccattctccaagctttttaaaaatatggatattcttaagtatctcacactgaggcacccagctataaagtaaccgtagtgtaggtaggtgcacactgcataaacacttcttctgtaagctggagaaatagctggaggagaaatctgttcttagaacaaggcacatgctgttggttccagacattctttttagtggaggatacaaaagtgtgtttaacggttgctggccccacgcctgctgtccagccctatggaatgtgctctgtctgggccacactgccagtcatcaaggcagttactgtgaggaaggaagaagccagctcttcagttccttgacctgagcttttctggccaaaagaaggaatctgttttgaagattaggtttcccacctggatcctgcccaccccacccacccccttctgtgaactgtccggcttatcgaagaagacccatttttccttcttacagttgctgtttcttcattgcaagtgattcaccctgaacgtaaagttaggaaacttagtttataaggaactttatttggtggagaaatgtcaccccattctctcgttaaaagatacgatgtctggattgattccaatatctgtggtttttggcacatgccatctttctgaaattgcttctctgtgttttatgtaag

SEQ ID NO: 333557 - DNA, 558 bp, Homo Sapiens
gcattcaaaatgggatatttacaagaaacatgtatatataatatttatatattcaattcaaagtctggaaaaacaagacttttagtcagtcactgaacttattgcagaatgaggtaactgagatgttcacagagtggattgatgtagctcaggtcctcagagtcaatccctcctgtctggattcatcagtcatggtttgatcgtctccattcgcagaataagctccagcttttctatatacagagagcaaggtggcgccccacccagccctgccctgtggtcctgagtgcaccccgacttgggtcaggggtgcccagcttcacctcagaactggtcttcaacagaaagaactgaggacgtcccttatagattggtctcatcccaggcaggatcattcatgttcttcaggactttcctcaccagcttctccaggtctttgcgggctctctgttcttcctctagagatttcttcatctttttggtgtcctgtcttaattcttgaacttcatcctttaatgcatatacggtatccacaagactcttttcttctatcactgt

SEQ ID NO: 333558 - DNA, 273 bp, Homo Sapiens
agggtggagggggtcagggtgcgttttcgggcaacagttcggttccgggtgagctacagagacatgtaggggcatttggagcgtttggaactcacacgtcgaagcagtgcgccgccgacagcagccacctctctgccaccagcacggccccgcaacggtgttcccggcgccgcagccacaggctctacctgccacggccactccccacggcccgctgcgctgccgcccacaatcctggtgagcgcggccggcgccaggccacagtctggtagg

SEQ ID NO: 333559 - DNA, 446 bp, Homo Sapiens
  misc_feature (178)..(178): n is a, c, g, or t
  misc_feature (417)..(417): n is a, c, g, or t
tgactggggcattaggatgctgaaggcaagtctcaaccacttgccgcagtagctgtgtgaactgggacatgtcactttctgtctggtcttgtgtctttaacagtaaaacagcaggttgggttcgaacatgactctgagattccatccagctctaacagtttatctaggagtatttgcntgccattggcattacatgctacattataggtttccttccaaaatccttttttggactttaattttgaccattttcttccaatagaatctagtatacagacttcacttgatttctaacagtcctgtaaaaccgtgacttagtcaactggccatacagatccagctatgggagttaccctaagagatacctgtctgctcttgccctgtatgtccatgtgcctaccctttggcctgttcatnacgccttgggctttgtaataacctacctt

SEQ ID NO: 333560 - DNA, 470 bp, Homo Sapiens
ttttgtgaatgaggacgaagatactgctatcagagccagccagcccagatgtgctggactatcctctttctgtgagacgctgtgagcacctacagtcaacagattatttattaggcaagagaagcacttaattctaacttctggctagcaaagcatcctcctttccctattactggacaattactttctcagatcccctctttcaaattaatctttccctcatccatggtcctctctatcccagttgtcaccctccctgtgttctggcagtagacaacaatgcccttggacagtccacagcacaaacactggccggaatgcagtgctgagcgtacgtgggccgagcacatccaccgggctggctagcagggattgcttgttttcacaaagggaacagataatattttaactgtaataattcagtctatatgaactagaataattcagtacttataatttctattcttttg

SEQ ID NO: 333561 - DNA, 210 bp, Homo Sapiens
atgagcttcaaccctgacctactctgctccccagccattccatttcttcagtgggccctttattgatatctgtgagatattagagaaagtgtctcagagaggctggaattttctgtctgggtgcagtgtcatatttatgtgaacagtggcaaccataaatggccacacaatgactctatttaggttccctcaggtagaaagtactacggc

SEQ ID NO: 333562 - DNA, 396 bp, Homo Sapiens
gcagtgtttttctgggagttaattctggagacccagtatggaacccactcctagcccttgtgacaatattgcaagcatccagttccctgttttacagtccttttaaatgtggctagctacagtagtttgtgtttcctgcaactaatcactcatacatctgtatctaaagcactccacctgggtcatgtactatacttaaaattataaggcaatattaattcacaaaactacctactcgttttatttaaccctcagaagaactgaaaacaaaagctataccaggcttgctctagagcgtgggcttgggaatggaaaggcagagtgcacctattgaattccatcatcagtttttctataccatggagttacttaccatgtgtatacataacactgatt

SEQ ID NO: 333563 - DNA, 523 bp, Homo Sapiens
gtttttcaagcagaccggacacagatgtttattccaggaagaggtctaagaaacgagcttcttagagcatgtgtcacggggcagccagtcctggggctctcagagcagccccctcccttcagcagctgaagcaatagcgcccccattttacaggcggaatggaagccagagaggtgggtgggggagggggtccttccctggctcaggcagatgggaagatgaggaagccgctgaagacgctgtcggcctcagagccctggtaaatgtgaccctttttggggtctttttcaacccagacctggtcaccctgctgcagctgaagcaccatgccccctgacaccacctggaagagccccttgttggtggtgtcacagaagcccagggagcgtcggacctggccccttgaggaggagacgatggacaggcagatttcccactaggacagcacctggaagatgaagtagtagtagctgggtacagtgcagacgaatcggccggagtggttctggtacggttcttcgtg

SEQ ID NO: 333564 - DNA, 463 bp, Homo Sapiens
tcaatgcagctgctgtactaccaggctccgatgtcatctgccatgttgctggttgctgtgcccttctttgagccagtgtttggagaaggaggaatatttggtccctggtcagtttcagctttgcttatggtgctgctatctggagtaatagctttcatggtgaacttatcaatttattggatcattgggaacacttcacctgtcacctataacatgttcggacacttcaagttctgcattactttattcggaggatatgttttatttaaggatccactgtccattaatcaggccttggcattttatgtacattatttggcattctcgcctatacccactttaagctcagtgaacaggaaggaagtaggagtaaactggcacaacgtccttaattgggtttttgtggagaaaagaatgttgtcccaagaagataaaaaatattgttaagtgtgcaagttattaa

SEQ ID NO: 333565 - DNA, 400 bp, Homo Sapiens
  misc_feature (62)..(62): n is a, c, g, or t
ttgagaaatgaagactagtgttggagttatctaaactcagtcttcaacaggactgcgtgcanacccaaggctcagagacatctcatcagcttcaggaggtatatgggtacttccatcgcaaaatggctccatcggcacttacactaacaatatattgatttcctggacttatgcggatgcgtgtgatgttgccactgtgtcccaccccaacgtgagtcacttcaccctcattataatcccaaactttgaccagatggtcatttccacctgaaaaagataaacacgtatatggcattgctgcaataggagagagagaaacagccctgatttcaaataactggatcattttcaacatggtccccatgtatctgtctttataataacacttttacttgattat

SEQ ID NO: 333566 - DNA, 439 bp, Homo Sapiens
  misc_feature (12)..(12): n is a, c, g, or t
  misc_feature (184)..(192): n is a, c, g, or t
catccatgctcncagcctgcttctgtctctgtgtgtcatgaagcctgagctgtcctgggaacaggcactacctctctctgagggagagcagcttgacctagttcctcttctcagggccatgctgtagttttccctgcttttgtgacttccgcacttaagttttttgctcttgtgctctttgggnnnnnnnnngagctctttacaaccgggaaaagaacgaatagggatcctgcagaattcctatgctgtggagctcctaaacgtgcttctctctcaagcttagtctcagctttcagacaaccaaattgtagagcccagttataagcatcagaagcgttttgggctttgggagtattttcccttctgtctttttctccaaagggtggatccagcagagaggcttaaataatttatgaagccgagtttcacttttagaaga

SEQ ID NO: 333567 - DNA, 186 bp, Homo Sapiens
tatctttggtgttttatttcctccagtattttctgagtgcctgctgtgcatcaagcactgtactgaatagtgctgaggacccacaggaaccaaatcggcatcttctcatgaaattcagactagtggcagaaaactggacttgtgatgaaggagcagatgaagtgctctggaaattcaggggtgaag

SEQ ID NO: 333568 - DNA, 178 bp, Homo Sapiens
aaattatccaaaatgatttctttattgagattaactacatagatttcacagtactatggaatacttatatttagctaaagtcacaaacacatttcaacattcaaaatgatgagcatcattaccattctaatctacaaagctcatgaataaagaaaaatacaaaaacctccagttttac

SEQ ID NO: 333569 - DNA, 406 bp, Homo Sapiens
gagctgacatggaggctggtggcaccggggcgcaacgccgtatgccaactagcctaccgcgtggatcacggagctcactgacgagaatgtcaagttcatcatatatatatatgtagatgtgacttaatatttcaatgagaaacactgaaataaacaaacaagaaaccaaaaggcatttccaccatccatcagttgctaagtagccatgtgccccacctaatgtaatctaatttatcatgtaattttggtttaagctggacattaagacttgcaaagaaatggcttttgcctaagattaatagtaactactaatattctttttcttcaatctgcaaaggtaatgttaatgaaacttgcatgttaaaattctgtaattataagtaaagtgttttactaagtaccttaa

SEQ ID NO: 333570 - DNA, 424 bp, Homo Sapiens
tgaagcaggagttttattgagttcctccatgtcacattaatacattagcttcaagacacagtttcaaagaccccggtccttctgacgtagtgtgttggaggcagctaggccagcttgaggcactgtgtgttgaagctgtccccctccttgccggcgacacgtccagcagggcctgtttcttctgcatgctccgtgagactccagctcgtacatggtggtcaggttgaagagcacgctctcgtgcaggtagtgcctggggtcctgctggaccatggcctccagctgccgcagtgagtccttgagcttgcccaggtagagcagacacacggcagcgttgttgttggccactgcgtttcttggatccatccttaagatctctgtgaagaacctgtgggcttctgcaaagttattctgcccgaggtga
